United States Patent Application Publication US 2014/0057251 A1 - sequence listing, part 20

SEQ ID NO: 21471 - DNA, 3458 bp, Cannabis sativa
gatagttggtgatggtactaaactctctatcaaacatattggttcaaatgttctcaatatacctcactctaagtgcttgattttgaaagatttattgcatgtaccatccattactaaaaatctaataagcatctctagcctaaccagtgataatgatgtctcagttgaatttttctctgatttctgttgtgtgaaggatcaaacaacagggaaggtggtgctgcaagaaactcttaaagatggcctgtatcaatttccttcccaaacagtcaacaacatcagtcgagacacaaacaagttgttttctggttctgtctcacaatccaagtcttttatttccctaaaggatacctggcatagacgcctaggtcatccatctgctgctgtcttgaatcaagttttaaacatctcaaatgtaaaacatcaagttaatgaaaaacactctttcagtgatgcttgtcagtttggaaagtcccatgcattaccatttcgaaattctgacagtcatgcattacatgttttggatcttatacacactgatttatggggacctgccctagttgcatcacacaccaatttcaaatattacattcatttttttgatgattatagtagattcatttagctatttccacttaagcaaaaatctgatgcacttgttgcattcattcaattgaaaaatcttgtggaaaatcaatttgacagaaaaatttaacaactaagaactgattggggaggggaatttcaatccttttctgacttggtcattgctaatggcattttctttcaccattcctgtcctcacacttctgaacagaacagacgtgctgaaagcaaacatcgtcacattgttgaaatgggactaactttgcttgctcaagcaaagatgccactcaaatactggtctgatgcttttcagacttcagtatatctcattaacaggctgcctacagtagacttgaagggaaaatcaccctttgaagttctgtattctaaagtcccagattacaaatttttaaaagtgtttggatcaacctgttttccctatctgaggccatatcagacacataaatttcaatatcattctgtcaaatgcttaaatcttggttacagtgaagtgcacaagggttataagtgcttaagtccacaaggtcgaatttacatttccaggaatgtaacattcaatgagtcagaatttccatgtcattctggtttctttaataattatcaaagggaaaaactcatcactcttgatgcacctcactcctggtttcaacttccatctcctatactagtaacaggttcatctgatacctctccatcagttccagcagcaccatcctctccaacttcaacacaacagtctgtaagttctcattcatctttttctggttcacctattccttttgctactgatgatgttcttgacagcatatccatgcattcatctcccattcctagccctgatatacatccacctgtccaaacaactactgctcctactcatcccatgattacaagggccaaagcagggatatttaaacctaaaacttacttgagtcacaacaaaatcagccatggtcaacatatacctgcctcagttgctgaagcacttcagcatgaggggtggaactcagccatgtctgatgaattctatgctctcaaaagacaaaaaacttggtcacttgtacccagatctcttgctgacaacatagtgggatgcaaatggatattcagggagaaatttaatgcagatggaagtcaccaaaggttaaaggctcgtctagttgctaaagggtttcatcagagacctggtgttgattttggggagacatttagccctgttgtaaaagctccaaccatcagaattgttcttgccttggttgtttcatttgattgggaagttagacaaatagaaatcaacaatgcctttcttaatggcattcatgatgaagatgtgtacatgtcacagccagaaggctttgaagatccacaaaaacctgatcatgtttgtaagcttcacaaatccatttatggattgaaacaggctcctagagcctggtatgatcaactcagatctgctctgttaagttggaaattcaaaaactcaaaagcagattcttcctttttcattctcaaggagcagcaagttacaatcatgttgctggtttatgtggacgacataattgttactggtaacaattctgaagttctcaactcattcatagacaggttaaacaaaatgttctcacttaaatacttgggaaccttgcactattttcttggtgttgaggtattcagagactccactggaatccatctgtcacagtctaaatatataagtgagttgttgcagaaggccaaaatggaacacttgaaaccgtgtgctactcccataactgctggaaagccactttccatcaatgatggaaaacccttcatttttatagaagtatccttggagccctacagtatctaagtcactcaagaccagatatagcctactcagttaacaaactgagtcaatttctcaagaaaccaactgatgttcactggattgcagtgaaaaggattctcagatatctcaagggtactgcacatcatggactgcacttatctccaagtcccaatcttcatctggtgggtttttcagatgtcgattgggcatgctgccctgatgacaggaaatcggtagcagggtattgtgtttatcttggggattccttgatttcctggtcttctaaaaagcaaactgtagttgctcgatccagcacagagtccgaatacagagctttggctcaactggcagcagaaatctcctggattcaaggtctgttgtgtgaaatgaaattcgagttgccttcagttccagttatatggtgtgacaatctcagtgcgagtgctcttgctgcaaatcctgtgtatcatgctagaactaaacacattgagttggatgtgcattttgtgagagacaaagtgttggataagaaacttgaaattcgatatgtgccttcccatgatcaagtagctgactgtttgaccaaaagtctcactccctcaaggtttcaatttctcattgccaagcttaatgtgattcgctcacctttcagcttgaggggtggtgttagagaaattgaatcatcacaggttgatgatgtcactgatgattgattattaattgctgatgattgagggcagtctcggtattgttgaatgaggcaatcccaagacagatttccttttaacaaattctgtaattccttttcttttcagtgttgtatacgtgttgtaatgtaataggctcttaggccatctctgtttgtaatactttttctatttaatagaatcatcagccctcatgctcattgagctgggttttcattcaattgcattttattcaaaattaaacttgtcctacataactcttcttactgggcgttagctcacgggtactctgt

SEQ ID NO: 21472 - DNA, 3394 bp, Cannabis sativa
tatgtcttgaaataagcatctacaaaatggtttgaaaagttttctagttctttattggaagaaggattcagccattcagtaactgatcattctctctttatgaagcattttggaattagttttattatattattggtttatgtggataatgtgattcttgctaacaacaatctagacgagctagaagctttaaaagtaaggttaaacaatatgttcaagctaaaagaccttggcagttttaagaattttcttggattgaagattgctagatctaaaaaggggatctttgtatcacaaacaccgtatgcacttcaactacttgcagaccttggctacctaggatgtaaacctactagtacacccacggaagctaactttaagctcaatcaagacaataaggatggtttggccaaccctacacttctaagaaagattattgaaaagcttcaatactagaccttaactcggccgaattcatctttctcagtcaacaaactgtcacttcttagccactcccaaaacaagttacatgatagcatctcaaagggtcctgcagtatgtcaagtcttctcctagataggttatattcctctcttctacctctgaagtgaagcttgaagcattcacagattcaaattgggttgcttgcctggacacgaagaggtccacaaatggcttttgtattttccttaagaagtctataatctcatggaaaagcaaaagcaacacaccatatcaaggtcatcagaagcagaagcatagtacaaaaccatggccaacactgtgaggttgtttggctacttaccattctaaaagagttaaggatcgagcataaaagtcctgccatcctgcattgcgataacaaggctgcctagaacatagcagcaaacccagtctactatgaaaggacaaaacacatagagattgattgtcgccttgtgagggagaaaatacaagagtgcatcatcaagactgttcatgtttcaaccaaaagaacaaataggcagacatactagctaaagcattgtttccagctcagtttgaagtgctcaaagacaagatgagattaaagaacatctattcttcatcttgagggggagtattaaacttagctagaaaatagattagttagttttaggagttgactagtagcagttagttaccagctgtaactggttttagtaacagattggttcctagtctgttaataattcattctttggattaatgaaatataaattttctctttcattcttttctttgctttctaaagataaaagcaagtgctaaaattgttgagctaaagaaagtaataggattacttacaatactagttattcattctaaaaaacaatactagttaaaattgtctaagaaacttttccacaaatcaaataatgaaagacgtaagtcataatcaacctcctttccaattatggaaaaaccgcaatttcccctttcccctttccccattctgtttcagtatattatttctttaaaaatagaaaaacaattgagggtgtttgggagagtagaaaaattttacataccttgttctggaacagttgcaagatcagccggaaccagagcgtaattctctagcccacttaacaaaaccgcccccgccaccgtgacaagcttcacactcagggtcgtactgctcaaattcttcactgtatagttccaactatacgcatggaagctcccaacttctttgaatatatcaattcgcttcacattcttttcgttgatcaaaatatcgaaaactctctccccagctttcttcacggtggagtcgatctcagcaaaatgaaaccacaacaagtaatccagcttcgcgtccacctccagctcgtactccaactcttccttgtcgccgaccgccaccgccgtttggtacaatctcatagggaagtaattagggcttttctcggtcccggcaatgcgttcttcgtaactacggtcttaatggacttttccgactccgatactcggaaatcggaatcggactgccacgaccgtccaaacaggtcggtatcgttgctgaacccgggaccccactggccagaaccacaagacaaccggccatagttaacaagaatataaccctggccaatttcgccagaatcgtacgacgaaggatcaacttgaacgacctcgagtgagccaattacgggtggatcagtggcaatgctgtaaaaacacacatcagcttggccatcagaaacaaaggcgaatagatcagagtaagcgccagagcgagcgaggtcttcctgccacggcgagcgccagctgaagacaacggtaccctcgacggaggcatcgaaggaaggagagtgagattttccatcgtaattgtcgtaaactgtgaatgtacgaacgtaataacgtccgttaggaaggttagggataacgtaacagttcttcttcccagatgacggaggaaagtaacggagagtcttctcctgcgggtgtttgaagcggagcggttcagacacgattgcagtcgaaccacccgtgtaaaaacggtccgcttgccatgccgtattgaaccggtccgtcaattcagttgagccaccgcaatctatgtggtacgaaattcctgaattcaaaaaaaaaaaaaaaccttttacagttagttacagtttaaaaagttagttcaattattggtgaaagatagagattgagatttgagagagaataaccaccgtagggataagactgcgacggagattgggcggtggagattgaagagtagagatagaagagtgagaatgagaggaggagaacgactgacattttttttctttaattttattattattttctgtttttatacataaataatatttaggacatgatcgacggaaaaataaggatcctaagtagaaagaaaaagaaaaagagtagaagaagaagaagaaaaatgcgagatttgcgggagagagtggagtgaggcaaaattggtggtgaagtagtggattgcgggtttattttttagtcaaaattttgactttattttggcttgagattgggattttgaggacgagactactagttttattcatatttactattgttattgtattcataacgttaagtcaggtcactgtaatatgactttattagtttattaaagtgactttatggcaaactaaaaataaataataatgctttcaaaaaaaaaataatactaataaataataattgaagagaggattattcaattggtttccaattgcctgaattgttaatgcaattcaaccaccttttactttttgagctgtttggattactatgacatcaattcgttaaaatgtgtttttattgtctctttcgtaaccaagttatgaaataaatgaataaattgagtacaacactatttgttgaggta

SEQ ID NO: 21473 - DNA, 5537 bp, Cannabis sativa
tgcggatcggattggatccaaaatataaaattcgcacttattagtgcggattggatgttgtttgaccaaaaaagtgcagattggatcggatgaacacccatatttttacatgattgttgggctttaacgttacgggtatgtccgattggacttttgtatcttttcatatacctaattgggccttcatgttcttctccattttttcccccaaacaattgtatgagtgagttttgaagagtaaaggtgtgagacagtgagagtgagtagcatatatgtaatattgaagttacaattaaaatagatatcttctagtgggattattttgctcatttaccaaacccactagaagagatctatgccgctattgaaaattgtctttttcccaacattttttttttcttgttgttgctagcaagtgtttattacatattatgaacttgtacatccttaagatcacactttgttcatacatatatattgatatgatccttgatgagacaataatacacagcaacaacttacaccataattcatagtaaataaaactgatctaattagctaaagtggtaggctcacaactatcatggacacaagccaagacatccttatactccctataaatagtgaaagagtcatagacttcaccatcacggcttttcttgtactcaaatagaagtgaggagtgattgaatgcagtgagtttgacaaagccaaagtcatggtctctgtacacactccaaactgggatgagtgagctgtagtctgataaactcctacctcccccaccaaccaccacatggattgttccattttgaacccctgaatactgagatttttctgtgtttacacattggctctgcaccagtaccacaaacataatcatgattaattagtactaattaagactcaaataatgtatgtaccatattatactcttcttcttctggaactttattgtaaaatttctaaaagaatcaaatttcattcacaacaatttatgaggaaaaaagaaaccatgatgagaaactaggataccattcttaagactcttttaacatttctatttaccatttgtttttcattgtatattagtgtgtaatatactcttaacatgccccttgttgtggacattgtcccacatagaataaatagtagaaaattgaactataagaacatggactactccactcattgtaaattgattttaaaatggaatcacatgattctcaacatggtatcagagacatatacagatagtgaccaccatgtccaccccatgattctcaacaccccctcaacataatatttaagttaggtaacttaacatctctattctaaatgtgcatacctggtaaattgggcaaatcctttcatagttatgaacatgtccaaagaaggcaatgtccactctgtatttctgccaaagcttttggagatcatcctttccttcgggttccgaaaatgtgccttctccaccataccaagagttagaggaatatccaagtacacgatgagccgcaaagatcaaccaaggctgtttgcgtctatctgctgatgcaaggcatttctcaatccactcatactgttctgagcctttcctccagtcatgttcagtgtcagctatgcaaaacttgaacatcccataatccgccgagtacctaagaaacaaaacaacacaacacaaacaaatctactttgttcaaactagcatatacataacaatctcagtcttagattgtgactaagcatgtccttagattaaataatgaattttattggatggaaaaatacccctccaccttttgttgaaaagacttaccaaaacttagctctattttcagctggaacatagtacattgtctcagctacaacaccacattcccctcctgaatccaaaggtgtgaagaaggaacccgaatcgggccaatctcgttcatgattaccactgcaaagaaccaaaccaaaaagattcaacaaccaaatcaatatgcatttttggttgtaataattacaataaataaaccaaaccaaccttgcaaccatataaggcttagttgatgcaataggctcaacttgttcagtaaattggtcccattcagcaaggtatccatctgcataggccatatctccaatgtggaaaactatgtcatagtttttcaagtctctgacaagttgatcagtggtgttaagggaaccaggctcaattgagtactcattagaaccatcacgctctgcctgaaaacacattatgaaaaagaaaaaaacacacctcagcataagacattgacattatcaatatggctcaaaatctctatttactacctttcccatgtcaccaaatacaataattctctgtaaagagtcttgtccaggatatggggagcctttaaatgaaaaggtcttcttgctccatatatatgttccattaaataaacgatgacccaatctatatgtgtacctgcattggtataaaactactgtcaatatattgctatggaaaaagcttaaaattctgttgagaaaagcttactcagaatttggccacaagtctttgaggaaacttgtgtgtgtaaaaccaggatcacgccacccaacagttcttgcaggttcacctaaaatataatcataatcacataatcaaaatcataatgaaagaactcaaaagctgatattagtatatatattacttaccacacatgctgctcctatcatatgtcaaagtcccagctggggatctcactttggattctcccttaagaccccactcaacaaatggaacagcctcgtctatgttgtatccacttgtccaagttactgtcatctaatcaatattaccaaaaaaacacaaaattagacaaaaaaagacatggctagatttatagtttagaaggaaaatttgaagtttacttacttcatcccaagccttcccaagagcaagacgtggatagagaggtgcttttggattggcaaatgaaatatggtttgaaattgccaccagttttggctgtagaaccaataacatatattatgtttgtctaaattttagtgttataaatattaacataacataacataatggcaaaagaaaaacacaaacatttgaaacaccgcccgaaaacagagcaaatgaaaagtctgcccgctgatttatgagcctgaatttcaaagaagatttcccagtatttgcataatttgggttggaattattagcgtacttgaactgaaaaatataataagccaaagttaatttatttagaaaaaaaaaaaaggaaactttaaaagttagatagaaaatttagtgtaaattaattaagagatcaccttgattggggcagtacacatgtaaggttttccgattttccaattatctgggtcgatgggtggacaagttgatgagctgcatgtatacgtgttgtgtatatatattaatacagtatataatatataagtggcttaatatatagtaagcttcatattcctttttcaacactataaattggtgaaatgtttagtatagataatatatcatatatgtatagttattaatatatatgtatatatgtgtagttacttgaaatttgcaggggagaaaactccaacccaatctccggaagatggttcagggtgttctaactccactgttacccattgggtatcttcaccctgtgtcaacgacataaatcattgtaataatcagattattgcatttgcataatttattgtcgtttgcttagaaaatcttgttttttctgcttaagctgatgtcgtttaatcatacgctattgtttcaattagacgctttgctaatgactttggtgtccaatttttgaattttggttggtacaggaaaagatgcgaaaaacatacaaaacgacatgaagtgtgagaaacgacagtaattttgaaaacacgacaaaaacgtgtaagacaataatttaaaacgacataaagacaatgtaataaatgataacagcttacaaacgacaagatcggaaatgacatgtcaaagtcgaaggtttattactatttcactattttttttttttaaaaaaaaaaaaagaactattttacattgattatattttctatcctcattacaagaaatctccagcttttttggttatatcttttacaactttctattaaggtttattttgaagcatatataattataaaatttgagtcaaatataatattaatttattttttaattatattttatataaaatttacaccattcatagtactgtatttttaatttgtaatggtcaatccaattcatttttgtatataatataattgtttattaactgagtgggggagtgggtgtgagtggagtaattatttaacaaaaatttatataatagattaaaaaaaaatttaaaaaaattttaaaaaaaattacaaaattttatttttacattttgaatttttttatttataaaaatatttttttcaataaaactaataaaattgttcctttcaaaataaaaataaaactgtttgttttgtattatagttgtcatgaaattatttttctaattattttttattattatataatttatttatagttgctgtgagattgatttatcgttgttttctaacttttcgaaaaaaaatatatttttataaataaaaaattttgagtcgtaaaaataaattaaacataaaaaaatatatttttaaaaattcccacttatttaaactattttttttgttttatcttttcaattaaaaaaataaaattaatttcaaataacacattttttatggaaatttcagatgacattttttttgaagagttcagatgacatatttggtaaaactacttttatattttatttttaagatttttttttttttttgaaatcctaaaaattaaaaattttgaacataatctccacccaataacatatgtcgagcatttcatttttctttccaattttttaataacttagttcattgtactttataacattatctttgtaaattttatgaaaatttaattaatttactgtctcacaaatatatttgaatttttttaaatacacatggtattattgcaaaatatcgaaaaactttgctattaatgttaaaatttacaaaaataatattatagtttataataaatatcgtcataaaaaataattgaaaaaaaattagaaaaggggtttattaactttgttgttaatataaatgttaaaaattggtgaaaatagtcgttttgtgtaaaaatttcacaaaaaaaaaaaaaaaaaaaactctcatgtgattttgagaaaaaaaaaattgaaatataagatttgatggtaggactcctttcaatattcattttattttttttttctcctcacttaaattaaaaacaaaaactaataaaatactttcaaaatttcttcaaacaactttttaatcataatcttgtgcatttgttttaggctaattaacaattttttttcccgaactttgacatgtattaaatcatgcccctgaacttttttggccgttaaaaattccccatgaactattaagat

SEQ ID NO: 21474 - DNA, 4859 bp, Cannabis sativa
gtaaattaagaacataatacaatagtgcatgggagctttgtctaagcacgtctaccaaaataatgtacaaacaagtgctctatagtttgcttatatataattaatacgacatttaatttctataattaatgcaatatttagaaggaagacccaagccattattcttttgtgttagaaccttagttgtaattatcttaacaataatttagcctagaatacaaacatgtgaattctaattaataacaaagactaaaaaagattaattagttcaatattatttgctgtctctgcgtcacgacttatatattataagatttatctaataattttttgtggataagattcttagatattcatatataataatataaagaaatattaataatttgttcaaatatgtgttatatgtttttttctctcccatattccttccccaaaacactcaagtcaactactccaaagtctggctggattattattatgtacacattataattaaatcatttatatatttctaaatattcatctctataaataggctccaactctccctctcatgcttcaaactcttcactaacatcttaataataattcactctttcatttaagagagaaataaaaaaaaaaaatggtggtaatggtgccaggtggcaatggcggggccaagagcctagccctccaaatcataacagggcggtggttcatggttttcgcttctcttctaataatgtcggcagccggagcaacctacatgttcggcctatactcaagtgaaataaaaaaggttctgggatacgaccaaacgacaattactttgttgtcgtttttcaaagacctcggtggcaacttcggtgtcctctcaggtctactcaacgaagtaacgcctccgtgggttgtcctcttagtgggtgccatcctaaacttgtttggctacgtcatgatatggctctcagtggccaagaaaattcccaccccaaaagtctggcagatgtgtctctacatatgcataggagccaactcacagtccttcgccaacaccggctcactagtcacggtcgtcaaaaacttccccgagtcacgcggcgccgttttgggtctcctcaagggctacgtgggtcttagtggagctatcataactcagctcttccacgctttttatttcgatgatacaaaagctttgattctcctcattggctggcttcccacagctatttctttgatttttctcccaaccattcggtacatgaaaatcatacctcaaccaaaccagctcagagtgttctataatcttctctatatttctcttggcctagctgggtttctcatggtcatgattattttacagaagaaacttgtgtttactagaccagagtttggagctagtgcgggaatggtcattttcctactctttctcccactggctcttgttattcaagaagaatttaagctctggaaatccaagaatgtaatcgacgtgaataatatcgaggctgctaagatcgaaaacaagcttaacaacccaacaaagaacgactctgtttcagagcctgctaaaccattcgaaagccaaccatcgtgctggagaaccgcattcaagaagccagagagaggagacgacttcacaatcttacaagcggttttcagcatcgacatgctgattctgttcatctcttacatctgcggagtgggtgggacattgacggctatagacaatctcggtcagatcgggacttcgctcgggtacccaaaacagagcataagcacattcatctcactcgtaagcatatggaattatctaggcagagtcttcgcgggtttcttctcagaatacgtgttgactcgttacaaagtccctcgtcctatcatgttaacttccatcctcttgctctcttgcgttggtcatcttttgatagctttcaatgtcaagaacggtctttacttggctaccgttataatcgggttctgtttcggagccaaatggccgttactctacgccataatatcggagctttttgggctcaaatactatgccacgttgcataattttggggctgtggctagccccattgggttgtatatcttaaatgtcagagtaactggtcatttgtacgataaggaagcgctgaggcaattagcagccaagggagttgaacggcaagagcatcaacagttggtttgcaatggaatgaagtgttttcagttgtcgtttatcataattgcggctgccacactctttgggacttttgtctcgatgattttggtgattaggacgtataagttttacaaaagtgatatttacaagaagttcagagaggttgccaaggccaacgaagccgaaatggctttggccgaaaatggtattgcaattggtgaaatcaatagtaaaaataagcaagagaagagaaatagtgaaatatagtatcatgattttggttctagttagttcaacgtttggataacccaaaagggtaaattaatgatgtgtgacgagatttggaaatcattagacgacaaatatgtacttgttctgaaattttcaaagtgattagattacatatatatattcttgcgatcgttgaaatgatgttattgttttcatggttatgtgtatataataatacaactgtatctgtatccaatgaaattgttggatatatttatagctttgggacaccgaacctgtgctagtttgtcaaccacgtgacggtagagatggaatatagtgaattttttatataaataattatttaatttaaaatgttattttgtttttacgaaattgaagtcaagtaggcaaattacaagggcagataaccagtgatcacaactgcattattaagaatttaatatggtatggatgtaaaaggttgtgtatgtctttactctctagtcgtttggataagttaactagaggttcccatcctacactctcttttcttagagtatgaaaacacagcacttgttgttgttgacaattgagaattattaagagggccacagatggtcaaatatgtctgcatatatatctatagcatggcctaggatctatgaaaatactttcaaatataggaatcaaccaaaatcattaatttcatactatatgactaaatttaatttggacttgtatatagatttctaattttctaattttattattaaaaattaaaatcttactcttaaaaatgtagtgactttgagtaaatatttatttttagtagtcacaagaaattttataatattataactaaaagtacaataattaatgacctatgattaaatatatattaatattttgttcctataaatttttaattgtaactaaaattatatttattctaaattttctttcactaaagttttctgtcaaagggagttgtcgccctcttcccagctatcaatatatatgattctcgctcctttgctcctcttggccagaggctattacatgatcaccttgtgtcttgtcaaaggccagctatttggatgctccaagtagatatacacttgctcgcacaacccttacttaatgttaatgagatatttagtgcaagacttaatgatcgaacaccaaacaaagcatgcatattacagaatagccataacgtaagtgtgccacgaggcaacacgctacacgtttgagtgttggtggggctctggctgggagggtatgttactttgcaggtaggtaggtggtacattagagaacattgtcccacatagattatatataaaaatatagagttatatatacaaagataagttactccaatcataactaattagttttgagatggaaccttacatttcttcacataaatattatattacaagttaatattaataatttgttatgtattaaataatacagcttccattgtattaaaaatttggtcttaatacaatacaagtgttttgttgttagtagtcgttagattttcaattgttgatttcaaaaatatatattttaatataatacaaaagaaaaagaaaatttattaatataaacaaatttttaaaaaataattttaatatatataatgatcaaataataattgctttcatgcattaattaatgtataaaaattatagatgaaattttgttattaaattatagatgatgttaaaaaattaatctaagaagtaaagtcacaacctaaaaaagtgtcctaatttggaataaaataattccattaaaacaatagaatttttttcatcttagctaatcccaatataaactataattactactttgcatccatcgtattcattttctaatttaaagtttgatgtataataaactcttttatgttttttgttttagttttattttcacttatatttattaatttactatataaacgtaaccatacagtattaatatcgtaaaatagtttaaaacaaacttacaaaaacaaaagaaaaaaaaaatgataattcttatcaacttttgtttacttagaccagtccacttctgctactctccttccttttttattgggccgacctaatttttcaacaattcaatttcttgagagaacaaaaataaaaaatggaatcttacaaaaatacccatctttattgtttatattacatttttactgtaccaaacattcaaaaataccatgttaaagtttcaaaattaataaaaatattgtatttcaataaactaaaaaacaactgaagtaactctagaataacctaacaaataaaataacaataactagaaaacaacccaaagacaactaaataacaaccgaaaaataacaaaatattgacctatttgcaatatgcaaaacaaatatcaactcctccttgtatttttgtattaccaaatacttttttacttagttttgacaact

SEQ ID NO: 21475 - DNA, 2564 bp, Cannabis sativa
tttctcaacgaacaatcttcaaatcataaaacctaataagaagatatagcaacaaatgaattatttaaagatgtatctttcttgctttttgaaagacaaatttggtaatcaaatcatcataataaagtttatttaacaatttgtttccgatagacaatatagctaatccactcaatcgtacttgcaacatggttaatcttaaatacgattttatcaattctaaaaaatttctctctacagaagcaacagttactaggatagttagtaaaatttgataaacaatgaatgtatttaaaaaggaacaaatattttttatgtaatcaagaatttcaattgagttgctaattttatttggaaaaaatttcctcgacacttttaattctgaaaacaaatctaaaccattaatatcagacaatccattatatttcaaaacatcctcaagatttaaagagtgatctttcaaactatctttatccaatacttttagtttcttcatattgaacaaaaaaccaaaatattttcgtacacttgaaattgttcaaatcttattttaagtgaacaaataatttggtcaatcaagtaaagaaaataatcaattcgaaataattcttcagcgaatttaattataggtggcaccgactcaccattttgtggcattttctccttgcgataggtggcaccgactcaccttttacagccaattagcagatgacacatggcactccaaagtttacttatggtaattgcatttttactctatgtaatttgtaataagttttaattacacattagtcatgttaccttcctataaatagaagcttaggtttttagaattcaatacagttttcatatagaaaaattcagagaaaacgctcgaagcgctcagtgttagtttatcgcttttcttagttaattttcttatgggttctaagttcccttattattaaggtgaacgatgaaacctagcgtatttaattaagtacaatatatgcttatgattttcgcttcttaaaataatttctttcatttttaatatcacgtattttttatagttagaaattattaatgattggttctacattttattaaaaataatattctttgattttttgtatttacataaaaaatttcacatttaatgcttagaagacgttataattttaaaagcgaaggaaaatctattttttgttaaaaataattagtttaattactaattaaattatgagaactaatataaacataaaaaaatttatatacacttaagtggattttgaacccttaataatattctcaaatatcactgaaaatatctgttactgtcatttttaccgttaaaatactttttttttgttacccaaaagcctcactatttttggaactaggttagagttttaatagcttagactaaataagtattttcttcgatctcacgcaatttcaatggattcgatcttatatttcccaatctttacactacaataaagagtcatgcgcttgcaagttgataaatgtaaaacgtaccattttttgtcacaacagttatgccccagggcagtcctagacaaaccaagaaccaagctaaagtgaaaacccgaccatgacttagcctaataagtttggacacagttgagtaagataaaaatagtatcgagataaaataaatcgcattctagacccatataaaaaacccaggtcaaataatacaaaattaatcctaagaaagataatcataacataaaattaattattaaagaattaacaacttataagtacacatgtcagttacaacattaaagaatgataatgcaatcatacatgcaaatgtacaatataaataaagcaagaagttcacgtaaaagctaagaaaacacgactagaatggaggaagtactaaaaactcaaagaggaaaatctcattaaaaaatattaactgatttatttgataaaaaaaattgctatttttgattaaagtaggttagatgttgccaataatttctccattaacaataggggaataatgaagagaagaaatgcattttttttttcttttttagaatccagtcctcgtagaaactcaattttctcataacgaaaagaatttattaattcccactccaactacagctcgagcttattaattaagtcgtggaatatagaataaaacactaattattggcctttaataatatgataggattgattctaggaatttaaccttgggtcgcaccttaatttggtggtcttaatttatattcctatacatatcatcttgtagtgtggtgtggccagtccctatctaattcacatgcaaccaagtaagcacacactcacacatacatgatttcatcactatatagccaattctgttcattccatacatgataattgatggaggaactaatgacatttaaatctatgtatttatataaagaagagatatatgaagtggttttgtgtggcactttaaaatctcttgtattatttgttctctttaattattttatttttttaattttttattaccttcataagtattaattgatataaaatatatatttttattt

SEQ ID NO: 21476 - DNA, 2207 bp, Cannabis sativa
tcatttgttcagtctaaacatgcaagtaaaagatcacctttagtactcatatatcgaagcaagattataaacaccagtgtaagtaaacatagtgaataagtcaaatctaaactttaaaaatcaatatttatgtacatacttgagccttgagagctgctgctgtatcagttccaacattgatggtgtcttgaacaacctatacaacacaaaaaaaattattgaaaacttgacgcttataattcaacttcaaaataggaaaaagatagttcgcagtttgcttctagcatcgcctgcctttgtaagacaggaggcaaaagccatcacataaaatttcactagttttactaaaggaatttacaatttcaagtttaatgtaaaaacataacgatagaactctaatatgactcctcagtttagtaaacgaagtctccctgaagctggagattgctaaacatcaaatacaagaccacaacacaatcacctaatacttgttgcaaaatataggtagctggagcaaagtttcttcatcaatttttctttttcatgaaaaaggagtaagcttctttccaatgcattaataatgcttgaagagaaccaaccttctttgatctctcaatggcctgatctgtttcattcatcatttggtgtccattatccataagctgttgatttgtcatatctgcaatatatacactcttagaaacaattcactattgcagagtatgggacatacccgcggattttattatattgaatgcaagtcctaaacaaaaaggaatttcgttcttataaaagcagcagaagaggaaccttgccaatattaggtaaattgaaaacctagacacgatctaatgcaagtagtaccacctggaaggtctcataatgccaacaaaaccgtaattatgcgcatatgtatttacttacttgaggctagcaagacattttcttcatcatgtccttctgttggtccatcaaagaggtcaatttttttgttatcaagattggctgtatatctgtatccagaggaagaaaaacattcaggaatagtaacataaaaaataaaaaacctcaacaatgacatttctcatatattttctagtaattatatgttcaaatatcatgccatcgtgatcattgaacatgacatacttaagcttcaatagacgtgagtactgaatgggtatgaatgcgtatgaatgctattggttttattttattttattatattttattttttgaaactaggaatcctgcctaatgctacaatattaggggaccaggaaatataaatttcatcgtggataaagagaagaaaaaaaaatgtttaaagttgcataattattcatgtgtaaaattctcttgctgcattgtcaaccaaatagagtactttccaatgattcacttactgtttcttcaaggcaacatatgaattcaactccttaatctgcattagatatataataaagttaaaaccacttggaacacgtggagcaaaattagttgagagaaaccgaaagcgcaaacgaaatattcaaaacatcatattatcatattatcatgtgtcatacaagtataggattaaaaacataccatagactgctttttctcactaagcatcctgttggtgttgggatcatttctactttcaatatccttgacttctctgtcaaactctttaataagcctgaaaacccaacatataaggtcattcactccttacagaaagagaagcctttattgctcttagtattttagacattttcacagttttagtcatactcattttgaagcttctgctttttctaagaggactttttaaagattgagtgatgagtcaaaggtcaaatcatgatatatgaaactaacatcaacaatttcagtctccttgagtagatgatgatgaaggagagattcagaatttttaaaagtaaattaagctttaactgagaggaaagaaacctcctcaaatcttgagcttctttcagctaatgcagaacaaccaataggattaacaattgaatgaaggctgtaagttttcgattatcattctaaattaataatgcacattacaggactaattccttgccaatgaatataactaaagcaacataaatatgctatcagaaatccacaagttgacaaacaaagacaaagatagatctgattggaatgtgaaatgaaagtaaaacagaaaaaaaagacaattc

SEQ ID NO: 21477 - DNA, 2446 bp, Cannabis sativa
  modified_base (48)..(49): a, c, t, g, unknown or other
  modified_base (76)..(77): a, c, t, g, unknown or other
gagtttattgaaaatatattatagttttacacaatctattaatacaanncaataccaaacataatattgtattaannaatactaatacaatacaatacgacgtaccaagcgagccctaagagatttttttttagattggtcaagggtcttattgtattaaataacaagtaacacaatatttggataaaatattatattgtattaaatattacgaccataaattttaatacaatgtaacacatattatttaatacataacaaataatttgtattagtttgtattataatatttataaagggttcgggattggagaccccgacttcggtcctgaactccggacccgaacctcggacatggacatagaccaggacctcggaccctaacccgattctagacccaagacccagaatcccaacccagacccggacccagatgggggtcgaagttgaggttgagtttcagtaaagattatataattttacacaacttattaatacaggtcaataccaaatatattattttattaaataatattaatacaatccaacacaatactatataacacggtgtaccaaacgagtcctaagaagtgtttagttcgttgtcagggccgactgtaaaggtaggcaaacgagacgtgcatcttgggccaccgaacgctcaggaccttaacattgtgaaaaaaaaaaatctcaatatataaataaagtattaaataatagttatataacaaatagtatttagtgtagcattaaatttttttatctaaagttaagaggtcaagggatcaatttccaacttctgtttttttttctacttttttaaatatatttgatgtgtgctatgaaaaattgaacacggaacctttaccattacactaaaatactataattatgttttgataaaaagtactataactattattttaataattaataattaaactgtagggtttctaaaatttaattttgacttaggctccatataccttagcatcattcatgtttgttgtaatgggtattgtaatgaaatcaaaattcccattgctttattttaaaagtggtgtaataggactacaatataactttaatacccttttatatataaatataaaaattagaggaattactttatatactaaattggtttctccggtggtttctatatgagttgttatacgattttttattgcgatttaggttgcagcgctagttgcaatagtagtttttatgtaaaatttcgtagaaatgtaaaaaaaaaaactgttttaaaatgcaaaaataaaaaaactcctaaaaattaaagtaaggacaattttattaatttatcacttattctaatattggttacaacatcaaaccaaacatcctaatcaagtcatattactattcttatttcattataccattattattttattctaccaaaccaaacatcacctaattttttttttttttgaaaaatctacaaatataaaaaacaaaaataaatacataaattatttgtgcacttatatcaaagaatgtaaatggattgggccacatgaatattttccttcaaataatgaatcttgagaatctttgtggaataaacaagcacatgaccgaataattttgtattttttttaagaaaaaaatctctccccaattatttcactgatatttttaattattataattaaatccccaaattattaatatatattttaacatagaggaaccccatgcttatctgcatcttttgttatttttggtaaaataataatcattaatgattaccgcatatctctttttttaaatcgttttgttttttcatgataggttgttatatagatacatgaactaatgatctgtcaattactcttatttgaatccctttcaaatgaaaattacttttatatgtgtgagataaaaaatttacttatgactaaaattacaaacttgtaaagataatattcatcaaaaacatccacacaaaaaaaagattaaactaaaagaaaaagttaatcataatttttgtttctgaactttgacatgtactaaattatgttctataaacttttaagactgttaaaaatcccttaaattattgagattgttgaatattttcgtctaattttagtagaaaaagtctaatatggataaaagtttaggagaaatgattttaatacatgtcgaaattcgagagacataatttggtagatatcaaagtctagagagcatgatttaatacataaataatcactgaataagtaaaattaaatgaaattagacaaaaatctagattcaacaatttaggaagaatttttaagggagagaaaaattctggagcataatttagtacatatgaaagtttaagggaaaaaaaatctcaattagccaaaaaaaaaaaaaaattacataaaacactattttttttgtaaaaaatttatatttttacgttcaa

SEQ ID NO: 21478 - DNA, 4597 bp, Cannabis sativa
gcgagtattcaagctatgaacacacagacgtattggaaatataaagaacacaaggaaatatagtggttcagtcatatcacggtgtgcttggtccactgttgcaagggtttactgtcttgtccatttcatgttgaatcactcctttatacacaaagcaagtgttcattgattacacaaagattgatttcattatcaatccgtttgtacattgaatataacatttaaatcagtaaaaaatgtaaatataataaatgaagaaccgttttggcctaattcattatacacagcaacgtatgcgacttctatagtacaagttgtctattcatattctcgcataagctcgtaggcttaacatgcgcacaaggctaatcgagtttaggatatgtgtcatattcgagtcacttatacagacatcttgcagtaagtcgataacttaagacatgcgagtccttatcgggttatcgagcttgttgggtcatccagaccagctcactgagtataggagcgatctttacctcttcaaaggaagacctttatagtcctcgcatatatattggtatatgcaagtctcaactggatcttcggtcctgctccatgcgagctattctaataggacttgacactttcagggtcacatcatcccgctgaattcggtttaggcaaggtttgcactcaggtggtctctcactgacatctcagctctcctcaaggagagtgagtctacgtgtcatttttataagagtctgatctcgagtttctaggtgagaaattctcactataacaatatccttagcaattatgtgtcgttccaaagagatcgtcgctcgcctgggggagtcgaccacaccctcctttcatattcccactaaggaatatggttatcacatgtcccaacatgcttcctcaatggcccatgatgagggggagggtgacgttatagagttggagctcacccatcctattggcccattagaagatgttgaaatgcaatagcccgacaaatatcctccttcattgagtgttagcctcgacagttaaacacttgaggatgtgaatgtgggaggcttgagttacgcctctaacgtatcatttgacactttcaacattcaacacctcttccagaatctaaaggtccttcatgtttgccctatggttccgattagatggcatggtctcaatccctaatgaaccaatactctagcggatacaactgcagcttgggtgagttcacctcttctgactggacttggctacccaacttctcagtagacgggcatcaagaggctgctctcaaatgcaacatatgggttagtttacattgccattgcctttattcaagttactcactgctgtttctttttggtgacctattaaccgtaacttttttttccaagcctttgtcttacagcaatatactcctagaactagctctcttgggaagggggatatctcatgcctgcaataggccttaattaagatggaggagtctaaccataaatgcaacgctcttaaggaggaagtaaatcgtcttcaagctaagctaactaaggattaatcctcgatggctagccttacccaacagcttaaagattccctctccatcttgcacactcccacgtctgagaagggaggcttagagctaagatcgataaggtgcagcatcacagctacaccattagagtgaggaacaagaaggagtcaaaagagaagattgaacgcttgctatatgcggtctggatacaaaaccctgatcgttattacagcattctaggttcctttgcaacacaaaaggttgaaaccttataggcgaagtgtggtgaagcgactatggcgtgccaaggcaattgccaacacgatccaagcccgtcacacagctgtaacaagtagactctccttcttgtggccatatttatggagacccttgagacttattttttttttctttttggtttttcttgtatatttttggatgactgtagaactctatttttattttgtgttcttcaaacattgggaatcatccttggctgagtaactttttaagttgcccttggttgagtggttctccttacattggtaagtggaccgcctacatttctttttttttatctttgagttatcaagatgatgctagtcgagtgtctcttgggacaactctttggccaggcaactttccccactgtggccagcgagttttattttgagggagtatggctctttgagcagtctcaaccccttatcatttcttcatcctttcatttagatgtgaggggacttattttacttgactacatcccctttgtttgtaagtatttgcttacatttgagaggcgtccctctcatttcagcattatgtcatgggtgtccgttaagatctcttttggcttagcagtgttttgcatggaggagtgtatttacttttgtcaatcaagggtagcaaatccttgacaacttaggaagatttcttttgactcatatccttgccgcctaagtgtacagtgccatttatggcgttgtatacttgagttctccgtttatttctaaaggaaaggaattatcaacttagaaatgtaaacatgatagttttaatgaaacattcattcatccatatagttttcttggttacacctcgatactcaaaaaaaaggaaaaacaaaagaagttacactactggagtcgccccaagggtccttccttgattcttacggatcgtgctcaaaggatacataagttttcttgtgtgatggtgcctccttacttttttatggactccactccactaccttcaactggcccttccaagattgtcaattccattggctccttagctttggtggcgacgcacagcaagacattgtagcactcccttgcttctttatgctcttacttcagtgtagtggctccccttggggttgggaacttcatggccaaatggtaaactaagtttatagccttcaaggaatcgagcgacggtttccccatcactgtgttgaatgcagcttgacaatccaccaccaaaaatgttgccatcgctgtggagtgtttcgtgttctctccaatggtgagagccaactctattattcgaaggagttggttgagtcttttgtaaacccataaattggtatcgcacatggttttaaatccttgagtcacaatcccatcttcttgagggtttcaaagtagaggatgtccaaaaaacttccattatctaccagtgttcgatgcaccctcgtgttagtaatttggattacaatgactagtgggtcattgtgggggaaattcaatcccctcgcatcctcctcactaaacaataccgactcattctctcccaaaaaactttttggtggtctatgctctaggctccaaacttggggctcgtgtctcgcttcgcgggcatacctttctcttcccttgtgggtgttgcctccaacttcaggtccttcgatgacactttggataacacttctggagcctcctcaagatcttcttgttaacgcggctcgtttggcctctagttttcttttcgataccctcctaagtacccatgttgtatcagctctacaattttgaccttcagatgcttgcactcttccgtgagatatcaagcatctttttgaaagtggcagtacttgtttgggtctctcctagctctttctcttttcaagggtggcaacctcttgaagggtaagtgctcattagtaagaaagctatgctctcttgagtgggttagctccgtgtagtgggtatactcacaaggtagtggttccaactctctcttggctttcttgtcttgtatgtcatccttgtatctaaacccccttttttacatgacccttcagtttgagccttcttgggttttttgtctttcctagctcctaggttctcatgcccatcttccactaagatgtatatgttggccctctaatagaaatcgtcgaggtcatccacatctcacttgagaatgttgttccatagtttactttttttttataactcccgaagtgatggccatcttatgctcatccttagacaacgtcccaactttggccgcttcagcgttaaagcactagatgtagctttttaagctgtcagtttccccttgcttaatgttggccatgcttttccttgggatgacataatctcaaaaagcacgatgttaggacaagaactcatcaacaaattgtcttcagaaagttattgatccaagggcaaatctcttaaaccacttttacattgcacaccgaagcatcaccgcaaagcattggcaccttgctttacgcgtgaccctctttgttttcataatttcatttacagcatctaggtgatactttggatcagtgattccttcatatggtgatatgttaggctctttgaagttggggggtagttgttcggactggatctctcttgaaaaaaggcaactcatcgtcaaaatcagctttgtcgcagctgccttcttctcatgcacatgaggctattctatggcaaaggtcttccatttctctgtcaatctcttgtatcctcttcttcaacctttctcaaaggtcctgcgatgtgcattttggaccttccctatggtggtgtattgtcaatgacg

SEQ ID NO: 21479 - DNA, 2190 bp, Cannabis sativa
gtatttttagtttcaacacattatcattatgagattctctaacaaaaggtaatatatattttaggacaattgcttaagttgcacaagattcagaatattgaagctcttacaaaaagactaatattaggatttcatctcaatatgtgttatggaattgacagtggaaaacagtgtcaaagccgttgttagttaataaaccaacgtcagcgaaattgaaatatcaagatttgaagagaaaggtatagtgtaacaaaccaaagccttaggcacttctgtctcttccttgtcatcactatcttcaatctcagctgctgtatcccattccatgttgagtctcctagcagcctctcggggatcaataccagtatctgtcgctttagcatatagggatttgcttggttttttcttttctgcttcaacctaaacaagaaacacggtgtggagaaaacggtgaacataatgttgaaaattcccttttgaaaacaaactccacataaagttgaggaccaacataatcttgaaacattggaactcaatgtttggttgtcttacaaatacataatacataagaaacaaaatgcaatatcaattgtgaagaaataatgcaaagggagaaaggagaacaaggaatcctccaaacgaaatcatcgacattagattatgaaatctttatcacatttacctactaaatttaacaagaagagaaaatcatgaaatcaattgaaagaggaaagatggaagtgaagaatggatagttacaaatgaaaacatctctttcaaagtgagatgatccaagtactactatgcttaactagaataaataatgataatacctcaagattgggccattgcatcatttcttctgcgagcagacgaagagtaacacggttttctggtatttttccttcattcacctgagaaaaacaaaacacatattcagtatttttttccaaatgagaaaaacaatcttcccatttgttcatgcatgatgattacaattcaatagaggtttcaaaaatacatatactaattagggaagatttagagaccataacattattacactaaacccgcctgaaataacaaaaaagagaaggaaaaagaaagagatgtaacaaatggccaggaaattgggacgatcaagtttgatcgtgagcgatgatgtgagtgaattggagaatggatcccagccattggtagcaactccgggagctggaactgcttgaactggatcagccgtagccattggtgcagcggtggtgccaggatcagtcgtggaagaactcattgacgtaagtcagaggcgattgataccatgtagaaaaacataaggcaaagccaaacaaaacagagagaattttgaaagcttaacccaaacaatggagctgaactttatttatataaaagtcgaattacaagaaatcaagaaaagcaataaaactgttacagctcactaatattaactaactaaccaaattaactaacaatgctaattactttgcttatttacacaaacagaaactataacactagtataagatatctattagtctagcctgtaaatactgagagttagtcttgtgaaagaaaggaattttggtgtgaaatatttatagtaagatattactcagggcgtttaccaaatttttgtatttgttcttgctcttatcaataaacaaccttttcatagttctttcaagaactgaaatgtacacaagtgtgtatcattcttattatatatgtttagactaaaccagacacccctccaagataatacctaatatgttagtgaagaaaccaaaaactgaacctaaaagtacaaccagctggatcaatgctggttttcatgataacactctccttcataggaggaaacgaaataaactaaacaaaaaaagctctgcacacacatgttatgtttaagcaagaataatatgaaaaatatgaaatgaagtaaggaaggaaggaagttacttcttccaaagcagcagctaagtcttctcttgatgggccatctgattcttcaatgccaagcaatctccttctctctgcatctcttgggtcttcaatcatgatggtaagcttaacctacaaaacaaattcaaacaaaaaagagtacaatttagttaccaaatgggctaattcagaaagatagaaaaaagaagcttttttttttttatcatttcatta

SEQ ID NO: 21480 - DNA, 3534 bp, Cannabis sativa
gcttgaattccttcttaaagctagaataaacacactcaatgaaagaagaagcacttttagccaaaattccctgaaatgggaaatacttatctgaattccttctcaagagcgttcaaaaagagttgtataaaaatttgatacggttaaggcttcgcttaaactcctatagacttaggctttatcctgaccaggaaaatgccgtctgaagtctgtagcatgtgaaattggccttcttaaattataaaaaggcctaaacggtcgtaaattatcaaggctccatgatcatgcagtaatttaggaatagcctagaaaaccattcatgttttcagtagcaacaggaggcaggcacttcctaagtacctcctaggtcagcagagggatacaaggttgaccaatgtcaaaggtttgaagcgatggccattggaaccacacgcttcaaaacggcctaagaagacagctcttaaaataactatacaggccaatattgaaagctaaaggttgaaaatagtacgaaatattagagtcaaaacatggtgcctcgcataaaggcaaacaaaggtgttcttgaagagaagtgtcacatagagccccgtggaccaggctaaagtaaatacaactccgcgacaaaaaaagaataaaaattgttttaaaggaaaagataggtgacaagaaataaaggtgacccctattgatcttgggtaggagaaggtgctactgagtcgattagggctgggacattagttggctcctctggatctgggttaggctcagcaacgtctcgaacatggtcctccttaacctcgctggaagacaccttagctttagcaaactcttgagaacttgagacttcaacacttgtttcttcatcgttgtcactatcatttgagagaggaaactccttgatataggtgttatatttcatagcgagtactctcctggtaacattctccctatctgcctcgtcaataagctaaagtatggaaggatttgccttccataagttgtgaaggaccacaacataggacatcttcaaggaacgaaggtgatctttctccgccttagctactgccttagttgttgctgtaactgcatcctgaatgagttggaggcagtctccctcattctacgcatggcagctaaagcaatgtatgcattcataccgtttgttggactccagtcgactttattttgtaatctatcaatggtttcctatcgacgatcacagttacgacatgccccttgagaagaaggctgagatggccatgttgtgttatcaaggactccgccagtttcttctccttgtcgtgttcgacttgaaggtccttgatgagtaagtccttcttacagatgtcctcttggaagttgttgacttgatggattggggtggagatagtctgagactgagtagcatgcgggcctcgactatttctttctccttcgtggccttggctaagtcctctcgaagggagcgtacagtaccctcgacttcttgctcagttttagctttgtgatcccaatacatctgcagtatttggtgtcccacttctcttcctccacagccagcttggccttccagtcttcctaggtctcgatctgctcaactttagcatgaaggccacattttttatggtcaaggactgaattgtggcgcggagctagtttaattctatggtcatattccccacttctttggcagtctactttataaacaatgtcatctagagaaaggaaagtagagagaaattattaggcattctttggtaataaattttttatcgcaagtgagaataaatcagaaaattaaggcttacccctgcaacctgctgtttggcggccactgataaagtgtatggatcaacactactgctcactgcccacttctttgatgtaagcttgctcacactaaggctcatgttgtccaatatttctacagcataaggggcaatgactctgcccaccttaggtatctgattttggctcactgcaatcagatctaacacaaggcagggggacaaaggttggcggactccctcagttgtctcagctgtcttgatagaagacagccaggtagctcgcttctgaagatttacctgttctcgctcatgctgcttctacaaaatgccagcctttgtgaggtactcgtggccaagaatagatagcctcatggggaaggagaatcataatgaaggagccctaccctttacagtgggttagggtgagtcagcaaagcttggcctaggcgttgtgttctcgggaaggtgttgcgatgtaggagactgagatgccacaatcagtaattgatgaggagataaagatcactgctgctgcgccagaggcactctcctagattgtgattgcattggctgttgttgttgttgttgttgttgctgttattatggtggttgatattgttgttgttgtagttgttgttgttgttgttgttggtggtggtgttattgttgttgttgcggtggttgttgttgtagttgttgttggtggtgttgttgtggcaatggcaagttggtggacagtacatcagatgcccctaggtctgggaccgaagacttgaccctctttgcaccgagactaggggaagtctttgatcccttgtgtttagacttagcttgagtcccctttgggggaaagacaagtcggtccaggttgtcattagaaccccccgcgtttggtgtggtgtctgggattatctctcctgtagggggaataatttaagaagaccgctctcctggagcggcaagaacctcagaggcttttcgggggtgccaggtcccttctccccactagttgaagcagaatggcctgacgcagtaagtccaatcttgatgggaggaggaatctctcggacatctgatgatgaggatgttgagggggaatgcagtttctgagtccttgaagccatggtcttattctttctcttgcctttttcctgtgatttcctggcctcatccatggcagctgagatttggttattctaagacttcaacattgcagatttcgatatatctgaacacaagacgacagtacgagtaaacaagaggagcaattgcaagtcatgcaatcataagaaaaaatagcaacaacaagaagctaaaatgcgtgggtgcagccattcaataaagtaccttagggttgtctacgagcaaaagctaaaatgctcctatgaccattgaagctgtcatattcgttaaatttaggaagagacataacaatcaaagggtctactttgataatgtccaaagtagtccccaggtttctagggctcataaaaaatgtaaagtgtaaattcaaatgtaaactatttttgttctcattgcatgatgcctgagggccattcgtacaaaatttaattacatagatttttacacaaaacattccaaatgttgtcaaagcctggtttcctctgcctgttggtagtatcggcgtaaatgatctgcattcaaggcgtgagggaccctcgattcatccatccttttcaactgaaaagtcccttgtcccattttctcgagtatctcatag

SEQ ID NO: 21481 - DNA, 2176 bp, Cannabis sativa
tatgatgttgccgactgacccaggagttccagtgccaatgcccacacggttccatacaacttgaacctttggacaagtaacaagtgcatggactatagtttcctcagccccacggcaaactggacaggcagagtaaacatttactctttttgtttggagctgacaaagggtagggagacagtttttacaagcacaccacaccagattttttattttagggggcagttttagacgccagaacgcagcccagaattttgctgctgtatcggggttgtcattccatctcccttgagctgtttgcaataaattgtatgcactttttacagaaaaaatacctgaggtctcaagcttccaaaccagtcggtcttcaatggccgagaggagaggtatcccattgattaaactaaattaaataggaagtaaaacaaaaagcttctatatattaccagccacatatataggaaaaatataaataaggtaataaatgatattggctctttcttgaaataatgcaaggccggggacccttcttgtgtttgatcatttgtttttgacctttgggttggtttgacagatatatatagagaaatgctaaagggcaccactggtgcctagcacccttctacgtgtcaatatcgctattggtgcaattaagtatcgggtcccatatagtttaatataataatttttgtagagtatcgctagccaattgcaagtcgacacatttagaaggtgctaggcaccactggtgcccaataacaatgctcatttttaaatggtagaaagtagtaccataaattaatttttttgtcaaaataaaaattaataataattcgatctagaatcattatgacaaaattgaatacgtactagaaatgttcgtactagaaattgtttcaagtttgttatattaaaagaaacttattgaaaattgaactcaaagtaatattttgagccattttaaaaaatataaaatataatttatcattttataaaataaatagtctattcaataattttttcaaaacataaatgttattatcacccaaagaggctagagaaactgcactaattataataataaatataaggagagttagtttccaaaaaagaaaaaaatgtagagttagatagcataaagataattagtgaaggatacttgtgtaatatgactaataataccacatgaaaatatgtgaaaatatgttaatactgcctacaatgctccatcataaaatagtttgtatagcaatataaatattcttcattttaacatatacctcgagaagcacaagccttcatgttcacatttttcgaagacagttcaatattattcaggcatgcaatgcaagagagaaagagaccaacccttttccttttcctttgtttttttctgaagagacttgtatagaaggaggaggttctctttaacaactaacacatttctttcctttttccagctagtcaacatgaaatatgcaactcttttcttgtcttattttggcaacataataataataataataataataaccaaagtaccaagccaaaccaaacctaacaacttcttcatcatgcatcttcaaattaaacaacaacaacaacaacaactctttaattttatttttgttgggttgggggtcaagtcaagattccctaacaatatttggattgtgcatgttcgttcaaaagggtcgtctctaaagaaaaagctagctagtcatcttgtattatataaataaatatatacatatatttttatatatatatatatattgtagggtttcttgaaacgagtcatacagattacatggcagaaagcttggctggctttgggctcaggcaggctcatgtaccaaccaaccaaccaaccaacctcttcactcatcaccaaagagtctcatttatatcccctatctatttacctatctgaatttgtctttgtctttcatggcatggataacaactactctactcctctttctttaatttcacatggacaacatatcaaacaaaatcagaccattaaatcccatttcacttattcacaaattatataaatatatattttctttgtaattaaagttcacagctgtaattaattaacacttttggcagtgacagtagtcaccactattactattactgctacaatatcaaccaatttggcctacaa

SEQ ID NO: 21482 - DNA, 3430 bp, Cannabis sativa
  modified_base (1781)..(1788): a, c, t, g, unknown or other
tgataaatgagttaaacttgtggagataccaaccggcgctactgactattcacccttataatgaatacctgtcaagacaaacaataaagcatccacagatgatttgattagagaaaaatataagcatactgtgacagtaagattttatggaaaagtactccatgtccattgaggctaaaatcaaatgaagttttcatgttccaaatcgaaataccttgaatgcagaaggccttatcaactgaaaaatcaatgcatcaccatccaccaaattatgagcaactgcaaaccctttccacccaccactcagtcctgttttcctggccaaatacactgttttatgttcctcaccatcttcatctattaatgtcatcacttcatctctcttaggaaggttctttctgcaaaaatgaacaggaagtccctgcttgatattcaaaaaattacatcaaatacacaaacacaaaaactacttctagtcaagacataatatctaactcaacttatcaataataatattatgacatgcattaccagccagaatccaccagtgacatgggattggagcattgttttaataaagatgggatattcagattccaactcagatagtagtttctctgctctttctaaggcatttgttctagcttcatccgaagcatatacccggttagacaaatctctatgcttagaaatcctatcatacaaaacaacaaaattagtttaaaagggcatcaccaaacaaaacaaccacactgtttaaaaaaacacacaaatgaatctgtgtcaatataccttctgggtatcaccacacgttcaatcacaacctggttaatcatcaaaagggtatttaaattttcgaataatcagaaaaattaaaagggtatttttctattttgagtgattaaataactcacttcattgtagacagggataggcttgtttgccacacgactggatctcctcaccattactacctgtttttccattgtacggggtttcttcacgcttttcatctatgcattattcaaaaatcaaaacaaataaagttaaaaaggtggctcctttatagaaatgttaaataagaaaaagagtgttaaagttcagggatttatttacaggggagagtttcgaaggggatgagtttcggagtgattgagcaagcatggtgagattgagggcctccattctttgcttattttcttccaatctctggcggcgagattcctcgtaagatatcttggacttagccatcaccattccttcagtatttttttttttcctttcctttccttctattttcttttcttttgttttcctgtaaaccaaacagaaaacttctctttcttccaattcggtaaaaacagagagagctcaaaaaccaaaatggcgaaatttgaattagtgaagagccgaccgttgggttcctacttaaatagtgtcatagcttatggaatgggtactcactatccactattctcattggttctgctgtacataacctttttttttttcaaatataaaattaaaattataaatgtctctttccctgtaaaaaaaaaaataaggctaattagtaatttttcctcccaaactttaacatgacttttatctaattttaataaaaaaattctaacatagatgaaagttcagggggcatgatttaatacatataaaagtttgaggggcgtgatttggtagatatcaaagtatggggagcatgatttagtacctaaaacagtaaaattgaatgaaattagaaaaaagtccttaaattcaacaannnnnnnngttcaggggaaatttttaacggccgaaaaaattcagggggcataatttggtatatgtcaaagttcgggggtataaattgctaattagccaaaaaataatagacatttttgtaattttttttgtcatcataatagtattattgtaattaagtattaggtctcaaaatagtttttaaaaaatatcactaattaattgtgaagtaccacctataaaagttattgggcatcactcgtgtccaataacaatactcttgtcttttaaaagaaattctttaaagaaaaaaaaaatccaagttttaactcatttttttcgcaaggtttttaactccatattttttttttatttttatatttttaaaaaagaaaacaaaaatatttattaatagttaaattggacaaattccattacatgatatgtttacttattaagtaggctgtcattttttcatagcctacttaagtaaacaggtccacgttgttcgacgactcgttaagaactcgcaagttccacattgtcaacacacgagatgtctgtctatgcgatcataggtgaacgcagacatctaacaacaggcccatgggccacctagaaaatactaaacgcatcaaaagcctgggagcttgtgcgagaatacgaacatgcaactcgcgcttagtaagtcgcatatatttccacacttaatacaaagacgaattaaatagttcttcgtatattctttgacgtttattctgatttaatacagtatttattgtaaaaagattttaaaaccgatcatttatatatatcctaaaggtcacttgctttctatacaaaagagtgacccgaatcaaataaactaagctaaaatctttgcaacagtggactaagcaaaccaagttttgactgaaccactatacttcctttgtgttcttgttattttttgctttttgttctgtttcttagtagccaattctttgagtacttgctactttaagtgagtagtcacaagttttatccaagtgttcttaatagcatcaaatactcgcacgaattttgtcccccttgcttcatacttaagcaacctataagtctaggggtaaagtggtccaaaaccacaacctcgcctaaccccgatactctaaatatctcaaatatttattccactaagaaatagattctatacttactcatgtgacacggccatccgtcgcattttccgtcgttgccgagcaaaaatcataaaaattacataattcatatttagcttaaataatattcttagagtttaataaaatctctgaaattgagaaattataactctaatgtctatttctaaaaatttaaaacacctttttgattttaaacccaaaccaccaaaatacagacacaacgggcagtgatcaaaattactagtctgaaaagagcacaaggcagccttcaaaaaaagattgagccaactaccattaactaagcccttgtcaagagttgatttgacatgatcccttccattacgatggttgtcccaagttaacttatctccttagattggcaaatttatgagagcccgagaattcaccagctccgaaatgatggggataaaagggtctcttcctttggatccttctcgttcagactcattgagggcaaagttagcatcccccaa

SEQ ID NO: 21483 - DNA, 2440 bp, Cannabis sativa
gttttataacaacacagtatttttgaaaacttttccgtgtcacagtatttttgtaaaagttaacccaaattacagtatttttgtaaatttccctttttttttgagcccctgggttaggtgggccctaggcacaggcctagcccgcctaagcccagggtcgggcttgagtaccagtagtgtcttttaataattctctaattataaatataaaatcatactatttattgtgatgtaaattttacatttatattgtcgtctaaatttagatcatttttttgttatgtgatacttttagaacactctcaatagtttttttattctattttttaaaatgcctaaatttttaacttgagatcggcctaagtgacgccatataattagttagcaatatttactaaaagttaaaagttatgaaaaactcaatacttaactgaaatataagaatgaagatggtgatagatataatattgtcttttagcattttttttattttattattttatccttttataaaataaaaagaacaaaaaaagcatttctttgagttccccaaaatcgaccatggctagactcttcctaatctgcaacccaacctcactccctctaactctctctcctcacacttccaacccctttcctctcagacccatttccacaacagcttcattcacctcctctcacttccccaatttgccggcggcgctcagattctccggtgacccattgaaaaccagaggtagagaactgagtgtggtcactcgtgcaggtcccagcacaggaagctttgttcttgctttctttttgcccttgtctctcattctcatcactgtctttacttcaatcagaatctctgataaactcgatagagactttcttgaagaggtatttcatttcatttcatttcattgcttttcttttcttttattttgtctttgaactgtttgataaaagtactgagtgaaatagttttgttagcactggtgagataactcaataggtttcgtttggtactattagtattaaattgtattgttttacttgcatttatttttgcaagctcaaattttcacaataaaacttttcaaattattaaagtgttagtaaattgaaagtgtcatttacttaattaccatcataaattgtatatgtgtacactgtgtttgacacgttaatatgggtacatttaatattattattttaaaattaaataaaattataaataataatattgacaattgtacacatatacaagaaagagtgtacacataaagtagaatgacaattggaatgatttagctgcaaaatttgaaatataatatataacctaatttaatataattatactataatatgatcaccaaacgagttgtaaaagtgtgcaaacaaagatgagttagtttgagtaatcaaatcgattgttgaacttcaggataaacagtcagctcagcaacaggtattggtgagattttctattatttgaaaatcaatgatattaatcataatgaaaatattttgtcaattatttaaatagtgactatcaataaaaaattaattagaattagaattaatatttcacttataacctattaaactggattataaaatattattaggctacactaaaaaaaataattatatagaattactgaaagttatgaataagtgaaatttattgatttgctgaataaatgaatttgaaaattttcgatgtatttttcaggttgctcttaatgaagctattagacagtcagaggaagatgaaggtgaagaagatattgaactatcttcaaataataatgtgactccttcacgtacgcgtaatcgacccattagagaagtttagattattgttcttcataatatacattttcatcttactttctaatcaaatttattgtaaattaggtccattaaagtattgaactatcgagttatataccttttattttagttttgagattataaaacaaaaaatttcaaactagataaacttttggattaatatcaaattttctcatatacataattaatctcgagcccatgaaagtgcattctaataagaatctcaaactatttcatatttttatagttatttgatgtgggataatattatccaatatttagttttatttattttgtttaaattttgacttattatctaaatatgtgtggatttagttgaacagccaatactgattagtccaatttattttgtgtgtaaatatatggtctagtgagtgaagaagaaacgttgcattaagagcaactctaaccatgctttctaaactcgttttttttagctaaaatagggagtgtaacttaaaaaaataagctcctaagtatataaaaaaataactctctataacagataatgatagaaatctttctaaatgtaggaaactccttatttcttttattaaatttttttaatagtatttta

SEQ ID NO: 21484 - DNA, 5264 bp, Cannabis sativa
  modified_base (730)..(730): a, c, t, g, unknown or other
  modified_base (1191)..(1192): a, c, t, g, unknown or other
aaatatatataattactaaatggaatccaagagagttgggcatgcacacaaaacgaatctaactaaaccacctaataatgaaagttgcctttttgatatattagctagtcacatatgtgagtgagcctactaattgctgagtcagttccttgtagtctgaggggtttatttgtcatttttcaaactcttcaacttgattgaatgggacccattagaaaagaaaaaagttaattaattacattacatatatctttttaaaaaaattgtatattaacatatgtcacaagctttttaaaaattcaatttcataataatattataaaaatagtttcgtgtggaaattgtattcttggtttaacctatttcatcaaaatgcaccagtcattatgataaggtagatgatattgtaatttttgaaaatttatatatatatatataatatataattatctaatttaaatttttgtcccttcaattttggcatgtactaagttatattttctgaacttttttaacaattaaaaattctcctgaactattgagattgttggatttaaagatttttgtctaattttattcaattttactaattcggtgattgtccatgaactaagttatgttcctcagattttgatatctactaaatcatgtccctcgaattttgacatgtgtcacatcatgccccctgaactttcatccatgttcgacttttcttactaaaattagacanaagtccttaaatctaacaatttcaatagttcagggggattttttaacgttgttcaaagttcagaggcatgacctagtaatgtcaaagttcgagaggcaaaaatattaaaaaaattgactaaaaaatatttaactaaaaaaattaaaaaaattatttacactttaaaaatttttaaaacactttattttaatgatttttattttatataacattcatatctttaattgtattaagtatttttaatttttttcttctaattcatattcttaaaaaatatttttattaaaaaaaattatattttaaatattataataaaattaaaataaaaaattatattaaattttcttaaacatgatttcgaaaaaataaaatatgaaaataaaatcaaaataagtattaaaattaacataaaataattggaggaaaaatttttaaaatatattaaaagtaatttttaaaanntatttaagtttattttttttaataataaaatgtacttttcattttataagatgtgttaacacagattttccttaaccaataataagtttttttttcgtaataaatttaacacaaaaattataagaaattaataaagtataataagtataataataacactagatatttcatgtgattttgcagttaaatctacatactccacgagtctagcatattaattttaagtgatccattatcaatatcatggaatatacattctattttcgtaaaacctaactagtaaaataagtaagataaatattaaattgtatcagtataacacctcataatagtgttagttgctatgagttttagaagatctaattggtaatttattatttaacaaaatagaggatttaattgataatttttataaaatacaaggtccaaaatagtatttattcttttaaaattttaaaaatacactttgtttagtaaatagtaagaaaatatttaaaaaaaaaaacaaccagaaatcaacttcatgataactttaaatgaactataaaacaatcagaaatataattcatgacaactataacacaactataaataaactaaaaaacaattaaaaaatagttaattatttttattgaagaggtatttttgtaaataaaaaattttaaagagtcaaaatgaaaaattttgggtgttgaactatttttatatatatatttttaaaatttttgctctattttatatctttttagagaaattatcttgtatattatttttttaatatatttttttaaaatttatggtttggttttctaaattggtttgtctgtggttttttttatgtgggttgctatacgaattttggttgttaataggttggtccgttagttggaatataaatttttatgtagaatttcgtaaaaataatatatataaaaaaaaaaatttattttaaagtgtaaaaaatgaaaaattcaatttttttttttttaagcttttaaccacatgatcaccgtccacccaaatttcttctaagagaacattttaactgagaagattcggaaaccaccaagaaattttacttattttaaaaaaaaaaaaacaaaaaaccaaaataaaaaacctatataaatgaataattccctatttcaattatataagaaaaaaacccaatagaacaagaagaaaaagaagaaatgggcatgggtaataagtttgagacccagaagaagccgccgccggcgaattcgaaccaactgggttccggcgacgacaaacctcgtttcaaactcaaatccggtagcctgattccggcgaaaaagagactcgtcaagactctgatccttgactacatactaaaacaggggttctctttcttcttcggaaagaagaaaccccatttctctatgagtaaccaagtgtttccatacccaccggaacttgacggtggtaattcccagaattgatcagaagggagtaactttctttatttcaaacttgttattatctttactttttttttttttaattttctggtcaattatgtaatgccattttctatactatatggtcagttatttaatttataatggtttttgatcatcaaattcatcataataataattaatagctgtatttgtgtcactgtgattattgaatgttgtgttgatctcattttcaactgtaaaaactgtaataagaacaggggcgcgtgcattcttcccccacgcgcttcgtctctctccaaagtagaatactatactctagctgcgattaggctcgggtcgggctatagatccgaatcagaatccgcgagctggaaaatatttttcttttagttataattttgtaattttattaaaaatttaattttagccttctacaataatttttttacactttgacccctacaaacattcttgattgtacgaaattacgaataactctccttccttcttcatcacggctggttaccgggttcgggtcggttattttggcacaggacccgggctgtgttggtcggggaatgtttaatttgtctaatttggaactgaaatggttcataagagtctttttttctttttctaaataatacataatacaataaattataatttcataaaaattcaatttgtacgtatatttcttgagatttttaaggtacattttgtgaaatttatggaatgattaggtttctagtcctcgtactaaggccccaattgtttatggtgtcccacaaataatataaatatatatatttttgagtacagcctacaaataatattcaatattatttgaatacatttgtatatattcattgtgtttatttataaaatactattataataataaagaacataattttaattattattggaaaaaaattagatttttggtggtttaacactaaatgtaaacttacttgaattttttttttcaaaaaaacaaattgctaagtgattttgattttcttttaagattccatttatatattcatgaatcttatgtataggaatatataaatataatatgatgatgctcttaaaaaaaacacggtttcatttcataagagtaaaagtgcttagttctaatttgttttgttggggccaatgattatgatttatcgggaagtgtgtatatatgatcacgtcactcatattaattatacgagtgaagtgacccctacacatggaaaagtgtgaaatttttgtcactttcaaattcctcatttatgctttaaaacgcccacacttggattagtatgcaattaggcaattatcacttgttgaatgacacaacacaacacaagctatgctattatatatgagttacatatgatgattaattgattactaattaataatattatgttacatcacaattcccattatataattccatacatgcaatagcactaagttaattttcttcatactaatgtattttactaattatttggataatgatgtaagagggaacaatatgttacttttatgggaaataacaccacgaagactaattttagaagcctcactcaacactcataggcatcaccctctcaaagactaagtttggtggcacacatatatacatacatacatataggattaatttttattttattataatataatataatatatataatatatattttattttttttttttaatataaattaaaatttaacataaacttacataaaaaataatataatacaaaatctaatctaatctaatataagtaaatttattacttcatctgaaagaaaccacaaaatttattgatgttcatgtttattattagagacaattatatttatgctcaaatataggcttatagctatgttgggggtcatcatttgactagctatgtaaagtgtaaacaatcaagttatatagtacaaagtatcccaaaaagaactttatcttttttgccttttcaaactgtaaattccattgagttatgttccctctaggaagcttcctagctaagtgtgccttttatcaaatttaggagggaaggagtgtggtgtaggtgggttttaattaaatattgtatttatatatgtttttaataatatttttcatttttggatatatattattgaaagaaaaaaagtaatataggatcatttgatatattgtagccttgtaggagggagtgtgtgtggatttaatatatgagaaattaattatatctaacaataaaattaatttaaattacatcttggcccttcaagccaaggaacaactaaatagagagtagtgttggtcgaaaagatacactttttcaattgagtatgatcagaagagtttaggtgtacttatattatcttatgtataaaatataaaaaaacactaagggatacctttaaggtgctaagcatattattaatataattcaataatatatttcacttattttgatttagtaaatatttccaactaaccatatttgttaactgttaactataatatattattcatagtaaaataacatcttaagacaatatggtccatataatatagtgaccttcttaatcacgtgcgtatcacgtgctcaactagtatat

SEQ ID NO: 21485 - DNA, 1337 bp, Cannabis sativa
gtaaaaatcctaattaccctattcaaaataataagttacaaaattcacttattttattatttatcattgaaaaaattattatattttaaaaaatgcatgtggcaacaacatgaagagtttatttatattcttatttctaaaacaaaaaatattaaagagattagtcaatagtcttactgtcttctcttacagcgactttctttattcatcagtaccatatttggtttttatttgctttattgtaatttttattcttcatcattatattcaacctgattcatgagaagtgcaactattttaggaagagtttaaatttagccattaatagcttctattaattaaaacttgagtggggattaatatttatccgtactaaactgtaatatatattacgtcaaaaaaaattatgatatacatatgttttttataaaaaattagtacatagtacttaattatattatatctacacaaaaatttatttacattttattaactatgcaaaatattattaattttatatttttaatcttcatatcactattgagtcaattcgccaacattacactccttttatatttattcttctttttcattaaacaatccattttcatgtgcttcttacattcaaagcaaattagtaaatcatctttattctttttttcttttgagtgatcactccctgttgtggcttcttcccaaagtttttcttgaattttatgaaccttttgtatttcttggagaagagtgtcaagtctttcatgtcactacacaagagctatcctcatcttcttcactaatggcacgaaaggaggaagacttgaatgaaatagtcctctttttcttctcaacttcctcttcttcttaagcactcatgaaaatttcatggttcatgagtgaactaattagttctcccaagggaagtgttgagagatctttgacttcttaaatggcaagtagcaactacctttccttgatagattttagtgagccttctcaaaattttggtcaccatatctttttgaataagtaccttgctaagagagttcaaaccattagtaatagtagtaaaacgagaatatattttagcattggtttcatccgctttcatcttaaagttctcatattgagtggaataaatttagattttagtttcttttatagcactagttccttgatgggtaacttcaagcattttccacatatcataagcggtagaggcttgttcaatatttttaaatatatctctatccaaagctagggccagccctaaacataggtgggctaggcccgcgcctagggcctactcattttaggggcccaaataaaaaaatatcttt

SEQ ID NO: 21486 - DNA, 3284 bp, Cannabis sativa
tttttccaacagttataaaccgtcttttaaagttcagtatttttatgacacccacatagccaacggttttaggaaccgttgtgaaataatataaatgacaattagaaactgttggaaaaagttaattttgtagtagtgagcttatagaagtcctagtccccgtcctcagtcaaaagatcaactacccaattatagccaaaggaaggattgccattggaatttggaaagaatctattcccgtgaggaacctaaggatcatcccagatacttttggacttcccatcaacaatcaacttacaggctcctttctgaatcgttgatctagccttaaccacattcttccaaaactaagagtctgaatccttgtaactatagtgaaagaagttattaccccgtaagtactttgcttttagaatcttacaatataacgagtcacttttggtcagtagattccaaacccatttggccagaatagcttgattcatctcttttcttttatggaagctcagaccacagacttagggaggcacaacttatcccgagccttgagatggatcccatgattttccttttcaaatctccaccagaagtccctcaccataccatcaattttagtcaccattcgactagagagctttgtggtttgcatagaatacattggcatggtgagacccacagacctgataagagtcgcccgaccagccttaaaaagagtttttacttttcacccttagagttttgaagaaaggttcttcattataaaattaaaattggcatttttttttgtctagaccaaaacagaggaagatccaagcatttaatattaccttctagctcattaatgcctagctagtctctaatgtctcttttcatcacattcggggtattgttactgaaaaagatcgaggttttgagtttgctgacatgttgtccagaccaagaattgaatttctccacacaatgctataaccatttagcctcttcaatatttgcacgccctaccaggataatatcgtttggaaagagaacataagatatggtagggcctcctactcaacttaacacctttgatatcacctttatcaacaatgctttctatgagtcttgaaagaattttagctgcccaaatgaaaaggtaaggagagagtagatcacccagacgaattccacaagatgggagaattttccctacacgacctccattgagacatacattaagggagaaagtcgagatacactgattgatccagttgcaaaatgtcgtcggggcctcaaaactttgcaacacattgtcaaggaagctccaactcagtttttcataggcattaacgagatcaatcttaatggcaaaaaaaccttccttccctttcttcctcttgaaagagtggattatttcctgtacaatcacattgttatcttggatgtttcttccagggataaacgccgcttaagttgggaaaatcggtcgaggaagaaccggtttaatcctattagcaataatcttagaaatgaccttgtacgtaacattgtagagagaaatatgtctaaactggctaaccctctgggattagtgacttttggggtcatcaccaagtttgtagcatcaaaacccttgtgcataataccagatgtgaagaaaccatatcacaaaaatcatcccccactttgtcctaatagtgtttatagaaaagcataaacatatcatctggatctagggctttatgactcctcatcgaaaaaagagtgtcttgaatctcaatatctgttgggagtttaaccagatcttcttactcttctgggataaggcgctcttgcattaggccgtccaacaaagacacttgagacaaaggatgcttggagaaaatcttgctccaaaaatcagtgaatttttctagtaatccactcatcattgttgtccattatacttttaatagcattacgtctacctctaatggtagccgacagaaagaaaaatttggaacttttgcgaataattaatcaaattaacaaagtatatagatatttgcagttgtaagagggtcaaattgaattaaattcatctacttgtgcgaataattcaaaaatcaaaaagtaaatgataattcaattgaacttttatacatcaaattgaattaaaataacatacaaaataccataaaaaaaatttaattataaaaataatatgcccaatcagtcagcatatacctgattaaaatttaatacataccaaaatctaaaaattatgaaaattatctcaaatcttttttcttaaatattccaataactagttaccttttaaataaaaaaaaaatatgtatagaaaatctatctatatacatttcgccattatcgaaaatactatttttaaaaataactttttagtcacaacataaaatttttataaatgatgaatatattacttttagctaccataaatattacttgtcactagctaaagagaagtatttagatacaagttatcactaaattaattttaatcacaatacctctactcaaattaaaatatttacaaatatataaataatattaaatctgaaaagacaaatacttatgtatttttaccccaatatttcctctaacaactatgtatttttagtgaaatttatcctaattctacctaaatttgggcaacatagcgactgtaatcggatgttcctaaaaattataaacatgcggaaaataataatcaaaacacgcaaaacaatacaaaacaaacgaaatgacattaacaattcaaaaattatccactcatccgaccgtagtacatgtatttacagaacctacatcattactgataaaaatttaagatattcaaactcactaacatgcatattctatccatccgaccgcactacaattaatagcagaacctacttcactatagataaatatctaagatattaaaactctactaaataatttttttaaaaggtttagtagttatacctttatccaataaagctagctacttttgcgctctttaatcaacaccaagaacccattcctaaaaaaaattaaaatatgcatcaatagttagttgaaatatttaattgatactaatcaatttacacaaattctataaacatattacataaacttatccaattaaacaataatatactaaaaatgagatcactcgaagaacccactgataaaagagaagaactttgttagaccaccgataaaattaattaactcctaaaaaatttaaacattaacattttttcaaaaaaaaaattaacataaaataaataataaataaa

SEQ ID NO: 21487 - DNA, 1681 bp, Cannabis sativa
tcatccctgaaaattaattctaattctggaaaactaattatcatgaatacaatttacatattcttaagatgtagacttgtatgatattgatctcgagtttctcggtcaatccaaatcaggtatcatacagaaaatacttatgactacaatctctaaattttaattgttgcattaacgttatgttttcaaaattttaattatttaaattattcaaattcaatggcgacaatgaaataaatttctattcatctcgcatcattgatctggccatgtaatgcatatatttttgttgctgaataggtgacgtacagtttaccattagttttatgcacgctcaaacaattaatgtagcaatacttatacattgatcagcctccaacacaagtgtaacaccctactagcttagggacgttactacgttttcttagttactatgctaacatttactaaccaaaaagtttagtgtaacattatgtttaaataaaacttttaaaatatttataaacttcactaaataaacataattaatactaaaaatttacaattttgagtatgtagaatctattttttcacaaacatacaaaatacaacatatcaaaaaatgtcaattacaagtcgattatatgtttatattttatactttttaactgagtctgttaactcacaaatatatttttcatgtgtaaataaaggaaaagcaaagactaaacaatagtgagtctagagctcaatgaaaattgtacatatctaaatagtcagagttggagtgttcagattttgggacgacatgagcatagtttttgttctttttgtttactgtttttgctttctattatttattttatctaattgctttattttgactcactttcgttggttaaaaacaagctaaatactcttctacataaaggatttgagagttagagtgctaaatgggtagagtcattattttgttgcattacaaatgtaagtaatcctaaatttaataggtttattttgggttttggaaggaatttattctaggtagtttaataattaagttagttaaaatatgtgttataaacaaaatcttaataaaatattttcaatatggacatcatctccatcctctatgtctaggtcttctattaatgtggaggccagtataaggaaaaatcaaactcctaagcaaaattaagttaattatggcactctgatgcgagtattggtacaaaatttgagtacttgtgtaggcgggattcaaatagacctgtcacctctatagtttgatgatggtgaatctagctaggcaaaagtgggaaagaacgatggctatgacaatgatgatgattacacaatacttgtagtagtagttttttttactatgtttgagataattatgtttatcttatcgtacttattaattttcttagtgggtattaatttaggtttatttacaccacatactaaaatctctaattttttttacttttgtactgtgtggtggaatttttttcaaacatactatgtaagtttcataatgtgtactgtgttaagtttttactgttattctaagattgttttttagttgtttcaatgttgtttttagttagtctgttttgtgttctactattattttataaaaatatattatttttgaaaaaaattccgtgtgacatgtatttttgtaaaaattaactca

SEQ ID NO: 21488 - DNA, 2966 bp, Cannabis sativa
aacttttgtcagcatttgtcagcacaaaacagcacaaaaatgaaaatgtgctgacaaaagtgacatttcttgtagtgcaataaaaagacaaaatgaaattccaataattccattcatatattttttaagaatagattgatagaagataagagtagtacgtctctttattgtttcacatggtaaagtggaaaacgtgttgattattggctttatcaactttatattaagcgacaaaaacattatgtatggtcgttatatttctatgaaatttctcaataattgattatatcttttttatttcatgaaaaagaaaaggaaattatgtatgttatttattgtttaggattccttaataatatatattgattaacttgtggcataaatacttaagtttaatttttagcggtaatataatacttaagttatatttttggaactagctgttaaatatcaagttattattcacgtatcattttcttattagtatatataatttaattttttgaaaaaaaattaaaaattcataacttggactaattaggaattgtcacgtagaaatttacttaacatttaataaccaagtacctgcagagttacagaaatataacttaagtgaatttaagtattttttttacaactgtgagttaaacttaagtatttataccgtatattactcatatatacatataaatttcaaataactccatcaattctactaagaagacagaaatcgcacacatgcatattaggcatatatataggaaaacttacaaaaatattagaatttgagttaatttttacaaaaatactgtcacaaggaaatcttttcaaaaatcccgtgtttttataaaacaccagtaaaatacaaagcagaatagctcaaaacaacagtagaacaactaaaaaacaccagtagaatactagtgaaaactcaacacagtatactgcagtatgaaacttaattataaaaaacacagttaaaaagtcaaaaataccgcctggcaatatttttataaaaaaatggcaaaagttaatataccatgtaaatttccctatatatatttatatacactatcgtgttttaaaatttatgaataatcattgtatcgaaattggggttaaaatgatcatcattacaaatttataattaagcgattttgtttttcgaactttgacatatactaaattatgttccgtgaacttttaaggtcgttaaaaatcctcctgaactatatcgatacggttggatttaagaaattttgtctaattttggtaagaaaagtttaacatgaataaaagttcaggggcatgatttggtacatgttaaaattcgaggggatgatttagtagtttggaaagcatatataatttagtacataggcaatcaaaaaattaataaaattgaatcaaatttggatagaaaattttaaattcaacaattttaataatttatgagaaatttttaactattaaaaaaattcaaatacaggtcaaaattcaagttattagccctttaattataatagttctatccttgtaattataatagctctattgtatatggatgatattgaaaggtattacatacatatatgatgatcattcaactatagctagtcaagaaaaagaacttttgatcattatttataagtcaatacattccgcgtacaataatattttattttattaaaggttccagcaaaacaaagcaggccctaggccaaagaacagacaccaagaacagaaactaaacaaaaacacagagaaaaaactaacaactagctaaaaaaaaaatgaaaataggctcagggagaacaaactaagaaaatacacgaccatatgcagaacacaattgcaagaactcgtcaaaactggccaaatcgatcaaaccaaacttgttgtttcgatttgcccattgagccaccgaatgtgccacaccattgaaggttctaggtatccaaaagatctcccgaaggttgaagtttcagccaaagacaagaattaatatttaacaataaggactaagattaattcattaataatataataaaatcgtattatatcaagattaactaattaataacaaggctagtactaaattaaattaattagtatatatacaaatttattaccatatatatagtatttacataaagatgagaatattgtttctcaatataattaaagaaatctacaactttttgtaaataaatttttttggacatataatgtaataaaatttgataatgtatatattgttataaatttcccttaattattactacatatattctaaacaaaagaaaattaataagaaacttttattattggcttacgtacactaagcttagatacacaatactaaaagaaattagtgaaaaacagtacaaattcttgatcacgaaaacaatctgaaaaaacaaaacccttcagatcatgaatgtatctttattacattttcttctaaataaatctgatcatccacatcatgagatatctaaaaaaaaaaaaagtataatattaaaatacacaaatcaccaaaaacattcattatataataatttatagtcatttaaaattataagttagaattatttttatttttaagtatcaaatctaacataacattattagctttcaagctctacttttcagttttctttcagcaataaaaattaatgatagataaaagaaaatgaaaaagtaaactaataaataaaaactgtttgattttaaactattggaaacttattggcatgtgacctaataaatttatacctttaactgaaaaatagaataattatatatacaaaacatttaccttcttgtcttcacaaaagagttattataggtcctatctgcaaaataaataaatacaaatataaatattaaataagaaacatttgaaaatttttatctcacaaaatattcttttgaaaagatttactaaaaaatgaatacttact

SEQ ID NO: 21489 - DNA, 2557 bp, Cannabis sativa
gagaggtgaaaacccttagggtgttgagcttgtcgcacttcaacatgaatggggatgtcccatgcagtttatagacaagcttcctctgttgtttgaccatccttagagctcttagcaaactttcctgatctacccttctaggtgagatgttagctactgctgcaagattgagcgaaatattcatattgttgatggaaatagcgataggattaataagtgcgacaattgggttaactggtgcacctaatgactggtgtgacaactggattgactagatcattaacatcattatgaattattacctcaagtttttatgtgggagggatgccttgattgtgtgtttggggttcatggggctcccgtcgacgtatgttgttttcatggtttttgactttgggtgatcgcgcaagcaaagccttgttcattcggtctcatagatctgctctttagacatggtattttcctccaagacgtataaaaactaatctccatttggtatacatgctaggagtgagactatcaaatcaaaatgacccggaatcatactccttaggggttctttaatcaatgcgacttctaagattgcgaacctcaccgtcttcttcctcgtgatacctttcttcgtttctaattctaccaatatcccatggcacccagaatcttgaatcttgttgctagtcttccttgaaaacagctggtccctttccatgtgtggcatctcaaggtggatggttcaagttgggagtgtctgaattatgctcgtctgtccattcctttatataatacttgcaaacacgttcaccatgacatctagtagtatgattacgtacctcattaatagtattttgtacattggtaagttcactcgacggggcaacgttctgagtatgtggcattcctgcgacttcagcctacaaggctcacatttattcttgtatagttgtatattgtgtggttgttaattgcaccatatccttagtggtgtgagtaggtgtaattgaagggaaatgaccaatagtctccataggagttgtcgtgtctcttgcggccccaaaaaattctaagaacaaatttagggggatggtggtagtctatctgattcctcccaaaatggcatcaacagcgaggttcacagccaaagttccacctttattgggtggaatagtgtctcgttgacgttgatattgacattgacattgttgaggtaattttggttcacaatcattgtgatcttcctccaaaattagagaataatgttggaatcaccctccttctagcgccaaatattgtcgaaggaaaatagacaacactaaatattgtgagtattcgagataagcaagaacactcttttgcaaaacaacaattattcacctaaaatggcaaatactcaaatataaatagtgagtgtgcaaataaagatagtgtaaaatgcaaaagcgagaaaattatagcagttcaggcagagcttggtctgcttagtctacttttgcaaaagtttgtgattcaatttaattcagattggatcactcgtttatatagaaagcaagtgatcctttggattacctattcggtcagacaggaccattacagtattaattacatttaattaagataaaaaatatttatagaataaatgaaagaatagatttcaccatttctaattaatactcgaacatatgcgactttagaccacacatattgattgtttatttttcttgaataccatatgaacttgcgggttctctggtgttactttcatataaggtctttgaaccacttaaaccctcttagggtaatttataacttaaaattcttgcgactatatgggtcgcttatggagcgttgccatactgacaacatagaactcgtgggttcaagaagagttgtcacatacgttagtcattcgaaccagacgcctgtaaggatgtggtctttatatgggtacacgagagacacttggtcatcgcataaaattgttaacacacgacttgtgctaactcttgatcctgcttctattttacaatggtgagcattatgtgcgactagacctggtctaagtcacaccttctcgcaagttcttatcatgcgagaatagctctagtggagtagttattcacatgtcatcattttccaactgggaattggatctatgtgtcaaatatatacgagactgtacttgtatttctaaacaaaaaattcacactataacaaattttaattattatattatatttttttgtttatttaattatattatattatgagaaatatatatattttttgtttgatattactattggaagaataatagccactgggcccgtcaataatactatgttagattgtaatttgataatacgtgtagcgacgggacccgttactattaatcaataataccgacatggtaatattgtcccaatatcgagggcaatagtaaccgatttcaccagtaataactaaatgagttgattttcttcttattactgactgattgcacccctttgttaatgctagggttgtacatcggtcggtttggacggtttatcctatatatttt

SEQ ID NO: 21490 - DNA, 6093 bp, Cannabis sativa
aacttatatattttaatataataatgcgtttagatgtattatgtaattagtaaataattaaaatacaaagtaaatttacgaagattttacaagatattttaaataattataacgtacatgaatataaaaaaaattagactaaacaattttttcgataaaaaaaatgaaatatttgttttaatccgatgttaaaaaaagaaaagtaaagaatttgttaatcttaattaagattagattagatctaatctaaccgccaaagtaatataatttccaatgctataaaaggagaaacctttctctccattttgacctcaattttccattcctatttccaaaattcagaaccagacctcaattccccaccgacctagatatggaaacagccatcaatagacagcgaattttactccaacatcttcaaccttcttcatcatcatcttctcctcgacctgaatcctctccaatttctgtaagtcctttaaattattttatttgattgtgtagtagctgatcatgataacgaaatttgtttagtttgtgataaagtcagttcctttcgtagaattcttgtgttgaatttgaaggaattcgttttggggttcattgaaaatttgattttggtgttgttgtgatttgtttcaggcatcggaatgtttggctggggatagtgctgcttaccagagaaatcatgtgtttggggatgatgtcgttattgtggcgtaagtctttcatttttcagatttggattagtttttatatcatctttttttgattttgggattaaaaatgtcttttttaaggatttttgaatgaaaaattgaagtttgttttggatgaaattagcattttctgggacttttgagaagttattaattcttaatttactcacagatatccaaaaaaatattttgtatgatattttttattattgattcatttttgcaacttttatatcaaattaagttaattttgcagagcttaccggactgcactttgcaaatccaaacgtggtgggtttaaggatacttaccctgatgatcttctggcccctgttttgaaggtttgtctttcttttttgttgtccttatttcatgatttttggttaagtgatgactagaattgtcaatgataattacccttgttttttgtatttatgattgggtgttaatttttaggcattgatagacaaaactaatttgaacccaagtgaagttggagatattgttgtgggttcagtcttggcaccgggttcccaacgggcaagtgaatgtagaatggctgcattctatgctggtttccctggtatgctttgtttgcaagtttgagctttattgagaatcacagatgagtttgttatttatggatatgtaatgtataatatgcagagactgtcccggttagaactgtgaacaggcagtgttcatctggacttcaggcagttgctgatgtagctgctgctataaaggcgggattttatgatattggtaatggttctttcgagtatcttgtagtagatcactttgccatggttaaatacatttacttaccgattttaattattttgataggtattggtgctggattggaatcaatgacggtgaatccaatggcgtgggaaggctcggtgaacccaaaagtaagctgatctttttctaattatcatcaacttagctgaactcctgctgttaggatcttacaatcttatactttgatggtgatggtaggtcaaaatctttgaacaagcccagaactgccttcttccaatggggattacctcagaaaatgttgcaagtcgctttggtgtgtcaagaaaggaacaagatcaggctgcagtaagttgaataaacatgtttggttttaaagttgcgatccaactgttaacacgtgttttattaatttcatatggtttatgttgttaggttgagtctcatagacgggctgctgcagctactgcttctggtaaatttaaggatgaaattatccccgtggctaccaaggtgtgttttccttactctttttcttaatattattgtattttgcggatatgattatcaatattattatcgtatgtggtccatttctcatttatgtgggctttgtagattgttgatcccaaaactggtcaggaggcaccagtcacaatatctgttgatgatggtattcgacccaatgcatcattggcagatttgggaaagctgaggcctgtgtttaagaaagatggaaccacaacagcaggttttttctctctcttgaattgatattttttactatctgaatattatcacttggtagaatccaataagtaacatctctgtttttactgttctaggcaattctagccaggtcagtgatggagctggagctgtcctcttaatgaagagaagtgtcgcagataaaaagggcatgccaattctcggtgtattcaggtatttgtccctggaagccattttattaatcgctcttacaatgaagtgtttgaaaaacaccatcaaatcccttctatatgagagagctaatcaatattttctcttttccctcgaacttttcgataccaagacttgaaactcttcaacttagattcatagacattatttgtgtaatggagagtttgatcgaactatttgctacctgttattttgtacacaagaaagatttgcttgatatgtcataaatttttcctcttgatgcatgatatacttttgtaacgtctgtagatatgttgagttagatgtttttctttctaaacatcttattttacctatgccatgcttcgtattctgtataatcacggactctctatgtttctttctcgactttcctcgagcacgtatttagctttgcattggttattttgtttggctatgcaggacttttgctgctgtaggtgtggatcctgccattatgggagttggccccgctgctgcaattcccgctgcagtgaaggctgctggtcttgaactggatgatattgatctctttgagataaatgaggtatttaaatatcctggcatttgatcttgtttctaatatgttattatctttttcatacattggagaaatgagtattacataatatgacattgattgcactaccgaacaggcatttgcttcccaatttgtgtattgccgtaataagctgggtcttgaccccgaaaaaatcaatgtgaacggaggtgcaatggccattggtcatcctttgggtgctacaggtaccatgagaaaatttcgagttacattaaagtttgattcatttttagctaagaatgaaatactcatgaaaatctttgctcctccgttgtaggtgctcgttgtgttgcaactttattgcatgagatgaaacgccgtggcaaagactgtcgttttggagttatctcaatgtgcataggtatgttctcgcaccctctttctcttagcgatttgttttatgcaggttgttggtgtggggtgtcattaatcgaaatgttaatgtagggacgggaatgggggcagcagctgtgttcgaaagggctgatcacggtgacgagctatgcaacgctagggttgctcggtagtcacttatcctctgctacgtttcttaccaataatgtgatgttgttggcctttgggatttgggaattaataagaaagtgttatcttttgtaagaatcttatcataaagaggatatgttttgccttttaacacttgagacattgaaacagttcaagtgtttattatagtattattattattatacttacattgtattgctgagtttaattttccaatccaaatgcctttttttactttgtttgtataaaatataacaaggacaaattgtaattgccaaattcttctcactctgacccattggattttggcccttattatttgacaaaaatattccttaagaaaaatagtaataaaatctcttttgaacttttacacataataagcctctcggaaacatttggggtatatttctatgagaaactttagcgttggaattatcagtctaaaaatgaatttaataaaaaaagacaatgaaaaaaattgaaaagacactaattttattacatatggaatttatttttgctaatgattagtattttttattaattttttatttttgctaatgattagtatttttgctaatgattagtatttttattacatattgaaaaaaaatattgattagtatttttgctaatgatgtattacatatggaattttattaattttttattttctttaagaaagaaaatatttaaaattttaaaaatttgaagaaaataaatacaaaatttaagaatattaaaatagaacaatctccaaattttaaaaataaaattaaaacataataatatatttacatttatatatttttaaattaatttaaaataaataatattaatatttatatatatttccagttataaataaatatttaaatttaatttttgacgataataatacatattcattagtgctaaattaatattcatatgctacttttttattagtaaatttacttaattttttaaataaaaaataaaaatttaataatatgcaccaataaagcgggaatcatactaggaatccctcctaaacaacaaaggtgggattcacacaaggaatccctccccaataacaaaatcagattcttgactagagactctagcgtttcgagctaacccattcgcaacaaaatcgagactacgctgaaaaaaaataactagctcttaaattgaaagagatatatgaatcggtctccaatcagcaggacaattaacggtcaaaaatttaacttaagtatttatctgtaatcaagaattaaatttaaatatttaaaattattaaagtattattatttgttatcttaaggcaaataataacaacttttgaattgaaaatacacaaatatttgcttgcatagatgatcgaaaacagtggagttttcttttacgaaaaaaagtatatgttgcttgagaagtatagaattggtttaaaataatctatcaacattattttcatgtcactctcaaataacttgtgtaacttgtattgtgtagcttaattcgattatagttatgtttgtttctatttctcatttatatttcaaaagaaaatgactataactagcttgagaaagctaaagccagacgcttcattctaaataagacttagtccaacgattagtttgacgaaaaatgttcggtcgaaaaatgcactatttccggtgactggtgagacctcagatggagtcacatggattcaaatgttgtattgtatgtaatgttcttacctcaattagcctaatctttaaaaacatagtgagaaagaaagaaagaaagaagatattgatggatatagaaagagaaggaaataatatatgaccttataactggtggtgtattttccagcttaaccaaaaacaaaatatgtcaaaagcacctattttcagcactacagaaaaaccatcgttgaaatataactaactttttaaccattttttaaatgaccaataaatcagtagtagcacagctgttgttgtagtgaaatttttgtaaaacttttgctccaatgtcataggagataagcaattgaatctgtgattaccttaaaaaccaaaaggcaacatatgatctttctgtgagacggcgctgaagtgagcaatttaagtaatggagcacttgcaaactgggcatgatgcttttcgggtgagccatggatcgatacactgttttaaatgcaaggagagagttattttttgtgtagtggaaaacgttaataagagtcgagtgtgagtccttacatctttgtgaaatttgtggaagcaagggagatgacgaatagtctccccgacaccgggactttctaagcaaattgcacaagcttcatcgaggttttcagtctgtcgaaaacaggagtcaatagctaaaacaatgacagttgtaagcaagataaaatacaccagaacatgaaagaccaacctgtactacggattgaggcaaagtattaatttgaatagctgaagcaccagcatgctgatgattttgctcgtcgagggctaataacatctcataatcatttctgaaccaaaataaagaatcaat

SEQ ID NO: 21491 - DNA, 6471 bp, Cannabis sativa
aatgtgtgtgcaagtggtaaaattttaataaaataaagttgaagagtaaaatggtggtattttagtaataaagtatgcattttgtatttttggtgtaaaaatttcaaaaataaaaaactaaattaatttaaatatgatttaagaaaaatctcattattctcaatttattaatgacgttcgaaactcgttgtcggaaaatcaaaatctgagttcaaaatttagggttaagatgaagataaaatgaaaattcaaaccttaaattggtattcagagtagagagaaaaaattgttttgtattgtttcaaattatgtgattgcaaaattaattatctaactccctctcacatatgagagaagggtatttataggtgcttttataaattaatttatattaataaactaatgtttaaattaaaattctttaataaaataaacttaaacttaaaaggttacatcaataaatatttagtttcggggatcccctgttacaaaaggtttagtgctgagtttgtatccaaaatactatacaatgccaaaacaccccctaacaactcggctatgcaagtcgaaaagattgatacgtacatttgttgaagaagactgttgactcatggctgccctagtttacccttacccttacctacaccacaaggtaccgttgagtcacaaagacccaacaagaaaagtaaaagcaataatcacatgtcaaccatacatataattccaaacaatcacagataagtagtacagataaccacatacgtataacattccaaaactacacaaatatttgtctaataagactaactataattgttacttcataaagtaaccctttctgtgttacctaatgaggcaaccctgataagcctaactgggcatctaatgtcactattgttacctaatgaggtaatcgataagtaagaaacctaacaacggtctcaatttagagtaatgactctttctcacaaatggtaattgtcgtatctttataatcgataataacaaatcacaaaagataataatcgtaacatatcttgacatgctaagtggtacaaatatactttcttacctcaaatccctatccgagtgtatcagccaacctgagtggagaatagacgacgatcccaggccctatatcacaataacaataaatcggtttataacttgatctaacccattttaggacttaaaactcaaaattggaagtttccctattgataaatagcgtgggaataccctaaatatatatataaaaaaaaacaccaaaaatgggattttggtaaaaatcccccccaaaaaaagtaggtcgtttctctaaacacggtaggccattttttgggacactactaggaaaaatggtagactgtttctagaaaacggtctgtcgttttctgctgcagagaacacaaaaccttaattctaactcaaaactacctcaaactttatatctctaaaatacgtatattttaagcctaataatcataatccaaccagcaatttcaacaacaagcatataaaataaaatacaccattattgagttaagcttgacttaaaagttcaaacctaactcaacttaggtttcaaccaacaaaaatcagttaaaataacattaaacacttaaaattaaactttcaaaaccaacataaaaaacccaaccctaacaacagctttaacacaagatcacactacaaaactaagcttaaaactgcaaaatacagagagaatgagtaggtatagtttaccttggaattctcttcaacaaacacttgaattacccacttaatttggtctgaaaactaagaagaaaacctagcttccctttgggttttttcttgagatgaagcaagaaagagagaaaagtgtgatgttttgttttataatttttattacttaagataatatcaacctagtattattcaacttatgaaataaattaacgctaatgataacctaaagaatcccactaataaaacaaaatccaaaaaagacataatcacccttaacttaaatctcaagtaatctctaacctaggggcaatttggtcataactagttaccctaaaatacctcgataaaacaaaaaccaaactaacccaataaaaccaacattaccacaaactaatatcgttatgattttttggccaccaatcgggtctccacggttgctggacctaaaaaatatttttatttctcaaataacttacatcatacccacacatttcaattgaatcttcgtaattgataaattacacttactcatttatttatattaaaatttctaattaccacgtaattagattagtaaaatcataatcatatccattatactcataacacacttattattctatattttttaaaatatgccttaattattaaaattaaatttttgggatattgcaactatcccctccttatagaaattttgtcctcaaaatttacctgaataactcgggatactgctcccgcatctgtgactctaatttccaattcgcctcttcaacctttttgttctttcacaacactttaactagcaaaattattttgttttgcaacactttctctttttctatccaatatctagataggttgttcttcataggataaatctgtctgaagctcaatgtcatcatagcttagaatatgtgtcgagtttgatacatacttcctgaacatggaaatatgaaatacgttatgaactttagacaaggtaggaggtaaatctagtcgatagtctacatgacctactctttctagaatttcaaaggggctgataaactatggcttagattccctttctttccaaatctttaaacccctttcaaaggtgatactcgaagaaaaacaaattccccaacctacaattcaatatccctgcacttcgggtcagcatagtttttctatctactttgtgaggtgagcatatgagcttagatcttttcaatagcctcactttgggtcctagatatcttctttcacaggcttcatcgcagtgaataggtgaccgacactttcttccatacaacatcttgtagggtgccatactgatggtgctctaatagttgttattatatgagagctcgattaggggtaaaaacttgttccaagaacctttaaaatctaccacacatgctcgcaacatgtcttccatatgtgaatagtcctctcaaactatccatctatatgaggatgaaatgttgtactgaatttcaattttttcccatggctctctaaaaactttcccagaatttgaaagtgaactttggatcacgatctgaaaagattaattttggagcaccgtgaattcaaactatttctttcatgtacaaatcagcatattgatctgtctatagtatatgttgtccgcactagcagatagtgtgctgacttagtaaacctatccactactacctaaatagagtcgtacattcctatagtctttggaaaacccaccacaaaatccataattatgtcctcccatttccattcgggaaccttcaaaggttgaagtaatctcgttggcctctaatgttctgcttctatttgttggcaggttagacactttgattcatactcaaccacaccacttttcattcctgaccactagtacaataccttaacatcatggtacatcttcgttgctcccaggtgtagtgaatacagagtagtatgaaactcatcaagtgtctcttgtctaatctgctcatctattggaacataaaccctatctttataccttagtagtccactcggtgacactgaaaaatctttcgttgtaccaaccgcgaacttctccctataatcaatctattctagattattctactgagcaatcttaatccttttaaacaaatctaattgtaatgtaacattggctgactttttgaccacaaactcaattctcgatctggtcatctcttcagctaactttagagagatttgtttcaattcatacacttaacaaggacctcttcgactcattgcatctgccaccatattcgccttcccagggtgttataggatttcagtcttagtccttgaccaattctaaccacctctgtgtaaagaaatatttcaagctcttgtggtctctatatatctcacacttctcaccatacaaatagtaacgccaaatcttcaaggcaaatactactactatcaactctaggtcatgagtatgataacactgttcataatcctttagttgcctagatgcataggcgttgacctttccagacttcattaaaacacaacctaaaccttgctttgaagcatcatagtaaaccacaaatttctcatcgctggttggtaaactcagcattggtgtcgtgatcaacttttctttcaactcttggaaactattctcacatttggcagtccaaacaaaattacaattcttttgggtcaacttagtcaggggcgtagaaatcttgacaaacccttccacaaatcttttgtaatatccaattaaccctaagaaacttctaacctcagtagcagacttggcccgtggctaatccttaactgcttcaatctttgtcggatccactaatactccatctttgcttactgcatgccctaagaaactcacttggggcaaccaaaactcatatttcttaaacttaatgctctcaaagacgttgtaataccatctaaagatgtctctcatgtacctctgctgaatcatagtagataaggatttcatccataactacaattacaaagttgtccaagaaatccttaaatactcggttaatccaatccataactgtcgttggagcattagtcaatctgaaggacatcatcagaaattcatagtgcccataccaggtacaaaaagtagtcttggaatatccttttgttgaatcctcaactattgataactagattgaagatcagtgttagagaagacagtcttcccttcaagttgatcaaatagatcgactatccttggtaaaggatacttagccttcactgttaacttattcaactcttgatagtcaatgcacattcttagcgacctatcctttttcttcacaaatagaatcagtgctccccaaggcgatgtgctagatcttgtaaagtacaaattaagcatattctgcaactgaatgtttaactcttttaattctgtcagtgccatttgatatgggacctttgaaattggctcaacctccgatatcaattcaatctaaaagtcaatctctctccttagtggcaaccccgataattcttttggaaacacatccaagaattcacacattacacataccttctctggtcccatccaacacttctttcatagtatccatcacattaaccagatacctaatacatccatcctataacaaatcctttactttaagtgtcgatatccttgtaattcaagatccatgaacttcccctataaaaacaaatggagtcttgccctctggttcaaaagttaccatctatcttttgcaatctacggtagcattgtacttatcattcctagaatcacatcaaaatcttgcaagttagcttgatcaaatctactgactattctcgatcctccacaaacactggtaaggatttaatccacctctaagagatagctatctctccagtaggtaacaaagtaccaaaaccacttggcaacatatcacatggccgactaagaccatcaattactctacttgatatatatgaatgtgtagcaccaaaatcaattagagcagcaaatacaatgccatcaataaagatttgacttgtcactatcgaaggctagcattagcatctacccacactgagaaaacacccgagcaggaaccatggaatcttttctcttggtatctgtcttctatagttgcagatagtctcttttcaggtggcctactaccccacactgaaagcaggctttaacttgacatttgccctgatggtgtcttttgcatcttggacatttaggataggtcctcaagttctcattcctgccttggtgaaaacttggttaccctgaaaccttttgtttggatccataattggtggatcactttgcttcctttttctgtcattggggtcagaacccctactcaaaccagtactaaaaggtggcttccaagcatcttttctcatattactgcattcctaaatctgttcttcagcccccttagtagtgagagctaattctattatatgagaataagaccttacaacccctagttgcttagcagccacaaccacatcttgggcaatgtgctcttctaagcctctaatgaacttggattttcttatagctttagtggccacctcatcaaaatcaaccttggtcaatctatcaaatttggtagcatattttgttaatgtcatgctaccctgaactagctatatcattacatcggaagggactgatattgaacttgaattagatataataaacttaccgtaattgttggaatttattttaccgggatcttagatctactcaca

SEQ ID NO: 21492 - DNA, 3651 bp, Cannabis sativa
taaatatcaataaaatacaaaaaattactctaaaaactacagtactgtcctgaagacccaaacattctaagtctaatcatcttgatatgtacaatcttcatccaactctagacttattctagtttcgttgtagctcctacttacacatgaacataataactgtgagtcgacagactgagtaaaaaaaatataatcataaacataaacatatatgcagatcataatgaggcacccatacacctaattacaatattatcccgtgtctaacacgtacaagtctagaacattcatatgataaagtctagcatatatctatttatatatcgatgtaattctatatatatttcaccaatatctcgatatgctaatttaatggcttattggtttgcctaacatatatctattggtatcttggtgcaactctatgtacacctcaccgataccctaatacgttattctgacgacaactgacatgcacactaaacatgtgtacatatatgaaactattatactaatcttacattgattatgaatgcaagtataccaattactttgagtagaaactgttgctcgacgatttaaggccctaagtcacaatttacgtagaaatagcaagtgacatactatatcactttttgagaacctaaactcggacctaaaagttattttatcgatatatagaatgacaataccctaaatatcaataaaatacaaaaaaactactctaaaaaattgaaaaaataggttaaccaaaataccaaacggtagactgttttctgaggttctgcctaggaaaacggttcactatttctagaaaaatggtagactgtttttctacacaaaacacccaaatttcgatttcaaacttaattctaacccaaattgatccaaaccttccataacatctaaaaacatcatataagacataaaccacctaacaattgcattgataaagccctgtatcaaaactagccattgttgagcaagctttgagtttaaaaactcaaaattgctcaacacatggctcaaccacaaaaagaagctccaaaacaagaacaatcaattaaaaagcaccccaaaatagttcacggctcacccaaacacaaacagaaactcaaatttaaacttgcacactcaacctaaccttaaatcataaaattcaaagagaaaccagagttaggcttaccttgagataacactagctaccaaaaattcttgcagaaccaattaagcttgaattaatctgaaatgggtgaaaatttcctggttttgtctttggtggttctagccgaataagagaaaagcaaaaagagaaaggcctattttgtgatttttgtgtaaaatgtttaaaagaatagcttagtatattaaatctaattcaacattttaccatctagaataacctagtgattactatgaatttcactaactccccaaaaataaataaaaatgcaaatgacccatttgccctttacttactaagaagtaatataataaattaggggtgaaatagtctgaaaccataaccccgcttaaattcgacattccaaatatttatctatcacgccatgctaattctaagatacttaatcatatctgggtgactctaatgataaaatcatcgcattccactgttacaggacataaaatataaaaaccgtaaaatttcataaataacttctataacacatctgaaattcaaatatatctccataattaaaaaaatattttactaaggtttattcctgaaaataagccataatttaattcttacgatttaactttttgcgatcattgtaaaaaaaaaattgtattttatttttatttattttttaaagtcaagatgaacttgcaatttgataatatttatttccttgtataattgaagtgattaagcctatttttaattgatttactacctcacgaatattctaaattgaaaaagcctttgtttttcttcactaaaatcgttttacatgctacaacctaatataccatatcaaacattaatatgttatcgaaatttgtttatcatattttgtttataaaatttgtacatgccttatttcaaaattgcaattgggttttattgatttttttattgatgtaggaattaatttgaccaaaataccctacaccaacaatcaattatcagttttaaaccaaggtcaaatctaacctttttcctttttgactttaccaagtcaaccgagtctaaaacgactccgttttgtctaaaacaaaaccctagatcaagaaccttctcgatcacttctcttaggttctagcttcaattttgaaaccctagcagagagtttcttgtccaaagaaactcgatgctcaaacctaatccttaccagaaacactaaacacacataagcacgagatcagatctaaattgatctgatctttttcacaaaatatagaaaaaacaccagaaattttttcccgagattcacccaaattggctatgtccctgttaagctgttccccagatttggtagctcaattccactatcaatcaattgttctgagttacaaggatgagattccaagtcataggtatgaattatgattggtaatctctagttttaattacatattttgtatttaatccctttctctctctgtttgctaagtcttttttttttttctgtgtatgtacgagcctctatccttcttcttcaaggatcacaactcctggatcttgaagaatctcctcaaccttagctcgattggattgtgtagtaggtatatgtatagctgaaggtctctgatttctttagatgttagtaacagaaattagttaggtggagattgatgacctgtcataatccattctaactaattcctgttaaggattaagatgtagaaggccaaaggccacaatagtaatttgcatgtgtaattttccttgtaaatacttgatgaacaaatatcagtgtaagtagaggtttattcagcaattgtcttcttcattccatgtgaaacaagtgggattattttaagaggactgttaccgtcaatttttgtactcgaaaattcatgtcggaatactttttgtcaaattatatatttttcatagcggtgttcattacagttacgacattatttttgtaaatttttgaaaaagattcgaatagtttacagtgacgaaaaatagatttgaagtttttttaacacgcgtggtagactgaaatatcagaaactctattttcggtattgttttattattcagaattttttaaaaatttacaagaataatattataactataatgaacaccgccttgaaaaaaaaaattgaaaaaaataaatattctagtatgtgttttcgagtacgaaaattgattaaaaaattataatagaaaattgtaattagcactcatcatattttaaattctggttatcttcatactttaaaagaccttacagatttggaaggaagtaagatgatgatttgcgttgttatttttagtaaaatttataattcatatgtattacttcacctcacttcatattcatgcaagtaaccttaagattgttgcattgacaaatttcaaggaggctttatatacttagaggagagactcgtatgcttcaaaatcatgacatcaatttttttgtcctagcaattttatatggttttatt

SEQ ID NO: 21493 - DNA, 12874 bp, Cannabis sativa
ctcactaatattactattctaatacactcatttttgtcactaaaataagtatagataaaatagtaataagagaaaaataaaatgacaaaataattttccactctctctaaaatcttatgctttttggttttctaaatggtcctatttatagagcctaattagtcccataactagccaaatgtgtactgtttagtgggaaagaaaatgactcctaaaatgagcaaaggacatgagtcatttttattgttcgttgcagagaaaatggataacgtcgcatgtgtatggcttcataactcagaatatgggtcctttcagacacatatttcctaagcattgaaatatggaacacattgtgaactccagataaagcagggagtaaagttagccagtaggctacttgacctaccctttctaatatctcaaacggaccaataaatctaggacttagtttccctttctttcaaaacctctgaatccccttcattggtgatactcaaaggaaaacaaagtccccaacctggccctcaatatctctacacttcgtatcaacgtagcttttctatctacttcgtgacgcaagcatacgagcttgaatattctcaatggcctcactagttctttggactgcatcaagtccaagatatctccgttcactggctttattccaacgaatgggtgaacgacacttccttccatataacatttcatacggtgccataccaatagtactctgataactattgttctatgaaaactcaattagaggaaggtacttgttccaagaaccttcaaagtccaatacacacgcccgtagcatatcctcaagtatctaaatagtcctctcagactgaccatcagtctgaggatgaaaagttgtaatgaactttaatttagtacccattgctcgttgtaaactctcccagaacttggatgtaaactttggatctcaatctgagatgatcgattttggagcaccatgaagtcgagttatctccttaatatatagattagcatactgacctactatatacgtagtccacgctggtaaaaagtgtggtgactttgtatatcgatctacaattacccaaatggaatcataggaccttgttgtccttggtaaaccaaccacaaagtccatggttatatcctcctccccccatttctactactcaggaatcatcttcagaggttgaagtaatctcgctggtctctgatgctctgccttgacttgctgacaagttaggtattttgacacgtattctactatatcacctttcatatctagccaccagtaaagtgctttcacataatcttggtatatttttgttgttctcgagtgtaatgaatatggggtggtatgagactcatccaaaatctcctatttgataccatcatcagatggaacacaaactctgcctttatatctgaataacctatctgatgaaattgaaaaatcctttgttgatccaacttcaaacttctctttatactcttataacacaggatcactttgttgggttatcttaattctctctaacaaatcagactgtaacgtaatgttagctaatttcccaattacaaacacgattcttactctggtcatatctttagccgattccagtgagatcttcttcaattcatatacttgccccagaccttttcgacttagagcatctactaccacatttgcttttccaagatggtagaggatctcgcagtcatagtccttaaccaattccaaccatcgtcgttgtctcatattcaaatctttctacgtgaaaaagtatttgaggcttttgtgatccatgtaaatatcgcattttttgccatacagataatgacgtcaaactttcaaagcgaaaacctctatgccaattcaatgttgtgtgtaagataccgttgttcatactccttcaattgcctagatggataggcaataactttaccagaatgcattaaaatgcaacctaaccattgttttaaagtgtcacattaaatcatgaatttctcatcactgattggcaaggttagtactggtgcagtaattaacgtttgcttcaactcttggaagttgttttcgcacttgtcagtccaaacaaatttataattctttcgagttaatctcattaagggcgtagaaatcttggcaaatccttcaacaaatcttcaatagtatcctgctaatcccaggaaacttctaacttcggtagcagacttgggtcgaggccaatcccaaaccgcttcaatcttcaccaggtccactaggatgccatacttgtttacaacatgccctaagaaacttacttggggtagccaaaactcacatttcttaaatttagcatagagatcatgctcccgaagacattgtaacaccatcaaaagatgtttcccatgtgcctcttctgaattagagaagacaagaatgtcatcaatgaagacaattacaaaatcatctaaaaagtcgttgaatactcagttcattgggtccatatatgtcgctcgggcattagctaatccaaaggacatgactaggaattcacagtgcccgtaccgggtatgaaaagctatcttgggaatatcctcctcttgagtcctcaattggtgataaccagatcgaagatcgatcttggagaagacggtttttccttgtatttgatcagacagatcatctatccttggcaaaggatacttgttcttcactgtcaacttattcaactcctggtagtcaatacacatccttaatgttctgaccttcttctttacaaacaaaactagtgcaccctaaggtgaggtacttggtctagtgaatttcaaatccaacataccttgtaattgaaccttcaattcttttaattttgtatgtgtcattcgatacggagctttagatacaggttctacccccgatatcaattcaatttcaaagtcgatctcccattttggtggtaaccccagtagctcctttggaaagacatccagatactctcgtaccactggaacatgttcaggtgctattggtacttccctcgtgatatccaccacactagctagataaccgacacatccatcccacaacaaatttcttgccttaagcgccgagattattaaatttggtatccttgaacccttcccacaattacaaatgggtcctcaccctcaggttcgaaagttactatttttctcttccaattaatggttgcgctatacattgttagccagtccattcccaatataacatcaaaatattctagatttagttcaattaaatctactgagaattttctaccctccacatgcactggaagggatctaacccacttgctgtagacaactaattctctagtagatagtaaggtaccaaaactactcagtaaaacgtcactaggcttattaaaatttccaatccctctacttgacacataagaatgcatagcactagaatcaattaaagcagtcaacataataccatcaatagaaatctgacctgtcacagtagaaggacaagcatcagcctctgcttcggtcaaaacaaatacctgagcaggaaccagagtatcatctttcttttgttctaatctttacaattgtggcctactaccctacacaagaagcaggctcgagcttgacatttgccctgatggcgtctcttgcacctcgggcactctggataggttctccagtttttgtttccacctcggcagaaactttgattaccttgaaatttctagttaggactcatagatgatgagtcattaggtcttttcttgtgatcattagggttagcacccctaccagaaccaacattgggcgattgtttctacgaatctcttctcatattatttttcttttgaatttgatctttttcactctcaacagcaagggctagctcaaacacctgagcataagttcaaacaaccccaattacttagcagctacaattacatcctgagcgatatgctcttccaacccctgaatgaacttggcctttctagcagccttagtggccacttcatcaaaggcaaacttttccaaccgatcaaacttggtggcatactccgtcactgtcatactaccttgagttagctgtatgaactcttctgccttagcagcatggatagattcattgtagtactttttgtaaaataaggttcgaaaagcatcccatgtcatgttattcagatcccaccgaatttgggcatcttgtcgcagcatgaagataacacatccaactcaatcgttacactcaacacgcataaagttaaagatggatgttatcatgctcatccattgctccgccttaagtaaatcaggaccaccttcaaacactggtagattctgcttcctgaacttctcatacaatggcttcagacaatttcccacatcctatggcactaccaaaggtgctagaggattaggattggcattgggagcaggctgagcttgttgctctctcaactctctgatctgatcaccttgctgtcggatggtctcttgcatcgtagcatacatttgctcccaattttgtggtagtggaggatttgcatcctcaccaccaaccccaagcccagaaagctcgcgtttaaccctaccagatcgcctcgggtgaataatctaatacacctacaacaataactttccaacatttagaatcttccaaaccaaaaccaatgctaataagcctttccatacatacatgtgcataatatctactatctataacttatcatactattctaataactcatacatttcaggtaagtagataattcaagcaattaacaaataatctaataatcaactgacaattaacacttactataccatgagtcgaatgagtcttcacaaccaatgttcatatccaaccagtcttccagatctttaaaccttgatcgctctgataccatattgtaacgccctaaacagtaaaggcaccacgtgtgtgcttttattaattagtttataataagaaactaatggtttaagaaaaatgtggtttaattaaaacttctagtaatactatttaaattataacttaatttttcattcaagatacaagtagttttgaggatccccttaattacaacctttttacaaaataatacataatagtttattacaaaatgttgtcacattttcaaaatacatcaaaagaaggatcttgtccactgtgagccaaaacatggcgattgatatatacattgtcgggagacttctaacgctggtccagtttcccctttctcttacctggaccacagagcacatgtgagtcacaaagactcagcaagaaaagcaagtaaaaagtaaacatcacacatagcataacattttattaacacagagcatacattaccatatataacttatgcaattattcaaaacataatcaaataataatcaattatttgccttatcaaacaaaccgacttggatgctttataatacatccttacccctcgttaccaacgagttccttatgtcaccatcgttgcttaattaagcaactaataagtaagaaatctatcagcaaattcaaaagggagtaataactcattcttaacaacggtaattaccgtatctttacctcgatcataatcgagtcacaaacgataataatcgtgtcttatttaatatgctaagcagtacaattgactattcttacctcaatccaaaaatcaagtgtacagccctgagtggaatgatgctcgacgacgaaaacaaaaacttggtaaataactagcttagaaatagcctaaacatcgaaaataaacataaaactaagttctagaataacacctcaaacgtacaatcggtttcagaaaaattaggattcccctactggtcaaccggttgaccagttccacactgccctgtagaaccggttaaccaattcctgctgcagaaacgggaaaaccctaattttgcattaaaaccaaaccaaagctcctccataactaatgaaatttccaaaacatttcaacaatctaaaaacaacataatcaagcattcaaaactcagaattattttaaaattgcaaattcaccatagttgagtgaatttttgcgttcttgaactcagttcactcaattcaaaacctaacagctatagaatcaccaaattcacactcaaataaactttaattaaacctaagaacatgctctaaactcaaacaaattccacaaacccaaaatcaagcaaaactccccaacaaaactcaacctaaagctagaaatcaagaagcataagagaagagcttacgccaaagcttgaatagctcctaaaattggttacttcaactagagaatgattgaattgaggtgggaattctctggtttttagctaggtttttaggctttcgaaagaagagggagagagaaagagttatgtgatgtttttttttctagatttttggttttatcatcaaattatcattataaaactaaatacataaatccaataaattaaacttattaagtctaaggttattaaaatactatataagacaaaaaggatgtgatttaataaatgaccattttaccctccaacacacacttaagttaaaatataacttaggggtattttggtcaaaccaacaactcaacattataaactagtctggtacaattacaatatatcttattctattgccgtcatgacatctttgaccaattcatcaactttccactattgtcgaacacgaaaatattttatttcaaaaatagtacatataatactcacatgttttgataaaatcttcgtaattaataaattacgtttaattattcatttactcaacatctctaattaactcataatttgcttaagtaaaattataatcttactctaatattcatataattacatatttgataaaatatgtttaatttaacaaaatcataatttttaggatattacagacacagaccttaggtacgaaatgctaaaggctcttcgataaaggacaccatcgatcatgagctaatggggggcttggtattgtatccttctggatactgctctgtcttgaggtaattcttcttttgttaaatacttgataattagattcatccaactggatatttgttcattagtcgcaatcttcgctttgggtgtgatgcttggctcagtgagatactcaacaggaactacccccaatttttctacttcgcaatccgaagctaacttggccaagtagtctgcatgaacactcttttctcgaagaatttgctcaatcttgtagcttttgaattcctgcagtaattctcttgcagtcgagacataggtagccatcttttctcctcgactctgatattctcccaacacctggttcacaacaaactgggagtcactaaatacctctatcttgtaagcccctactgttttggctaaccttaagcccgctagcaaggcttcatactcagcatcattgttggaggtgagaaacatgaacctcaaggtagcctagagtctcactctgtgaggagatatcattgctactcctgcccaagatccattctcgtttgacgcgccatagacatttacctttcaagtaggaataaccagatcatgcaaattagcgacggcttccatttcgttgcactcaaccataaaatatgcaagggcttgtcctttaattgagatgcgaggaatgaactgtatgtcgaactagctgagttccatcgcccatttgaggagcctcctagaggcttctagtttctgaaggacttgctgagtgggtggttagtgaaaactttgattgtatgtgcttgaaaatatggcctcatctttctcaatgcaattaggaggcagaaagccaacttttcgatcaaagggtatcgaattttagcccctatcattcgtttacaaacataatacactgggtgcgaactttttcttcctctcggactaatacagcactaactgcattcttggagatggctaagtataactacaggtcctccccgtgaacttgtttggacaacactggtggtttggccatatattctttcaattttttgaatgcttcctcgtattccttagaccattcaaattttttacttttcttcaagatattgaattatggaatacacttgttagtagatcggatgatgaaggggctcagggcggctatcttcccggtcaggctctatacctctttatgctttgtcggggagggtatatctagcaaaacttgtattttctttgaattttcctctattcctcactaacttactataaatcccagaaacttccccaatttgacgccaaaggtgcattttttgggattgagcttcatcccatacttccttaccacctcaaaacattcttgagatcttctgaatgaccctttcttgtctgggatttgactaacatatcatccacatagacttccatattccttcccaagagattttttaacatccggtttaccatacgctgatatgtgcctcctgcattctttagtccgaagggcatgactaagtagcagtatacccccttgtcggttctgaagctggtacattcatggtccaccacatgcattttgatttggttttaacctgagtatgcgtccataaaagataatagcttgaaaccgaaggtgaaatccaccatttggtcaatcctgggcaacgggaagcagtcttttggacaggcttaatttagatctgtaaaatcaatgcatattcgtcatgtcccatttggttttggtactaaaactggattagccagccattctgggtagtatacgtctcggataaaagtcttcgatagaattttatccacctccttttctaaagcttatgacttgaccgaatccaagggatgcctctttttctgtaccggaagcatatccttgttaacgttcaaaacatgagtgatgacatgtgggcttattctaatcatatctccatggcaccatacaaagacatctactgattctttgatggtggttatgatttcactcctttcgtcaaggcccaatccttttcctaagcggataactttggttggatcttgatcacaaatccccacctcctaaatctcctccataggctctaatgcagtttcagagccaatgcgaggacccaattcatcttgactttcgggcaagagtactttgccggtttcctgaaccataaaaatggcttgctgcacagccacactataacactttcttgcttctccttgattcccacagatagttcctattcccgtcacttgtgtggggaacttgaggcataggttcctgatggaagtaatagctctgaaaactaccaaagtcgaacgtcccaaattgcattgtaagttgtggggcagtctacaccacaaaggtgcagtacttgaacgtgcttagggggggtgtccgaacacaaagttatagggagtcttacctttcccatgggaacaagggtggtcccattaaatcccgtgagttgtgaatcacttggggaaaaatcttgcttagtgagtctgatggcaatgaaaacatccttgaacagaagattcgtcgaacttctattatctacaaaaaattcgggtgacaaccttgttggcaataggagtcaaaggatcataatgcgaaaaacgtaccggcttcgcatcttccaccgtaaaggtaatgggttggtccataagtcatggtctttgcgctgggagctggttaacttcccatatttctccattgtggtccaaggcttttggcataacgcttcaactcattccatgtggttcctccgatgtgtggtcctcctaagatcatggccacccttccatttggccttatgggatgtccaggtgtcgggtgatggagaagaactcccggaggtacttgtacatctgggacctaagttggtgatcctagaggcgttggtgttccgacttgtccaccattcatgtgtggcaatctatctttgatccatagatacatgtgatctagcctaattaggctctcaattttgcctttcaaattcatacactcattggtagtatggccaatgtcatagtgatattcacactttttgttaggatctctccgggagctatctccgtatagaggagaaggtctccggtaatatgtgttttgccacgtggccaagtatactcgttcctgagtgtccactaaattggtatactatgtaactgagaggtgtaacctttcttttgtctctcgcgtgatcccttttgaagatctcttgctttgagagatttgaagagcatctgccgcacttgctgtaggaggcacaaactgagtaggatattgcgaacttactctacaggtcaggttacccctagtgctcagaaactagactgagctggagcgagagcaagattgtgagtatatcccagtgttgctaaaaattgtacactaggtactttgcttgtttgaggcgcaactggaagagtaactctcaaaaattatgttcttggggcataccctagcccaccggtcgggtaatatcctctaaaagttgttatctgtgtttcttctaagttgatgtacttttgaaccctcttctgagagtcctgaaggcttggggccccttcatgctggagctcattttagaaaggggttcccgtccgaattctcgcttgaagtaacgccaactcttgtccatcatccactttaattttggaagcttcttccttaaatatttttattaagtttttcagggtctcaaccggtaattgcttgatgttggtcaaagcgccaactttaaggtttattttcctggctgctacgaattgccttcaaaaactgacttgtagtttgttccaacaatctatagattttgtatctaacttcgtaaactactcctcagcggaccctcctaacgtcagcaagaaacacaaacactttgcatcatgactgactgtcattacacggttaaaccgtgacaagtggtcactagggtttgtgtcttctacatacatcatcattttaggcattttaaaattctttgggagctctgcttcaaagatgtttctagcgcaaggctcccagtcctcacaatcagactccaaatcatcttccttttgtcttcaagaaactttagctatatccttttggaggatagcgagctcagccaggattccctcatttagagcgccttccaagactggtattgcttgtttcttcttctccaataaattcctaagatcaccgtgcttggcgttgagtttttttctcaaatcaataggagagtttttgcggtttttccccctctctcccagttcttggtgcacgatacgctctttcggtctcccggtcctaagggccagcattctcccatgggatcttgcccctctacagaccttttccttttgggaaattagagcgaactttttgaaaatcctgagccttcttgtttctttcggggaaggatgtggggttcatctttggagagccttatgagaaatatcgaatagggcttggctctcaatttttatgcctttgattgtttggcaaaaactcttctctcattttgtttggtccaatgggcttggcgttcggatgcacgtggatgtccgctatttccatagccttttgcatatcgaccattatttcttgtatcttcctgttctgttctttttgttctgccaactcggcttcatggtcgacggctttctgccttaaggccatgagtttggtgtaactgacatcagcataggcgtcgtactcttcttggttttcatcatattctatatcatttgttccgtcttgctcttctacctccgtatctattcgcgaagctacttcatcatctagcccactaggaccttgaggtggacgagaatgacttgcatgggttctagtctccaccatcgtaatggaaattcccttttaatatgtgtatattattatttatctgtagggccttcaacagctctcaatgaaagcaccaaaatgttgaccgaaattttcggcaactaattaatgaaataaattattagaatagagttaatgcaagtaattttacgtggttgggacattaatgagccttagtccacgagttactgatatttaatatagtggtgtttctttgcagggaatatttttcatcattttttcgatcctcttcttagaatgtgattaggggtatttatagccttatgaagaaagctaaaaggtcactattgtcgtaactgttcacctttggttagcacaagttcctagattcgaacaatagggtatgcatatctacacagtaggttacatagaatttctctaggtgttaggtgagaaaagcctttatccttcctgattggcgtgacaattcattatgtatcgtcactaaccccctcggttaaggtgtaatcgccgaagattaggcttgatgtgtctgacatgtctttccagattcatctgcagatgcttcctccatgccgcaggggccttgggcccagtctacaaagctttacctagctcctggagaagaacaaatgtctctccctccagacctagctgtatctcccggagggacctcttggataatccggacaagtttgcttaagacattcttaaacactttctgatcttaagacttatttgccacgtggtcaatcataagactaccacgtatattgagacaaaaacagggcaacaatagagcactgtgtcaatttaatgttgaacacttgaaaaataatgtgtaacattattcttcctagacaataaactatatttctccacatttaagagatcatttagctcattatctcaatttgagtagataaagttgttcattggaccacatccaatatttttaggcctatccagattcgatttaattatacattgaatgttagattttaccaaccgatccgatctaattattttcaattatccaatcgatctaacatccattagatgttagattgg

SEQ ID NO: 21494 - DNA, 2409 bp, Cannabis sativa
cttgtactagtttttttaaattcttttccacatacttttttttttatattcacatgatgtcgtttttagttccactagtttttaaatgacatttctagtatgatcgttatgtcgttcatatataatacttgtattcttttctttttcttttctttcttgctaatctcaaaaatttcataccaaagaaaaattaaaataccaagttcatggtagagagtgtcgagacagattctacctcctcaatcaatgttatgtttcagtgatcgtttcactatgtaattttttcccattatttcaaatagttttttgaagacgatgaggaaggaaaaaaaaaatcaacttatctttaattttataattattattagatttaaaactagttttatttaattttcaaattaaaaaaaaaaaaacaactaaatgatttgaaccaatctagaactaacatactcttttggcacttaaagtattgaaaataagattgagtgtagaattacctttaattagatgttattattactattttttttattaattaatgttatgtgtgtaatgattttaaattatgaagagttttgttaaaaatatttcaataattaagtgtaaaaaaataaattactaaaagatccttacttagtaacaaattgtaaaaagttaattaataattattagtaatttaattttaaatataattatttttaattaagattttataagaaaataaaatatcaaattactatcaggttacaagttaattattattttttatttttaatttataaattaatcacaaccatttaatagtaattcaatcgttaaaaataaatgtaaccatggtaattacatatttgatgtaatcattgaaacattctccataaatctataatgctcttactaagcataataagaatacattatataagagttttgtcacgacctgaaccctagaccgtggtaaatatgtaatatccataacttgggtggtcaaatgtcacactttgacctttgtattgtagaaaaatattacttataaatgattctttaatttatattgtaaaatacatatttaaaaataatgaaatagctcctatatttataaagtaaacattagtaacaaaattaggacgactcattaatataaaagaacaataatatcccttcagttatgtagtcacaaagtagatagattaataagccaataaacacaataataatatctaacattcaccactcctcatttctaactagcacagtaactattttaagtcatacaactcatccattcaagcttaaatacaaaatcaattttcaataaaaggtttaataaatagaataagactaaactaatagtgacttccttccttaacgtaccatcctcatctactagtatcaaactgagttcttggtataggaaaaaataaggggtgagttcataaagcccagtaggaaaacaactaatatcaaatgacccttggtttaataaaaaattctgtatggttagcttttaaaaataaaacatctcatcactattatcaaaatgtacaaacaaaatagatagaccacaattaatcacaaaatcaagcttcaaatgcatatcacaccatcattcactaaacccctaactctcaataccaatcataacacaacaacattccaaactgggtattcgggaaccactaaaatgctggggctgaaactgtactaatcataatgtataatttggaactatcattatataggtaaatatgtcaattatactaagaatatgcaaggaagcatcctatctagtttactaaattagaggaggaatatttttaataatttatattttattttattacactcccacactaataatttatattttattttattacactcccacactaaatcaaacacaataattttaattgtaatattcgttgtaacaataaaccaaacaaggttatcaattctctttctctttctccttactatacttaaagcactcccaacaacttctctattctattatttaaaatacataatcaaaactctactttttctattttacaacatttttatattacaccatacatcaatttttttaaaatacattatcaaaatcctacttttttaaattttattatattttattcattttaaatatacaatattaatatatacacacattctcgtaaaaaataattattaaaatctaaaataattaataaaatatatttagagtaatgaataatattttataaatgtaagacatgaaaagtgtatttttaagaaactttaaaataaaaaaagagtttagaacatctatttaacatattttttagtacaattttttaaaaattttaaagcttttcggttgtaagtgctcttatttcattacctttactcattatttattaatcaatt

SEQ ID NO: 21495 - DNA, 4152 bp, Cannabis sativa
  modified_base (3303)..(3306): a, c, t, g, unknown or other
cccaaactcgaatctcatccctgacccgaacacagactcgaaccctaaggctaacctcttaaaccccgaccaagactaaatcatttgcattacgctccaatcaatcttacaaatttcaattatttgagttgtagtttctatttgttcacttagtttatattatatgcaaatttattcttgtattggactaagtttgacctctttcttattttcttttctaaaagatatgtgtgcttgagtatgaaatagtttggacaagatgatccaatctgtaagtgatactcagaagacaaaaacagagaagtatgcgcaacaaaaattcaagtgacttatttatcattggacaaaattgacctaaagatttacacatttcatctttgagagcctatatggacatttaatcaaatattataaggttaaaaaatatacaattttgagactttggcgcaaaaatctaaagatacacaaatttgtctctaattgtaaggaactaagccatatttgaagggccaacaagtgctcttccataggctgccggaagtgataagaatttctttgcttttcctacataagcacgctttgtgaagttatcatagtcattggcttcaatggcatccaatatctgtctatatagcaacaaagatgcccacactggccatctactcgctgagctgagatcagccacacccttctctgcctcgtcgaagaacattcttgctcgctttatctgtcccttcatgaaactccgccacttgtcagttactttcccacgaaagatgtcctcgtccgaaagaccagcacgtgcaagttcatcttgtggaagatacactctacctctcctagcactgtcaccatcaccaacattgtcactcaagtcagaaatagcaactatgtaatggaaagaaacaatgtgagtagactcaaacttcaatgtgatgctaaaacaggaacaaagaggattcagtagtgtcaaataaaaagtgagaaggtgtaacaagaatcttactcttctccaacatctctgagtatgttagtgagctgattagctatcccaagagccaatgcagcattgtaaacgctctcagttgaagcctttgattcgggtgctattcccattacaggaacactcataagtccaacagtcccagcaacatagtagcagtaaaggtatagttcatcgaaattcatgtatcttgattttatcaagtctaacctcattccttctatcatgtccctaaagggctgtacaaacaaagatcaaatttgttaagtaaaagacacattttcactagctaaaatgcaagcaaatgatgcatctttctatacctgtatatcgacaggaaacttcgagactgtatgagaaagagcagcatcatacatatcaaacgggcgaccttcgtacagatcagtcaatcttttttcccatctgtcaagagcctttggtgtgatgtgcgaagcatttggcccgtcaacgagctcatcagtccttctgcaccacactgcagagagaagagaatacattattcaattacctcaaataaaagagagtaaagactcaacagcagcaagccaggcacatcatgtttggatcattcattcattttgttaagtagaaaaataaataaataaaatggggttctagatctgaatcaagcctaaattgtgtaaggaacatggccaaatatcaaactcaataacggtgcattgcttttctcttcatatgataaaagtacttagcttcataaaaaaagcatggttagtgattgtgttattgtcatccagaaatgcaagggtgatattaatcatacatttatatagaaaatttacacagcaaaattaatagacaaaagtcaagagcaagcaaaatgtaaggaatgaacaaatcatacgaaccataaattgcccaaacagctttcctccgttctggtgtcatgagtaaagtgcctgagaatcaagaatcaaataaatctcaattagtagtttgctaattacatttctctcaccatattcaaaatattctcaactaaagaaggattaaattaaactaaaggtggtacttttctatttaattcattttttaaaagcattggaatgaataaacaaatacataaagttaaccattaatgatatactactttccgaccttaaactagaaaacaaaacccctttttatcataaacataaacaaagagataataatatgaaaacaaatcacaaccaatcaaaaacacaagaagaaagaaatgtaatgaaatgaaaaaaaagtacccagataaaaagtcttggcatactcagcacagacttcaccacatcgttcataagcttcattcaagagatcccaattggttgtcccatcaattttaatcaagtccaaagatttctctttgggctttttacgttctctaaccaaagccgcttgtttcaacaccacttcataaactttctcctccgaagatcttgctgggtttgcgatagtacccgataaagccaaagacccacttgagaaactcagcttagaacacattttggacctctttggtccaccatttttggctgcaaagctaaccagagagttaccattctctttaagacaaacctgtacccaaagaacagcagccatttttgaaaaacacagaaaatgtgttcagtttctcacttgaatgaaaaagaaaaagaaaaagtgtcctttgatttggcaaaaacgagtggacactttttttttctctctcaattatttttggtttattgcaaatttactgagctttataaagaaaaggataacagctgagtctgactcaccaaaatatgtggacaagactcataatttcattattattattatttttattattcgagataacttaatttaagacttattaagttgtattggaattattatttaagctgtttattataagtattaaaaaattgactcaaaaaaattattgacaaatttaaatctgacttggagactcaatgaatatatttttttaataaaaattatttttaaaatgtttgaatatcattaaaaaacaatttaaaatattttcttaaaaatctttttggaaaagctataaatcataacttctttcaaaagaatttttaaattaaaaaaagacttattaacttatagaagttaaaccaaatagaaccgtaacttattagcttataatataaagagtaaagtttagaattagtcttaaaattatttgttttaaggggaattattaaaagtttaaaatgattaaggattaagttaagagtgcagtttaaaattagtcaaataataataataataataannnnaataataataataataatgaagagtgtgaaggaaattattgagtggaggaaaatgagagtaagaggcataaggaagatagggaggaagatagaatagagtatagtggtgagagtcaattaagaattacagccacaactagcaagggactatagaaacacccaaccccaaaacttttatatggtattcaattttttagaaaatttataaaaattaaataaaattatttggtgcatgttgtgaattgtgaagtgtgaacttagaatttattagttgtttaatttttttttttttttttattttagttaagacttttgaatgtccataaatataatataggaagcttttatagtctgtggtggacccagcggcatttttgagtgggggcaaaaaaaaattttgttaaatataatttttatagaaataaaaaaatatatgtaaattttaaaacaaaaattgtgaagttagtagggataaaaattaaattatgtaggataaaaatcaaaaatttaaattttatgggaataaaataaaaatatatagaggtataataagaaattattaattttatggggtgaaaactaaaatattttaaaatatatacatacaaaaattaatttataagaagttgaaggagggcaaatgatcccataagtgttcaaaaaatttacgaattgttcaatctgaattaagtgttcaaaccaaactaaataaatcgatgaaaattatagcctgaaataatgcattgaaaatttgaaccgtccaataagtatattaagtggtttacaaattattctaaaccgctcaatcaacctgaataaattgaaataaactagtttatatatttt

SEQ ID NO: 21496 - DNA, 1966 bp, Cannabis sativa
cgaatactgtactgcggtcggatgagtggaaaatattttttattgtttgttttgtattaatctaggttcattttactatttttgtatgtttaaaattttcggaaacgttcaattatagttgttatgctgccgaaattttggtagaattagaataaaactttaaatttttaggatacatcgtaaacccttagtattagattaaatgaactaaattgcatttttttgttattagaattctcgaaatggataaagattggatgaatgtgcatagattaccagtgacatataggcaaggtgttgatcattttttggagttttgtgcgaagaatgcgaaaaaccctaattttgttcattgtccttgcgttaagtgtgctaacttggagcgtatgaaaattgtcaagataaaagaacatttgtttaagaatggtatagacaagaattataaggtttggtatcaccacggggaagatattagagtttcgggggtggggccatctaagaaggataagtgttttaatttggattacgaagatgatcacattgcagaattatttgatgatgcgcaacatgaatccaatgttgatccagagaaatttataagagttttaaaagattctgaaaagcctatttatcctaattgtaataggtttactaaattatcaacacttattaggttatacaatatcaaagccaaacacgggtggagtgatacgagtttcacaaacttgctagctttcttaggagagttgttacctgaaggtaatgaaattcctttgtctttttatgaggcaaagaagacactttgttcgttaggcatgcaatatgagaaaatacatgcatgtcctaaagattgcattctttatcgaaagagatttgtggatgcaatagcgtgtccgacgtgcggtgagtccaggtggcaaaagaaaaagaattctgatgaggtaaaggatggtatccctacaaaagtgttatggtacttaccgcccatacctcgtttggttcggttctttcgaaatgcagattacgctaaaaatttgacttggcatgtaaccaatagagtggaagatggttatatgaggcaccctgccgactcacccgcttggaaaacagtagatgatagatggcctgactttgctagtgaacctaggaatattcgtcttggtctttctgccgacggtattaatccacataccttcccttagtagcaagtatagttcctggccagttttgcttgtgatgtataatttgccgccttggttggttatgaagaggaagttcactatgctgacacttttaatatcaggtccttcacaacctggtaataatattgatgtctatttagctcctcttgttgatgatttaggtctactgtggcacgacggtgtttcagcatatgatgcgtataggaatgaaacattcaatcttaaagcaatattgttatggaccatcaatgattttcatgcatatgggaatctttctggatatagtgtgaaagggtacaaggcatgtcctatctgtgaggagaaaacttgctctcaatatttaaaacattccagaaagattagctatatgggacatcgaaagtttttgccaaccgaccacgttttccgaacttggaagaaagcatttgacggaaaacaagaatttgaattggctccgccacctttacacggggaggaattgaatgaaaagttgaacaaagttcaattcaaacttggaaagagaaaagttgcccctaaaaaaagaaaaggtagggggaacaaacgtgaagaggttacaagtgaacctgcagggccatggaagaagaaatcaatattttttgagcttgagtactggaagtatttggttttacgtcataacttagatgtgatgcatatcgagaaaaacgtgtgagacagtttgattaataccttgttcaatgttcatggtcggagcaaagacgggattaaatctcgtctagatttga

SEQ ID NO: 21497 - DNA, 4306 bp, Cannabis sativa
atataggagagcttacatgaagaataacctaatatccctaaaaaataggaactatgaagtattatttacataataaaataataaatagtaaataggttaattatcccagaagaataagagaatagttgttctcccctattttgtgggtttttgaagccaaaattgtagcttggcttgttgtcccaaataaaggctatgcaccaagtgcctgccaggcaggtgcaggctggctgccccttcactagctagaggctagccggcctatgctaagtatagggccagccaggggtccgaccagacccctcaagatggtcgtttcgtcgtctcttcatctttctttagtactgaaacttcacgtcaatggatgtgttgagtagatgatttggccttcctgttgacaagttatactccacgtggcaatgatcttgcccacttggacatgccatgtcacgtgggtaaaaaataaggataacactcatgaagtgtccaaaaagaagattaccaaattagaaaggggaacttcagagctaaaggagtagcttcaataggcacatcaagagaagcaggatgaagaggctaaaacaactgaggcgttagagcaagcctttgtgtactctatatacactatttggtagcataacaagtccgcgatggacctcttagatgctaaagatagtgatttgttgatgccttagattcttgcactagccaaagcggataaggctaaggaagcagttcagacaacggaggtggttgatcttggaattaccctctcggagggtgagaacttagatgacacaacttttctagttcttaattctctttttgtgacaagttctgccatcctagaggtctcactcgatgctcaacctgatggtatccagccagttctgccacctgatggtacccaccgtagctgtatctacccaaccttgtcttactgtaacacctttatgtatttttgtattatttgggagataaaggtctcccttttgagtgtgcggagacaatattttatatccttgcccagggttttaaagtacgtagtaatacttaattaactctttagatatttgcattttaatttatagagtttgttaggttttaatgtttctagtcttgtgaggttctggttccaaaagcctgaacctttagattttttattaaatgcttagacataaatatgtttcttattaccaagtcatttgtactccttggaatatggatccaacgacatgaaccttggtaatttaataacttgtcttaaagaaaaatgtttgtaatggatatttacttaaagatgttgaaactttaataacttattaacctgagctaattaactattttagaattaaacctctcttgataaatatctcttattttttaggacctcttgtaacttaaatatttaattaacgtgaattaattactctatttaggatacctgaaggtgttagactaagttaacttgagttaaccatgaagcctgaacttcttttttaagttaacctgagttaactacacaatatattagattgatttcaagtacaataacacagtggcttacttcaagttttttgaagtttcaatttcaggcaatacttcctactcttatacagagtttgaatgttaaatcgtcttcaattataataaggtagtggcttacttccagttccctggggtttcgatttcaggcaatacttcctactcttacagttattataaatttaactggaaaataggtataactttataatgatataatgtatgctacccccaagtgattaagagttgagacttttaatcacttgttatgtgatagaactttgaaataccaaatatgaaatgaaaaaaatcttcttttattcaaattattcctatcctaaggaatacatggaagttaaatattataataaaaagtaaagaagaacaaaaaggaagctaattactcccaatttattgatagtacaggcataggtgatcagcattccatgctcttgggattcttgttccatataatctcttcaaatggtaagttccatcaccaattttgtctataacttcatacggaccttcccagtttggtcttaagagccccacttcgggctcctaagagccccattttgggctcctaagagccccacttggagcttctttttaagggtagtctttaagatcttgttgatagcttccacttgtctgtttgcttgaggtctggccacagccaaaaagcttttgatgattctatgtttggcacaaaagtcaagtgaattgatcagtgtcaaattgctttccattatcaaacactattttatgtggaagtccatatctacacacaatatttttaatcacaaagtccaaggcttttttagaagttactacgttcatgggttcagcttccacccatttagtgaagtagtcaacagcgatgatggtgaatttgactcctccatttctagattgaaatgatctcactaggtctattccccaaaaatgtaaaaggccaaggactattcatgagggttatctccatgggaggggctcttggaaccattgaataacgctggcattgctcacatttatggaaatactcagtgctatccttcttcatggtaaaccaaaaataaccttgatgaatgattttcttagaaagattgggtccagatgtgaaatccccgcaaaatccttcatgtatttcatgcatgatagcgcttatcttagttctagttatgcaccttagatacggcattgatagtcctcttctgtacaacttcccatccatgatcacgtatttgggggcctagtattgtatcttttgtaaagtagctctatcctccaagagtgtacctatttctagatacttgagtattggggccatcaaggaggttgagtgatcgatggctgacacccccagtgtctcctacttggagcaatcagatgtgcgatggggacaagttcgtatttctctacttccagatttgttgctaatttcgccaacctgtctgcataggcattcgtatccatggggatttgcttcacagaatagtgcttaaaatgttataatagctccatggtttttgctatgcaacaagccagtttttctccttttgtttggtactcccaaaacacttggctgacaatagactgtgaatttctgtagagttcaatgtttttggcaccaacctctttttctagttataaactgatgatcatagcctcgtgctctgcttcattgttggaagcttcaaattcaaaacgaagtgcactttggagatggagttgttgaggaaagattagaatgattccgggcttggaaccttttttcgtttgatgatccatctacatataatttctagacttctctctctgggactgacgtttcaggatcttcattcgtccctatgcactccacaatgaagtcaattaaagcctgacctttgattgaaattctgggctaatattttatattgaattggctcaattacattgcccactttagaagtctttgtgatgatgccagcttctataacacttgacggagagggtggttggtcagtacccttatggtgtgagcctaaaagtatggtcttaacttccatgaagaaattagtaagaaaagggaaagtttctcgatcacaagatgtctagactctacacccagcagtcttttgcttatgtaatatactagaagttgtacctttccttcttctcgcactaagatggcacttatagcatgatctgacactttcaggtacaggaacaacagctcttcatcaacttgtttggatagtattagagccttcgttagatgttctttcagttgttggaaggctactttatattctattgtccactcaaacttgctatttgcttgaagcacgttgaagaacggtatgcacttatctatggatttggagacaaatctgctaagtgctgctattctcccagtcaatttctaaacatccttttgttttctaggcgagagcatgtctagaagagttttgatcttctctgggtttgcctcaaagcctcaagaactaactatgaaacccaagaatttccctaaggaaactttgaaagtgcatttccttgggttcagcttcactctgtactcccagatgatggcaaatgcttcttctagatcttcgtgatggctctcgaaggttttttatttcccagcatgtcaccgacataaacccccatattattccccagaacatttttaaacattctgaaagtgcaactagtagactttaatgattcaagttaccaagttgtacaactttagattgattgatttcaagat

SEQ ID NO: 21498 - DNA, 15178 bp, Cannabis sativa
atacgatttttcaatcataaaaccccatttacattatatgatatgtaatcaaatcccacgatttttgggatgattgctgtaaaattatttcggtcaactttgtaattcaatgtccactatgtaattataaatagtgacaaagaagatcaaaaaaagggatgaaaaaactcataagaaaggggccctgaaacacactcagaaatttgaataagtttgactcgtggactatgcaaaattttaactacaaaaccacgtaaaaaaccctgtgttcatattatttatttttctatagctcttactttttcagtgtgatatcatcattgtgaggctcaaatttagttaacgaaaatcatcgttaacagacatctaagtgaaggcattgtatataatagagattacatattacaatgaccgatatgtaattaaattgtctttatcaaatattttgttcacaataaatacctaattcatatcatgaaaatgatcaataatagattgaattgagtctttagtaatcatgaactcctatccatgttattaatttctttgattaactcgttaacgtttttcaaagaagatgatttatacaatttatattttgagaatctaataatatggatggctggaaacatgatctattattatagaatcctaactttcctaatggatcgaatgttggttacctttaattgttaattctagaactaaaaagttgtgcataaatttatgtaggatcaaaattatactttcactagtgaattactggtactaatggataaagaaataatttaaagggtaaaacagtaatttgactaaaactaattacaaactaacaaaaggagagttaatcactataattgattatatcaatggatacaacaataaaattgagtaaatataattgtataattaccaagagttcaattctatatttatagtggagtaatcatgaaattaataagcatgattatttgatttatgagattcaataagtaatctagtttattggagttttagaattataggtccatagttcccgaatagctaccttaaaatattttcaagggtagggatagaagttatatattgatgttcagaaaaatcttttttgatttgtcaaaatagtcattatttattttgtaataaataatatatgtttaaatttattaacaaaataaatttgaaaaaagataaaagttatctaaaaaaagacaccaccattgtcttgttaagaaaagtgtggcgtcacctatactgtgttaagacacagtgataagcgtctctaatgtaaggatgtccccattaaatttgtttttgggttaactaattaattaaaaatataaatatttatttgaatttaaatttaaatgttagttaaaaatatttaagttggttgagatattcattcaaagtagttgagagattctctccaagtggttgagagactccctcaatcggttattagatcttttttaaacctaaacatctaattcaaaatgaatatgtatatcatattggtttataaatatttattcatattattaattattatttaataattttttttaattatatatttatttaaataaaatatttattagttttaatttatatataccgtaaagccgaattggcatcaagttttctctctagctcctggttcttgcagctatctcaggtgttgccatggcaaaaacaagatcgaaggtgcaaggaagacaaccaacaacaatgaaggcgtggaaagttcgtaagaaaggccctgtttctactgtagatgtccagaaaacaaaatcaatggatgcagtgattggtatcaaacgggttaatttcacagatgtggagagtgcagatgaaggtgatagtcgactcaatgaacttggagggaaatgctcaatgtaacaataacatctcacaaggtaagacttccattcctccaatactgcgatctggtaatattcaacgaaattcggataattcatttaagaatttggagaaggaaagagtgaggataactaaggaggatatagaagaggaggttaacttctggttttcagtaatcgtttgctatgttcttggagctaacactcccctgtctgttatccatggttttgcaagacgtgtatggaaagataagattgataaggttcgaatgatttcatatggagtattcttgatccgtttttacactatagaagacatggataatgtgctaaaaagagggtatatctttttgaataagcgccctgttgtatgaaaccatggaacccagatggtaactttaaaaaggagaatcttaatgtgattccaatttgggttccattggaaaatctggagttgaaatattggggagagaagtcattattgaaaatcataaggcaattggggaagccaataatggtggactcaattaccaaagagagaagtaagctaatgtatccgagaattctcattgaagtctcgacacatcaggacttatcagatcttattgattttgaagatgaacatggctacaacacatcttttggagtcaattatgagtggaaaccagtggtttgtgagcattgtaaaggaatggggcacaaaacgattgactgtaggaaaaagacatgtggtacacaagaatgaattgtgaagaaaatggttgaagaaccaactgggaagggcaaagctcagactaatgtagtagattctgatggtttttagccagttcaaaagggttggagaccaaaagaaactagagaaactgagctgactataacagacaattcatattagatcttggaagaggcagagatggagagtatagatgagggtaatactttgggaaagagaaagaaagataacataggaggagggggagatcctcatctttccaatgaatagaattctaagttggaacgtctggggaatcaacaaccaacaaaagcaacacatagttagacagtttatcagcagtaataaggttgatttggttggtatcctcaacacgagagttaaggctcctaaactaggagacttgtacttaaatgtttttcaaggatgatgctttacaacaaatatatcgtggcataaagggggtagaattgtgattgcgtggaattcaagcagttataatgtaagtattctaaagtattcaagtcaactcatgcatgtgggggttgaaataatcgataggaagcattggtttttactcagttttgtgtatgcttataatgatgaagaggggaggaaagaattatggaaagacttactgcagatagcaagatcaaatggttagtcatggaggacttcaatgacatccttgccaaggaggaaagaatagggaataaagtgaaatgtcatccttcacaggattttattgactgtgtttctagctgtcatttggaggatgcaatgcttgtggaaactttttcacttggagcaataaacagcagggagaagaaagaatcttttcgaagattgacagggctatggcaaatcagagttgaatggataaattcactaatgctgaggttaatttcatgaatgaaggattaatggaccatagactagctgttttgacattccataataaagtttctagtggcaagaagccatttaggtactttcaaatgtggaatacacacccagaatatgcagcccaagttgcagaatcttggaatcaataaacatagggactcaaaatgtttcaagtggtgacaaagcttaaaagattaataggggtactaaaggagttgaacaagtaggctttttcagacattcaaatgtctacacagtaggcaaaagatgaactatctgagatgcaggaaaagttgcagcaagatcctttaaatcacctgctgcagcatgatgaacttgaagctaggaagaaatatacagtcttgttgaagaattatcaatcttatctgcaacaaaaagcaaagattacatggattaaaaatggagatgaaaacacagtcttattccatgcgagtattaaagccagaaggagacaaaatagggtgccttcaaaggtctgctaggcactaaaatggaggggagaagaattgtgttaacaagctcagtgcaatcaggggctgtgctttcagatcagcttgctagttggctctgttagagttacacttatgaagaaataaatgctgctatttttggaataccaggaatcaaggcaccaggtcttgatgggtattcaagctactttttcaggataattgagagctcatttaaggagatgtatgtgctgtagttcagaattttttgcacccgggacagattttaaaggagattaattccattgtgcttactctcattccaaaagttaaatgcccaaatactgtatgtgatttcagacctattgcttgttgcaatgtgatttacaaaattgcaactaagttgatatgttcaatgttgaaacatgtgctccctaaattagtggctcagaatcagggtggatttgtacaggaaagatttataacacataatattatgatttaagatttaattaggcactatgggaggaaaaacacaaagcctagttgcatgatcaaattggatttgccaaaggcgtatgataccattgattgggagttcttagaagagatgttgatggcctttaaattttctatcaattcataaagcttattatgaattgtgttaggactcctaggttctcactgatgttcaatggaacaatgcacgggttttttgagtctaagaaaggtttaaggtagggggatccactatctcctatcctttttgtgcttggaatggagtacctctcaaggatcatgaaccagattgggcaaaagcaagaatttcaattccatgacagatatgaaaacttacgactcaatcccttgagctttgcagatgatgtactcctcttctgtcatggtgatttcaagagtgtgtacttcatgttgcaaggtttaaaactgttttctctcacatctgggcttcaaccgaacccaacaaaatttgcattttactttagtggtatgcaagaggctgaaattcagagaataatggatgcaactgggttcagcaggcaataccttcctttcaaatagttgggcataccaatatgtgctaaaaagatatttggaaaagaatgtgttttactagcagagaagatggcagacagaatcaagacctagagttctagaaacatctcatttgcagggagagcgattctaatcaactcggtattactttttatacacacttatttgagtcaaattatgaagttaccaaagaaagtaatttcgaaactggaagcaatctgtcgagctttcctatggaagggtcaaagtatgatgcaaggggcagggctcatagcgtgggagaaggtgtgtttatcacaaaagtaagggggagttggctttagaagaatattagaatggaaccaagctgccctcttcaagtatgtgtgggcaatagcaaataaagaaaataatttgtgggttggatgggtacatattgtgtatcttaaacagagtgataggtgggaatataaattaccacaaaatgccagttggtactggaaacaggtggtagctgctaaggatcaaatcaaaagcaaaagggatattcaggtcattgctaggactcgatatgtcattgctgaagggtataactcctttgccctgtacaacagaaagttaattgggataaggaggtatggggaaggctcaatgtacctaagcattgttacattttatggctagcaatacagaaccggttgagaacaaaggcaagactgaaagtttataacattgtcaaggaagataggtgtatattgtgtaatatgcagcaagaaactgtccagcatttgttttttgaatgctctgtgtctgctgatttcctgctggatgtaaaaagatggctgcaatggggtgctcaagccgtatcaatgaagcagctggtgcattggataggaagagccaagctgtccaagtttaggagaaaagtaatttcagctgcaatagcatgtttggtatacaacatttgggaagcaagaaatgaccatatatggaacatgaagatggtgagagcacaagagattatgcagaaaacaaaagagatagtgaagacaagagtaatggtgctttggccgaaagagatcaagaggaaagataaacattggttttccaagttataagatataggtggattgaataaatgtaaataattgtatgcatattacacgaattttataggtcctctcatgaggatgctatgtgtttgtacaaatcaattttatgagcaatacaactaactaattcataaaaaaaaaattatatatatcttataaatgtaaaaatagatatgtgttattttttaggtctaaaaaggattaatctattaaaatcttttttccatcatcatcactctcagagttcttactcatgtgttgagaataactaagaacattatatacaaacaatgtcctactagcccatactagtccttgtgtgttgtcaaaaattcagaagactacagtgtgagttcttcgtcatcaaaggacataacttacgaaaagaataatggtacactgataggcttcaagaggtaacttttatttttatatatttaatttcaaattttatgtatatacatatgatgatcctaaagatgtggtatgatgataattagaatatattattctactgcgtacctgatttattattacaaaaccaacatatggtaccaaagtaattccattatgtaaatatattaaatgttgtctaggttttatgtatttatatatatgtgtgatacatatataaatggatagttatgatattgtgaatgtgtgtgagatagtgaatcgttatttatatggtaaaaattgggtgtaagctttgcttttttttttttgttagaaaaatattctaagccattaatggggcataggtattttttatgtaattttatttttttgaaaaattatttttatgttataatgctttcgacacggagctcgggttcgaattgaaccccgactgtgctatgcctcaactgcacgtgtgtcgggtcctcgttgactctggttgttactcgacgacaatcatcacaagccatcactgtctaggatttcgtgccctttcactaaaatgccttgaaggtagttgacatgcaccggtctttcttgtgattcgatcccaggatccgttgccagtctcttctccacccaaacgaggccatggtagttcgatcaatattcgacgagttgaaggaccttcaaggctgttatttcctgacctgggacgaagcatgtaaggcatgcatggacctttcagtcctttctagggctgtacataaattttggtaaaccgtccaacccgaataacccgcccaaactaaaccgatataacccgatgaaaaatataaatagaaaaatcctacgaaaatataacccgcccaatctttatattgggcgggttgaagataatactaacccgcccaaataacccaaactaaccagaccaatcctattaagatggttttttttatatatatatttatatgtttttattatatatatttatatatcatataatttatttgactattttaaaaatataaattttaaactaatatatttttttggtggttgatttgaatattaaattcaatctatatatatatatttgtctcattattacaattaactaaaatataattattcttcgtaaaaataaaaaaaaactattagtggtcggtttggacgggttaacctgaccaaacagacaaatttcattgggcgggttactattttttcttttctttattgggcaggttgcacttagatttttgtaacccgacctttacattgggttgaataaaatatagcataaaccgaccaaatcgaccgacgtacacccctagtcctttctacgttttagaccatactaggtcttggtttttctttacccgctaggtgttgttgctgtcataattcttgtggacttccatggccatggtggctctccagatttggtggaccaaggtggcctgacccgaaaaactataatatatatgtatgtatatatttgtatatatatagtacatatatagtgcatatacagtgtatatacactataaattatcattaattattttagtcaataaaaatattatcttgtggaatatttatttttcaaatttgattagaatattaaataaatagtaatttggttttagatttgaaattcaaatttaaattttctaaccactttaattaattaagacaatttttgtcttaatgccttaaaataataaaacatattttatttttttaatcaaagacaaaataataataatattgttttaaataaaatattaatttcagaataagttaatcaaaaatattttaattaatttatgggcttcaaaaattatcttaaataaaagagtttatttaagaataattaattaaaagtgttttaattaatttaaaaactttcgatgatcctacaaatttataaaattttccttgaagtgaatcaaggtgatatagcttagtttttgtaatttaatttctatttttctaagagttgtaaaattagaaatacccaaaattttatctagttcatcattaatttttatttactgctttttaaatacgtgttgattaatagttaattaataacttaatgatgcattagtgaataacaacccataaataaaaaccccacatagtttaattatcatgtatcttatagtagaagcatgatatattaaaatattgtcctatgtgtttatatctttactatttttaaaattaaaagcatgtaaactttctaagattaatttagaatgaacttggtaattttaaattactctaattaatttaaaagggtttaaaattttatttaataattgtgatggaaaatttatttataatttaagaattctattataaataaattaatcataattattaaaagggttactatgtattagttatgagaattaataaattaaacacattaatcttaaaaagtgagtgggagaaagagtacatgtcaatgtaacttacggtcttcattaattgtcaacactaaaggagtatagactgacctcacgacgactttattttcatctccctaagaaatttatttttctatactgttgttcaggttcatctcttgaataagataggaggaagtgatgtgttttaatgcgatactaaccctaagacagagttacaaagttaacttgtgaaatcttaaataatgggccacactcacaaagtgtaactaagctttcatgtggttagttgttaaattgaccaaaaagaaatatttcatattttgaaaaggaaatatgagatatttaagtttcaaaattataaatatgagaactatctcataggctcaataaaattgactcgatctcgaccctacaatgacgatcagttgtcaaagatttttgttgtagaataagttaaacattattttatgtgtattaattaattgtatgcgctcatgcatcactacgtttacaatcatttcaaaatgatatttattattgaagtatattaatttttttatttttatttatttcagtcatgtctattactccaaatcctcttacttttcattagtattggtaaaattgaatagtgaaaatttcatgaaatagaaatctagtctcaatttgatgctggattgtgagaaccacaaatttatcttaactgaggagcgtcctgaagagcctgttgccaatgccctgaaaaatatttgggacaaatatgattcttggattcaatacaacaacaagaccaaattctaaaggcttgtttgcatggataacgtttggcgtaagacgcatgaacagctagagaacgcatctaaaataatgaattctttacaggccatgcatctaaatcattatggattgttgatagagtcactaactatatttattcttctatgcagatacatgattcatcaagggtgctggctcatggagaggtgaccatgcaggttgggaatggagcacaagcgtctaccaagtgtattggcaaagtctgtttaaattttgacaatatgattttattattgagcaatgtttattttattcctgattgtaccaagaatatattttcttttatctctttcacacgaacaatcttttaacatttgttaattaataatgaaattattaattttaagtttataatgcctatttgaagtgcaaaacaaataaatggactttatgtgctcagacctagtgaaaaattgatttaaataatgatgataaaatgtatatgtcgcatctacattttggtcatattgtcctacacagaacaactcagttaacaaatgatgctcctttgagagaaataatggttggaactctttcggtatgcaaatcttgtctcaaaggaaagatgactaattgtccttttctgcaaaaggtaatagagccaaagaacaacttgagcttgttcatactgatgtgtgcagaccaattaatattcaagcacaaggaggtcatgaatactttgcaacttttattgaagattattcaagatacgatcatatttaacttaaagccaagaagtttgaaactttcggaaaactgaaagactttaaagccttagctgaaaagaaattaggtaaatcattaaaaacacttcaattagattatggagtgtattttgattctgaattcaaagactacttgtttgaagaagggatcttttcttaatttacaacacttggaataccttagcagaatagtgttctgagagaagaaaccagaccttattagacatggtcagattaatgatgtgctcctcatcactgccagtgaatttttggggatacacacttcaagcagctacttacatttttaatgcagtgccctcgaagaacataagaaagactccaatggatttataaaatgggacaaaacccaatttgaaacatttctgtctttcgggttgtcctactaaagttcttaaactgaagacatggaaatctgctatgaggtttgaagtgtgtatgctttttactttttcagaggaaactacaggtgcatacttctattgtcatgaagaaaataaaatttgtatcgacaaatgctatatttctagaacataactatatgaaatgtcacaaaccacacaattaagtggttatcgaggaaaaaagaaaagagcagacttctaaatcaacaactttagaaccatcagtagaactaccaacaacggttgccacagttccgaaaaggaaccctagtacattgtcttagtgggaggattgtcaaacaacctgtctgctatgaacatgaagcacatgttcttgtctttgatatagacaaggactatttattaacttaccaacaagtaatggataaccctaactcaaaaaagtggaatgatgcaatggatcaagaaatcgattccatgcggaccaacaaagcctgtaattatgaaatcgtacctgaaggtgtaacacctataggatggagatgaatttataagaagaagagaaatgttgaagacaaggtagagacctttaaagctaggctcatagtcgaaaaatacaaacagcgagaaggcgtcgattacaacaaaaccttctctccagtggccatgcttaaatctattcttattcttttatccatagctaccacttttgattgtgagatatggaaaatggacgttaagactactttttaaatggcaatccggaaaaaaccatttatatggaacaacctgaagggtatgtgcaataagagaaagataaaaaggtttccaaattgctgaaatccatttatggattgaagcaaacctctagatcttggaatataacctttaataaaactattaaaagtatggattcgaacaaaatgaagacaaagcctgtgtatagaaatacattaaaggtaatgtagtgatattcctagttttttatgttggtgacattctacttattggaaataagatagaaaggttatcagacgtaaaaaattgttacctgaataggacaattacagtctagacatggaatttctttatgcaaggatcattgtcaaaagactcaaaaggagatggaggacatgagaaattatccttatgcatcagcagttgggagcttaatttatattattgatctcactttcgggcaatgacattaagtcttaaaagcgacaagaaatcaatgagatttaaacaaaatataattattagttagcaaaactaagaatatgatatgttatagaggttcaaccccattattatggaatggcttactcccctttttgttgaattaaacttgtgacaagagaagcaaaaaggatttgatctgtctcaaaatatttatagaaaaaatgagcagtgtaacggttctctcaattaaatgaatttagatccttttacaatggaatcactccattatttataggagaggttaacagaagatattggttccccaaaagctatcgatccattaaaataaggaataaatgacattactaaattatgagaaatatatgtagaaatacctttaaatcgagatttgatgatatattaaataggaaactatattaaatgcctgctgtcgaaacattaatttaatttgatgtttgttgataattttcttgggcagggtgaaactgttgtattgccacacgtacatatgttttcttgagaaatttcattgaaccgaggcttttatagtattttagctttttctagggtttaagcttgttcttgataatctttgatttaggttttgcatcattctgaaaaaatcttttcttttgatctgtatattctgttggtcaaaatatatagattgtttccaaaaagaaccttctttctattctgtccagtatttacctccccctccttctttttgagatgaatctgaaagacttttagggaggtaataatcaaattgacaataacctctaattgttattctttgaagaccaactgagactccgggcgtcaccttcgtcctctattgatatttcctttagctttgaggagtgggatgtcttgagcgagaaattcaacctgatattctggtcgtccaaaaccatttctatccaaaacgaattggtggatacatgtacagtatgtttattagagagtacaattttggttggtggaaatactttccatccaattggacatacgttgttcgatcaaacactctaaacactttgccaaaagcggaccttagccctctcttcccccaaaggttgaggcagaaattacggttactgttgtagaccatcctttagagagttattcatttcattcaagaaatgtgtcttgcacaaagcaaactgtttgcaagattggcccgaacgatgttgagctcatcaaaataatggttatgcatcacaagtggaccaagccagactctgagagtgagggtgacccacccactagggatcctaaagtccaggaaatagaagacgaggtcgacagtcataggtatgcccttatgccttatgaaggcacttgttggtggtgagaagatgacaaaccttacgactttcattgttgcctcttagtcttgggcattgattacatggatcaagagtttaactaggccaagtcgtctaaacatcaggagcccaaagacccaatgtggatttctccactgtccgagcttattaagaggtgccttcaaaacatggacaaggaaggtcttcttggggacatgcacatctttcaaccatttgagggataacttgctaacgaccaaggcaaaggtatgtgtgcgtggtcccgccctcatgctaaacatggagaaatattataaaatctctctgatgcaattcacacaaaagggaatcaagtacttggctaccatgtacatcttatacgcaaagcaagggtgcgagagtctcctacacatgacattaactggttttttgaattaaagccttctctacatagtggtcgcttgaggtacttctacttttcacagtaccaatgctcgtggctaatcgacactaatgagtaatgtgtcaagaagattagtggctttctttgagactattctatggtcatagagatgtcaaccaacttcactgattttcatcaagcaaagatgtatgttcagcttccttttatgtttggtcttagggatagggcctaagtcatattttcttttagttaaagagctctttgatgaaggtgaagctaaagatatcttatcaattcctatttcattgtttatttggaaggatatgttgattttgcatttttactaatattggtatgtacacagttaagagtgggtattggagctctataacgagagtagggtggggtcaagtgtcaacttcctcaagtcaacctcgctggtgggaagttcatgtggtctctttcagtgccaccctaagtgtaaattttgtttagaaagtatgtcttaatttcgtgccttgttatgtcaatttgtaacgttatggcttgaatattgcaaaggtatgccctatatgtttccaaaattatgagactactttgcaagtcctttttttatgtcctttgctcaaaggaataagacaagggtggttgttcaaaggtttggaagctcttaagctggcctccaacttatatgagttattaattggttgtatggatattatttcaccacaggagatgaaaaaatttgttattctctgttggtagatttggcataggaggaatattttgttcatgaccataaattactccaagatgatatggtgacccaatgatctttatgtttcctttggtgctattaagatgctcatggttcttcttgtacgatggtaatgtcaaatgcctcaatgtcagtcgacctatctaatgctactccaactgaggagctagagttgggggacgtcaacttagttgtggatgctaatgttaattttgaagagtgaaagattggtcttgggctgtggtgatgagtcgaccaagtgaggttctctactgaggggcagtgccggtggcgacagcctatgaaccttatgtagcagaggtagtagctatgttgcaagggttgattacttatcgtcgtttggggcaaaaaagtctcatgatactctctaatttctttgcttggtgcaagttgttaggttttgtgccctaaataaaacccatttgaatataatcagatttctaattaatataagattagaaattgcttttatgttg

SEQ ID NO: 21499 - DNA, 4233 bp, Cannabis sativa
  modified_base (31)..(33): a, c, t, g, unknown or other
cgcaggctaagtcctattaaatggacggccnnngaaatacaagaagtcagggtaatagggctgacaccggaggcggtcagggaaaccaaattccctagaatccctgtggtcgtggccaaggctatggtagagttcaaggtggtcaacatatggacccaccacaagctccaccttattgggagtagaggttcgtagaattgcaagatcgtatgatccaacaagatgaagaaattttaagactaaggcagcaaggtcctcctgcagtgaaaccaccgcaagcacaagctgttgtagttcttgctgtgccagcagaacaacctattgctggcaaccgtgtggagccgttatacgagaggttttgtaagaaagcacctccagtttttttgggcggtccaaatatgatgatggctgagcagtcattggcaatgatcgggtgacctacgccacttttcaattttaggaagacgccccagtgtggtggaaattggtgtacctcactcgggacgtcactattatgacttgggtggagttccgagatctattcaacgccaagtattacaatgaggcggtccacaatgctaagcggaaagaattcactgagttggtgcaaactgatggtatgttagttactcagtacacaaccaagtttgaccatctggccaagctagcctcgggtattgtgaagatggttactgagaaatatttggcccgtttgaatttaaaaattagacatgatctacttattaccacaaatgaagcaacatcatatgtggaaatggttgaaaggctcagtgagccgagtgtacagtaaagtttctttaagagccccgagtgactctgaatgttggtgggaccaccactcttcctactcctatttattgaacggaaggtggtgattccaccattgatcagaaaataatagttatcccgacatctggttgcttgggacagagcaagaagtttcgtggaaaccaattcagaggtggacgcgagggttactcttaccctgaatggaacgttgtaagaaatatcatcccggagagtgcaactggaagacatgctttcagtgtggcatggtggggtatttcaagaaagatttccctcaggtaaagaaagaagagcagaagccataggcaaaactcttacctgcttgggtgtttgccatcactcaagttgatgctgcagccagtccttttgtggtgacaggttagtttcctgtcaacaactccttttattctgtgttatttgacacgggggctacacactcttatgtggtaacatgggtaattgatcttttgggtaggccgtatgattttatcgaaagagggtttggaaccctaatgcctaacggggagttggttatccctaataggcgtattaggtcattgccagttaggatcgaatatagggaattaagtactgaccttatagagctagaattaacagagtttgacattatactttggatggatcttctccaagtattcggccagtattgattacaagtggaaaatggtgacttttcacccagagggtgaagatccatttgtctatgtttgatcggttcagggctctcagatcccgattatttcagtattaagggctaggtatctactacacagtggatgtgtaggatttttagcggttgtgattgactccagcatactcgaaccatttgggcctgagttagtcagggttgttaaagatttcctcgacgtatttcccgaggagttgcctggattacctcccaacgagagatagattttgtgattgacttgacacctagagttgatcctatttcaaaagcactttatacgatggctctagcggaactgaaggagataaaaatacagcattaagggatgcttaatttagggtttatctgacccagtgtattgccgtggggagctctggttctgtttgtgaaaaagaaggatggttccatcagaatgtgtattgattattgggaactgaataagctgacgattaaaaacaagtatccattgcccataatttatgatttatgcgatcaacttcagggaaagactgtgttttgaaagattgacctacgatccggttatcatcaactcagcattcgggaagaagatataccgaagactacatttcgaaccagatatgggtctgagtttctggtaatgtcatttagattgactaatgctcatgcggcctttatggatctcatgaatagagtattcaaggatttcctcaataacttcgtaatagtgtttatcgatgacatcctcgtatactctcagtcagaagaggagcatgagtatcatctttgaacggtattacagtgactcagggatcataagttgtatgaaaagttcaaaaagtgtgagttctggttgtcagaggtatcttttctagggcatattgtcggaaaagatgaaattatggttgacccaggaaagattgaatcagtgaagaattggttgaggccaaaatctgtgacgaaatattaaagttttctcggtctggtagggtattatcgatgtttcatcgaaggatttgctaagatctctttgcctttaactgagttaactaagaaaaataagagatttatatgattatacaaatgtgaagcaagtttccaaaagttgaagcaccatttgataacaacaccagtattagctttgccatcagatccagaaaaagtttgttgtttactgtgatgcatgcagacagggtctgggatgtgttatgatgcaagctgacaaagttataacttatgcctcctgccaactaaaaaagattatgagcagcgcaatccaacatatgatttagagcttgctgctgtggtatttgctctaaaaatatggcgacactatcttaatggtgaaaatacgagatttgcactgatcataaaagtctcaagtactttttcacctagaaagatttaaacatgaggctaagaaggtagctggaattggttaaagattatgactacgagcttttgtatcaccctgggaaagccaatattgtggctcatgcactgagtagaagaggtcccgggcaggttttaactactgttgtgatatctcttcaacttgcttaggagatgattaatgcaggaattgaatttgtagttggaaagttgcataacttgacactccaatctgatttgctagagagaatcagaaaagtgcagttggaaaatcctgagctgagctgattaagattcgaaatgaggtgatggttggtcaaccaaaaacttttttatctcaagtaatgaaatgttactgtataagcctcgggtttgtatccctaatatttattagctcaagaaagaaatccttgatgaggcaggaaccaccaagatgtaccaggatctaaaacctcatatctggtggtatgggatgaaaagagatgtggtagattatgtgtcaaagtgcttaacctgccagcaaatcaaagctgaacatcaaagactagcagggttattgcaaccactagcccttcctgagtcgaaatgggaggacattgcaatggattttgttgttggtttgcctagaaccacggaaatgtatgattcaatatgggtcatagtggatcaattcacaaagtcagctcatttttcagccagttataattacctaaaccgtggatcagtacattgaactaaatgtaaaggagatagtttgtatccatggcgctcctaaatccattgttttagacagggatccaaagattacatcaaaaaatttggtgagtcttaagagggctatggtcacaaagctgaagtttaacacaacttttcaccctcaaactcataggcaatcagagaaaaccatttagatgtttaaaaatttattgcgagcttgtgtcatagactttgagggttcatggagtaagtacttgcctctaattgaattctcctacaaaaaaaattaccaaagtacaatagggatggttccctatgagatgctgtatggtaggaaatgtcactccccaatttattgggatgaaactggagaaaggaagtactgaggtccggaattagttcaaaggaccaatgaagcaatagatgaggtcaaggctcgaatgcttgcttcgcaaagcaagcagaaaagttatgctgatccaaagcgtagagacattacctttcaggtaggggaacacgttttcctgcgggtttcaccaatgaatggtattaggcacttgaggaagaggtgtcagttaagccctaggttcattgggccatttcagata

SEQ ID NO: 21500 - DNA, 8884 bp, Cannabis sativa
  modified_base (4486)..(4490): a, c, t, g, unknown or other
ttatttttaaaaaacaattttctacttttaaaaaccaaaaataattttttacttataacgccaaacatgcacttatttattaataaaacgtttttgcaaaaagtactattatctacaagttgcatataatgcattgatcgattgtcatgaatattattatattatttagtgcttattgtgacatattttatagtacgaactagtgattgccttctctaacatctctttctactcttaagaaaaagccatatgtcattaataaatagtactacccatatgaaatttatataaatatatatatatatatatatttatatgactgatcaatatggattaataagcaccccatgttatatgtacacgcaactatatatagccattaattcaaaacatactcaataatatacattgcataattagatacatagataacaaagaaacctttcttgacatttcgttttagaatttgtgtgaataagagtgtatttaatatttttataataattaaatatagtataagagcctttggtgcagttgttatcatgaattaaaagaaaacccaattcataattaatatatttctttacaccaaacgaaattattaatttatatgatctatacatatatcattatatatacatgtatttgcttcttgacacatgataatatataattataataattaataatacgattacgatcatgtgtctcttttaaatttgttaaatctcaattctcatatacattgttcaattttaattaacttatttattatgaaatttaaaattaaaacaccataactaaaaataaaaatatacatgatttattgtacattaatttagtatatatttatatatatttgattcttgacttttattcattgatcgtatatgtatatgtggaccttcattggaaaacgttgagataatatgtgttggagtctcagggagattcttacaaaacaacaaaatcatgcagattctcaaatgattactgagttattaggactcggtttataatgttctatatagaacaaatataatttttttgagctatatttataaaggatgaggaattgattcattcattattaattgattttgagataattgttgtggctatttgattcacacataattaactaggtaatacatgtatctccacacttgaaacaatattaaataataagtgagtaaataaataataaagtaattcaagatttgatagggaaaactatatatatttcgacatgaaacatatataataatattgagtcatttactcatttataaggatatagataaattctacttattattaattaattttaaaataaaatcttaattcttaataattcatttccatatacattttttttgtaaagtggtgtgaaattcaaaagaattactatacaactcagaaataaattagaattcaatctagctcaaatgtacaaacatttatgaatagtatatacatttggtgatttcatgtattatatatacaagagtactattgacaatataaacttcctttgaaactttgaaggcctttagatcaactttcaactctcttattacaatcatgcattatttctaaaaagttaatagtacttctaggagatacgtaattgaccatatatatatattagtggatttgaaactctaattagacacctaatcatggcaatccaattaaaaatgggacaaacgtaaatatacaaaatacgtatccacacaaacacatatacatataaatacattcattattatgtatatatataatatatgtttctataaaaagcatagtcattttcataataacttaatttaaagctaagttgctcttgctctcgattgagaattaatgtataagagccacaagtgttggtttgcttaataaaagaattactttttcaatgaatggttttaattaatcttaacaacaacaaaaacctttgtattcatgcaacacataaataatattaattataaaacgttacgtaactttggggccaatattgtgggctcatttttttacctaattaattatatataattaaagctctaattacaattaattgatcagtcaggtcagtatctatagctccacacttagctggcactacaagaagtaccgtacgtaaaaatagatgtgtcctagccttgacaagagattctatatgtaaggaataattattaaacaaacgtactatatatattaattaattaattggccacatacttatataaatgtataatttttattttattttattattttttaagaaaataggtttgtagatcgtttaagaaacttattaaatgatatacattacataaatcaaacaataaaagtttagattcattaatttaatcaccgtatatatattggctttattatgaatagcatgcacaaaaaatatagatgtatatatatttaattaattttccttgaagtataaataattaatatgtgttagatatgtactagctagctcgcctcaaacatatattagtttttttttttctaatgtattaattattaattattgatcgaatctcagtactgagtactgcatgctgatcatcattgtctaaataatcatctaaatctttttgaattatatatataatcatataattatataatatttcttaaggagagttatccggagcttcgattaaaagaataaataataattaatttaatttgactaattaattaaatcaaaaattaatgagagagactgtgctagctaaattggctcttacgaacatggtcaagttttcctacttgagttgactgtttgattattttggcttcaattctttttaataaatcacatatatttatatattcctaattaatttttttttaaaaaaaaacttgtcatttgttaaggttaacctatatccaaaactggatatatttatatatatatatatattataaaaattacctatataataattaaacagctatatatatacaaagcatgcaagcgcattaactaattaattttaattagtgcgctggctataatttaaaccattattaaacaaatagtaaatactattaatcatgatcttgatgatgtgatgatgatcaatgatcaattgattaataatatttattgtttgtttttattctcatgatccgtttatctaaacatataattaattactacagcaaaatgtgagtacgtggaggaaaaatattttgtccatttttatatataaaaaaatggaacatatatattcctttatgtattattattattatttttttttgtataactctataaactttgtttttttttggctgaaatataaattttacttttgaaccttatcaataaaatcttgtatttagtatctacaagacaattttttcatcattattttttttttattttaattatatatatttaatactataaaaaaaacccaagtacgtcccccttaatttaaattcaaaataaaaaccctcgacaaaatcttctccctaagactaattatcaattaattaattaattaattaattaagaagggttgatcaggaaaaacatggttgcattgcatgtggatcgaaaagaagataggattattaggtcatggttggttatagtggctaatgacgtctttgtctatgtaacacaatatatatatatatatggatattaattaattaaacaccaccaaaggtcagatctaataaatgattaactccttttacaaccccatatatcatatcatatatatatacagtactactatatatatatatctatatctatacatatatccactaatatttatattaatgactaaaactagtacaagctataaagtgaatatttagtaacaactgatctgatctcgtcacacaatatttttcgtgatctatatacgtcggagatatgtaaagactgttatattattattattattattattgttatatatatttatatatatctaggggtttaattattctcagtcatctaatatatatatatatagagctagaggtgacattatctgttttaataccattcatcatgtttaattaataatcattaaaatgatcaaattttcatttcaatttcaaaaataataattattattatttaacaatcaacgcgtaagtgtaacgcattgatcatatcaattattgaatccaagacaaagttctatagctatgtgatatatatatatatacgtatatataatgtgtgtgtgtgtgtgcatgtttatattgatcaagttgattgaatatatgagatttagctagctgtaaagttttctttttctttttatgataagtgaattcaaagataaagaaaggaaagacaaaatgttatctgacacattgtgaaaaacactgctattaatggtcatcaaaatagtatatatagttaactatagcttgctagatcactgtatatttatagctatatctttttgttttttattttttattnnnnnttttttaaaaaatatatataattagttttttggtttttgacctatttctacaaaacaaagggtaccaccaaagacggacttactttaggagtcttatagagactcaagcctccactcaaataaaaaaatattatattaatttaaattaaaaaatattaaaaaaaatatatgtatcatattgatttaatttattaattagaattttattcaccaaatattaattaaaagctcccatatataaatatatatttacaacaattaagtccatacatacagattttgtagagaaattatattataatttttatatttattaatactatttaatcagggcggagcctagttaaaattggtcttaagaaaaaaaaattgacttttattataagagtaaataatatatatatatatattttttttttatttaggcatcctaaaatagatgagtccttccaccttaacctaagctcccatcaaacaaaaattcttaatcaatatatcagtgactatataattaggctctgaacttggtgtatatatattgatatgtatatttaattatatacgtgtatatatataatgttttcgtaaatatacaatataagttgtttcgatagtaacattgatactgatgcacactattcatagtttttgatcttccaatatgttaaaatctcaatttatttatatattaatttatattatagttatttaatgtatttttataaatttttaatatatttaaaataatttaaaatacatatagaaagtaggattaaaaaacttacacataaaataaaataaatattactgtgtttgaattttatttttaatatgaattttttaaaaatttgtagaatattttaagtaatcacgaattctaatatgatataataaaatttaagatcaaaattatctaaaaaattcaaaggtgcatcgatacccatttttaggagtgcaccgtaaaaattttcaacatttatatcactctatatacaacgaaattgtactatatacttccaaaagaacagtagctatagaatattttatatgtacataaataaataaaaattgtggaaaaaattgctccccttaaatggggcaccacatagaataacataaccaataagtttctagaaaagtggtgtctaaaggagaggactaaaaacaggtcattgtctgcctcaatatatatatgtatatgctatatatatgccagttgatggaacactgatcatgatgatgatgtaactatagctatatatataggacacataataaggttaaatttacatgataaatatatatatatatgcatgtagggtttcatcatctctctatagttattctctcaaatcaaatcaaatatattattttactataatataaataaataaatgtttcataaattcatactacaaaattttgaataattaggtaagtgggatctgacattcatgtagaagcagacttttttaggtttacccaaaaatataataaaatttaaataataataataataatgtagcattgagtaagacgtatatggcctaagatgataagttgaagtcttcttttttgtgtcgactactcttgtaattaattcaaattattatttatatatattgtgagtagttctctcaattttaaataaaacaaaatcatgaaggtgacattttagccataaaaaatgcaaacataaatttgtggaaaatgcatacgtaagaaaccaatataataaaaaaaaaattaaaaataaaaatttagctagggtttatattaaagttaattattactgtattgataagtcagtgcattgacagaatacgagccattgcatttcatcctcataagttaggtatttggtataatgaactgtacccatatattgttttgacccaacaatttttattttttttattttttttttaaaaagaaaaatcatatatatatgatcgacaaaataagtttcacctaccaacataacaaattgtcctttagtagagattattataattaattaatgaaattgatcgataatctagttgacaattgggttattcttgtttctactttacagatataaaaattgccaatagagtgaatttgtgttattgggttgttatatatgccttttttttttttattaccaaagaaaggcacttatatatatatgttaggtcatgcttaacagttgtatttttatatcaatctattttaaatcaaataataatggtaactttattaaaataaaaattaacaaaatggtacacctaattaaaacattatgacttttcttttaagtgtgtgaatataattttccataattgattttatgttaattcattacactacaaaaatatcaattgataaggacttgtttgaattaaatggaagattaattaagtttttttcttttttttttttttttttaaaaaaaaaccatatcatataaatataattatataatggtaaagaataatttacatattttattttttgcatgcatggtatgataactacttcttataaaagttgattttaatttctttttctgatcaaaagatcaagaaatagaaaagggttattagttaataaatacaactatatatatacacatctatgtgtgtgtattgtaatggctaaaaatacacttaatagcaagctggaatgatatgataggtgtttatacagatattttcattctttatggggtatatatatatataaacattatatgtaaggctttgatttactttgtaatccttgtcgaagtttagtgcaagaattatcccaaaaatatatatacaatataataaattagttataaatatatataaaaggctacgtctttttatatatttaggcatgcgtacagctagaaaagagaataaaagaaaagtactgtaatataatatatatatctgtatttaaaaaaaaaaaaacaacaaaaaaagccaaagtgcactatcaatagaaaataataataataataataataataataatattaccgctcttcagaggctaaatgcccccaaatttaaatgttctttttttaaaaaattaataaaatgtaaaatataataaatcaacttataaaaattataaaattatatttactacatattaatttttttaaaaaatatataataattataagttatataatttttttaatatttcatattaatagtacattataacaaaaataaataaatatattaaattattaaacatatagtatttgatatattactgaaaattaatatagtgtaataataaaattatataccacaaaaaattatgacaatactaaattaatactcagaaaatatatatatcatgctaataaaaattatatataccactatttcttttttgaataaactagtaactttgattaaaaagtaaaatctttcaaaatataccgcacttcagaggaataatcctccaactgaagcacacgacttgtagagaaacaagaactccttacaagacaatgatctactttgtttacaaatcgtttaacaaaacacaactcaacataattgtaagataaaagcaaagtacgaacatcttgtaaaagaccgaattaagacgacatggacacattattagcttggacacaaactaaactatcagtttcaataagaacttgcccccaagagtgttgaacaattcaacttaaagcttcttaatgccaatgatctctgcaatctcaggttgaacacgacccaccttgccaatggtataggcttcaaccatccttctacgataattccgagccactttgctcataacttcttaataaactagagaatccctcagtaaagagcataaaaagataaggcggcaaaggattgcctttacttaaccctctttgagcaacaactggacccatttcttttccaccatgaataatcgagtaggaaacagatcacacacaatgtattactaaattaatccatctaccattaaaccccatcatttcaagtattgctcgaagatagccccattcgagcctatcataaggttatatgaataccaaaggctttaaagactaacatcaaaggacccaaaattatgcgggtactaaaaagaacgattttgttttgtaggtatcaataaagaggaactaaagttggctcttgggtgttgatgcttaaagaagaatgccaagttcctacattaccaacaagtcttaaaaagcatagaaaaataatgtatcaattcttggacacaacccaaatgaacaaatttgggaaccggtgatatcactcctattcattctacatattaattttgatgagagtatgatgcctagattgaaacatctagatggaaagtaagtgaattctatgtccctttactaattgacttgattttaattcttt

SEQ ID NO: 21501 - DNA, 3939 bp, Cannabis sativa
aatcttctattgataacaaatcaaattacattgaaatgagttttatttagggaataaaatcccaacagtactctccatcgtcttcctcctcttcatcaatctcaacatctctgtcatcattgacgtggtcatgctggttgttttggtcatcctttcgattgttcacgttaaacgtgtccccacctcttgcattgctcaactgggcgtgcttcggcgagagggggtttaccttctccatgattgtctcgagtcaaccttgaagagtcttcttaggaaccatcttttgtgtgaaaaccatggcagcagtaacaccgtaggctttacgtctttcttcagctctcaatgaaagcaccaaaatgtttaccgagttttttggaaactaaatattttagaactaaagaaataatgaaacgtacaaataaagagatagagattttttacgtggttcgggtgttaattaaccttagtccaagagttagtctattaacctctcagaatatttttgatgtgtttataatgtttttgtaggaaactctaactttacactctatgtttctcttagagaaaatgaagacgaagagtgatattggtagagtttcagctatattagacgtgatcccccatccgtatggaaataagagagtatttataggccaagtggcaaatatgaacatgcccatgacccgtctagggttctgctaaaagtccactaatggggtaaattacatgcaaaattgatcgttgggttctgtggaaaccattgtgcccgtgcttgctgtaactggacaatggggaccattttgtactatatggacacgtgtcatccaaatgttttaacctttaaaagtaaaggccacgtgtcgcctaaagctttctcctttaaaaatagaggtttgtaatattcgtctattaaaaaggtggcagagttgtgcacactgccatgcttggacgtaggggataagatctgatctttgtcagaaaagcataaccgtcacttggtgatctggcgtgcatataaggaagacatccatgacactccaaggcagtcgacatccgcattaggctcttcaagtactcattcgggtatcaactgggtaggcttctatgtttagacccctctgggtctaggagaggcaatacgcctttcacatctgggaagccaaggtagagtcaagtaaacttccatgtactcttcaatctcaacatgttctagattccaggaggcttcttcgtgacaggatcacagtggaggactttaatagggtgttatcaggctaatcccttccataataaggcacatgtcatatgctcaaaatcatgtataacaattacttattgaagagtataagcgtcaagcacgtgatacccaataaccgccattgcgcctctcaaagtccatttttcaaggcaagacattaaatgcccaagatatcaaacaaataaccatatcttcgaatcccgtaattagatcacatcaaatcaagatggagtacgaaagccaaacacgtgtcacccatctaaccaactcagtagccgagtaagtccatgtacgagcaaatggttcccacacggacttggaaagaaaatgttattccaattttcacacagggtgatgtggcattaaataaaagtgacatgtaaagaacattttaaggcttggacgggtggtctcccctcaatagtccgtctggagagatttgtatgtgactgtccgagcaggtgctcactattcaacgatgtcgaatcctctaagcagtataacgcgatagaaagaggtctttgaagatcccttccatatgccgcatttatatctcaattaaatccctatttttatggaatgggcattttcctaacttagttttcccttttatttctaattattttgggaaacttaattcatgtatttttttttcctataaatactggagtcatttcattattgaatgatccaaaatcatatgttctagagagctattacgttgtcaaaataattgtaagtttttccaaaggattattgagaaacttacttggccaactccttgtgatcttgataatttttcaaactaatacaagaaaaaatagagtatgctattatcgtaatcaagggtcgaacctcaataaattttggtattcttattgcatgattatatttattattatctattatctcatcgctttaaagatttagcgtcatcgacttaaagcgaggtcaacaaatgtaattaatgtaataacaatcatgtctagctaattgtatgaacgaaaatattacttgcttgttatataaatgagtgtccccatatgaataaaactaatcacaaatctttttcaaaaatggattaaacagactaaattttgactgtagtattataattctctcgtctctttatacatatctactatgtatattttgctattcgttattttagtttaaatattcgccactctaggtaaatattcacatattgcttgtgagtttttaagctttgctcgaatactcataatttttagtgaggtttaatttccttcgaataacatatagtatttttatatttttatagattttaatttttgttttttacaaaaataggtacttgtttttacattaattttacaataatattatattatgttgtttacataatattattatatatatacgttttttctaaaagaaaacaattgaagaaaaattctgaaaaaataaattataatctgtaaaaatataaaaaattcttttatcagtaaaaaaatgtgtatttataaatttaataagtaattattgacttgtttatcgaaacaacctttaatcaaactggacccaaatcagtgtagccagctgttgctccacaaatcttcacacgtattaacttcagttacattcgcgaaacacacaaaactgtatagtggcagatttgtaggcccacagaaaaaggagaaggaaaaaaaaaaaaacaaaagaatattggtaataaatatatttttaatataataaaatcgaaaaaaaaaagtttattctatattttattatttttttgaacaaatatattttatttattttgtttcttaaataatatgtaaatgaaagcaaatgtagctatcaaaaattgttgtcttgtttagaaggcagcactgtatactctgacgctgataaatacccctctttatactttctctctcttttcctcacctttaaataaatatatatttaaataataaatttaatgttgaattaatttgaagagtatcattatttttattttcctatactattttcagttgcatcatcagactgcacagagctgagaaaagaagtgttgcgtgtttggccggaggattctgttgtatcgttgtatgcggtttgattctctactcattatactctttttcaatgtttataattaaaatttgattttttttgtaaccatgattatgtggtttggatttttttttctttttatattttgattgttttggattctgaatatggtggtttttctttttttatttatttattggtattaatatgataagtgatgggtcaagttgaatcttgagtgagtggaggtttatgggtgttgctgctcttgcattgggtttttcaaaagaagagaaataataagataatgaaaaggaaaaggagattgtttcttgcaactagatgaatgtgtttatgtatgagaaaacccagatgagattctttacaaaagctacataattattaatggcttagtatccaaaccagggattgaggtactctttttgctccttgtggaaaatggccatcatagaaaatgtccaacaatggaggcgaatgcatgttttttaggttccgagaaagggaaatttgtttagtattgttgggtgtggcaaaatatggtatgtggtggactggattttttgggttgccaaattcgcttctttttttttggggggggg

SEQ ID NO: 21502 - DNA, 3478 bp, Cannabis sativa
  modified_base (1383)..(1397): a, c, t, g, unknown or other
ttgattgaattttccatcactttccaaaatcttggtgtcgctagggttggccaaacgtgttactgactcatcgtattgtgtttgtgttatattttattagacatactttatatttaggatatttacataaaatacaatttttttataaaagaatttacaattttatgtgcaaagttttttttatattttttcacaatattttataaaatcataaaaaaattacaagaaaataacatcataacaacataagataataatatataaataataagaatacaacataaaaatacaccaaaaaattgtatcttgtataaataaaatataaaaaaaccttaaaaatttttaaaaatctgtatataccgtattttgtaatttttttgttattttttatccctttaaattttgtgtgagaggtgtcgactcgttttcgaccgcgttcaattttctcaactttaatccgacctgtgaaaaatgcatcgtgttcgtgtcaacccactttaacttattttgctattacgaaagttaaaattatagagaaaataacagattcagagttccattagaaaatttattaatataattttttatttacaatacaaattaatttttttaaaaatatttttaatttcttcatgaaaaaaataaattttaattttttaactcaacattaaatcactaaatatatatttttatatagttatatattaataattttttttttttttttttgaaaataaatatatcaagcatgttaaatttgtgttaagcgaaccgtatcgtgtttaatttgttttttattgtgtgttaagcggatcgtgtcgagtatcgacccattatcgaccattatcgaccgcacttaattttcttgatcttaattaataaaattcgtgtcgtgtttctatctcgtgaggtaaccattttgccactcctaatgtcacaagttaattagtgagaactaaaaaaaattaaaatctggcccacttagactcctacccattaaaagcccaataaattattggtgtggaacattttgtaaaaaagttgaatacatcaaactatttgaagcacattttgaataaatatataatttttctttaataaaataaataaattgaaattagaaaaaaaataaaaataaaaaacatttcccatcattgatttttccggtgatgatcttcatttctttctgttccaattaactttccccttttaaccttacctttttaccaccatttatttactttctttcttttaccaaacaaagtaaaaaatagtctaaagaaaaaagagccatacttaatgacaaaagctgctataaacatgaataatattaaagggttggtcaattgtctttataaattttgcttattattattattattnnnnnnnnnnnnnnnattattattttttaaaaaaaacacttttactctagtttgaatttcaaattagtttttttttaaaaaaaaaaagatggaaaagaatgaaaccatatgtttatactgtgagagagagaaaaaaaaaagatttataatgaattttaagcttttattataaataagctatttttataagaagtactttgttttctacatgttaatcaatttgtgaacaaggggtcaatttggctcgtgctgcttatttttttttttcaggtcgtcgattcagtgaagggtttatcccgacagatctttatgctattttattagtggatttacactttaattaataatatacaataaactttcactcaaaaaaatattaataagcatcacctttatttacaaatatatgttataattaattaaaatacatataaatttttttctcgacttttttagggtccacttgtctatgcttagaatgaacgatgaactaattcaaatagatatttttctattatttttttatatggtatagtcaatgttgattatttttaatgaagtagtgattttttttgtaaaaaggttttttttaagcaaaaatagaaattgtaaccaaacaagccctaacaacctaagataaacatttataaataaataaaaatctgcaaactttcattgacttttcagacttattaagttcacttttgtaatcagtaaaaatgaaaagtgaaaaaataaaaatagaaaagaagagcaataatgataataaggaattggtgagtttttattgatagggtacatttttgtagtatgtgctaaatcaagaaagtttcatatgtcattttcaacattcaaattcatccacatgcaggtccaccctatgccttacggtgggacctatctatcctatttctttcttacttactatttctattcattcattttagcatgtgagtagggatacacaaagagcgagaaattggcgcgaagtggagtagtgcattttgttcttatgctcgttaagaattttaatttcccgtatttacttattctttggtggggatgagcatggccggtccaaggattttgggagctttgtgcaaaattttaaaattaggctctttaaaaaaaaaaaaccgtgtacattaaaactacaattctattactagtttttttttttttttaagattcattcataaattttcaattataaattttttatttatgtatatataatagggaaaaaaaaaagaaaaaaatagacatttttttttaaaaaaaattgagccttgaaaaaatagaggccttgtgcaatggcccaagctgcccaatgcttgggccggtcctggggatgagacggcgaatctcttaatgggacgaaaataaaatgagaaatttctaatgtagaaataaagtttattttaatattttaaatgtataaaaatattaaatgacataaaaattaaaatataacacactatttattattaaatatactaagtattatacaaaacataacttaaaaaattataaaaatgacattaatatacttaaaaatatacaaatacatattataaaatataaaatattaataaaaatataactaatatattaagcgagttctcgtcgggacaagaagtgtcatccccattcacatgccatttaatattcaaggacaagaaattattcccgtttcccatttagagtggaaatatctactccattagagacaagtcctcaaaggccattctcatgcaaaaaatgtgtttcatgtatgtgaggttattttgattttttttaataataataataaataaacaaataaataaatgaaactcgttaacaaaaatatattaggagatggtgatttcatttttttaatataattattgcatagttatttaaatttaaatatatatacttataatactatatgttattccgttttttttaaaaaacataacttcattcgaggttaagaatggggccaaagccctacacattcgacgagcgaaccacactaaaagatggcacaaatatcgacttacaccgatgatggaaggggcaaaaaactcaaggctcacacatgagcattt

SEQ ID NO: 21503 - DNA, 2099 bp, Cannabis sativa
  modified_base (507)..(509): a, c, t, g, unknown or other
ggaaagatacttattcaacctatggaaagttttatacagtttttggcattgtactaacaatttactaactactagtgttacttcctgactaacataaatgtagttgccgataagtaaagaatccagtatccctagaggagtagacatgtagagaggaatttcacgatattaaggattttgtgattaagaaaatgtaatggtggagaaaagtttgtattgaatacaacttgttagatcctattacagagagaatactacatactacacctgatctagatatcaaggtgttgagattaattgaaatgcacttttcgttttatattagtgcaagtgggagtttgttgggttttgtgacctaaataaaatatattttagtataatcaaatttattaattaataaaagatcaaaatcgttttatgttgcatgactgacgtgatttatttcatgattatgattaatgtataaattctattaagtgcagaacatatatatatatttgttcatgnnnatagtgtcgtcagcacagtgaaatgtttaatgctctcaatgaaagaaccaaaatattaatctcgcttttggctaatgatattgagtcttaaaagccatatataatcaattagattgaataaaaatatatttaatatcaagcataaaagttgtaaaactataaaaataggaaattaatgactttcttaaactatactatgagaaatatacatatatatatatatatatagaaatcttctgaaattgagatttaaatacatatataatgggaaactatctttaatgactttatctcacacatttttccatagtcgggttgcatgaggtgccgactgtttctctccgtcaaggttaacttcgttcatcccgtgtggcaagttttaccttgtttatttattattgcatctggcaagttgtatatattgggcggacactcgaaagaatatttcacccgcccatgtcttgatgacatggtacatgtcacccaaaaaatcatgtcgcgtcaccctgacaagattcaggataacatttacatttttacggttttgtgttgttttaacgttgtttttatgttatcgtaacgtgaaaatgtgtaaataatagctttttctaaaacaacgtgtaaacaacgatatataaggaaaaaaaagtctgtaaaaatgtaataaataaataaataaaaaagaactcaaaattctgtaaaaaaaaaggtaaattttggttgttttatggtatttctaaaataatcctattgtttttatatactttcaatagaaatttaatgttttgttgactttttttatgtttttttattaaaataaagtttattttacattgatgtatcgaaatacaattgtaaaatttaagctaaatataacattgattcaaatttagcacaaaatttacactattcattggagatagtcttacaaccctaagtttaatttcgatatcaaattacacatttgtgtttcataaaatagtattaaatataccttgaagaaaattttagtgaaaaatgattttaatactataataatacactttattagagcatctctaaccatactctctaaacagactccttagttaaaatagagagtcagacttgaaaaaatgagcttcaaccatatgaaaaatagctcgctataatagagaatgaatagaaaaatctgtaaatgtaagaactctctactttttccccaaacttttttcatagtattttaattataatactattactttttattattttataaactaatttatatttaacaaattcaaattataaaatattattaaaataaccaaatattaactaacatatagagcatgattggagtaacaacaataaaaacgactctttattttagcttcttagctacttcagctaaaaaaataaaaagtaccattggaaacgctcttaattttggtgatacattcaaaagagcattgctattgtgcaccagtggtgcctagcacctctacacatattgccttgtgattggctagcgatattctctaaaagttattatattaaattatataagactcgatacttaattagattaaggctaattaggatttttgc

SEQ ID NO: 21504 - DNA, 1476 bp, Cannabis sativa
gcatgccctactgttcgaatttctgtccaccatgcttggagctcttgatctgactcaacaagactagcttttgggtagtaatgattgatgtaatcagtcacccattctttgatggaatcccacattattaatccatcatttgcataagggtaatcttcaattgtgagctttagaccatgtggagaatttggatcctcaacagccattcccctaaacaaaataatgattaattattagtgcaaaaaataattagtattacatcatggttaggcctaaatctttatttcttgctttctctttagaactgatcttttaaaatttactattcatgcgctacataaaatattatttattaaattaaatatattttattgattattttagattttagtatttatttccatatacattcatatttgacttagaatatattagaattttgaagaaagtagagtttttgctaatataatttaaaaaagttaatataatattataatctgaagtaaaataaagaaaataaaatttaaataattaaggtgatgagtttgtttaaattactaatttatgttacctatcaataagatcggccggcaatgcttgtaaatcgaatctccattccttatcatatgcaacagaactaagctctacagaatattttccgggtgaaaatgccgtttcaatggtaccatcagcattgataagcgcttctcgagcaagcgcattaatctccattgtatatcgaaaatgaggatgtaacaacctatgtactggatgcattatactaagttgtctatttgtagcaataacatatggctctgttatagaatgtgttttcaacctgcacaaaaaacacattattggaaataaattttttgatatgaaaacacgagaattagaataagaatgaaatagaataaaatttaaaaacaaatatgtataccaatgacaaacaagttgatgatagccagaatcatgggcaaggacatgaactttagctagtctccatagccaaactcccgttgaatgccaacaaggtgagaaaacttggttccaacgaggcgaatccaaatgtggtggccgagttaactcgatggctaatggcctcaaagttccatctgggtttaggaaaaagactgtccttgatccatataaagttgttcctttaagctctctaacttggtgaacaaatggtaataacaaatcatggtagtctaatataaacaacttcttctgttttatggcctgtatttataaataaccaaaaaaaaaaaatagtgcattacaatattttaacctaatatgtttagtactatttaaaagttagcgtcttgccatttgctaaaagtatttcataaaagtacgtatttaataatacttaattatactaataacaatatgagactgatgtatatattattataatgatgatgatattcttataattaataattaatttacctcatcaactttcatgat

SEQ ID NO: 21505 - DNA, 4056 bp, Cannabis sativa
  modified_base (2628)..(2657): a, c, t, g, unknown or other
ataagggctgatatattaattcaaacgtttagagaaatcgctacagtgtcagtatctagtccagagaaccagagcagagaaacatttcttctaacatattgaaaagaacttcaatataatgagtaaattggagaatctacaagaaactggttagttttttttttcttttcttaatggtgaaaaatgcatggcttttgttatatatactgctttcaaacaatttgtgattcggttttcaacaattacgcttactactcatgttttgcaggatggatattcgttgataataagcaactcaagtacttttcggggatattgatgtcctctaagaaggccactgagaaggaactccctactatgcaaaaccctggcacaagcaccaaagtacagatggatgaggatgctgcaattatggagtctaaaataagtcaaataaaagatttattccccgattatggtaagggattcttggctgtctatcttgaaacttacaaccagaatcctgaagaggtgattcagagggttcttgagggaactcttcatgatgatcttcgaaacatggatacttcattggagacgatgcctatacccaaggcggctgctacagtcgttggcaagaacgataaagggaaaggaaaattggttgaatctgtatcagtatcctctcccaacccaaatttaactcccggggaaagggtgcaacagagggaatcttctttggtttcatcttcatctactcatggaaggtttgttaggaagtctaatgctaatgtgcttgattctagtactcttgatgataaaaaccagatggattcattgagaacggctgctcttatttcgcaatatgaatacgatgatgagtacgatgactctttcgatgaccttggcctgagcgtgggagattcagggttggaggaaaatcagagtttgagtgacaaaattaactccaacatgggaaaaacttggcagaaagagactaatgaaggtggctcttcccagaataataattctaattcaaaatggggctcgaaaaagaaaccgcagtattatgtgaaggacggtaagaattacagttacaaagttgaaggttcggttgcagttgcaaatgctggcgaagcatcgttacttactcaggctcagcaagaacttatccatggcctcggccgtggtggcaaccttccacttggtgctgtgaagaagttgatagagacctctaatgaccaagataagcagcagcaacacaaacaacaacaacaacaacaacaagatgttaccgagactgaaggaaaccgatttgggaataatactagaggatggggaaggggaaggaggggaggtggccgagccaacggggaggaacaagataagaggtttggggtttcagaaggtgaagaagtgagagataatgccgggaatttcaggggaagaggaaggagaggaggaggcggtggcggcggtggaaggaacaaccattaccgaaaggatcgtgccaatgcaaaacacttttctggactaagtggttattagggagagtaaccttcaagtttcaatcattttgaccttgactcaggtttctttcactttcacaatcagttgtaaattgaaacttattttttatggtttaaactttggtaagttttatagttgaaaagctttgataaagtatgagcacaactgcttaagaagatgagaacaacagtaattatttttggtcagttctccaaacaaaatggaagtgtttgttttaaaagtgtcatgtgtaaaacagaactctattacattgatgatgatacatgataactctaattttacaccaacgtaatctaacacttcccataattgcatacaccaatagaaggtaattttgtttttgagagacctataaaaaatattgggtagttttacaatgcactatttcggcatctaaaaaaaattttttagtctaatttttttcatatttatttacgttatagttatttaagatattttataaaactttgagaaattcataataatatacaatatagaaagtagtgtttaaataatctatttcacacgcgtataaaataaaatagtcatgcttgcaacaagtagtaatctagctataagtgtgactctaattaaattatgcacatgagaaactaagaaaacattttgctcaaagatacaagtattaggattccaccaaataaaataaattgttgccgcacaagtagccgcaacaggcctatgaagcagattgcaatcatgattagcattcaaccacaaaagccaattcaagtaagactcaggtcaaatagcattgccaaaccaagaatggatagcacgcatgaaatgcttggaaaagaacaatcaaagaaaagatgattatggcagtcaacaccaacttcacaatctggacaactaataaaaatcataataaaaccacttgccaaaggtgatctctggttaataagttattatataggaggcttgccagcgaataaatctatattttggtacgggtaatctacaccaaatcattttttataattaactttggcataagggtaagaaaagagttataaagcttactaacccgaaatatttcctcttttctagcatccagaattattattattattattnnnnnnnnnnnnnnnnnnnnnnnnnnnnnnattattattattattatattaaactgaaggataaagcggttttaattatttcaaaatacttttatttattatctcctttgatgtttgattttttttttttaaattataactttcacataaataagtaataaaattgatcattgctcgctttcaaaaattatcaattcatcgataatttaattggaatttttttttttgagttctatatattcaaagattctattttaaattagcagttcttagtgttgtaaatatgtgttagactctttgacacgacacgaaatcggtatgagtttggaaagcacgagcacgactaggtacacaaaaatatggcacgacacgatacgatgctacaaattggcacgacacgacacgtaagtacaaatagactatatcccaaaaagcatagcacgacatattaaaaaatcttataatttattattaataataataataatagtaaaatataaatttatcaattataattaagttaaaataataataaaacttaaatataatacttagtattataattctataattaaaactattaaaacatgaaaaattaaaattatacattaatttatttatagtacgtgatataaaaatttgagtatttataagtaaatatttaaatttgagtattgttcaaaagttatatagctacaactaaagctttgaaatatacatataatttagtaattgtaaaaaaatatataaaaaaaaataataaagcacgaatttaagcccagatatgaaaataggttggcctgtttaagaaatacgagctgacacaagaaaaccacggcacgagtccgagcacagtacaaaaatattgggcctatggatcgtccggagcctaccctttaaaaatattagcacgacacggtacgacccatatttttttgtggcacagcataacacaatctgtattttttataaagcacgaataagtacagaccaggccagcatgacacgcacaaacttaaagcactaacaattctatatattctattttaattaaaatcaattttttaaaaaatagtatttgttaaaagttaaatgatgtagctggacgaccaataaaaataaagctgaactttcaagcagaaatttaaccacattctattcagattttagaaaattcaaaacatgaaaatttagagctctttctcagcttttaaacgcatctttaatcaactcatttgaaattcgtatgcaaaaattatgtgtattttattgagagaggtcggagcaaaaaagtggcaagcactgcagcgcccaaaactaacgtcacgatgctaattgcgcctccaaagcgccacgacgtgaacttatggtatctacaaattatttatccatgacaatttaatacccttttgatacccataacataatt

SEQ ID NO: 21506 - DNA, 3203 bp, Cannabis sativa
ctgtatacatggagtaacaagaaacaaggtcatgatagaatttttgcaaaattggacagagtcattgctaatcagaattgcgtagatttgtttccacaagctgaggccttattcaggaatgaaggactctttgatcatacgccagcaattattaaggtttatcctgaagcgcctagtggaaaaaaaaccattcaaatatttcaaaatgtggtctatgcatccgaagtacaatcaagaagtgtagaaagtatggcaacaaagaagttaaaggctccaagatgtatcaagatgtaaaagtagctgaagaaggtattcaaagagctgaataagtcaggcttttctgaaattcaagcttcagttgcataggctcgagaagatctaaaaatcagacaagaggaatttcatcaagatcctttgaagagtatgctccaacagaaagaatctgaggcaagggatcattattctgaagttcacaaagcatataatttgttaatgcaccagaaggtgaagatatcatggacaaaggaaggtgatcataacttagctttatttcacagttgtctcaaagaaagggagacataataagattttatcaatagattatgggaaaggaaatcaagtagagcaacccgaagctattactgaggcattcttggagttttatcaatgattgctaggaacaaagatgcaaggaagactatcagtcaacaaaaaagtaatggagcaaggagcagtagtcaatcaaactcatgagaacatactcaattcagcatgcactagacaagaagtcaaacaagtagtttcagcattccagggatcaaagcacctggacccgatggatatagcagctcattcctacaagataattgggaggtgatggaggaggatgtttctcaagctgccaaagaaactctgcaaacaggtcatattgtcaaagatttgaactccacaatgcttaccttgatccttaaaaccaagttcccgaatattgtaagtgattttagacctatagcctgctgtaatgttgtctatcatatcattaccaagctattacgcaataggttgaagatcattttaccagatctggtttctcaaaatcaaggagggtttgttaaaggaagatttatagcacacagcattatgatctgtcaggatctcatcagacactatggaaggaaatctgtaaaagcctaattgcatgattaagcttcatttatagaaagcttatgatactttagattgggaatttttagaggagatcattgtagcctttaaattcccaactaaattcattaatctaatcatgcaatgtgtctctacaggtagattttccttatacttcaatggagctctacatggatattttggtgccaaaagaggagtgaggcagggagaccccatgtctcctctccttttcgttcttgttatggaatatttgaatagaattattaaaaaagtgggaaataaagcagagtttggattccatgaaatatgtaaggagctaaagctcaatcatctatgttttgctaatgacgtgcttcttttctataaaggagacattcaaagtatcaagttggtactacaagggctcaagctattctctagaacttcatgcctctgtcctaataatagcaagtctgctatttattgtgcagggatgacataagtagagatacaaaaggtaatgcaattgtttggattcagcagaagcaccatcccttttaagtaccttggggtacctatctgctcgaagagaatctcacagaatgaatgtaacactcttgttgacaagatggcgtctcgaattaaaacttggagcaccagacatatctcatttgcagggagagcagtactcattaatttagtgttgctaactattcacacatattgaagtcagatattagtgttgccaaagaaagttgttgctaaaattgaaagagtatgcagaagttttccctaaaaaggatgcaaaaacatgataggagcacgggcagtggcttgggagaaggtgtgtcatcccaaagctgaaggtgaaattgggtttcaaagtattagtacttggaataaggcaaccttgatgaaaaaaatatagacactagctacaaaaaaagacaatttatgggtcatagtgtgtatttgaagaattgagattgttggagccacaaagcttccatacatagaagttggtattggaggaagcttgtggagataaaagatgaaataatgagaacttgggataccaggcagattgcaacagggaattacaagattgcagaaggctataagaagttgcaacaacccctggagagagtacatcagagtaatcaggtttgggctatactcaacaatcccaaatacagtttcatactatcaatggcagtcctagacaaactcaaaacaagagccagactgaaaaaaaatgaatattgtagcaactgattcttgttgtttttgcaacaaccagacagaaaacacttctcatcacttctttagctacagtatcacaggaaggttcttacagcaggttaaggattggttgatttgaattcactcataaggtggattagcatatttaaaagaagaaaattcaggaaacaggttttttcagctgctatagcaaggctggtgtacttcatttggatgcaaaaaaatgacaagatttggcaagctaattccaactcgagccaactgccaatacaagaattaaaatggcaaataaaaactagaatgacttctgtaatgccaaagaaaattgatcaagatgataggagttggtttgaacacgtgtaaatattgttacgtatagttatactatgcttccttgaaaaaaagagtgcttagattgtaaaaaaccagtttgtgtaataaaactcattgattcattaaaaaaaaattaatttaattaatataatttatattaaaatatcatttcaatattgttttgatgcacataattattacaattataatacatattattaatagtttgacccacaattaacatatgctccagacgtttttttaaaaaagaattataatattcttaatgtatcattcaaataatagatacaatgacgattgtgggtaactattacttttacagtataataatgtcgggctttaacaaccaatggtgacgcgccaaaagaaattataaaaaggtttagtaactcactttggaggatcactaaatattttctttc

SEQ ID NO: 21507 - DNA, 4143 bp, Cannabis sativa
  modified_base (1365)..(1389): a, c, t, g, unknown or other
  modified_base (3614)..(3616): a, c, t, g, unknown or other
ttttatgccctaaataaactttatttcaatgtaatctctattatttaaatatcaataaagaaacaaaagtatttttatcacttattgtgtcatttgtagggatgcacaaaagctccacggggacggggacccgcggggatccgcccctaatggggtggggattctccggcttggcggggatcggggcgagggcggggctaatattctttgcccgatttggggacgtggcggagtcggggatagtactacccaccccatttagtccccgattatgtatatatatatagtattaggaattatattaactctgtttctatacatataatatcaattataattatgctaattttttgataatatcaattaacgaagtaaatttctggtttaaaaacattaatgtattaattcaaattacattatttcctatatatattaaatgttgtagctgttatagaatatggataggcactagcaccactaattatgctattgatattgctaattgctagctgtttcatatgaatatgaaaagtctttgaagagtattaagtattaagattaatcctaaataattgttccatatatatgtaatatatgcctttctcgatttctccactctcttcaatctctttagtttccagaccaatctcatattttttctataaaactgcaacatgttcataacttgtgaattgtgactgtgagccttcatcatgagtctttaatatatactaggaagggttatattcctcaacaacttgtggctgcatcagtaaggaggagtagacaaagaagattattcattggttggaatggtaagcattaaactattactattattgtattataaggtactctgtttatgtatattatttaatgataaaaagagagtattttttttatcttttatggtcaatataggatgctcaataatcaatatagtcattgataaattatatacttaaaaaagaatttatttatttatttatttatatataattactatttatcttatatgtgtgtgcatgaactacatagtttcatacataagaagaatgaatttttatgtatattcatataggttttgtattttgtgaatgaaaataagtcaaagagagatatcttttgactaaatgagcctataaaattgcataggtgtataaatacaaaacatgatatacacataatttactagagatatcatattgctatcaaataactttttttaataaaataatattatagagtagataatgatatacaaaacttgataaatgtaaatatacaaaacatgatattttattagggtattttagtttattttattttgttgctttcagtatttattattattattatattatnnnnnnnnnnnnnnnnnnnnnnnnnattattattattattattttgttgctctacagttttttttttgtagttcttgattttactgttttgtctacttttatttgcactatttgctaagttagtttattttcttgataattttatttgactcaaatgtatacaaaataaaaataggaaactaaatttatatatatatataataattttagtaatgataataataatatgaatatctctatatataaataatatagtgtatgtgaacataaatatatatcttttttagttttcataataaatattatagtttatatatttaaaagtgtatactttggatttattataggaaaaaatgactgacattggaagttcaaaagaagaaactccatcaacatatggacaaaatgaaggagtaataatacccacaggacctattgaccttgattcatcaattccttcatctccaaaaaatgatgaaccaatgacagcaaccaaatcaaatgttgatagcgagaaaaatgaaacgaagagaaaactgactttctttgtctggaatcattttaagaagtaaaaaattaatggaattgacaaagctgtttgcaactattgtcaaaaaaaattaggaggatcaagcaaaaatggaacaacacatttgcgtgatcatttcaacatatgccctcttaggaagcatcgagatataaaacaatcaatcttaaattttcgtaagaagaaggatggaagtacttcacttgctgctcacaactttgatcaagagtgttcaagacacaaacttgctaaaatgattattttgcatgagtatccactcaatatggttgaacatcatggatttagagattttgtcaactctcttcagccattttttaagaatgtatctcgaagtactattaggagggatatattgaagatatatgagaatgagaagaccaacacaaagaactcaattactgacaattgtagtagagttgcaatcacaactgacatgtggatatcaaataatcaaaagagagggtatatggtggtgactgcacattatattgatgattcatgaaatttgcacaatcgaattattaggtaataagataatttgtttaatattttgtactttatgtgtatatttattatttaatgtgagtgtgtgctaattaattactttttattatatgcattcaggtttatatatgtgactgcccctcatactgctaagctattagcaaaagtattgatggagtgtttagttgaatggtctcttgaacgtaagttgtctactcttactttagataattgtactgtgaatattgctatgatggatcaaatgaaagaaaaatttaaaaatgcttctttactaatgaaaggtgaattagttcatatgaaatgttctgctcatatcttgaacttgattgttcaacaaggattaggagcgattcaatgtgccatagaaactatatgtgagagtgtagttttttggattggtactccaaaaagagttgaaaagtttgaagaggctaagaaaggattatcatgtgcaagcaataaaaagttagtgcttgattgtaagacaaggtggaattctacttatttgatgctaactagtgccattgtttataaagatgtgtttagtcgcttaatacacactgagaaaaattacaaaagggaacctagtgagcgagattggcttttggcaaaagttatgtgtgagaaattgaagttcttttaccatgtcactgagatgttttctgggaccaaatatcctactactaatctattcttctctaagattagtgatatttggttgttgcttaaggagtgccttaagtcttcatatgatgagattaggataatggcatcaaatatgatggataaatttgagcagtattggacttccattcatggcatattagccatagcaactgttttggatccaaggtttaagatgaaattaattgagtattactttcctaaactttatgttggtgattatcaaaatgaagttgaacgaattagaatgttgtgctatgatttggtgaaagaatataaaccaaatgatggaaaagaaaatcttattgatcctttatccaatgcttttggagttggtggggatagtgatggatgtgtggatcctttagctggttatgacttgttcgttagtagtacttctaaggtggatactttcaagtctgagttaaagttctacttggaggaagaagttttgcctaggagtggagagtttnnnattttagcttggtggaagacaaatggtcttaagtatccaacattacaacaagttgctagagatgttttggctatcccagcatctgcagtagcttctgagtctgcttttagtactagtggaagacatgtgactccttgtcgtaataggcttcacccgaatatgttgggggcattagtatgtactcaagattggttatgggacgagaaactaggtatacttattataaattactcttattatttatttttcttttatatccaaagcaaagtgcttaaaatgatattttttttttctctggtgacaacaagtatgtattttttttatccatttatatatatacattcctttctcataaaactccactttggctagaaaagaaaaaaaaaattagtgaaagttgttattagaaataatatctttaaaacatggacaataattgttatacgcatatacagtagaacctctatccaagaatacacttgggaccaagtaaattatattctaattgggaggttataactaaatag

SEQ ID NO: 21508 - DNA, 2851 bp, Cannabis sativa
tgcaatcagagctagaaaggcagaggagtatttagctggaaaagtgctaactgatgatgcgttttatgaagctagtaaattggttagagctactgttgtccctgaagatggcacttcaagtcctgcttataggtcaagcttgtctgtaggttttctttttgagttttttagctcctttattgatactacagctgaaactactgatgggttgttggggaaatgtgaggatgctgtgttggccaaggatttgaagttaggagagactgaaaatcagttcaatcatgatgaaattccaactctgctatcatcagggaagcaattaattaaaacaagtccagaatattaccctgttggcaagccaatcacaaaatctgaagcagccctccaagcttctggtttgtattctgggctaaaacatcactttatttttgcataagagttgccttgttgcatgaaaggcctcaaaaaggataaacgaaattacatatgcctctacatttcttcatattccagtacgtgttttaataatcttccatagtttttttttttaatgttgtgtttataactgtcaatgaagaaatcttaacttgtctgaacatgatgttgaaaatttaaggaattcacctatgcatatttaaccttagatgtgctgtaatatgttctcttatccatatttcaaggtcatttagtatttagtgctatgcttatttctttgtggatgtcagtgcatccctctctttgtccgcctgtgtcgcatttgcttttcttcctttatgctctttttcttttgataattacgttgtcaacagaactatggtccggtgtatttgttcctcttatgtttctcatgaatactgcaaattccattgcttcaaggtatttctttttttttttcccttaacagctaatttgtgtcatttatgttaataatctgcataggcgaggctgtatatgtagatgatattccttcaccaccaaattgtttgtatggggcattcatttataccacagaaccttttgcacgggtgaagaatataacattcaagcctgatcaacagccccgtggagtagttgatgttatatctgttaaagatatccctgaaggtggggagaacattggatccgcgaacatgtttggtactgaacctttatttgctgatgatctcactgagtgtgctggtcagcgtctagcttttgtggtaactccaactcccactatacatctctatgtgtgatggctttcttcaagtgagagtaactttactctataggtttgcaagcgtatcaatcttcttcgtttattgtgatatctgttctttgttaggttgcagatactcagaaacatgcagatgtggcagcagagttagccgtggtcaattatggggtagaggatctagagccacccattttatctgttaaagaggctgttagaagatctagtttttttgaagtgcctccggtcatttacccaaaacaagttggtgatgcatcaaaaagaatggctgaagctgaccacaaaattatatctgctaaggtatggcagtctcatctattttgaagagactacatgtactacagcataataaaaaaaaagaaagagagtgaacaagttgcatgaacactgatttggcatctctatgcagtatttagcttatactttcattcttaccagatcaagcttccttcacaataccatttctacatggagacacaaactacccttgctataccagatgaagacaattgcatggttgtttacagttcaaatcagtgtcctgaatttgtacataatgttattgcaaaatgtttggatgtaccagggcataatgttcgtgttatcacaagaagggttggaggtggttttggtggaaaggccattaaagcgatgcctgtaagtatcattatagaatcagttttatatctcctctttcctaagataaccaaataattgaaattttcctaagatgaacttatatccattacaaatttaaaatattgttgaaccgtaccaaaacaccatccaaatgcaaaatttgatgaaagctcaaaactgcacttcgaacatgaacaatcgagaaagaacaattgacactaataccaagagaccaccctgcacaacaattgcttctgtcaaactgtacgtatgacaattataccatcttctgccaagctgtgattacgcttaataaactcactcccataaaccaagcactattagcaatgataaatatttgagaataacaaagaacaaaaagagcgaaaaacagagaggctagagtttcattgatagcaaagtcagaaaagtgtctaatagaaataatagttaagtcttgtatcaagacataaagttttcaccttttgtatctctagtctttcaaatagctgctttaaaatagtttgaagctgttaaaatgatgatgtagtactgagcaagtatttcataatccagattattctctcctgtatggtgtgtcataagcttgctactctcatgtataagttataactaaattaaaattaaaggaattatttacattatgattatacaggttgcaacagcatgtgcacttgcagcacaaaaattacaatgccctgtcaggatatatatggatagaaaaactgatatgataatggcaggagggaggcatcccatgaaaataacctacaatgttggatttaagtcagatgggaagattacagctttagaactagaaatattgattgatgcaggcatgtctgtggatataagtcctatcattccatcaaattttatgggtgcatttaagaagtatgattggggtgctctggcttttgacataaaattatgcaaaacaaatcattcaagtaagac

SEQ ID NO: 21509 - DNA, 2260 bp, Cannabis sativa
atataataataaaaagttacacacaaagctttatgaacgatactaatctaattttataatttacaatagtatttaatttgctgctaaagtactatactcacatacacttttctcttaatatataatagtggtgagagcaggtataattatgtattgttaaatagatatataggtatatagtatatatatagatatgttacatgtagagtggcatgtaatcaataataaggcatatgctagcagtttaagttctaatatatatgtatatatacatgtaatattgtaatcatcaataatgtctaatgggtggatagagcactgatgagttcttagatgtacggctctacctaaaccagccaaagcctttctcctaacactttactactttaacgaattaaaaagagcctcaaagcctatcttataatatgtgtgtatatatatatatgcgcacttatttattataattatattatgaaatgcttataatcatttatattagcatttagttctgctctctattgagccatagaaattttacaaaataacttagcttaatatttaaaagttatgctctcccaaattagtccagtacattaatgtaatatatgttaattttcccaaacatattgaaataaatgttagcaagaaaggatcttcaactgcaaattaatagcaatataatatagttttattaggcacacgttattaagtgggtgatatctattgagccttacaaaatcaatatctctgtttaatatctcctaattaatcacaatgaagatttgatctaaaaaggttttgaatagaatgccaagaagctttacctaacttacctagtcaaagtcttgctcatatctatacatattttattgagggggaaaatcatttctagttcaaaatgtatgacaacaaaccatgtaatgaataataattaatcatcatgatatggtttcaatattatttataaataatatctcgactatgcaggactaagaattaatcatgccatgatagcctcaaagttgtttcctttatttatagactaataaaaaacttgcacagagagagagagagagaattattaaatttaatattgttcttgagagagagtaaatatatatcatatctatatatatattctactaattgctgctagaaacatatcctcaatcatactgtctctcttttgtgcaatgcaatatatataggactgaaaatggtatatagcaatcgtcacatgaagacaacacctcgagttttgttcccattattaataatccactaaatgattaactatcgatcgagaaattcatttaaaaaagctaatacttataataataagctacgtacgtaagtatatcactaaaaatttaaatgataaaaaattgtatgtaaaaaaaatgatagaactaaaagcaatttgacagtataaaatataaaatggtacttataaaaacaatttaaacagtttgagcgtagctcttgtatatcgccagttcactcttctactgagttgataaacattgtaattggctaatttgatttattaattaacttgtcatatttccattcaaaaaaaaaaaaacaattagaccatattgtattgctgtgaatcaaagtcgaagtggctattattgtatgtaaacttccattaaaagcttgttaattacatattatatgcatgcatatagctctgcgcagactttcagacctatatgcctgtaataatataaatatgtttcagatggtatttgtgttttttctactattaaatttagaaattaaatgtcatatttctatactagtgtttaaaatgtaatcacctttttgaattctttttatatagttttgggaaatcgtttgtttatttggtaaggtttaattatgcctttcagctaattaatttgttgccaaccatagtgctaacctaggtaggatttggttaatacaacaattaaatataatttgaagatgatctttttgttataatatatctgaatcggcacttagcaaaaacattgtttaaaatttaccttaatgatgtcaaaccacaccaaaatataactttagtggaagtgtctcgaggcaaatttaattaattaaaacaacatttttacataccatatatatatatatttatcctagaaggcctttatttaaattatgaaaatgattagctataccatctaaacatgacaataaataaagtgaattcgtttcttcattgattgcatatataaatatattattatcttcttct

SEQ ID NO: 21510 - DNA, 3507 bp, Cannabis sativa
agtctcagaattatcccacttgaccttccccaggtggtgtggattgcacaccttacctggtatttccccttacgaatcacgggactactgactgtcacagatggtgagccacttgctactgatggcagtgatacaactatggacccgtagttctagctgctttgatttgttttctttatcttgattttattgtacagtggggacactgtttattttaagtttggggatgggaagacaatttcatgtttttaatttttaacttttttttattcattttggtttttatgagtagtttttagttaatttattattatataactgtattaacgttgacttatgacctatggattcaatgatgaacttatgctaaactctttgatattatttagtatgtgtgaaaaacttgtggattgtgtgcttgacctattatacttgcttttgatattattatatgagtaatgtgtcattctatttgttcaatatatatatatatatatattgtgattttatgtgcatgtgtagacttagtttgatttggttgatattaagataactaaaacttgtataattaatttattggggcaaagtcttgaatcatttgagccaaaaaactaaccttaatacattatcctttattgtcctattttgagtctaattttttaatttttattctttgttaaaaacaaaatgcatatttatccttgattagagccatgaactcaaataaattatccttaccctattttgcactataaacataagttgttgtgtagtaagtgaaaaatatgatataagtgggatgggaaatttgtttgggaattacgtttgggaattttgtatgtgcatagagaattatgatccaagtatattacattgaaaagttctcttcttattaaaaaacaactttaaagaaaaaaaatcatattaagaaaaaaaaaactaatagcaagagataaatttgataggattataactttaattgtgtgaacaatgagatatcaatttaaaaaaattttgttgggagaaaaaaaaattataatgaaggttttgtattttgattagatttgtaagtttatgatgtgaatctagcctaaatggcattcttatccactatttacctaaacctaacgatacatgtatataaagtctttttgatctacatgactttagtttacattagtgggggtgaattagttatgcaagtctatggttatcttgaatgttttgtggaaagagaagtatttatgcacatggattacatgtatataacggtagtagaattgacatatgtatttttaataaaaataaaatattagaagttaaatttaaatagattgaaattctagtcctttgtttgaagtgcatgttaaataattgaaagagagttttggtgtttgagataaattacctctttgttttgtcgtctaataacttgctagtttttttatttttttttttaaaattttagttttagttttattcttttttattgtttgaggacaagcaatagtttaagtttggggatgtgatgggtatttgttcactaattcttagtcaattatttgatgaattaatattgatttcgtaaagttttgtatagatttgatgtgtttaataagtgagtaggtttgtgcttaaaatacaattttgtgatgaattgagatatttgaaccaatttttgacaatatttttttttttcattttctcaaggatcttatgaaactcaaaatgatagagcttgttcctagagtttcaaaatatgttaaataatcttatttggagtctgaacgcaaaagttatgcatgatttaccgagcaaagatcaaaatagtaaaagagggacgaaaaaatggtttgtggcgccaaaagtgtggcgttgtagcgccgctcctaaaaaaacaaattgagaaaaaaaagataattttagcacttggggtagtgatatcaagaagtcaagtatggccctatagcaccgcgtatttttgaatttaaatcctgattctaaatggattctttctatcattgggcctatataaagaatgatgtaaattaacttttggacgactggagagatacaaacaagcaactttgagattagaaaatatattgaagagcaagagagaagaaattcaaagcaattatcatccactatcatcattagagtcaatttcttcttatacttttttattcttttgtttagttatttaattatgaacatgattattatggttatcatatttgtaattataaactaaacattcttgctagagtgttgatggaactgttttagattatgatggattaaagtttttagattaatcccataattgttcttgctactttgttaatataattttgtgttaattattatcttgttaatgcttgattaccattaattaatatagagattttagatcttacacttgagagaggtaatattctaaaatcagatttagaattgcatgacatagaaaaaatgtgagattgatagattctactaattctatgagtttcatttaaagaaaattatattgctttattattgcttaattgattaacattgaatagagatatcttgtagttaattaaaattaattttatcatcactcgaaagaggttaatagattatattaggattcttaaaactgctacaaattatagaataaattgggataattggtaaactgaaattcatagttcgacatagaataattaatgctctaggtctttactttctgattaaaattattgtttgtctgtttactttttcagttattttattattttattcttaattaatcattatctactttgaagcttctaattaaagtatataactaaagtatagtaataaatgaaatttaataattaagttcgacaatctttttaaaattaaaattttttataacaacattgtacgtttatagtaaaaaaattgtgtatcactaaacatctctaaaacaccatcgtgtagctgtgttataagcaatgttgtatcgattcataaccacttgtagagtatggggctgtagccctctctaagaaaaaaatgtatacaattttatatatattaaatgtgtaagaaaattatgtatataattatttataatttgcacccaaaaattaattttattcataatttatccctcccacttcatacattctcccacccttctatatgtatgtgttatacacacaaattaataaaaacaaatcaatgaatcttaattaaggccctttaacataaataattcatattgtaacacggtcacatattatagttcaatcgcaatggttgctattacaatctgtcataaaatttaggattctatttcaaaactaattgattatgagtagagtaatttataatcttatatatagctcaatatttttacatttaatttatctgggacaatattatcaaatacaatctatatatataattaataatgggtaaatagcggcataagtacctaaagttttaagtttgtaagcggcataaacccaa

SEQ ID NO: 21511 - DNA, 2030 bp, Cannabis sativa
  modified_base (1956)..(1957): a, c, t, g, unknown or other
attattactattattattattgctctttgttgatgatgatgataacatatctaggaaattttctcccacgtcttgattatggttgtgtaattctccattgttcccaacatttctgcacaaatacgaaatatttataaagaaaagattttaagttcgaatattctgacaaataatttatttacaagaaaaagaaagttaatttgatttagaaaaatctaagttcttataattatgaatatgattgtgaaccttcctcctatgtgcacactacacctacccattaaagcatgctttatttatttttccttagcttataaaagattcttctttccactttgaaaaaccattataatttctaagaaagtgcaccaataattaaaaattaattctttgctttaaacaaattataccaactagaatttaatcttaactagacatattaaaaaaattgacttacaataagacatgactccaaatatgattatctgaagcggtttgttgctcagccatcaagtcgtcgctagaagaagcggccggctcaataaggcggcgagatgactcaacagtgaggccagagtggtttgaagcattagtgaaggaagtagaaattgaaacatcctcatcggagttggagttagggttgggagcgatagccaccgcagcttgatgaatattatgccatggaatattacggcaattattgattgtagtagtattggtgttattattgttacgatgatgatgatgacaccatgaagagagagctgatgagccagctgcggccgtggccgcagctgcagtagttggatggagatcccaccaattgcttggcgatacaacgccagcagaggtggaaatagccaccgaactctcggcgcattcttcagccatattgatctctcttgtttaaattattattacaaagctttttgttgggtatgaggtttttttttttttataatttttggggtggagaagagaatgaaattttgagaagggttgtggggtgtgatatataacatccgttggtgagaggaattaagggtttttatttttttgttaaatcaattatgaggggacaataaaatatgcaaaatgagtattccactatatatcgtggggcaattattataaatgagagagaaagaaggctaaggccacgaaagtgctttggtttattaactagggtttttgctgctttttttcttttttgttgttggtcaagtttggtttatatatgagagattttattgtttatgtatataacatattcatcctcatatatatatatacacacatatattaatattctatttattaatattgcataaaataaataggaacagaattatcatatgacttttgttgagttgaggatactaccaagaatgtgcaaaatagattattatggatcagcctcgttatattttggataaattgataaattttatgttatatatacttttaataatttataaaaaaaaaaattagcaattaatttaaccatgcatgaagtcatgtctataccggaaatatatattcatttcattttctataaggtttaattggcaaaatatttagtcactttttttaaatgattttacaatattattgtttttaacttttgataattttttgtaaattagcttttgtctaaaaattcaatgactgccacaattttttaaccatgtatctagatcgtaaataagtattgaaactaagctaaaaaacataataatagttttaaaaaatattattttatcgatccagaccaatataatagagataattacataaagtattattttttgtaaaaaaaaatatatttttttaagtttaattttttttaagtatatttttacgattttccacaaaaataataagaaaactatataaaattaacaggaaaataacaataaaatataggctaactattcaatagttacatttttattnnaaccatatggttacatttttttacctgtaatagcaggttactaataggtaaaattttatttttagaattaatt

SEQ ID NO: 21512 - DNA, 2658 bp, Cannabis sativa
ttgcttggaaacattgttctgatgtgttatctataaatttgcaggctgggtttgctggcgatgatgcgcccagggcagtctttcccagtattgttggtcgtcctagacacactggtgttatggttggaatgggacagaaggacgcatacgtaggtgatgaagcccagtctaaaagaggtatccttactttgaaatatcccatcgagcatggtattgttagcaactgggatgatatggagaaaatttggcatcatactttctacaatgaacttcgtgttgccccagaagagcacccagtgcttctcactgaggctcctttgaatcctaaggctaacagagaaaagatgacccagatcatgtttgagacattcaatgttccagctatgtatgtggccatccaggcagttttgtccctttacgctagtggacgtacaactggttcgtatttgattcaattacagtaagatttggaatttcatttagtaattgtattagaataaactgagttggctttctttaccaggtatcgttctggattctggtgatggtgtgagtcacactgtgccaatctacgaaggttatgcccttccccatgccattcttcgtcttgaccttgctgggcgtgatctcactgattctttgatgaagattctcactgagagaggctacatgttcaccaccactgccgagcgggaaattgtccgtgacatgaaggagaagcttgcttatgttgccttggactatgagcaggaactcgagactgccaagagtagctcctcagttgagaagaactacgagttgcccgatggccagattatcaccattggagctgagagattccgatgcccagaagtcctcttccaaccatccctcattggaatggaagctgcaggaattcacgagaccacctacaattccatcatgaagtgtgatgtggatatcagaaaggatctctacggtaacattgttctcagtggtggttctactatgttccctggtattgcagacaggatgagcaaggagatcacagctcttgcaccaagcagcatgaagattaaggttgtggctccaccggagagaaaatacagtgtctggatcggagggtccattcttgcgtccctcagcaccttccagcaggtgagaacacattgcatcgcatctttaattttcttcaactaactaactaaccaccctttttctcaattttgttttcaaaatgtgctattacactgaggttttgggactaaatatttggttgtttggttgtgattattattcagatgtggatttccaagggcgaatacgatgagtcaggtccatccattgtccacaggaagtgcttctaagttgtaacggaagtgctttgatggtgagttatttttcatttagttggcttttcgtgtcatgcgtcatgtgaactcagtttggttgagaagttttgaggaatgggatcaatatgaattcacgcttatcgtatctgctgtttttgagagagagaaagagaggcttttacatggaatgaccttgtatgtggactgggcacagaaagaaataggttgaaagttccttcctgaccgtgcatcatctatggttcaaccgtctctttcagtaggatgctgtgtagttggagagtgattgtttttttttcttttccaagcgaacataagtgtttttttttaattattattattattatattattttcctttaacaatgaaggcgaacataaaatagttattgtatctgaaattttcagttagtgtcagtttgcggtcataaactatctatgaaattatattaaaaatactagcttgaaagattgagagaagtattttttaatcttttatttttttctcttggattttacgctattttttcttaatgttattaacccgaagtattacattattggatatttttatgttggttttgtgtttgaattttcaaaaattaaggccactctcaattatcatagttggttctttgagcaattaaatgacctgtgacgcctaatgatttggtattcgctgtctagtgaaccttgaataagtccaagttttattgtacactctaatctagtattagaagtaattctatcatattgcaacttcttcttctttttttttttttgctaaaacattgtaaattatttgtaggacagatattcttcaaacatagtcctaccttaccggtttgcaaaatatgcaagttaagtgactaaaacatagttcttctaagtttgcaaaatatacaagttaagcgacctgtaatacaaacataatattttgtcgataagattcttggtaattatcccccctcccaaaaagaaaagaaagagcttatgtttagcacgattaattttggagtgttataaattttgggtgcaaatattacatttaacagctagtctccaataaaaaaaaaaaaaattgaatcagctactaacttgaaatacatttgtgtcagctagactatctttttctatgcagggtgattgtgtttctagcgacatacttggatagattggcagatttgcatattttcttctatgtaagaatgtaagacatttttaaattccaatataagctttaaaagaaagtaaggggtgtagtgagaaaagacaagaaatgggttaataatttggataattacataaga

SEQ ID NO: 21513 - DNA, 1015 bp, Cannabis sativa
  modified_base (410)..(416): a, c, t, g, unknown or other
atatttagcttcttgaggctgaaactttatattgctagaccatctctgatgataattaatttcagattaatatatattaatctaaagattgcttcaccgcttaccatatcttaagactggttttattatattaattacatcatcttattgttcaacttttgtgtttattctcttgtgtttctctttatcactttgttgagaatatttgactgaatttggtgatcaaacattcccaaagctcaaaacacttagattaaaatcatggaactgaagaccaaaagagtgtaattatggctaaattacagattaagcaagagaattagctaataatcatgaactaagccaactactgagtaagcatagtcacaccttaaattgtatgatgaccggagagagagagagagagagannnnnnnagagagagagagagagagggcctactttgataatttgaaaagacaaccaattcgggcaagaaaaatatgtagaaaattatggcaaaaaacttttagtcattcactcgatatcagtcacagaaacagtcacccctaggaagtttgaaacaaaacaattattctttactcagttcgagatattgaattggtcaaaaaaaggaaaaaagaaagtacttgacatatatagtagatgacctatcccctatatatataggtaataaacctatctcctttgacatatatttcttctttaatcttaaagagtttctttgcaaacctttttcactatctcagagaaagtctctaacgatcatggcctcaacaccatcatgcaaatacttgaaaaggccaaatattctcagttccatgattttttctctcatattaatattatctttcaatatagaatttacaggtacatatatatacatgtatatagtttctttaatgttatatatatacacatgtttctttggtattaaaacgttcataattaaatatgctttctgtttttaggagctgatcatcatcatcatcagtcatttttacctaaagatgac

SEQ ID NO: 21514 - DNA, 3248 bp, Cannabis sativa
tctatgtaatggcggattgatggggttgcaggtggggagaaaagcttcagacatcccatttgccagaaatgatatttggggacagttgtttggttcttaagcacaatcctagtggcactaaaattcattttaatgcgtttgatgctctactgggatggaaacaggaagctctgccgcctgtggaagttccggccgctgaaaaatggaaattccgcaggtaagcaacaaatgtgtatgcattaccttagtgaaactgaagaatgtttatcatgattagttttacagactaaaatgtaccacgttactgtgttgaatttactgaaagtgatattattctctagcatgataaaaaataggctttcttaagtcgctttaatgtttgtattttcatcttcttatatcaacatgagtttaaaagtccatctttgtggtgaagagagtgcgctgcttgttcatgtattaaaacaaagccaaatccacggttttaacatattttgttcttgcttaggtgctcaaaattctccatttgttcggtccaaatactacacatgagtggcccaattaataatgtgcattgtaggaaatttgtttaagaaatgactttgtccaccctaggtcataacgaaattgcgtgttttgaacttctaaatcaaattgttcttttatttcccacttattagaggagatattttattaagttgcatgatattccctttccgaaatgcagcaaaccatcccaacaggtcattttggattatgattacacttttacaacaccttatcgtggaagtgaaacaattgagattgatgcaaccgaggtgtgtggttcctctttctctctaaatttgctgggtaaaattgctgttctagagtgatttaacacatcataatcagttctttgagaatctcaaaattgtggtgtgtgtgaccaccatttttatttttggtttgatcagttcactttctcccatattatcaatttgtatggtcctatacataaactagcattataaatgaatcagttcttaaatgaaaattaaatgataaaaagtgttccattttctcagcaagaaagagaggattcctctgagggaacctacaatgtccagtgggaggagagcaaggagaaaattgatatggctgcactggcacccaaagagcctattctcttctatgatgaggtcagcatctatggataataaagtattattatatagatgcgtgttttcctctatgcgtatatgtgtttttgttttcctgctgtgtatttacagcccttgagcaagtgttttttgtaactgcacaggtaatattgtatgaagatgaacttgcagataatggggtgtcgcttctaactgttaaagtggtataatatcaatctctgattctttttggctgatcttgtctttcttgtttcactcatgaacaatcctactattattgatgactgactgagtcatcctttgattctccagagagtcatgccaagttcttggtttcttctattgcgctattgggtgagttagttccctttaacaacaatattgcctttgacttcttttaggaaaatgccattaatatatacatgcacaagcgggtgtgtgcgtaaacacatcataattatttaacttgagatcattcagccgataatagctaacaatgaactatttagaagagtagaagtaaaagggtagataatagtggacatattttgaaaccaaagcaatgtacggaatttctctcttcaaatttaatttttatctatttgctgactagaaacactttctgtctgattcctagctctgttggttacatttttcttacagctcagagttgatggagtgcttatgagactaagagacactcgaatgcattgtgtatttggtgacaattcaaatccaactattcttcgagaaagctgctggagagaagctacatttcaatctttatctgcagtaagtttttatgtgcttgctgcatatgctataaattgatcctctgatctctcatcaaggatgaaagttcttttttcatcctcctgtttctgaagtactaatacatgtttggctttaatttatgaaatatcactcagatatataacgaagctattgtttcaaaacagaaattcttcttacatacaaatgtaatgtttgcttcctactgcccaccgttttggacttttgaacattcaattatttacttattttttgctggagtaaactttcatttgattgtatatataaataaacacattatataacatcaaaatttattgttcattgaattttcaattgtttcctgtttcattaattggctaatcccattgtgcagaaaggatacccttctgattctgctgcttacagtgaccccagtgccatcagccagagactacccattgtcatgcacaagtctgaagtgcttaaagtccccggtaacctctagagctgtaaaaattatatgcacggaagattgttgaatttagtctttcattgtggttctggttgatgttaaacttatttatttacgaaaagaaaaattggcatacattttcttgtaacttcaagtttccatctatagtgtttttttacccagaaatatttctcaattagttcagggtagggaaataaataaacttaccgaatatgtggtctcagaggtgatcttctttcagaaacaattgtaggaactgaaagctaaatcatgaggcatgacaccctctttttggtgaaagagttagaagcattagatcaatgtgtgatattgttatttatagttatatttttgcttcagcttgagcattattgaactctggcagtggcatgatagatagaaaggataacaaagttcagaaatcttgtgttttgggaccgtgttggtgatacggtggtataactcctacggctacagaccatttatttatgttcttaatgtttccaatttccttggaagtttgcaaatgcaaatactcatttctttcaagaatgaggtaggtaggtaggtgctttgactaaccttgaagtgaaattatgaagtctgtgggagaaagtttcatgtacgctgaaagacgggaaatagttcccggaataaaaaagaagaaagaatcaagaatgctttgatttatgattctttcttccttgggtgaaggaatttattgtcattgaaagttaaagtggtccaaaaatgactacattttttgagtgggaagtacaactgtacagctacacgcaatttcgttcgtttcctatgca

SEQ ID NO: 21515 - DNA, 3139 bp, Cannabis sativa
gacaaataaataaaaatatataaggaaaaatgatgcattattagttcttaaacaaataaattttgaaaaaaattataaatttagatataaaatagttttatttttttttaaaaaaaagtattcttacacaaaatccatcatgtacctcaggtaggagccatgcagcctcttcttttgttacacatctaagtaatggcacggaaaaacctcttctatacatcactccaatgactatgatgtatcgtgaagctttcctcatcatcttccgagctttattcctgtcatttggaagttctccagtgttgaggtaaactgctattgtgtcatctagtttggtgttttgtctattatttcgacttcttccacgcaagtgatgcgaggttcttctaagaattggattgggactaggttggccttatctgttatagtgatgctcgcaagccgtcctagggcatcaatagtggcattttcttctcttagaatctgcctgagggtgtaagccttgaattgtgcgagcacgtcttgtatctttcttagatagaccaccattttatcttcctaggatacgtactctcctgagacacaacttactaccaattgcaaatcactacaaacctcaatgtactcggcatgtacctcttaagcatgttttagtccagctatgagggcaacatattctgcttcgttgttggaggccttgaacccaaatttgattgctccatgcaggtgtggcccccaggtgtgacaagggaaaatcctgcaccaaaatgctggtctgtagctaatcgatccacatgcaatttctgggtaggtctgtcttcattcttttctggtaggggctattgtaatgcctctgggttgtccctcacgttgctttcttctttgcctatacactcaactagaaagtcgccaaggcctgtcctgtaactgttgtacggggttgaaagattatttcataccgacccaactctattgaccatttaagtaatcgcccaaaggcatcaggcttttgtaatacttggggcaattgttggtcagtgtaaaatcaaatagtgtgagcttgaaaatagggccttaacttccttgttgctaagattgggtggtaagtgagcttttctattataagatattgcccttcagcttcaacgagtcttttgttgatatagtagactggatgttggacattgttttcttcccttatcagcacgacgcttacaacatattcggtgacagccaagtatattcctaattcttctctgtccaggggatttgagagtataggaggctttgcaagttgtctttttaattcttggaaagcgttctcacattcctccatccattcaaactttttattacctcaaaggatgttgaagaaaggaacacatttgtctgttgatttttaaactaatctactgagtgcagctatctgaccagtcaagctttggacttcctttgtctttgttggcgatttcatatccaggaggcttgcattgtctattgattagcctctattcctcgagcattgacattaaaaccaagaaacttgctcgagctgaccccgaaggaacactttaagggattgagtttcatgttgtattttctgaggattttgaagcattcatccagatatacctccatattttgtccgatttcatctttaaacattttgtttactagtctctagtaggtagccctaacattcttcagattaaacgacattactttgcaatagtacagacccatatctgttcaaaaacttgtatgttcttggtctggtggatgcattttgatttgattataccctaggcatccatgaagattaggatttcatgttcgactattgcatccacgagttgattaaaccttagaagtggaaaacagtccttaggacaccccttattgaggtcggtaaaatcaatacatactggcctttttttgttcgcttgggtactagtacgggattagtaacccaagctgggtagaaggcatcaatgatgaacttattctcgcgcagtctctctaaactcctctttcagtgcatgcgtctgttctttgtccaggagttttctcttttgctggacgagacgaaagtttggatcaatgtttagggtgtgagacatcagagtaagatcaataccgaccatatcctcatgtgactaggcaaaaacatccaagtttgctctcaaaaattttattaaagctaattttatttctagcaacatacccttactgattttgagtttcctagacatgatttttttgtcaatttccacctcttcaatttcttcaattggcacacctattttgtttgtgtccccaagttagggatgcatgtcttcatccgagccttgggcgacttcatattgggcaatgctattttcttcgtctgatctctggccgaaggtattttccttcttgaccttgttagagcaatgttgtagcattcccatacaattcgtttgtttcctttgagacaccgtactccattttttattaggaacttgacgcacatatggaagactaatgtaacaacttttaaatcaaataggatcggtcgacctaacataacattaaaagccgatgaaacatcaattatcaaaattgtgcaatcacaattatgctcctcggagcttgtccaacagtgaggggtaggcgaatttatcccagaggtgaaacgctctggccagagaaatcatatacgagctagatgtagggggatcaaatctctaagctagagtctcatcttctcataggttattttaaataaaatgtttgaggaagctccattgtctatcatagtttctgccactttcttatttgcaattttcacttccacgaccaggggttcgttttacaggaaatggacgtggctttcatctgcttcagtgaatgttattgttggctcctttacccgtggtatttttggttttctctcttccacgacccagactgtttcaatttgttcgtactgtaaggctcgggcatacttttctcgagctttgcctgagtctcgagcaagatctggacccctaataatgacctgtaaatgcccatccagcaagatgtggaccattaacaattttgaaaaatatagggttcattttgtcatttaacaaaatagagggtccaattggtaact

SEQ ID NO: 21516 - DNA, 2758 bp, Cannabis sativa
ttaatagccgatcttggttgataaataatttcatattgccccaactatattgcccacttaaggaggcaccctgacgtatctggcttttgtaacacttggtgcaatggttggtcagtgagtaccatgatggcgtgtgcttgaaaatagggtcaaagtttttgggaggctaaaagtaaacagtagattaaattttctatgaggggtatttattttcatcccctatcaaccttttggttacatagtagacctggtggtataccttattttcttcccttactaagactgcattgactgcatgttctatcaccgccaggtatatgcttagctcttcaccatctaggggttttaataggactgaaggctaggatagttgttgctttaagtcttggaaggcatttttgggttccttagcccattcaattttttttcccataggatgttgaagaaacagacacacttgtcggtcgactttgagacaagctattcgtcctgtcaagctttaaatgtctttgatcttagttggggatttaatatcaaagaacaagtattcccctaagagaaccccgcctctatatacactccatgagccatcaaagaaactttatccactcctcgctcttgccatcctcgcctaacaaagccctcaatcatttgtaatgatggattcactcctaaaacattgcagactaaagcaaacttccaataattcacttatatatctgccatttcaattttggctctagttttctccccataaccactagttttccccaaattcatcttctaggttttctatttgtaaaatgaggataggagaagtgattgatttggatgctgccatacgtttcgttgcctagacgatcccaaaccaagacgatagggttttcttaactttcgatcgatctgaagtaagctccccctcacttgatactattgttaacaaagctttcaataacgatctctcctgtaccctcttcgcctctatcaaaccatgttgggaatgcaaccaaagtcccaccttggcaaggaatagaaagaattatgggtatataaggatggacactagtcccattagaatgaggccttttgggaaggtgcccaaaaataaaatcgtgagggcttaggccgaaagcggacaatatcatattaatgtgggagtcaaggtgcggtaccggcccaacaaggtagatgagcggggctcaacaagtagtattagagccaaaagcgctggtatagtgggctgcatttgcaatgtgtggaagatacccttaatgttatgacctcgcgattgaagatctatattgtaccttgtatcgaaagtctatatgatattgaagtagtcaggtggcgtgtcccgttgatgattacggcggtacaagatggagatcgatgttaggacctgtgtcgaaagtcttcctgacaaaggtgatggtcagggggcgagctcccttggtgataacggcagcataaggtggtttcgctggaggagaggccacaagtatgtggtcctgtgtttgaggggaggattgttgggaatgcaaccaaagtcccacattggcaaggaatgaaaagaactatgggtatataaggatggacactagtcccattagaatgaggccttttggggaggtgcctaaaaacaaaaccgtgagggcttagtcccaaagcagacaatattatactaatatgggagtcaaggtgaggtagcggtccaacaaagtagatgagcggggcccaacaaccattagtaatttaataaaattattgtaatttgtttttgtaagcttcctctatcactcaacaccatttttaatttttttttttttagtttttgaaacataaataataatatttttgtaatttaatatttttttaaataatttaaattttttgaaagaatatttatatttttaaaagtaattatacattactgataaaaaaaattataattataggtttaatattgcattttgacattatgcttaggtgttttgtttttgtgtttatatatttatatttttcgtattacattgtacttaaatttataatatttatttcgtgctaaaatttatacatttcgtattgtaccaagtttaaattcattttttttcgtagtatatcgtgcttgtaatcatatggtgcttgtaattacacagtaccacagctgaccctttggtacagtgtcaaaaagtttgacctaaatgtagactagggctaggggggcacaaaagtttgtggttgactggtccattaaaagatgatgtgaaagtgaatattgaggttattacttaccccacgtgttataatatatttattaatttaattaattggatatatggtccaatctcttactttacatgtggcaaattaccattggcttaatataccattggatcaccacgagtcaaacttgtggactcagttaaaaatagtatggtcctaataatttaatttcaatttaatttcaggttgaaaattactaaggatatttaaaatgtgattatcaaataaaacagtgttaataacatctgaaaaacacaatttaactgaaatgaagatcattatactagtttttctgtgagaaatgctaaagggcaccaatagtgcttatcctcttatgtgataatattgttattggttcaattaagtatcaggtcccacataatttaatataatagtttttatggagtattgctagctaatcaaaacgcgacatgtcgaaaatgtataatatataacaatgctcttttccttttca

SEQ ID NO: 21517 - DNA, 3213 bp, Cannabis sativa
aaaaaaaaaaaaaaaaaagcagcagaacataatgtgctttgccactagtttaataatatttcttaatgtgttctacttaacttcgtatcgtagtagctggtagtagttttaaaagagaaaaagaaatgccttacttcttaattcaaattattaggcgaacaaaaagagaccacatgtgttttttttttaataataaaagaataactcgtataaccgcccaatcgaagaaaataactaattttttaaaataccgttatgaaaatggattcagttaataaaatcccataagcaagaaccaccatttaattagcacaaaactgaattggcatccgttaatttctctccactattgtattttttttcttttatcttccattgttaaacaaaacacatcagaaatcttgcttaatgttttcttgggaatcaatcagaaaatctctaccttccatccaccgagttgtcatcacaacaactcagcggctccattctccgccatttttcaaccaaactcgatgcttaatctcatcttcctcttctttgagctcccataatgatggtaacaataagactaagttgttttcttcagatcgatttttgagatcaatctcttctggtgttgtgattcttggattcacctttagccttttttattactcttctccttccccggattcgaatcccttcagtccttttgatgatgactctaatgagactggcgagatcgaggaggaagaggctcagtttcaagaatcaagacatgaaaagaactctattttcctctttaaaggtattgcatgttttttttttcccttggttttgtttggttttggttaaggaaatttggcattctgctcataagagttgatttcagaggcatataggaaaagggtcttcttcaagtatgagaaacggataaggatgcaaagccctcctgaaaaggtaatctttaaatgttcagaagaagcatgacatatcatgatttaattgataatgacaagttcataaagactacaattttctacattagtgaaataaatgacaatcattttaggtttttgagtactttgcatccgttcgaacccctgctggggagatttttatgaagcctgctgacttgatgcgagcagtggtgcctgtctttcctccctcggaatcagatcgggttagagaaggatttctaagaggggaaagggtatcaggggagctacattgtgctccttcaaattttttcatgctttttgacaccaacaatgatggacttatctcttttgcagagtaagtttatgagaaagataggttctttgaaaacaaaaacaaaatgctgcaaacaataatgagaaacatttcttttacaatcaattttcaggtacatccttctcgttacattgctgaaaatcccagattccagcttctcagtagcgttcaagatgtttgaccttgacaataacgggttggtggtcactcttgtttccaagccttgaatattaagcaagatagattttttgtgcataaagttctatatagataagataaatgaatgtttttgcctcattgttttaaatcaacagagaaatagatagagaggaatttagcaaattaatggctttgatgcgagctcaaaccagagaaggggctcagtgcaaggatggacgtcgtctttggccaaaagcagtttcaactgaaaatggaggccttcttgagtatttctttggcaaggatgggaagactcctcttagacatgaaagatttgatcaatttcttagagacttacataatgaagtatatataactctctctctttcttcctatctttatataaaaaaaaataaaaaataaaaaaaaaaaaactgctaggcaatatggggcaatttggtccttggatgtttattttttacaaaattcagttggatactctattgaaataatcagaaaacttaatcttaatgaacagagtctccttaaaattctaaagtcttcttctaaacgcaagtattaataagagcagcacagagagactgcaaaattagagaatgttgtcattcttttacatttctttctttttggtattaagacaaaaatgtctttggctttaatagattctgtggctggagttctcccattacgaccacaaatctcagggaacaatatcagctaaagatttcgccttgtcattggttgcatctgctgatatcaaccacataaacaaactgcttaatcgggttgacaaaattgaaaccgaaccaagactcgccgacatccgtattacatttgaagaattcaaagaatttgcaaacctccgtaagcagttgcagtctttctcattggctatcttcagttatggagaagtcaaaagttcattgaccaaaatggattttcagagggctgcatctcaggtaatcacagtaactaggctgataatatgtttaggcaaattataccttccatctcacttttcacaatcagaaactatgaattttcactactgaaagggtgatttgtttatacaggtatgcggagtctcggttacaaacaatgtagttgacataatattccatgtgttcgatgcaaattgtgacggacgtttaagtgtaaatgagtttcttacagttctacagagaagggaaggtgacagctctgaaggaggctacaggggattgatatcttgttggttgaactgtgcgacttgctcatcggctaagcttcctttcctaacgaaattagctaacacatgactgtcagttttaagtcacaatagttacacatgatctgatatgtttgggggattggaaaaccactacagagcaggaatctaactcagcctagtctttactactgataactattttgtgccctcactaattaagttgcaggtgactttgtcagcacagtaataagatagtgcatagtctttgtatatgtataaagataatgttgttgttcatgccttgctgcttaatatgtagatagttattttctgttaatatgaacaataatcttgtattcttttaccaagtaaattctgtaggaataaatgaccatgttgatacaaaaattctaataataataaatgggatttactttgttggccttaaatccaacttttcagcagctagagacacaaacatgttatttctttttccctaccctatttttctcttgtaaggacatatcgttgtactagaactttgagcttatggtttgactgttatagta

SEQ ID NO: 21518 - DNA, 4024 bp, Cannabis sativa
aaaacatgttgtattatttatattatatcagcacttgttatcccattatgcttatgctttaatctttaaaactgtagtggattcacttgtcaatataattatagcaaagagtaatggtatatgttcacacaaaatgtgcacatatattcacttactcttatagcaaatggaaacaaaagagcaaatcaacaaaagacttgtgaaaaaaaccaattgaagcagaagaagaaaagttttacatgtatataaaactttggggtctgattttgtaacaagtaagaatataataatggaaaaaagaataagaatgttgcatggatagtacatttttcagtaaaagttataagagtacttgttagtttctattatgagttcacaaaatgtcgacattataagctcataagtttcacacacccatatgacccttttcagtgctttctgtttcattataatttgtgttagaaacagacactgtttttcttttatagtgttcttgatttgactcaagtgcctactgactaagaacttcataattggttgccttgctttgtcaccactcataattttgctattaactttcttcttttttttataactaatatataactgcaacttgaaccaaaaagatcaactcttttcttgtcctattaagataatgtaataggctgtgtttttatcttacctgtttttaaggccaaagggtcattttaagagcaagtataaattgcccacatggggttgtttcatatagaagtgaagtgtcttagaggtgtgtgttctctttaagcaatattttttggtcatggaatatgaacaagagtctttagtggtaaaagtgagtgaaatctatgaaaagatttcaaaattagatagtctcaacccatctaaccaagtgaattttctcttcactcaacttgttctatcatgtattcccacttgtcccattgatgttaccaaattttccaatagggtcaaggaaatgaggtctaaactaattaccctttgtgggaaagctgagggacttctagagagtcattattctagtcttataggatcatatgagaatccacttaagcatattagtctttttccttactattccaattaccttaaactcagccaattagagttcactatgctaagccaaaactgttctcaactccctaacaaagtggcctttgtgggatctggtccccttcctcttacctctattgtcttagcttcatatcacatgaaaacaacaacatttcataactatgacattgactcaatggcaaattcccaagcttgtgacttggtctcatcagattctgacttgtccaaaagaatgttcttccacacatcagatatcatgaatgtctcagatgtgttaaaggaatatcaagtagttttcttggcagctctagtgggaatgaacaaggaggaaaaaactcgagttatcgatcatttagctaagaacatggcaccgggagctattctccttctaaggagtgcacatggagctagagtgttcctctatcctgtcattgatccttgtgatcttcaagaatttgaagttctctcagtttttcatcccacagatgatgttatcaattcgattattgttgctcgtaaaaaatccatgcctttaatctcactgaatcaagggctttgctctagcaaatgctatgagattcatggtttgaatactctaaaccatggaaatttgattgaagaacttaccattgatgagaagtgatactaatccattggctagtttaagaaggcctaatgtcaaaccttatatttaaagcataataattgagccactctcttgggcaactcatagtactttttcttttctttccttttcttgtgttgagtttcaatactcaagaggatgtagttccttgttaccatatattatgagcatgttttaaagttatgaatattttatcatttgtagttatttttcttattactaattttcagcttactataatcaccactagactagcaaattacattcagaaattttagaaacataacagaatcttttaagataaatagtactaaaattagatgattttccaaacagaaagagatagaattggtgtacccttccatccaacaattaagcattttccattcaaatcaagagtgcaagaatgttcacaagaaaactttttgagtatgagcttggcttggtataatgatgaagagctgagttcaacatctttgaatccatacctagtaaaaaacgccttccatacatcaattgtgacatgtctgatcttcctttgttttccctcagatgccaccatgttttttattcctgttccaaagtataatgactcacaaaccatcctattttcatcttctcttttcatgaaattctcaaggcaatcgaaataggccccataaaagaaaagagcttcaatgaaacggttcacaaaaactggtgagttgtggtttgcttcaatctcagtaacaaccatcacacatggatttaagttccttactactttcactaaagactccagttgatctggctctgaaagaaagctcctaagtaaatatgaagagtagacagctactgtttcatcagactctaactcgaaaaggtcttcttttagatgagacatatctgataccataactatcttgaaagacaaaggtatgttaatggtcttggcaaaactcaacaacctttcacctgtttcctcaatgagatctttcgaagtagtccctatagaagtgatccttagaagctcaagtggaggagattcatgattagaagaagcaagagcttgcattaggacagtccattgtgaaccactccttattccaagatcaattatgtgaatcttctttgcttcaatgacattctcaataatggcttgaattcctgcaaaaatacacagctgagagaatggaatctcttcatgcatagcatggtgtgtcgcatttaagctcatcatcgctttatctggattaaactgctgaaatgtctgcaaactcaacaccatgtggcgttcggtttctttgtcaatccttgctctgagagctctacagaaatagtaaactactctttcaattggatttcctgaaacagaacataacatctcacactggttgagtagtttgcttccccattcgaactgctgagattctactctctcagcacaagaaaggagcaactcaacaagctctacatctctaatttcttcaatggaaaggccatagaaagaagattcaaaagggtggttgagcatcatagaaggaacatgatcagcagcagcctgttgagaattgaaacactgaataaatcttgttccaccaatcctcaaaatgtcatctgttgacagtttcttctcttcattgcttgttttatcataactcggttcctccataactctttctccattcatcttctttactccactactatagttccttaatatctcaaaagaagctaatgaaattggataatctttctccttcttggattcaacatttgaaaccaaagttgggatttcattaaaccttgcaatctcctccaaacatgtctcaagcgaaggcgaatctacagttactccagtatcattaagtaactcataatctgaaatttgttcttcctgcagttccttatgttgattcttggagaaaagaattccttcatctaaaaaatgatcatcttgaacatatctgaaatcagaagaagaaaggtaattttcattatctctgtcttcccaagtttctccttcataaaaatcaacttggtacttattgttgttgagttcttccatactctctcacactttataccttaaaaaacaagaacttgattttgttaaagatgtataattatatgtacatgtcttaaatatacatccaattacaagaaaatgtacaaatttagccaagtctttaaaatattgcctcaagtacaataattttgattgggatgttgatacaaacaatacaatacaagcatagttttttattatatgagtgtaaccaatagtttatactagaatatcat

SEQ ID NO: 21519 - DNA, 1846 bp, Cannabis sativa
atcgggatctagctccgcccttcttgggacatctactgtgactagttccgggccttctttgtttgggtcaagttctagtcagaccctgttcggggctcctacatcaacaccaagctcttcttcatctttgtttgggtcatcagctgcttcatctccgttttcttcctcttccttctttggctcttcttcgtcttcatcttctgcttcaaccactcctgcattcccaaacttgtccacgagcagttctgcttcaaattcaagctccgcttcacctttctcagcgtcttcgtcagggttttcattctctactgcttcggcttttggaaagccctcaacagattctaccgccactaccgtaacttcttcagctcctattgcatcctcgtctacaaattcttcagccttctcgtttggagcttcagcttcccagtctccatttgggtcagccaatgcagcctcatcggccaccgctctttctagcacaccggcagcgaagcccagttcattatcattcgcaacgtccgcagcgccatcgttttcaacggtgacaacaacgaccgcttcttcaactccggcttctaatagtgcacctcaaccttctttctcagtgcctgcttttggagcaacctcttcgtctactactactgctgcgggagccacttccagctcagttgctccatcgaccacctctgggacgtttactggttttagtctagccaccaaagctgcctcatctggcactgctggttcttctccgagtttttcattgtcgaccaaagcaactacacctgctgctggatcgacacaagcacaatcgacctctactgtgccttcgattggttagtttgcaacgttttctttataaatgacatgttctttacataattgggcatatttatttcattgtatacataatatatttttatatatgtatatgtaagttatatgtagtggaaattgtttaataggtatcgttactgttattgtattgtattgtattatctggcttaatttattttgatggttgatacttgatagtagttgatagcctgcagtgtataacctataggtacattgtaaattaagcactggactttgtttagggggagatattcatacaagattgtattctccatctgttattttgttgaatttcattgctaaaaccttaaagaagtaaatgaaattacgaaaacagtgttaaatagaatttttgtggggtttcatctatatcatactgattgcttttcttagataacttttattataacaaattttaaatatgacaattttacttatcaaggtctgcttttactgacgttccataatctagtagctagttgttatccatgtttccatgtatgacatttgcatgagataactttgcaggagtccccacttcagcgtctttagctttaacaacatccacttctggcacaactacaactcaaacgtcaacttctcttaccgtagcatctagtagtgggtctgtatacttcctggaaaattatgctattcctggagattactgctatatgtttcttttgtacaatatcattacttgttatttcattttcttttcgtgtcattaggaattttaggtggatgcaagtggaatttcttttaaatgtaagggctgttgtaataaagtcctatttttgtaaaattattattgtccaatttttgctctagtagtttatagggtttcgttctagtatatcttagttagtatacttgctaatgattccccaagagataaacgcagtatgaattttacaatatatcttatttcaggcagaaaccaagttcctaagattatactatatttctatttcccgtttaacat

SEQ ID NO: 21520 - DNA, 2753 bp, Cannabis sativa
cattatgatcactgattatatattcagagatttttttcatttttatgtttttatttttttttgggcaaaatttacaaaatatgtttttttttttccaaaaaaatattttatgagaaaaatttaaaattaagtaaaaagatttaaaaaatatggaaaaatagtttatggtgactagttaccttcttaaggtaatcatttacgttatactatttttcttattttttatatttttaaaattttttctcataaaataaccttttgacaaaatgtcatattctcgcacaaattgaataaaaattcagaaaaaatgtataatgtttactatatattttgagtggggatcacatttaatttaattgtagtgtataatcagaaagtatttgtatcattattttatctttaattttttgtatataattttttttttttgagaagattcactgttattttaaattaaaattcatttacaacagataaacttagatagggaatttctatatccaacaaatatcttcatccaactataaatgatattttactaatccacgagcagaacagaacatacataaaaaataaagcagaggtttttacacgacatactgaaattttcaacttttttattttttttactgtgggacgaatttttttttcaaaaatttagtgtaagttttataatgtgtattgtgttaagttttacggttgttatttaatcgtttcactattattttaattgttcagttttattattttacgattattttataaaaataacggtatttttgtaaaaaattacatgacaataaaattataaatttgccatttttgtaaaaacccctaaaaagcaagcatttgagcaaaagcaaagaggcccaggcccattaaaccattggcccacaggcccattagcccattggcccacaggcccattggcccaatctctcagccatactctccttcttcatcctattctcccagcccagccgcactctctcagtcgcaccatcggagaacctccgccctcgaaaatcccaagacgcatgtcattatcccgtcgccgttaggagctcgtcggagccgagatttcatggcgtctatgtgagctctatgatttcgacatccgtttcttatttttttcaatgcttaacgttgacaggcgctatgaatggaggagctccgaatcttgtttcaagctcttgaagtagtccttgattcgttgtgaatctcaggtgcatttcatataactttaatctcaattttcattattgttgagtttaatagtttacactgtaatggaaattgtaatttggactgttcttattgtttgtgagaattatatggctaattgttatgcttttcctttaactggttttcaaatgagaaatgtctagtttaaggtttctaaattttagggttttcctttttaagtttttaattgaattcttttatttattaaataaaatttaattttcaaacaattatatattttttattttaaatatttatttatgtggaaaaattaaattgtgccaattgtatactgtctcggatggaaatagctaaatactaatagaatataagctttggaggttttaccgctaaaatttgaattttggtagttaattgctagtgatgttaaagttttgggagttttggcgcaatttactggtaatatatggatagtcaatgtgacacttaattgcaaaaaatgaatgaaaatggctaaatgctaaaagaacatgagttttgggggttttgccgctaaaatttcaattttgagggttaattgatagtgaagttaaaattttgggagttttatcgcaatttactcataatatttgcttgttgtgatcacaattttcagcaacattgggttctgttttctgttttaaaccctcaatccctccaaaaccctagctttcactttcctccatttcaaacatgagtttcgcggcgtacaagatgatgcattggcccacggggatcgagaactgtgcctcaggcttcgtcactcactctcgcgcggactttatccctcgcgtcactcccattcagtccgatgacctcgactctgacatccccccagcctctcaccgagaaattggtccggtaccaaaccttgttgtcaccgctggcaatgttctcgaagtttacattgtgagagttcaagaagaagaggatagcagaatttccaaggctcaggcagagtccaaacgtggtggattcatggatggcatatcaggggtttctctagagctagcttgtcattataggttcttccccaatttacaatccaagtcattgatttgttactaggtgcgtttgaagccttatcagcttcgttgacattgttttgtaggttgcatggtaatgtggaaacaatggcagtaataccttctggaagtggtgatggctctagaagaagagattctataattttgagctttcgagatgccaaaatctccgttttagaatttgatgattctaccaatggacttcgtacaaggtggggaaaggtgatccctgttaacatggggcaaagtgtttttctttattactgcatttttttggtttgaataatgttcctgagattgatataatttagaaaattggcacttgggaaaattagtaatcgaagccttttctgtccccatagaaagtatctagcattaaaagatcgaattcaagcattgggtgaaaagaaaagcctctgagaatttggtgactttagaatttaaaatcttactggctcgata

SEQ ID NO: 21521 - DNA, 6949 bp, Cannabis sativa
cacctgcacctgcacctgcacctgcacttgcagcaccaccacccaatattaatgtaccagctgaaatcaaaacctctggcccggctgcacctaccagtaccaccttccaacaacagccaaccgataaggtaataataattaattatacttaatcccatattaatttttaattatatatgtagaaattaagaaattatttgctgataattgttttgtatatgaagccagaagacattgtgatggagttgatgaaagtacatgaacaggagaaatgtggtggtggtggtggtggaggaacaaaagctgtagtactgcccaagcaacaacagttattagtgaatgattatgatcatgatagggcgcttgaggaactggtagagagtactgaggatgatgatcatgatgaagaagatgaattagatgattatgatgaagaagaagacattattgatgaagatgatgagggcggtcaagtaattgttgatcagaggaaaatgggtaattataaaatgcaactccaccaccatcatcagcatcagcatcagcatcagcatcagcagagacaacatagtgcagtagtggcatcatccaataatggtaatgctactgctactgctactactactccaaatgacacaccaccttccttcttggccatccccatggttcaatgactactactactactactactatatcaattcatcatcatcatctacctatacctggctacctacctagctaaaactatatatgtgtatatctatcatgagaaaattctatatatatatatacatatcatcatcatcttgaaattaattcaccatatgccgccatttctcataacgtacgtagtagctatattggatggatggatggatattctcatcaaaattcatgattctttttctatatatacctttggaactactttgtacgtagtacctcttctttctcatctcttctcctgttccatcctatatatacatagctttctacaatttttgtttttgttccttgatcagctctatatagctagctagctctgagtataattatgatgatgatgatgatgatgagatacgtacgtagacgtacgtacgtacagcggtgaaattataaggttgtagagagagagagagagagagagtttgagattattttctaattgatttgatttattatttgttggtgaataaaaatcagccctacacacgtttgacaaacccccaaacggatgaggcaaaggaattattaattaatttatattattcaaagtaaattaattacgagattaattattattattactattcataagcatatacatatcatatatgcatgcaccaccctcctataattaataacattattcatttcaacagaaacagtacataatctttttcaatctcttaatgtctcttttcttatttttattttctcatagaatgaatttttgtttattttttcttttgagcttttattatcaatggagtttattgggttcgcgcgaaccaataacgaaagttacgtatacttaattatgttcaactctttctctcttgattttaattataatcaatatatttattattcttgttttaacagtaccctattttccttttcttttaattaattttgatatttatttgtcttctactatttataattcaatctgatcacattcttctcttccgatttcttagtttcatgatacatatgcatatggaataaatatatacatatatatatatatataaagaagaataatcaatttcagaaagaatggtgatttttaaaggaagatgatctctggctccatatatacaaaagttatatttacaaagtcagcggcatgcagtacacttctaatatatactatttgatgatctcattcattgtcatatatattaatgtgcaaatttttatctctctctatatataaaaatatttcgtaatatttgtagcatgatcaacatatacatagatagttacatatactaaaaactaaacacaattgatatttaccaaactatagctaatattaatatttcgtaatatttatatgtatcatgcatatataacaaactagctagctatgttatttatatgcatatatatacataattattttttttaatttaattaaatctgattcactttgaaatcaaattaaagatcattctctctcatgccccgagattctttatatatagtaatattacatactatactataaaaaggaatccaagcctttgttgtgaagccaagtaattaatatatataattatcaaatataaattaatgataaaaaaaaaagaaatggaatggagagtgaatggtgaatggccatttattgttaattattaaatccactgacacgtacgacgatatatggatcaccgatgaaggtgaacgtgggggcttctaactatatatatatatatataagtaacatcttctctctctatatatatattatgtatattttgatgtttttatttgagtgacccctcttgttttgggacgtgccctaccatgtgccttcttatgatatatgtttctaccttttttttgaaataaaattattaattacaacaatacatatatacagtgatatatcgcaaaatacaacccattaattagcctggccattatcacaacgggttcatgtttgtatagcaaacacgcatgtgcatttgtgtaaatccattaatttatttgtgataggagaagttagaataaagtagctatagtactatatatagattacttttataaattgtattgtaaaatatatatacatctgtaatgacaatgtaataatatgatatctaagtgtagtagtgtaagagagagagagagagtgagcacatggacccaattaaagattaaccctaacttgttagggtgtcagatcacattttatatttctcattaacttgttaagattaatggtcacagcctgtctgtactacgtacttggaacttggccttttatatatcattttctcatttacttatatataattattatattctctgtatcaaaactaaaaataaataaaataaaaaccatgtattaatatatatataaatatatatattgaaattaaatgagaatttgagaaaaaaaaacgtaatactagctacatctgatcccatggcatgacacttctctaccatgccaaaacaactactattacttggcagtgatttgttatgttactagaaaaagtagaataaatgatatggcctggtgaggtgtaggggccatgccaattatatgtatagaatatatattatatatatatgtatgtataagttgtttgttgtgttgtatatgatatatgaaatatgagtgtattttaaaatctttattaattaatattagtagtcaccacatgggttgtctgccagtgagtgaataaggaaagcaagctccgactgtggaggcggtaaaaaggacccttccttacttaataacaaactacctttttcttttcttgttgcccaaaatgctttccttacttgcaacaaagtacattcacatacatttctgacacttaactcttttttctttctttttttcttttcaaattaaatttaaaataagaagaatctgccaaagtgtgtgtgagtgagtgagctcactaaatagtaaatactttaatggggggtataactcatatattctctcctaatttgacgtaagcatcattatttagatgagagaattataaggatgttatgtatagaagttgaattagtatttcagactttggaaaatggttgtaaattgtaatagtaccaaaacaaacaatgacaattagaagtgatgtcaaaaagggttaaataggtaaagcaattctagtagttatcaaccaactcctttaaaccataaataataacctcagctaacacaaaaaccactactactactacttcatgcaacaccatataaatggctcaaatcatcatcgatcatacatccgtattaatgtcggaatcaacatttttttttcttttttatatgaaaaaagacacttccactggctctggaggctcttaatgacatgggtctgtttgatcaacatacatccaaaagttagaagattgtataaagctctgagtttgactgattctaacaacttggatgattggatgattggattggatttgattagattggagaatgaatgccctgctataataacaaaaataataataataataatactataattcatgcttgctcttgcttcttttcatttttgccttgaaccttgattttgtcatcagtgtctgtactgtatttacaaagttcccaattgccattagcaccaaaaggatcccacaaaatatcacctgacaacaacagttttccaacattcaatatatatcttcatcttttacttaaaagaacagaagaaacattgaccaaaattacgtgaatacattacctgccattcagaaacaaccccatccaatgcggttctgagcaatagtagtccaacataggcttcaaaaccctaaagagaagaagaaaaatgtcattacactacaccagaatccactatcacacaacatttaatcgaatctaatgaagatatgaacaaaataatctttcaaagacatcaatgttaatgaacaaaaaattatcatacatcacagttcaacttcgcagtagtacatttaaagcctatcaactataaatattaaatactgaaggtatcacaactacggccaatgcaaaaggaatacaaattcaattcagctcagtttagaggaatagactgtcataattcaggtaaaaatttaaccaataaagataaaatggcactacagtcaaaatctattaaactcctttcccccaattttttaccgaaagccagatcgttcaaacaccctaacatgcccaggacactagaattataatagaattcttgaaaattactgtatatgataataagcaaaagcataaaacgactcccctgtcagtatctattcatcagtatttatgtctcaaaggcataataatctgttccaagcttataaaagtttttataattgcatgaatttgatttgtttaccataaattgtcaagtcatggtctaattacctgcaaaataaagagtataggacagagcacccacaactgaccatctacaccagcagtttctccccaaactacatccatccttttagccttcacaaaataaacaataaacaacttaattgaagcataaagaactaataattatacataatgtattatattttgattaatgatgattgagcaagacccaagagccaagagataggccagttgtttcccagcaaaatgatatgatatgtgtttgttatcctaatatattattgtaagtagaacgtagtatattttctatatcaatacatgtgtaaaactgaatatattacatcttaaattaattcactttaaaaagatttaagtaataagtattacacactatcaatttactaagcgaaaagaagtggaaatgacacctttcccaatgcaatacgagtatagagtctttggcgttgatatctattttgtaaaagcatagctactccttgcatcatagcccatattaggaaaagttgtacccctctctgtacaagaatgaactaatttaatcaactgcaaactacaacatttgcatgtaaatatggaatgggacaaacttacctgcttctgagaacaatttggctgtcctttgatctcccaagtgagactaacaagagccatgagcatagcacaataatgatggtatatccacctgccaaagtaggttgtggtatgtcatgagagacaatcctaaacacactaaataatgatatgcatatgtggtcagtagacagatacccatcttccagtaagctaatctcacaagaatgattactagatgtttctaaagtacacaaaggcttagtgttaacatttcaattgtcaaagctactattattcaataaacgaaattgtctctgtatcatcaatcacttttaataggttataagtaagccgaacattctgccaaaccccaaaatgcaaaagataggttctttctgggacaatatattttcctatctctttttcttttgagacaaaacaacactacttgttttatttaataacagagaaaataatacacaagagtgactggggtgcaggaaaagtgtgtaaactatgttcctgctaacctacagacagaaaaagaaaaggaaaaaaacagtcaagactctacattgagacaaggcaaaaccattcaacagaaaatcaattaaataaaattacaaaatactctgccaattccaaggaagatctgagaagaaaatgtcattgaactttttcattttgaacagccacggagcaacccaaattctgatcaactccccatatcataatttatcttaagaaactcttctatttctctccagccacaaagcccgccacatagccattgtcacaccagcttctaaaacagcttcctgcttttgccaccttctatatctgtagacagaataacccattccataccaaattccttcaggacttttaaccgaatattttccaatctcaatgaagagaaaggaatgggtcttcagcctagagaagtaacagcgtgtgtaaagttttcataagaaaatagtttgtatgagtcaaatgtgtgtttttataaaaacactttggttattccaagttcttgttgctatactcacattttggtttgtttagagagatcgctggcccagtaaaactatttgaggaaaacagccagtaaattgttggatgttaaaactttttgggtgttcatttgaaaccctggatacatgactacaatgtttctcttcctttccttatttcaccacaaactgccattcattgctgtttttagtctccttggtatctgttccccccccccccccc

SEQ ID NO: 21522 - DNA, 1758 bp, Cannabis sativa
  modified_base (1683)..(1711): a, c, t, g, unknown or other
gagaaaaaatagaatcttattgaatgaatacaagtacacagtatatataaaatgtgaagcacataacaactaagtgaaataaccgaaaaggactaagtaagaattccattataacaaacaactaactaactgtcttaatcctcaagctcataattgaatgatcttcaattttgagtttgttcctaaagacagaaaacctttgaatagaaatacccttggttagaccatctcccagttggtcgaaagcagcaacatgtttgatgtgtactattttgttcaaaaccttttctcggacaaagtacaggtctcgctcaatatgcttcgttcgagcgtgcaacacatggttctgagtgagcataattgtgctaagattgtcgcaccatatagtaggtggttgagggagcttgatatgcagtttagaaaatagataatgcagccaggtgagttttgcaatgacattagcaacactcttgcattcaacttctgtgctggattgagaaatagtctgttgcttcttgcttttccatgctatcaaatttgaaccaaaaaaggtagcatagccagaggtagattttttatcatctggattggatgcccagtcagcatcgcagaatgccacaagatcatgagattctggtttggtgaagtgaaggtcgcagtgcattgtactacttatgtatctcagaatacgtttcaatgcttgccaatgtgtggacagaggtctttgcataaattgacacaccttgttcacactaaaggacaagtctggtcttgtgatggtgaggtactgtaaagcacctacaatggacctatattgttgaatgtctgcaagtggttctccctagtgagctgataagcgaagtctacttgtcattggtgttggagaaggtttggaatctaaacatctgagctttaataagaaggtcttgaacatatttgttttgataaagatgaatactgtcatctgtgtagttaacctatatactaaggaaatacttgaggagtcaaagatccttcagagagaactgagtgttcaaatcagccataagatcaacaacaacaactgaatcactacctattatcaaaatatcatcaacatacacttggacaagtgttgttgactgagatgaatgattgatgaacagggggtgatcagatttagaaggaatgagcccaagtgaggtcaagctatgttgtaacttatcaaaccaagctttaggagcttgtttaagaccatatagatattttttttttaatttgcacaataggtgttcctggccagggatttcaaaacctggtggctgggtcatgtagacttcttgtaagtcaccattcaaaaaagtatttttgacatcaagttgtctcacatcccaacctttggacaatgctagagttaacacaactcgtatggtgactggtttgacaacagggctaaaggttttcgtgaagtcgaagcctgcttgttggtgaaaccctttggcaactaatcgagctttgtacttgagaacactaccatcatggtttttctttttcttgtaagcccatttgcagcctatggcctgtctcccttcaagaagtctcactaaaatccatgtcctgtttctggccaaggctaggatctcatcactcatagaattattccaatgctcttattgaagtgcctgttggaaatattttaccagnnnnnnnnnnnnnnnnnnnnnnnnnnnnnttaacatcctaatatgaatttctagaacaatgaaataaacacataag

SEQ ID NO: 21523 - DNA, 2045 bp, Cannabis sativa
attgtaccaataataatataacatctttaacattattagagagattggtgcggtttaatagttttattcttccgaactatatgcaaaattaatattaaaaaattgttttttttttattatttttttattttttaagaaagaaaatttaaagtcatataaattgtgttttgaacagacaaattaggaattcaagggaaaaaggtgaaaaaagatggtgatttagaggttggtatttaatatattatatttttatctatttttttttatttcactaatacttttgtacatgttttcatctaataattaatgaaatatatttatattttgaaaatattattaaaagtagtattcataaaataatgagtatatttcattaagtaataataattttattatagaaaagagaaaaaacggtgtacgaagcaatattctttatatgtggattaaaactaatgaaatttaattttaaaactaactgataatgaatagaattatttatattcgtataaatagttgaataatttcacatattttcaatgcgggacactattttaatagcgaaaaataattaacataacaatttataggtttggagtagtccacttagcaaaaacaggataacaattgtgttatggaacagaggctcttcaagtgcaacagttacagcttcttggtcagatttgggtctcaatccaacaacacttgttatggcacatgatctttggacggtataaatactacatacggtgatacagttcttatctattttggcatacaaaataattttttattttattttttttcatagttatgtgcgttacaattatttaagacaccctataaaattgtgagaaatttaaattaatatacaatatataaaaagtaatgttcaaacagcctatattttacatgcgtgcaatagactgtttgaattctgttttttatgtgttaaatttttttgaatttctcaaaattttaaaagatgttttaaataattataatatacatgactataaaaaaaagttagaatgaaattttttctcaaataccgaaacaaataaggatgtatcaatatatcttttttaagaggtttattgtagaattttgactatgtatttttttattaaactaagttttttttttcttcttatgttgcagcattcgattcaagatggtgtgaagggaaatatttctgcatatatagaatcacatgcatgtaaaatgtttgtcttaactccacactaattaattacaatgtggagttatataatatttatattatatatataaatatttatataacataagaaagaagagttctatatatgtactctactatgaagtatgaatattagtggattttgttttcaatatataaacatgaattattgattaattttgctttttaagtttgataatcttcatctctttgatctatgtgtcattaatacataattaatataataataattcacttgaactttatgtacaattttttttttttgagaatttacttgtttttttacagctaatttacttgaattttatttagtagttttaatagataattaagtctagctaatccatataatttatgtttgtttatttatttatgtatatgaaaattattaagaaagacatataattctaataaaattttaattaatcgtaacaatttatgttaaacatcatgttaagtttgaatcaagttattgtgtctaactcaaatttttagtgctttgacatatgatttatttacaaaattatcaaagttaagaaagcaatccaaaccattaatggcgtgtttacttatgagattagagaatgattcttattaacttgttcacttttctaatttattttaaggaatgagaatgaaatatgtgaatctcacaccaatttgtgattgaggaatgaaagtgacaatcccctaaactcacatagccgtcactgttatttcttcttaaattataaattgtcatttttaccctcgtgtaattctacatacccgtaaaactttaatcaatggtatttttgtaactcaa

SEQ ID NO: 21524 - DNA, 1790 bp, Cannabis sativa
ctcatactctttcaactgatgagaagcataagcaatgacactattagcttgcattagaatgcaccccaaaccctgtctcgatgcgtccaaatatgccgcaaacttttattgatttgatggcaaagctaacactggtgccgtgatcaattactgcatcaactcttggaagcttgtttcacacttatcgggacatacgaaccattggttcttcttactcaactctgtcaatggcattgaaatcttagaaaacccttccacgaatcatttgtaataccctaccaatccgagaaaacttctagcctcagtaattgtccttggcctcggtcaattcttaactgattttattttacctggattaaccataattatgtccttttcgatgatattccctaggaaggacatttgtgacaaccagaactcgcactttttgaactttggatacaactcatgatctccgagtcattgtaaaaccattcgaagatgttttttatgtttcgtttctatctgagagtacacaaggatgtcatcaataaatacaataacacaattattgaggaaatccttgaacactttattcatgagatccataaaggttgtcggggtatttttcaaccagaatgacatcacgaagaactcatagtaaccatacctagttcgaaatgtcatcttcaaaatgtcttcctcccaaattctcaactattgataacatgaatgcaaataaatcttggagaaaatagccttaccctaaagttgatcaaataagtcatcaagcataggccatggttaattgttctcgattgtcagcatatttaattcccaataatcaatatacagccaaagggacccatccttctttttcacaaacaaaactggagctccccaaggcaacatactaggttaggtaagccctagatccagcatcccttaaagttgtatttttagctacttcagttctgtcggagccatatgagaaggtgcctttgaaacagtctctactccaggtgccaagtcaatgatgaaatctatttgtcgttttggcagtaatcctagtaactcctcaagaaataaatccaggaattcttttacaactctgacatactcaagccaaattttttggggtctactagagtcaatcacaactgctaaaaatcctacaatccgctgtatagtaaatccttagaccttaaaactcaaaagatcagaattcgaggaccctgaacgaagccaacataaaaaatggtacctcaccctctggctgaaaagttaccatcttctgttcgcaatcatgttggtcaaatacttggacaagaattccatcccaattataatatcaaactcagttaattccaactccactagatcaacgcttaactccatattctcaattctaataggcatagaccaaacctgcctttttgagataactaattctccactaggtaataaggttccaaatcctatctcaacaaaatcacagggcctatctaatttattaattacccttgatgccacatataaatgtagccacagagtcaaacaatatagtataataggactcgttgacaagaatctaacatgttacaaccaaaggactagctgcaacatctgcttctgtaatggcaaacacccaagtaggtacaggttttgcctctgattttgctcttcctttttcacctgagggtagtctttcttaaaatgcccgaccatgtctcacagaaagcatgtcttatagttacattctctaagatgatgtttcttacaatgatggcactcaggataagaatagccct

SEQ ID NO: 21525 - DNA, 3817 bp, Cannabis sativa
  modified_base (3761)..(3767): a, c, t, g, unknown or other
aattaattaaataattttatacttaatataaaaatactctaatatgtaatatatagttgcaggtttaaccgcagttattaaattcaaaaccgcaaactgcattgcaccgcaaaaaatttcaaattgtattttttgtgcagtgtagtgcggtgtacataatttgtgcgtagtagacattttgatgaacacccccactaagtatggctaagtaagaattttaacctcatagtttgtctataactaaataactagctcactaagtgtggttaagtagaaaatttgtgggtttcacggttatttgcgtgtatgattatatgcatatcagcatatgttggctacactcgtaatttttactccgagaatcatatcgaaatcatccaacgggaccatcatgaggttggactgagactcccacggcccaacctttaacatcaccgtagcagacccttgaataggtttcggttatgagtttaccgcttttcaaccgagttgaactttggaccacttccaacccacaagtcgggttgcttctttctgagccacaaaattattcgttgccctcgaatccaccatggtcgtcacttctccccattgacaaacaccttcacatacatcaaacttttcaacagacttaacttctccgtagttatggcagagagaagttgtaagggattcattctaggcgttgtttcttgccttggtgccttcttccggtctttgtgcgatcaagggcattcaacttttctcgactaggacattccctcaccatgtgaggaccattgcagatgaaataaccaacacctttcttgccattcatctgtgatcctttctggttattcccaccagcaccgtctttcttctttccatcgtgattatgcccacctttggacgaggaaggcttctaattatttttcttttcccccgtggatttcttcgaattgtcaccttgtgcctgattcgaattatatttgtagtccactagtttctcggcagccactatcgccgagggtaaatcagttaccgcttgcctcctcaattcagcttgtgcccatggctgcaatcccgacaaaaagttgaacagagcaacaaagaactatattctttcacatactcccgcaccaaaccagtgtgcttaagtttcgttagggactcacgagcgatccatgtcgtgttacatggaaggaactggtctttcaactccttcttcaacacgtcccaagtctcaatcttgggcctccccaaacgtgcatcttcctccatttgagtacaccaccatagtttggcatcaccctgaagatacatgcttgtgatggtcactctatccgagtctggaattcttgctgccttgaagtaatgctcaacatcccaaaggaaattctccaattccttcgagttcctactgccattgaaggctttcagtttaggcactttgattcttcgaggaatgggacgaagaagactcggttccttgggacggatttgttatcgcccttttaattactgctacatctgcatcgagatccatgaatctctccttcacaaaattagacaggtccgatagtttgtcgaacacccctttcatcttctcatcgaatttctcttgaacatcaatcatggccctaccacaacccacaacctaatccgatctgacgattccttcaaaacatttcgagccaatgcctcaagggagtgttgtttactgagaagaaaaaaactaacaacatcatctttgttgggagaaccaactaactctttgaatctctctacctgagtcgatagttcagcattcgtcaccatgatttctgctactttcccaacacgattcacccgctctgataccagtagtcacaaggaaaatttctcactcataaattttccctgcgatggcctagattcaccccaatatagtcagccaacccaacacccgtttgcatgcacacacacacactcatggtttagtttgcccatcgtcactcaacaacactctctcgttatcaagtaaatgcacataaagtataagaacacacacagcatacgggaaccccttcctaaccttgttattcacacaatatcacggaatataatgttcaaacgtggacatcacactctgatgactcaagcgcacaaagcctactttataacccaataataggttgcagtcgacatctccaactgcctaggccatgctggactcactagcattttacacatcaacatcgtatatacaaataaccaacacacctacgtgtcagccattcaagccttctatctgaatcatctgtttccaacagatgtcttcagcccacgtgcatgcctttggatagacattgataactcacggcaaccgtcattcatatgtgtcactatgcacattgtctaagaaatgcatacatccccatgcaatatcacgtccatcttaagaccatcacgtagacaagtccagctaacatccccaaatgttgcagcatgccaatgatgctgctgtgtactgtcccctggcaggtacacttcactcgtatgctgctatcccacaagcaaatcacgagtgatgtcgaggtccaccgagcgaacccaggtgagggtctcacaatatctaccaaattaatcttgaacatcaatgaaaaggaaaaatatgtgcctattattaatttattgtcaaataaatatatatatatatatatatatatctagcaattaagctcctacatatttataatttgaaaaataaacactaattggagacaaatggagagagagtatagtactatttcacattataacaaattcaaaagcaaatacattacatagacagtaccatatattcaataagatcactcagcaaaaggatcaaatgaaaaagctagctagtttgttttttctgtatattataaataattaagaccaaattaacagctgcggtatatataaaaataaaactgaattatcgtagttgaggagacacaaggaagaagatcagattacaatttggtgcaaattacaatattgtgtatataggtaggctatgtatgtaatatatatcattaggtttaggaccacagcaaagggagtattaatggaccaccatgcatgatgcatgcacagttatagtagtacacaactcgaccatccagttggcggctatacatatatatctgtgtatatatatgttcttcaatgtcgccttgatgccttttcttcggcctttcgcagtttatgggaaccaaacatatggttcaattattagagaacgactacttttcatttgattctgtctagagcttttcaatcacaaacaaggaaacgtaactagctagagatattttcattcatctagctgggctttttggtaattatatatatgtatcctcttcaatacggcatatatgaatacgtacgtgtaatgataagtgcatacaaacaaaatttacatacaaatttaatacacatttatttactaaggaatttcaactaattatttttaagaattattatatgaaaaatagaaattgacactttatttacaaaaatatttttataaggtgggacaatatttattttatgtactttttaattactaaaataccttttacactatcacttacacaatcagatgatagttgttgggtggttggtcagagttgcattagatgaaagtttcaatcagacgaaaattgttgggtggttagttgaaggttgcattagacgaaagttttaatcagacgaaatgctgagtgattggccgaaggttgcatcagacgaannnnnnnatcagacgaaataactgttaggaaaatgtttatgcaactgttatgaaaca

SEQ ID NO: 21526 - DNA, 2898 bp, Cannabis sativa
aaaaatctgagtagtcttagttgcaaggcatttccttgctaacatattagcacactcattgttattcctatgaacatgaacaatggaattacaatttaaactctccatttgcagcttgatttggtgaagtatagtgttgacagcagttaaatggttgtcctggttcttaatagcatcaacaatttgcttgcaatctgactgtatctcaatggggctggctgctgtgtccggtcgatttttgagagcttccaatatggcccaagcctctgccatatcaatcgaacagcacctatgacaatagatcataccagcaagcaaaattctaccttcccagttgcgccagatgaatcccgtacctaccccagcagctcccagatgcatagcagcgtcacaattcactactatgtgtccagtaggaggccggttccaatgcttctggtgagggggctctagagtagtcttcctgtcattctgcaccaagggactcgatcctgggtacgctgagaagacccaatccagcagctgggcaccattcatgacttggagagattgttccatttcctgtttcagttctcccaaatggcccacatgattttaatagcatcttcaaactcactcatgtttagctttgcctttaaagttaccaatatatcaaacatagacccttgattaatatgttcacattttttgtaccaagggacaagtttccaaattggtttgattttagcacaagaccaaagagcatgagtaagagtttcagcttggttaccacacaaatcacaactaggatgaacagtcatacctctatgagacaaatttgtttttgctggcagccaattatgacaaactcgccacccaaaaagcttcatccgaggaggaagttgcatgctccacatcatcttccaccatttgtggatgtcttccatattagagcatctagtgggatgtatattgatttctctactaattcgataaccactcttgacaatgtaatttccatttggggtaaatggccatatcagcgtatcctccatgaataaatctataggaatcccttgaatccaagagatgtcctcctcatgaaagtgttttttaacttcctccatttcccataagccgtccgtattgatgaagtggtgaagtttagtgtgcggtgcaatcccaggcctttgtaaaagcatggcccccgagggtcttggtatccatttatcttcccaaacccgaatctctctaccatttcccactctccaccgagccccctcgtgcaaaatttcccgaccccaacatattcctttccaaacacacgaggccccaggaggacaaccagctttcataaatgaaatattcgggtagtagctgttttttaacacccgagctagtaaagattgaggattatggataagtctccacccttgttttgccaacagagcttggttgaattcattgaggctacggaatccaaggcctccttcctctttgggtttacagagtttgtcccaagaaccccaatgaagctttttattatcttttgtgtctccccaccaaaaattggcagcaaggctgtggagattctttatgagtttcttgggtagacggaagcaactcattgcatagatcgggattgcctgaaccaccgccttaattagaacctcacggccagcttgggagaacatagaagccttccaacctttaagtttattccacactttgtcctttatatcaaacacctcttttttccttcttcccacaaaactaggcagccccaaatacttggcatgatgagagacgaggcgtacccccaatctagtagcaagattgtgaccttgagaggaggagattcttttccccatacaaacttctgacttttcgaggtttatttgttgacccgagagtttggaatatcgttgaaggatatgcttcatgttgtcacactcctctatatatagatattttttacccttattttctttcattttagaaaaaaattcataaatacagttttaaaattacaagaatattttttactcagtagaaaaataaataagtgtaaaaataacccactataagaaaaaagattttttataataccagaaaagaattataaaaatcttatcataatacttttcaaaacattaaggaaggctatgttattaaaagtcatgacacctttataatgtattttatgacttatactaaagtattattgaaaactcttttataatactttttatgtattattttaatacattaatatgtttaaatttgcatgatctttatgagttttcataatacattatttcacttatactaaaagggtcagtttggcacagctgtgctgtgggaaaaaacagttgtaattgtgctgcgggaaaaatcagctgcagaagaactgtgaaaaaaagctgagattataaatttcaaagtaccgtgagttgttaagatctattatgatgataatgataatgttataatctagtttattataataacaaatatataaaaacttattttatataatatttttatttttaatatatttattttttattccttttataagtttaaatttatatgcatttgataaaaaataatttataatagttttatattatattttatcaaatgtaaataaaaaattcaaaacttaagaatataagaaaaattcaaatgttgatatgatttttaatattaaaataaaatataaaatatcttttaaaaaaaaaagatttaattattattatttattttattataattaatttattttaaatattttttatttttctaatatataataaatgaaaaaatatagttttagtataaataaatttattattactacaagaaatgtcacttttaccagcacagttcgctgttacttttaccagcgcatttcgc

SEQ ID NO: 21527 - DNA, 2128 bp, Cannabis sativa
ctcaaggtgatggagttcaacttgtaacatcagtaggtgcgacccgtaatcgccccttgtcaaagaaccgagccaacaattgcaaggttttccagccaagagagagatgcccctctgcagcgagtcgacctcgatcaaaaacgagctgagcaagttaatatttcttccctttgtatgcaaaataaggtgaaaaaccgccactcccacgccattgaatggagctaccaagtcaagttgagaagaaaaaagaagggccagccttgaagttgtcaaaatcggagtggtcccaaaatgtattgtccttcccctgtccaaaacccaagagacacaccgccaaaatcgataattgtgtttcacatgaaacaattcaggacctttttctttttttcttttggtgctcttgcccaaaaccagtagaacaaacgaggtataagacaaaaaattcccataaatgaaaattaaaaacttatccctttgtgtatcacttggtacccgtatagttttgtgcacgctgactatgaacccattaacaagccttttccagcaaactaaatctttgaaccgtaaatacatagccaacaaatagaacccaaagactctgttctcataacccaatccattatgggcaagtattaatacttgagaagcatcaagtgtaagtggctcttggaaaacaacttgagggaatacatatattatcccagatggcttgttttctttagtaatgtcatatatctttgtagtcaaagcacaaggaacactataattggaaaacaaaaacttgttctgacgcttttgcctaatactgctcataatcagacaattccatatatcctcacccatattaccaatccaatttgaaaacatgaaagcagcaaaagtgttagccataagccttatgcaataccttatgacccaaatggtgttgtttaaacttggcgatgaaggattctccctcttcttttccgttaccgacactgcggtgtagtgaaccaatcgcacctccttcttgtaataccccaagggtggagacgtactgctccccggatcccaaaccataaacaattgtcctaattgaattattgggacttgagtaatatttaatgggccttccttcttactcggatcccatataacccaatgaccaaaagcataaaatgggtcatctccttgggttgatttgggcctcaggtaaggttttaacagtccaaatgcaaacatctctgtaacgaatgaccgtagccccccatgacctgaaacgaaatcaaagcacacgagtgacagcgacttctctggttcttccgtcgatgattgccagcaaaagttttctggcgaggcacaagtcttctccgacactggcgagcagcccatttcatggtgtaaggccggtaacgtactcgacccaaagtcgacattagaattcgttgttgttctgtcattaacggcatcgaaggcttgctggttgtgctttccacgatcaaaaagcttgtgagcctccattgccataggcaaaagatggcgttcaagtcgcgtcgccttcccttgccaagcttgacgaatttttggcggaatattctggctcggcttctccttatacaacaccggtatcgtctccagcaccgatgtcatctccaaccttggtagttcgatcttcgtctctggtgatgcaagcttcgttgctagaattacttgatggctgaatctaatctctactcctttttcagaaagcaacttagaattaattgaggaagatgatgtgtccctatttactgattgaggttgaaactcatcgacggcagttgccatcatcaatggaggaaatcgaacctctggttccgtcggagtcgagtacaaagagccatccccgtgcacggttcgaggacgaattttgttgctggcggtgttcgtctctgtcttctcttttccccctgcaaagaaacgggttaactgagccatcattatctccggtaagcgctgaatttctgctcgtgtctccgaaacctctttttccaactgagatctaacgtctgaaatctccttctgaatttctgagcggaaggcctccattctttcacccagtagctccatactagtgtgcttctcgggtcccatgaacttgtgctctgat

SEQ ID NO: 21528 - DNA, 4764 bp, Cannabis sativa
acagtcaataacctccctccaaactccatgttcaaccttaaaaactcccttaaaataatccaccattatatcccccaagccattattacaagttcgtaaattgccagaagcatctttcaaatgaataatctgattattacatttacgggtagacactttagcatgaaaaaacttacactgttttgatctccttccttcaaaaccacaattgttttgatctttgccgccaaaagaattctcgttacttaagcatctggaacagttgtcgttttacatccgggaacaattgcttcccttcaatatctctccgccctttaaactgcttcagagccttatagcattccttaatacgagcagtgaaattcctcgtgactcccttgcgccactcctaaagtgcctggccacaatgataaattttttgatcaatccctgccccattcacagaattccaactgttccgaataatactctcacaatcctggtgattgcaccagcaatttttgaatttaaaggacctcaattgggcaacaacttcatggtaatgaacatccagcacgagcggacaatgattagatggtgagatttctaaattaaataattttacagtaggaaatttagacaaccaaccttaattcaccatcgcacggtaaagtctagcctcaatccaatttagagtatctctaattttttccccatgtaaatggatgtccaagcatgtccaagtcgcacaaaccacactactgcacaaccccctggaacccctcgattaaccaagtcggatatggattaccaccaattttctctctttggttaagaacattgttgaaacactaaggagaaatcgatcgagcatagagagtcctaaggatagtccatctttgctgacgtagactttggttaggctcaccgtacatcccagtgaaattatccttcaaaggaaaccaaactgtcaatatgattcttagagaaatagtcaatagccacttcatctttattcttccaaagcaaagcaataccctcactatgtccttgggcctcaacagcaaaagacccctcaaacttcaaacttctacaaattgaatcaatctccaccttattacttagagtttcataagaaaattacattggccctttttttagcaacaagctctttaaggaactgaacattccgtgtcggcccaagcccatggtagttccaacttaatattttcataattattggcgagccccatttccaaggcccaccaaagttggaaatccactaattccttagtacatacccacgtgacccctaatgttttcttctcttactttccttttttattgtcttaaataacaaagttgtcatcttcactgccaataacctccttccccaaattcttgcactgattatctccttaacttcttatcatattatttccctgaccattaacaccctgattaccaccaatattgatggtatcttctccttcattgagcaaatcactcctagcattattattagcaaagtaaactccaacaggactttccgtattcgggttcatcggttcagccataccaggtgcactacctccggtcgccactgatggagtctaacccctggtacggagccatctagctacgatatttttatggttacacggtggttgggctctcataaactcaccatacggtttcaccacttgataaggcggttattgaaagagcctacagcaaaacttttctctatgcccagtaataccacaaataaagcaaaacgtgggcgttctttcatatttaaatgcgacccaaaaccaactgccatcctcctttgttaacttcaatatcctccttaaatgttttgttatatcaagggtaaccctcatatgaatataatccctccaaatgtcaataaaattcttgggatcagattctaagaactttccttctgcattgtccactccccgaacagtcgactctgtcatacacccaggttgaatatcaagaatctaaatccatatatctagagtgtttagcgcaaaagctttggggtccccgcccacgggtaacctttcaatgatcaattgtatcctatcataagtccatggacttctttcaatgaccctttggatgtccacttcgtgataaagctgaaacaagaatcgattattattgagttgtttaacgaacattcccattcccggctgtcatagagaagccaagatattttgcattttgtcaaaatcaatcatttgattagtcagaaacctccccaccaagcaccatctatcatctatgccttcattctccccttccacactcactgccaacccttccaactcttcctcttcaatttgaaagttgaaaacatcctccactgatcctcccatatttccactggtagacgccatcttttaaacacagtaaaacacaaatttctatcacctcaaaatctcaaagaaactattaaaaccatgtcaaaagacaagacatcaattatatttttttatgcttgaattagactcttacatctctaggtattattagacatattagactaaaaaaaataacctaacgacatgaaatcttaagaacaacatatatggatatgatttaaacgatagtaaagacctataaacaatagtgacattagattttatagatgttcaacctcaacttcaataataataacctaattcccttgagtttatattattcaaggtttgtacacaagatatggtagaagtgtctaatgagtttcttgaatacaagaatttacaaagaaattttaggcttacagagaattgagatccccttcactatggtaaaaagatagtatgacataccaatttataataaatgtctgatttcctgcatctttgaattggtggagatgttatgactaactcttcaaggattttagcaataaatgaggatcttgggttaacttggttgcctgctggagataccgactatttactgagttttttgacatcagattataaaagaaaataaaagctaagaaagtaaattcaaaataatgaactggagatgatatttttgttacgtgattagggtgtttaagagctttagttcacgagtcagttgtattgggctaaataatcttgaatgtattacacaagttttttttggaatggcttaagaaccccaaactttggctatagagtttgaatcataatctttcaataccttgcaagaaggtataaggttgtatttacatgctaggatccgggtatgggtatactcgtgacccgctagggtttgtattaaacttggtccactaataagagaaatacacttaatacaataactttgggcccacttaatgagccttagtttgtggggctatgatcttccatacggatggggaccacttgatgttgacagccggtgtgcatgcaccgtattcatacattgttgtgtataagaggtggttgttggataaaaggtatgttccccttagtggtacacacactccttttgtctaacgctgaggataaggccctaagcttgtggaatttggtgtcagaggatcgtcacataagcctgagcttggtttttgggacatttatcggattgcccttctggatgtatcccagatgctcatccagaggggctctgccactccttcttattcgggcaggatgccctttgggatctagagagatccagtcttggatgtaaatatcatgggcctcaaataggattgaggcccatccttccatacagactggtcctgttatcttctttgggcttttcaccaggcattagatgattaatcttgaattgggaatgacacatgtcccccttctaaaaacacggataacatttacccctaaggtgtcgggacttaagagttgcagaggcttgcagtcttccttccaaattttcatggacacgtgtcaaattgtggaaggatatgatccttccaactcccgtacattaagtggtggataactataaatcttctgattatgttcatgcagatagacttttgcctataaatactaattaattcacccatgtaccacttttgttgagatttccttgtgaatttccagaaccaaatgagttcttgctagtgagggagaaactctacttggttgtgtcagcggaagctcttcaaatggagaagttggtcgccacgttcaatctctaaacggttgaattagttgctcctcactagagcattgatccttacagtgtttgagacatctcccatgactcaaaggatgtcaaggataccaccgtcaagattgtggatgatgagatcaagaaggtcgttaaaacagataaaagatggttggtggactgaaattgacccatccaaatcttatgaacaaggaggaggagctaagatcattaaattgaactttcaattgtatccaaaattatctccctagaaattccgattgcatattgatgaaaataaaaggtctatgattagttactagcagcttgagtccttttagggaaatgccttacagatagcaaacgacattctatgtcgtcccatcaaagtctgctcccaagaaaacctcagaatgatggaatggttatatagttaatgtacaccattactagattcatgaatgtcctgatcatgaacttaagaaaagctagaactattaactaaggtttgtatgtttaataactattctaaagagattaagggtggaccatcttatggtcattaagataagaaagtgtttatgttaacaaatactatttttctaagaacatgactaaatctaaaaacaaagt

SEQ ID NO: 21529 - DNA, 2490 bp, Cannabis sativa
taaacaacatacttgtgagtagactggtaaaataatatccaacaaaggctttctaatagaaatataaacctaaaagctgacattgcactaatctcaccagcagctaaaggaaaatgctatgtggttcaccgctaatgaaagacatgctaatgaaagagcaatctccatcaatattcttgggcttgctacaacactatctgactctagtattaagagcaattgcagtgaaaaatcttcaaagagcaatctccaatgaatcaattaataacatcagagctgatgcaaaaagctctgattcaccacagaaacagaatgttaagaccccaaagacaagagtggcgccagcagtattgtaaacatttgttatactagatgagatttttggcatttcattcacagcaaagagcctttcttctggcgagtctctcccaccaaatacgtttttcagaaaaaaaaacttaataagagcaatgtgcactgaatcaaacatttcatcaaaaaaaaaaaaattccctgttctggaacgttctagggttctcccttttctggtttcatccagtttgccaaccgtagctttgatcttccttcccctcttctctttcttcatttaatgctatttttttaagtttctatctcataatcattgttagtgtttaatgccgcctccattttccccttaccgagactccatttaatgcttgttcggacaatctttggctatccctcttcctcccttcctttccattaatgttgtttaattatgtttctgatttataatcattgttagtgtttaatgcagcctccatttttcccttaccgagactccatttaatgtttgctcagacaacctttggctatctctcttcctcccttcatttcaaacattcaatgactgtcactttcttcaggtggaggcgtatcattgccctactgctgggtagaagaggatctaggcctccagtagctacgatggcgtttgcatcccctcctctcccagtttccctctgctccaggtattactctttcttactcctctatttaaggttctgcagtttgtgttgtatttacccttctccagtctctctccctatttttgatcatctttctgttttttccttacacctaaaaatggctactttccctgtttcccaatctacccaattaactgctgaagaagcccttgtccatgattttgaccatgtctccatccaccccgaaccccaatcccagtcccactgcttggttgttaaggttttgtcccccaaaactctgaaagtcaattggattcagaaagccatgaatgaagcctgggttgctcgttgcccattttctttctctgaataccacttgggacttcttctggttcaatttggctgtgagggtgaccgtcgaagagtcatggagggccagccatggcattttgatcgatccctcatgatctttgctattcctgatggttttgataccatcctcccttcccaacttcgctacattcctctctgggtccaggttcattatattccttttggttcccgttcctatggcttggctcagtttgttgctgatacgattggtgacctcattgaggtccatttgatctctctgtatgattctgtcagtccgttcatgcgtgtccgtgttcttcttgacactatcaaacccttgcaccgtggcatgaatgtccatttcaggaaattgtccctcactaagtggctcaagtttctctatgagggtatacaaaactactgttaccattgtgggaagcttgaccacactttcaataagtgtggtaaatttctccatcattgtgatcaccacccttttcctcccagctttagctataaggatgtccttcgagcccctgccaaatccatttacaagaaaagtatctttgaactttccacttctattccttttgaggaacaaacttccctctccaacactggccatcccactcttgaagaccacactgaccatttcactgttccaaccatggctgaacccactcccaccacggtcacttcccctcatcccactccctttaccacttccaccatggctccagtttcttccattactacttccaccccatctccacccatgcattccaccatccactgcccctcccaatccatccttttatgacttccaccactaatccctccaccaccaaaggtaaggcccctatgtaccccgagacctctctgccatttctcagcagccctcctttatccagtctccatattaatgacactccttctgctcctcctcccaccaggaagcggtcttttgccaggcagaattgtcaagttggttcttcggttcgcagcatgctgaaacgagctcgtgcctctcactccgactttgcggttgttccatccatgtccaaaaatgaggaaacggagggtgttgctcagcaaccccgccgagaaaaatgaatctcatcagttggaatgctcgtggattagggagttcccgagcattccaaaa

SEQ ID NO: 21530 - DNA, 7113 bp, Cannabis sativa
actaaacctttttttaatactaagaaattttccaaactcagcagatccaagttcgaaattagagttctttgccaaaccctacaacatttgagaagcagtaaactatagcaattgcaatacaggtgctcagaaaggactccaatcttaagactctgtaggagcagtcaataaagaaggtaatttctctatattatttctcatacaaaaccatgtgtttaacatgtacaaggataccttaaaagggaaaaaatcaaataacaatgacagaataaaactcttaactatatcctaaaaatatggaatcaataaattacaatagttgacttacagctacacaagaataatactaaaaatagagtgattttcctacatgagcaaacacatgcatgtttgagcagccactcttaataacacaactaccctcactaatactaagggtagttgattttaacaatgtacattttgttgtctatttccactcctagtgaacaacactcaacacgaaatgtacataaaaaacttaccttttttttgtaattttatatatatatattgaaaaaaaaaaaacccttcctccacaaaatgttcaacattttttcttcagttacttcatgtttttatgatattttaagattccacccaatgtttttctagattacatttttactgaacaacagcagcttataagtcataggtatacaaccatgagaaatatgatagatcatttttaaactgaagatttttagtcaataaaggttttagaaaagtataaccgcgaaaagcaaaacaaatccagcaaactattagtagtttagctataaaaatttatttagttcactaaaatcaacctgctggcaacgccattgcaatcgtagagtagcagcctcagacaaaagctttagctcaacctcttctgccagatccaaatgaagcagctcagatgcgctctcatgtgtcagcatgtaagttggtttaatgactgaattctccactgacacttctgcaacactatagagccacagagagagattttgaggaagattttattataaaaacaaattaggctgacaaatataaagaaatactcatcacccttcactagtgtacaggaatatgatatactccagtaaggatcttcaaatcaatagtaaggatagtaggcaaaaacaaagaaagattgaaagtagaaaaacatggaaaataggaaaatctgaaaatagatattaaattgaacaaattgataagaaaaaactgaacggttgaggaatttgaaagacctaaactctcccaagagccaaaattgcaattctaattctctctactgttgtaataatactactctgttccatctcattcactacgcacgtcacataaccttttattatctatgttatagagataattgcggctaaagtctccctatgtagtattatttattgcagttaactacctacataaaaaaattggttacaaaagtatctaagtagtagattttgttgcagttaattacaaatgtaaaaaaaaaatggtagcaaagtaccgaagtaatataattttttgcaattaactacctatggaaaacaatttaaatctaaaaattaaaaataatttaaatctgaaatttaattcaaaatctaatactatgagtactttctagatttaaattgcttttggataggtagttaattacaacaaaatctacaacttaagtatttttctcatcaaagtttttacatagatagttaattataataaatgacactaaatagagagttttccatcaattattttacatagatagttaattacaataaataaaactatataagaagtttagccgcaatcatccctatattctattattcacccactttgttgtaattcactacaagaaataaaactaattagagaattttgcctccaaaaaatttaaataggtagttaactacaataaatgaaaccatataagaagtttagcagaaatcatctctaaattctattattccaagaggtgtctaagaatactacatgtatatctaatatgtttctaattccctatatccagttggtaaacattgtatgtagatgtcatgtggtgataaaaattaaattccaacaaccacattgtatcccgaaaagaaaaggtaacatatcataaatggaagcaatataacaggagactttgtaaattaaagaagattaattcaacaaatatctatgtctcacataactctcctttttaacataaggtaacttacctcaaagaccatgacatatctaggtatagctcgaatctctaacatatcaaagtaaaagtaataccttgaaattctaataatgtgtacaattctaaagctacataattgcattttaaacagaattaaaaagaaaattaactttctacctgccatcaaaatgcaacacaacagacactgtaacagcattacaattctctccctgcttcagactcattccttccatggcaagtatctctggaaacatgggataagtaacagtgggcagaaaaactgaagttcctcttttcattgcagccctaaaccacatagattaccaataagtaaaattaaaatatagttttacgtctcttagtgttctaaaagtttacctatcaactatgttccctggatcaagaaatctagtaggatctgcaacatggatcaaaatttttatacgtccatcttgcaaccttgttgcgcttagggcatcatcaagctgaaaaattatgtatcagtacaaatttaaattgagaaactcccactttttctatggcagagtttaaaatagaaagaaaaaacagatcaagttacctcatcagcctcatcaacatcaatggcataaaccttcaggtgagtaagatcatttctattatgctaaaacaaagaaaacaaaataagcatcaggcaaagaataactttagaagcaatagcattcatcatgcatcttcatttccttctagttgtagaaaaaagcaagtgtgaagatcttgataaacagttttagctctccaattcagagagaaccatcttaaagatcataggagtggcaatactgatattagcaaaaaactttgcatgctaaaataataattattaatatttcagataatgaagagaatctcaagtcacaatttttaatttgcatattttaactttttaaaacctcacatttccaatattataactgaacagtatcttgctacataaaaacccttttgtagtctcatttgtatagaaggctgacctcatcaggatcagatgactcttccagaagactttttgcagcttctgttactacttcagaatgatcagtatggatccctaacttcaacagttcaagattgacatgaacaggaaaataaccaatatctatgaggagatatactgctgatgatgctgtttttgctaaccccattgttttaagaatctaacaagataggaaaatctatgttatatatgataaaggtgcctcacaaagagcaatatcctagtaatatgtctaactgaagtgttacaaattcacagcaaaataaacagtcgagacagatataccaatccagcagttttcttttggtcatcacttttgcaggcatcaatagcatataattcaagagattcaatttttcgcctaattttctcttcacccagccaagttgatttgggaggtttagcatccataggcattgatttagcagatttcaataactgaacaaattcttgcaactctttctcagaagcctctttcatgagcttcctatgaagaagctcctccacctatttttaaaacagatgagctatcactgtaacaatatatatgcacacacacaaaaacaaggccagaaattccggtctataagtggcatataacattcagctactgccaacaaaccaatacacgcagaattttacatatacagtacctgattagtaggtcgagctccgtacatggaacaagaaccttttgcctctatcactgtgaaatatatttcatctttcgaaagcaaaacatgggtacaataactctctagaggcatcgcgctaccaaaaatcatctgtagaacaactaaagtcactgaaggagaaaactatatatccatgaaactaggatagtattgtacctcagctaattcttctgtagtcaccaacttatttttttcaagaagctcaacccaagcaaattctagcaatgcaggatcctgtaccaaacaaaatatgcactgaaattttacataactgccttctctaggattctttacaaattgcaacatttttaaaagaaaacaaacgatttatgtttctgccaaacgaaccaaattatcctgagctttctgaataaagtccccaatatctgcatgatcaaacttttcaatgccaggaacaatatatgtaacttgttgaggtttaatggacgacactacaccattctgtcaaggaaaacaaatacttaaaaagaattattacaaccaacatcaatttttttaagatttcaaagaagaagcaatgaaatccaacacctagcaacctattcaacatgccgcaatagttgtttctactagaacctgatcagagaccatccagttctttttgccatctggtttctgagcaacagcaagcaatactctatcagaatccttcttgaactctaatagcaaccctttctgtatagtgcgttttccgagtctatcctctaaagaatctccttttgctggtatttctattctgaaaagagtcactaaataatcatattatatacatgttcaaaaagtaacagacggaaaaaagaaattgtaaaatatggccaagaattccacactagttgagtattagaatatatttacgagaaactccaacaagccaaagacaaagcaaaatcgtataaggaattactaagctttatcgtttcaatatccaaacactgtaaacaaattcagtaatgaagaacgaaaaataagagaagaatacacctacttggaggttgcgcaaattatcctccatcttcgcgaggttcgaagctcatccatgacgctatcgaacaaactatgagcagagaagctccgtacacccccctgatcaataaaactcctttgagagtatagcaggggtaatgaaaatcctagtttagaagtggagtaagcgcgaaagtaagaggtcttgaaatggaaagggaggcatcggacggtgcagaaaggagtagatgaagcggagcggaggatggagcaggtgttgacggctcgaaccgccattgaagagtgctgaagcagataggcctagggtttcatagcaaggtaagaaaatggtgcaatggtgagtggagtggagatgaaggaattgaggatttgggttttggattacgagggacgtttattcacgatagagtagaaagaaacaattcgacgataaccggagaaaaggggtattttcgtaaacatactagcatctgcttgtgtggcaaactgtctttctctttaggattttatttttttttttttaaattaaactcttattaacaacaataagagagtttattacattaactaaaaaaaagaaagaaaatcctcaattcaagtcaattcaccattcaccctaagtgtatgtacagctaattcatgagcagtcttattggttgtacattaaacatgaactagaaatgtctcatgaaaactaaaaagcaaactagcaatatcattcaataaggaacttagttcattataaagagaaaaatattttgggagagccaaaaccaagactaagcaactgactccaccacatgaagaggaagaccaagagtgagagatcaatccaacgcaaccattaatgcaacaacttctgctaatatgattggaaaattccctacaataatcaacaaacagaggataagttcaaaaaataacttacaagcagagaaagtaaatggtcaatcctaataaaaaaaaaaacaataaggggttcaaaataatctaattaatgagaatattatggaggagaatatgattatctgtaaacttattactgtgtttggttatatctatgggaatatctaaatagattactgttaattagattatagtgtttggttgagcacagaaatcttatatattattgtataaaagttaaataaaataaaatagtaactattatatctcttttatattaattaaatataaaataaaataaatattcataaaaatttatgtaaattaataaatttaatgtcattttatttgagattaaaataaatgaatatcactcacatatattttttcgtataatatttttatatttatttatgtaaaattattatagtaattaaataagaatagataaaagttatatttaaataaattctaagaaaaaactaaaataaaaacaacacttcatgcattattaataaataagaaaataatctaaaatatttaagttcaaaaattatattttttgcgtttattaataataagtatttttattaaagaaaaaaaactaaaataaaacccactctaactcgcttaaacatccctatagcaatatctataatttttaaaagtggactaatattatttttcaatagtataaatatagattattatttagggatttattaatttttaatatttttttggttatcatttaaaatatttgtcccaaaattgcaatctttctatatattttaaaaataacaaatcaggtttccaattacagtactattactttgtttataaaatacacgtcaaaattaatgttatactttagattatattactcaatgcgtaaaaatatatattcatataatatatatttacataaaaagattataaaaattggacaacaccacgcgaagcccggcttagttccctagttcttcttctaaagtgaagaagtaatcgatgtggggttgatttgaaactagaagttttccaattttaagtcgttgggaatttgtgagtccatcaacttttttgatctcttcatataggttcattctcctagcagcactatcagcttcatgttgaaaacaatcagcaagttttctaatagaattacttgcagaagcttgcatagtactaaattcttgcattgacttagaaagtagttcaaccaa

SEQ ID NO: 21531 - DNA, 2782 bp, Cannabis sativa
tcaatctcttgtcatttttagatttttcaaaagattttaattgtactaaataattttattactcaaatatatttttgttaatgtaatttgctgcgatatttaatcttaataaattagtatagtcatatataccaaagaaaaaaatacattatttattatttaaccttttttttttagaaaaaacaatttcatattaaaacctcatgagtaaatcaatttgggagaaacatcaaaaagaaaaaatagtgacagccaaaaaaaatctatatgcaaagtagtagtaataattatactaatattaatatttaggggcagacccacatagaggcgcgagggaggcgtctcctgaaaaaaaataaattaaaaaaaaaaatgtataaggtatctcatatatatatatccacatatagagttaaaagttcaaatctcaatttgagcatttttattttttatttttaaaacttattttttggaaagatagtcttagaatttgaacttttacttgtatttagtgctttaatttaactattaaaaccaacaattttattgttacttttttactttgaattatatttaatactataaaaatacaagtttatatcaatttttaatatagtatattgtgtaaaaaactaaattatgctcctcttaatttatgaagaaaaaaagtctgtcctccccaacttcaattctagattcgcgactgttaatatttctcaatatatattaattattatcacaatatatacaaatatatataaaaaaaaatgctaaattaaagctattttttttctttattattgcagtaatataaaagctaaattaaacttaagaacttttttatttacacttttataattttataattgacttatgggattagaatataataatttattgtattaattaatgattaataaagttatataatttaaagtgaaaaaaataaaatatatatatacatatataaagataggtatacgtatgcatggtctcatattaccaacttccaaaatcgatgtgttattttagtgtgttagtgttaggtacttatgattaatataattacaataaaattcataacacttcaataattataaatcattagaataaattcacctttatcttaattgttggatttggattgtattgatatagattctctgtttaatttagatagaattaaagcatttttctaacttattatatatttgtggttccctaaaaaataatatttggcatggtttttgtttttaaaattgtattttaaaaaaatcacacaaacttaattttgtaattttttgaacacaaaaaataattatttcatattttttaaaaataatttttagattttttttttttgtttgaaaagtaaaagctttaataaatatatttataaaaagatataaatatttttttgaagaataaaagtaattattttaagtaatgtgttgtataaaatagtagagatatttatcgcgacaatatcaatttttaaacattattaatttaatacattgttattgtttttatatagatattttttagtattttaatttgttttagtataactttattaagttataatctcttaattagaatacaatttgctacaaatacttttcgggctaaagaatgcaggaacaacctaccaacgtattgatgacaagagaatacaggcccacattatctatcaaaaaatgtgtacattcctggtcaagcagatacatcttgatttgatctgattgtaatttaaataggcgtccatcttgatttgagtgtatttataggccttgggattacttaatccgacttaactatcttttattgccaaaagtacaaataccctagctaatcctcttgtattagacaaatcttattagtactcttttttccttgtgatttttttcccattagggttaatttcttagtaggggttttaattatgctaagctcttttaaagagaaaaataaataaatgaatatgcaagatttgttttttaaacaaaataatagtgtaaccaacaccatggtccaaattgattattgcataaagagaaataaaggtgggtgggattgaattggagacctaactttttagaccccctttatgttagatatattaatacattgatatataatatacatatttattaataataaattgatggcatttcacattagcatattccacttgttttatttggcaacttggtagcaaattcatttattgtcaccaccattgccaatattaatttataaatttaatgtatgaaatttgacttgacttctagttaatgttatacatctgaagtttctcaaaaatcaaaccttcatggaatggtcatccttaatttgcaattaaaaaataaaataattagttcttatttttcttattgattcccacatccaaaaacccacttattaatttttcatatataagatatatattattccttttattaatttatttaatgggaatctaaagtaactaaaataattcatagatttctggttaccattttaataattatgtcttcgtaaaaaagaaaaaaattaaagagtgttttgttcaataaaaaaattgaagataattaaaaattgaaattaaatggttaaaataaattaattgtacaaagcatacacatacacttgcatatgcaactaattaatatgtacctaataaaagtgtttaaatattcaaagtgtttatcttcttagtttagagtttttatttattttatttatttttgttaattttaaccaaataatattattatta

SEQ ID NO: 21532 - DNA, 3626 bp, Cannabis sativa
gttgcgaaaaccaaggcctccaatgctcttgtgacgactcaatcggctccacttcatccaagttataccacgtgactgttgggaagaattaccccaccaaaacttggacatcaacttctcaagcaaggtacatgtttcaactggtaagaggaacaccgacatagcataagacggaattgcttgtgctaccgttttgattaggatctcacgtccagctttagataagaatctaccttcccaactcaagattcggttttccattttttcctgaaggaaattctgaatagctttcttgcttcttcccagtatacaaggcaaacccaagtaaaaactgtcatcgctagcaggcaccatccccaacctagtacaaagtctatctcgaagatcgaaaggagtgttagcactaaagaagatggatgattttgcacgattaacttattgtcccgaagctacctcaaacatgtgtaatatacgaagtacattatcatcctcattctcagttgcacgacaataaacgtaactatcgtgagcaaaaagcatatgagatattgttggcgcaccattagcaaccttacagcctcgaatatgaccacttctttctcagcccttcttagcaatgagatatgaaaagccctccgcacaaataaggaacagataggggataaagaatccccttgccgaatgcccctacttggaacgataggaccaatttcatgacccccatgtactatcttgtactccaccgtagagatcgtgtgaaaaatcaactcaatgaaccggttatgaaaccccatttttctcatcatagccattaagaagccccactcaatacgatcgtaggctttactaagatcgagtttcaaagccatatagccagtctaccccttacgctttctcttgaaatagtgcattacttcataggaaaccataatgttgtcagagattaatcggccaggaatgaacgctgattgattctcagagattatatgtggaagcactgttttcaaccttttagccaagacttttgatatgattttatacaaaacattgcataaggaaattggccttaagtcacccatactactaacattcttctttttaggaataagaataatattagtattattgacattgtcgggtaacacacctgaatcaaagaagtttctcacttgcaacacgacatcttagccaaccacatcccagcatttttggtagaatcccggagtcatgccacccggaccgggtgccttatcgggatgcatttgaaacaacgcccttcttacttcatcctcatgaaccggccgtatcaaatcttcattatgagtactcgaaatggaaggagtaataccagccaccacggcattagttagagcattagttgaggtaaataactcagaaaaatacaagtgaataacatcatgcaaacctgaattccaatcaacccaagtacccgaactgttttgtagtcttgtaatagcattattcttcttacgagatgtagctttggcatgaaaaaacttgctattggaatccccttcacgaagccaaagctgcttcgacctttgtttccaaaacacctcacgctgtgtaagaatttctgtcaaacttttttctgcatttttcagttctgcagccgaatcctcatctctcaacctcttcaatcgtttgatattattcttgcattttttttattcgatctttgaagttgccagtatattcattaccccaacttgagagaacctccccacatcgcttaatcttcacagttattgaatcgccattactggtttcccaggaatcccgaaccacctgcaggcacatgggttcacgaagccatgcgttttcgaacttaaattgacgaggagcagccgttaagacattgttcaccagctcaagtaacaacagacaatgatctgagctcgagatttccaagttcacgagttgagctgaatgaaaaagctcaatccaatgaggagtagccatagcacgatccaacctaatttccacccagcttcctgttccacgcccatgttgccaagtaaagtgatatccaataagctctaagtcaatcaggttgcaatcagagagagcttgttggaaaccttcgactaacccattaggatatcgattaccccctctcttgtccgagtgagaagcgatgttattcatatcaccaattacgcaccaaggtaacggagattcatcaacaatcgtacgaagcaaatcccaagttctgaatttataagctcggttaggttcaccgtacataccagttaatcgccaaggacctctctcaacattattaattttcacatcaatatggtaattggaaaaacccagtacttccaaatcattttgatttctccacaggaaactaatcccaccactatgaccccttgcatcacggtaaagacaccatcaaagccaagcatcacacgaattctctcaagtgtttccttcatacttaacgtttcacaaaggaatatgaaatcgggtctcttttgacttacaaggtcttttaggaattgaacggcccgtaggttcccaagcccacgacaattccagcttaacacactcatggcgaatggtgggcctggaactcagaacccatccctaataagttttttggacccgctggcccaatattacaattcaaatcatcacccatcaccacatcttgtcccaccagccccatagcattctttgttaagtgaactggcccaccagtgttagcattaattagaggcaaatcattgttgatatcctttccagtacgtctacgtttagaatccaccacattgagttgagtttgactttcctcctcaattacttccacaatcagctctttgccaactactgcagcacaatcagtgttgattctctgttcatcaacggcacaatcctgaaagataggattattaactacagactttccatatctggtcacacattgactctccccctgatttcgtgcatagtgcaaactttccttaatggtagtttgcatctggttcaccaccggcacattggaaaacatagcatcattcgtattaccatcacgaagccattgggatccaatctggtagttcttccttctcggctgtgcacgaagaaacgaaccataaggcttgacgacttgatcaattggcatagagaacagcttcggacagagtctttcggcatggccaatgattctgcaaataaagcagaacgttggcacatattcataattaaagtttgcccagaaccactcacttcccgttttacgtaacttcatccgacgcttcaacggtaaagtgatgtcgatagtaagactgacacgtaaatactcccgccatattccttgaaagttctttggatccatctccacgaacgtgcctatgtagttcgcaaggtctcgtaggacctggtctgacttaaaccccgcttggaggtcaagaacttggacccaaaggtctaaatgcttcacagccacggttctgggattatccccatctttcaaccgagtaaaaacaaattgtattctattaaaagtccaaggacttccttcattaacacgagttatatcgagttcatgatagaattgaaaaagaaaacgatttgcctctagctctttgacatacata

SEQ ID NO: 21533 - DNA, 3789 bp, Cannabis sativa
agggcacaaaacccaacactctccttaacgggaagccagaggtgaagaagtaatagtccctgaagtcatgtgtgtgcttcgtgtaactggttgggcagtgaatactcttgttatgttgctccaacctatagaagcccaccttatccttgtgacccctcatcgattgagacttattcttatagaagtacaagatttcctttggcctcggcatagatttgctatttttgacgcaaaagacgtaccatcctgacagtaagcagtacacttgaggcataagttggaaaggtgctattttgactatggcactgaatttagcgaagtagcacctcaagggcaagtgtgcctccatttcaatatgaccccaattccatacatcaaagcctccttctacgcacttgctgggcctctccctggctatgaagagcttgttctagaatagtccttaagttattgtaattcctaaataggttaatatgctggtccaattctcagggactattatttagcaccaacttgggagcctcttggtgctccactatctcctctttggagtcagcctcttcgtgacgggttttcttagacatagtttctatacaaaaagaaggaattccaagcagttagctaccctaactacctaacatagaaatggagttgggggtcctcccctgtaaacttcttggagaggtcccaaatagactcactatctagaacaagaacttctaggagctactcgtttcatataggaagtccaaaacgacgtaggaagggagaaaacaaaaattaataataaaccccaaaacctaagggatttggggcgaatagaagaatttgcaaacattcacgacataaattaatcaactcaaggactcacaaaatgagaaattcgaaagatggcgcagttcatgaaatctaaatctgtttacggtgtcaatcgcacagtcaagaaaccctaatctcatcccataacagagcatgcaaatgcaattcaaaatgaaaaatttagaaaatgcaatccatggacgataaaataacatacctgatattgataatggagatgttaagttgatcgttgctggggtttggttcaagaagttgattgcacctttcttgaagacgagaagctgagacgatcaatgaattgatatagattacttggaccgagagcctagatgggcttaagtaactgggcatttggtaccccataaggggactatacactaggattttgaattcctagggtttgtattcctagaacttgaggataacctaccatttgaggaggatttatggttccttcctatccatgagcaaataattgcccatgagccactgcctgtttagggtaaatgattaggattcgaccccaattagataaatgaccaattctgaccaatccttatttcatcttttagataatcacacccattcatagtgtcttcaacatcaccatggtattcacatattttattttggtcccttctatgcattccacctttgtaaataatcgatgaattcttataatgaaccatgttgcaagttgctatgtaaatattttctcgagtgttcaccaagctgatatacttggaatatcatggttcatgactcatctccttatttggagcttcactcaaactcgagttctttgtgcctcttttgttcctggaatgactcacatttgattttggaacttctgtttgtcaacttgtttgttcgggggctacactatatttggtttgtgccaccccaaagccagagaaactagcctgcacagatgtctatcttgaaacactaggtccatacactatatgagttgtgaaaatgcttctgggaggagcaatagttagagtagaatatttaggagtcggagtagaaccaaatcaataagcatggacataagactcttctcaatttatgaagcgtttagctttggatgagaaatctgacaacatatcagacctctttctttgccaatctccccacaacagagatccagtagatattgatgatgttaaggccattagcttcatctcatcattgacctaagttttagctaatacatccatcatcctttggatatacttctttagaccttctctcgattattgttttatattggtcaatgaactaacctccatatcataatccttcacgcctatgaagtgttttttaaacttttgttgtaaatatttccaattatgaattgaatcaaaataaaatatcttcaaccaatctttgatagacttcaataaagtttacaaaaaatagaggcactttgcatcatcacttacctttgctacttgcatcagtcaaatatatttagacgggtgggatttggggtccgtcctttctcagtacaactctatctgaggcattctaaaatgtgcaaaaatggtgcctctattattcttcttacacatggttccagatctttttcttctaagttagatacaaccccactttgctttcgggcaaggcactttgtgaaattggtcaattcaactatttgatcttcaagatgatttgtattgtcatcacgaaactctcacccacaaactctatcattgatatgattcctaaggttatttccatgagggcttgccttctcgcctcttgctcgttctttctctacatttaaacatccccagaggtcctctgttgacaaactaccttctaaaatttggtgaacctagtgtactatatcattggggttaacaaaattactaaggcagtttttccttccctaagaggtaggcctgtgtacctgagtactaagcttatcgcttcatgcaactctgccttgtagattaatcgagcagctttgctttggagcattgaccaccttcttttcttgtaaattttggttggaagcattcatgttattccatggagcagtgggagcagttttttgtgttggttcctacttgctgatgcagaaaactagccaacttgctcgtatgtatagacgagatgaatgttatagtagttcactccctgtgtcgcgacagtaatggagctttgtctacttcaagtttttattctcacgagaatgatttcaagaaaaatagctaagtctgaaagctataatttctagagagagatgatctgaccttatgggtactttttttgaatgttaaaaaagagctagaggagctccctttcatagggaaggaggtcctgttaaaatattaaaaaaagtaaaaaaaaatacatttaagatattttcaaccattgatgatgatctaatggtgaaattaactccagaggtcagtcgtcaatttttggagcgtgaatcgcatctataggacccatttggggtaagttatagttaaaatgcgtaactctcttgaggatgaaatttggagttgatatcttcaaaattatgattagagtatgatacatgactttacagatcattaaaatatctttgaaattcaagttgaatcgcaacaatcgaattattattgagtgagttattgcccttttactgaaggctactttgataccattgcctaggttgacatatcatgtcaacctggacgctagttcaagggaaaacgtgtttatgatgtattttttcgatgcctaagtgatattttgacattacttagctagtttctttagtctggttaagtcgttgaccagttcttggagatgttgttatttcacagaattgggagactagaaactacccaatttgcaactaagtcactttgccaaaaaagtgaaaatatgaagttgtgaatttgacttgtattagttcatatctcttgtttactatgaaaaactaga

SEQ ID NO: 21534 - DNA, 2712 bp, Cannabis sativa
gagtactcaactatttatctatatcaaaccaagctcgaaggaaattatcgtttggaatgatatccttaaagagtctagtggtgatgatctcatgctcagtgaaaaaattcatcaaatcattccagcacctattgatgtcactgtttggaatgatatcatatcatctcaagatgatggagaaggattatggggaatgaaactatcaactcataatccatgagtcattgaacacctattggtatttacttttttttgacatatttacttttaattatcaatttttatatttttgtatattctaatatatgctttccatattttgtaagactattcattatggagctagcgcgagatgagaattatgatgattggggccaatccattagtgattatcatggtgcaccatttgagctagaagaacctcatagaaaactagaagaaccttcaccagcaccaccgcattagaaaaaaaatagggagagaaacaaaagagtagaatttactaaaatgaagagtgagagaagcggatggaagttgagtacagtaacttcagacaacgttggggaaaaggtatagagtaacattctaccatgagatatcaagtggcctaaggtggatgctatacttaaagaagcattatggaatgaaatgaaggtcatattaagtaccttaaatttgtttcttactattaattatgattcgtacttataactctgattgtcaatttttgcagagttttttcaagttacgagaggaggcaaagaaaagcaccatttcaagagctagagatagatggagagattggaaaaatattcctaacaggaggtatttaagaattcaaatatgtagcttcccaccttctcgagaagcctcgtaaaatttatgaagaactaattggtgagaaagattagaaggaattcgtggcatctagattaaatcctgagtggacgacaaagacaaaaagtgcccaagagaacaaagaaaaataaattttcaacctccagtctagaaaaggttgtatgatgaagatggaaaaagaaattgagagagagttaggccaccaactcattaacattgaaagatctaaagtatggaagagacttcacacaaataagaaaggcgaggtggagggcccaacaacgaatattgttaaacaaattgtaagttttaaataattacattgatatttttatgtttcattatttatttctaattccatttattatgtttttaggatgacttgcgaaagcaagtggaagagagaacaatacgtgtggaagggaagaaggaaattttgaccatggccctgggaacaaatgagtatggtggtcaggttcgagccatgggttagtaagtgacaaaatccttatttttttcacactccactccctaaaaataaaaagaaggatgaggccaacgatctcttgtcagagatggagaggtgactctgtgaggcggaggagagtaacagacagattcaagagtaaataaatgaactccttcaagtcatatgttcccagtatagtggcgttgtgggtacgtcacatgcatcttattctgatgttggaggagaatcaaatgaaccagcatgtgcgaactttgcctctgctccccaagcacctccaccacgtgctgcctatgtctctactccaccagcaccaccaccaccagttcgttctgacactgtctctgctccaccaccactaccaccaacacgtgctgtgaaggtttctgctccatcaacaccaccacccactaatagtaattcataagaattaataataatagtgttgaattacaaatgtaaaattataaatataatcaatttacccattatattgtttcttgtttgattataaaatgtagaaaattatgcgttcgatgcatgttcagctaaagccaaaaagaaagccatagaaagttgcgactgggtttgttgcgaaggagaaatcactgatgaatggcaagttctgggtccataacaagaactacctacaaaacaaatatcgtgaagtattcatcgaacaagtctgtatggaaaacgcgcctctttcgagacccgttgttcacgaaggattcacaagtgcaggtgaagtgatacgctactatatagtatagctgaaggcctatatttttgataacttggtatgtttatattagtttacttaattattttttattgattaatgaaaatataacttttaaatgtttttctatatacacatcaacatgaaaaacaacagcttggaaaataacatggcatgccaaagagataaaaagttgaagttacaatcggtccacatacacaacctttagaacaccttgagaggccaaataaacgacctggtggaggtcgttatgttcccacttgaatgacttccaagttgactgtttttggaactagtttctcagggccataatcgaattcaaagttgatgaagacctgtttaaggcaagagatgacacaatttggcttcaattgacggacattaaggacttttataatatgtttgttataggagcctagccgatatcaatttagtgcaagtataatattcaactcttaataaacttaattttttttttggaagtttgttattaattatctatttttatcatgtacatgcatgatcaattacttaacactaataaattgaatgcaaaatatgcaattctaaatcttggtgccatttccacttaagcacgagattg

SEQ ID NO: 21535 - DNA, 7023 bp, Cannabis sativa
caacatgctttgatctccaacaatcaataaagaaatcatcttaatgaaaagctttaatctcctccccttctagtgttctgctccaaggtcccattttcaaacactatctctctttccttccatttttcaactctaacaccaaacaacttaatgaaaaatattttcctctccaatcctgcaaattttcttttctgtctctcctattttccttctctctaccaaatggaagcaactcaattttgtgtgcccacttaagtatttgacaagattatctatgagaaaaattgattgatatgtatctatctttcaatgattttacactaactaatgaaacttattaattttaaaatagaagtgttaatgtgaatctcatattacaatttcttagtcaatcaccatgtccaaaaacatatgtcggaatttttttttttcaaatgtttttttatggtagtgttcgttatacttaattacaacatcatctctgtaaattttcgaataatttatagtgctaaaaatacggttaaagttttttgaatacgggtagtaagttggaatatcaggaactctatttttgtcattgtaaattattcaaaaaaattcaaaaatttacaagaataatactgcaactaaaacaaatactactgtaaaaaaaatgacaaaactcttaaaaaatgtcgaatttctataatttagaacaccataccactgagacgaacgttccattgtccatttgaaaatgaaagatttttagtcatattttattagtgagtaaggatcatcatgtacttactgacaaatatatctatatagagaataaattatgaccatagggccaagtgaccatgtgaccaactattaatatacatatatacgtgttttaattgtcaatatttggcttttgacttttgactttatcattgtcagtccattttgggaaaaaacctctttatagattgcattttggaaccccaaaaaaaggtaacaatggcaggactagttgagctactgacttctattttgatgccaccagaggaaagactctttagattcatccaaagcataactaatccatttttcggtagatttgatggcgaaaattcagtagacattgacaatttagatcctttacagataacttgtggccaagaaaacaatgtctttcatattgcagtaaaatgtggagcaaatccacaagcagtgcctgtgcagaccttgctaatgctgcattcattgcttgcctatcaaccaaacaacaaaggtgacacgcctcttcatgtggcggcgaggttagggaatgagagtttcgcagcggttctgatagatcatgctagaggattagcaccaacaggccataataatcatgactatagaagtctgctgaggaaggtgaattatgagaaggaaaacacaccacttcatgaggctgttctcaatggttactttgaaatcgctaagcggttgattgaagaagatccaactttgacatgttttgttaataaggctggggaatctcctctctttctagctgtcgatggtggattttataacattgcttcaatcattttggacactacttttcctatttgctctttgttaggaagaaatggcatgactgtcatgcatgctgctgtcattcgttcatgcagcccaggtatatatacatatacacagttttcatcatttccgtacatattttttcagttacttatatatatgatttgtcttataattgtagataggctggtgctttcagttaacatagccaacattattaacattatcaaggataatgactgtaagttacaacatgtttactccctctttgctttataaatcaactctagattttttcactaaccgaaattagccaacatttttcagttccttcctttttaggatttgttaaaaaggcattagggagatgtggatccgagattttagaaaaggctgatgagtttggatggatgcctcatcactatgctgcaaacatgggacaatcaagagttgttaagctatttttggaagctaaaagatgtattgcttatagcaaagacaaacaaggtatgactgctcttcacatatcagcaaagaatggacatatcagagtgatcagaacattgatggaagaatgtcctgacattggtgaagtgttggacaatagagaccggactgcacttcatattggtgttgagcacaaacaggtttctgtggtaaatactttcttgaataagaaagctttcattgatcttataaatgagcaggacaatgagggaaatacagctctacatgttgctgctattcatggttattatgagattattatacatttagcaagtaatcgaaagaccaataagagaatcatcaatgagatgggattgactgcttttgacattattggcaaatcaactctacttggtcctgttgaaaaggtatgtcccatattcctaaatttggctaacttgtctaacactactagaaaatgactcacttgtactattattataattattagggataattgggccataagtacctaatatttgtaaaattgtaatttttgactggacagatttcttttcgaatttattaaaataagatttgaaagtaagtgatattacatgtttctgtccaaactgaataatttataatttgggtctgtcttgtttaagacactaatagagtttgtactaacgaaactagacgaaaaattacaattatactaacattggatacctatgctgctaaaaaagatcattgggtttatgctgctttattattcatttctcaggctatgattagattaaaaatgaataaagaaggccctcttctaagtttgcaagaagctgcaatggtggaaaaaaccacaacaaatgacaagacatctgaagaaatccaatcaatgaggactcaatctggaccaaaggcagaaactaatgataaagatgtaaagcacatggcagacatgaacttagtagtgtcaacactgatagcaagtatcacatttcaagcagccattagcatgcccggggctggaaaatacaacacttcaactggcatggaagctttcaaattcttcatggcattcgattcactggcttttggttgctcggcggcctctatgttgattcattttgctgttgtagtgtactccaagttaagaggaaaggcatgtaagtatcctattgagttcacaatgattttaactctgctatccattagctcctctgtgttggcctttatcatgggcacaaaagcactgttgtatgagaagaaatctgagcttagtattagtgggagtactaatcataagatttgggattttgatttccctggaaatattgcaatagttgcattcttagctactctcttctatgtctttctcccacttctaatgactattttgaattgtttcctcattttggttccagatgatggattacccatctttatggttgcaaccaaatatgtactcttgaaaatcttcagaattttctacaagtgatcatgttgtatctatttctcatctaatttatacaatctagttgtacatattactcaattgtaaactatggtttatctaaacaagaagctttaagaaaattgatggaatatgggaaaaattcctctaaggacacatctcttgggatcaaacttattaacccaattatggaatctcccctggaaagaagtgcttcttaagtccaagtagaacaagaatccaaaatcgcaaatcaaggtttaaatttcccatctaattggttgatagacaagttcaaaacctccaagtggctgcttcttctctccaacattttggtattgagcctctagtttgtaattggcaatgatgagagccttcatcagtttcttaaaatgaactgtaggattctcagggcagaagaaagattggagttgcttgaggttggttgaatagaagaagacagtgagacttaaaattcttgaagactcagatattgacagtttgaaaggttacccactaaagagattgatggctaaaacaagagaaaccaaatcaaccattgctgaacagttagattttattgaaccctccaaggaattgtttgtcacattcagcagatcattgaagaataatttaacaaagatggtggtaaaaaaccagtgaaactgtttattttcagcaacaaaagattgcaactttggtaacttgtgaaaagcatttggaatagttcctgaaaaaactatttgagaatatatcaagaataacaagattagtaagattaccaattcctttgtagatagactcagagagttttcgcaggcgaaaatgctatcagtcataccacccagtaagacaatccatgccaagatagagcttctccaaggaactacagttgcctagttcaggtgggatgataccagaaaaggaattcactttgagatttgatacttggagtgaggaacaatttttaccacagataccaaaaggaagtaaacactcaaaacagttttgagacaagtctattatctgtttgaattgaaaagtgactgaccatggaagtggggctttgagatacttgtgagagagattgagtgttcttagctgagtcaaattgcccaatgatcagtcagagagtttcacaaaaatcatcttcacaagctccaacttcacttcactgtcatatgtttttgccccttcttttcacagcaagcatccattaatgagataaatttttcaattaagtaatgccatgcatgtatgggaaaatttgtatctttctccacctaatgaccatttaggtggcgttttggttagagggaataaaaacgtaagaatagaaatgaaaataggaatgagaataagaataagaatgaaatgaaatcaaatttaaaatgcataaaaagattattaaattatttctcatcttatattgaaatgatttttctttccattttaaaatggaataataatttgatggaaaaatcattctattgaaaagatatttcagtactttaaaatgcaaccatgaaaagaatagaacaaaaattgtttcatttctttttcgtttcatctcactaccactaaccaaacgctgctatgaaatcacatcataaaaggccaactgatgctactgcaactaacgtcctactcccacattggtggaacttgcttcaatttaaaataaagagatatgaaaaacagagttttgtacatatgttctaataatcaaatattaacactcccaacatggcaaaaatgtcactacaattaattaatgaattaaaataatacaattattacatcttccaatgtaagaagacaacatgatgatgatgaaactaaaactatatattacacggagttaatattatcttccatctcatgcacagcatgaagtggaacacttcaaaggctatttccgaacaagcatacctggccggcctaagctttgggcagcttgggtcattctacaaagctagaaataaaaagctagtaatggtagtcttaatgtacataattttttttacaaaaacctcaattttaatcttttgcacaaggtcccaaaatatttaattcggcttcgatctggttcaaccggttacacttgttcctctttgaagcccctaccttaaaataatctatgaaaactaataatcacatcaaacatacccactcattgtatattatcacttatatggaaaggccctacatggtaatgatatgaattttcaatttcaccaaactcacataccatatattacattccaattgtaaagcaacatgtaccatgtatagataatggattgaataatggcatgtaatttaatttctaagaaattgtgataattgtggagtacatcattttaattaagtttgaaaataacaataaaatattctgaaaaaaaaaatactaataataactatgaaggaaaagcaagaactgaagaaccagaatctcaagctgaaggtaaagagaaactttggaactatgtgatttggctatggctgcttcttttgcttttgctactgctgttagtaatgcatttgctgctattatcacttcttctcttgttttcgttgctagtcttgcttcttctctcgcttttgcttcagctcttgctcttaattcttctctagcttttgcttcagctcttgctctcgcttcttctctagctttagcttctgctcttgctcttgcttctgcttctgcttttgcttcttcttccttatactaagaattgcaccattaatattaaggttatcaataaaactgaaaaacacaacaagtcatgacatgaaaatcactaactctagcaaaatcagaatccatcttccgtctcttggcatcaaaatgtctgcatagctgctcatcaaaaagttgtctggtcttgtcattcatgagtatatcatatgaagactgaagcctctggaatttagcagtggctttcgaatcatatcgatttttatcagggtgcaacaacatggccattgttttatatgcctttcttatctcttccactgtgagcttagcaccttccttgccagttggtaacccaagaatggcatagtgatccaagtaaacacccatatctgatgcttctttcttgttctgcaaccaaaaatgcaccatatacatatattcagtaaacatgtcaaaaagatggctcaccaattcaggactgtcagattagtagaatggtatgattaagtcctgtttgccttattgtagaattgcttgttatgatttttaccaagttttattgtactctatttgatttggtacttgtacttttctcaacaattacaaaaatgaattctttgatctttcatttcatttcattttttttttataagatccttcacattacatgattatagtatgtaatgcattatgcatgtatacaaattaattttttttcttcttttatttttcaaactaagaaaacataattaattcacgttttttttcaattaacaatagtaaaacaaaattgtcaattttatccaataaaaaaaaaatggtagtagtaaagtttacattttta

SEQ ID NO: 21536 - DNA, 2183 bp, Cannabis sativa
  modified_base (1082)..(1092): a, c, t, g, unknown or other
aaagtgattgacagttgagttgaaattgtaaaattatacaccaaattaatatgtaacaatttagtcaatattgaacggcacaatttaagtcttcaccccatataaacaagtcttctctctcaaaatatatttttccttagaaagttttagatttcatcttatgataatttagactttatattttaaaatagtacaaaataataattttaacttaatttaagttaaaataaaacttaataataatataaatttaaaatattattatatttttttaaaatgtattcatgttataaattgacttttaagttaattatattaaaaataaattgattaaaattgagcctcgggtactatataacatttaagaaaatattaagtcaaatttattaataataaagcagaaaatctgattaataatttttataaaatacaatatttaaaataatatttagaatatataaattatgaacagtgtaaaaaatttgtagtaaatttttatatataatcaagttaaaataatttaaatataaacacaatgctacttaacatctctatgtgtaaatttaaatattcactaattttctaatgaggttaatattatacctctatcatattatcatgacaagaattatgagatttgatatcattataaatttcatgtaaaataactaatctaaaatgacatatattatattgaggagattttttttaactatgtttggtttctaatttttttaaagggtttctaatttatgtttatgattttatgaattaatcatacatacacttaattagtttgaatagaggcttttccatattgtttcttatgtttgtactattttataatttcaatcaaataatcaataaaaattcagttcattgttataaaaaaaaaatacctatatttatatgtaaatgtacatacatcattttcataagtggatatatttaaaagtggagcgtctcttaaataaataaacctacttagttttctgtttggtaggtgacacattattgtttgatgtaatatgtatctagcatataatacagtattttactttatatatagatatatagatatnnnnnnnnnnntatatatatatatttatagattatatagatacaaatagaccagtccattaatctcagggcaaggcactactgcttctctattattccttttatatccactaagtaaatttataaagcttatttaataatttattcctatatatatacacttaatatcaaacaaaattctgagactagtgttgtttattgtttttagtttgtcaactatttttaatatcttaattaattgttaattattatttattatatacatacccaaaagtaaggaagaaacaaccctaacaataaacaagcattttgtcatgacttaaaactatatattaatattgttattattatatatttagaatatatgatttatacatcttatttttattctgttttttttaatacaaaaggatataaaataataatcaaattaaaattttaaaatttattgatgagaaggtcatgttttggaatcttatataactaatttttttattatatatatacataaagatataaaataagaattaatattatttagggacttgagtatcactaaatatttaaaaagttttttttattaaatgatcaattatagatgaaaccttgaagacatatataattataaagttataaatttgtttttctttctttatcttttttattcttatggagaacttcctttgtttacatttttttttttttgttatatgtatgttggaacatatgtttttttttttattattaattattatttgtggaattaacaaaagttcaatgttagaattacataagttaaaaatactcttttttatgttttatttaaaattttaagacctaaatgttttatttgtgaagatactttttaaaattattaagattacaaaaatatatttttctcagcaaaaagtaagaaaacatgctaaaaacaaataagaaatcaatctctcgacaattaaaaataaactataaaacaaccgtatgataactataaaataaccaaaaatagtttattgtatttactgaaaaaatatttttataaataaaaagttcaaaaataaaaaaggaattggctcctaaaaaaggaacccagaaagaaattt

SEQ ID NO: 21537 - DNA, 1953 bp, Cannabis sativa
tggagctagttctgatacttaggtattggaatgactaacatttaagaaaatactacctataagtgcaaaaagtctggggaccacataagttgcacaatgctcgaacaccactcttaagtggtggccttctgagcagatctcacttaaaggttcaaaaaataactggtactaaggtcaggtgaccactttcaaagtacagttagttcaaaatcattgctcttgagcgatgtctttgggcagaatatatcgttcaaatgttctatgttttaattagctaaagatcagatcgatcatgtaatagctttttataattcaataaatgtacattaccacggtaacaacacatatcaataaataaataaataaagatataaattatcattcaaattgtgtcaattttatgtctttttacaaataagagcaagttatttaattacctaatatgtgtacaaaaggtttgcctaaatcaaaaagccggatagacaaaattattaaacttatgaaatgcaagtgacaaagagtcaaaagtctactcggtcacttaggggcacctatacccgtacaaatattggtaaaaaataagctaacgcaaaaacaaaattcaatttgaaattgaagaaaaatatttttattgagataataaagcaggataagtctgagattaaaagctggccgaccagctagtcgtcttaaacaaaataaaaatatttctcaaaggttaaaacccgcttggccagccatattatactatatatacaaaaggcctgtaggccgaacagacaaaagaatttaaaaattttacttcataggattccttagatcttgaagctgagcagatgaatcctgagcggcaacggttgagtcctgagcggtattattctcttgctcctggacggtagaagaatcctcattagttttttttttttttttgctttcttcctttcgcaattgtcaagaaagccaccacggagatcgcctttgagatagtcaaaattaccttctggatttgtcttttagaattcataagaaacctccaaggtagttgtttcatactcttcaacctcattccgaagtgtctcccgctcagcaacaaaagactcctgcaaggcagtcttcccccgacagcataacaactacatttaacttattcaaaaattttaaaacccaatctaaacactctaaaagttttcaaatacatcatagactcatactatttctacatacacaaaaattacatatatccaaaataaatcaaacaatttattaacacttagaaaagagaaacaaatcacatagaatctgttttatttcaaaactacgtacataaaactatattaaatttaattttttaagacttacactaaaaaaatttaaattttcatacaaaagattaatatataatacaaattatatatatgtacaaaataaaagaataacatataataagcaaatataagaagaaaaaaaaaattaacaatggtgactccgatataaataactttatctgggctgcttgtggcggctccaatatgaatggtgactcactaatagtgtgtcaacaataaaataaaaaatatataaatataaatacacatatatataatacaaatcaatatacacataaaatattaaactaatatatatgagtaataaaattacattactggaagatagcggggacaggcgcgaggtggtggtggtcaggcaaagcttcaagaggttaatatggtggtggcagtagcgaggtggtggtccattgatgcttcaagcagtgaagatggcggcgacatgaacgatatggttatgttatttttttaaaataggtttcaggggcagagagaaagagaatgatggaaagacaggtttgatggagaaagagggttcagagaagaaaataaagggttcgatgaaatgagaaatcagaagggagtttgaggtttattttaatttttt

SEQ ID NO: 21538 - DNA, 4330 bp, Cannabis sativa
tcctataaggcacaacatcacatgtgacctcttatgtttagtttaaggtttctaaactaacaataataaaaacaataaactggacttatttagtaggccttttttttttgctagcaatgtatgagtgttaagttgccttcaatcataaatcatatttatatattgtttacaatatatattatgcatagggcatgatgcaaattaagtcatatattataatttattaatgttaatcaatgtttttttttattctgttaccaataaaattatatattttttttctcttaattcaaattatatgctgtacgcacatgtattattttttggtaggttaatgaaaatttagaattgagaaataattaatatgtaatgaaatattctgagggccgtgtcttgaaattcctcacttcgagtcttaattaaaacatgattgtaatatataaacgcttaaaataaaaaaataaaaattaataaaatattctgagagcagtaatatatatatatatatatatatgagtaatcgtaattttattgtaagtatttctctattagcacatctaataattaatttgcaacaaaaaggatcttctaaaataatatatcatcaaacacaaactacagctctagctagttgtacttctagccaaattatgaaaagagagagagagagagaaaagagacccagcaactacagtttcgtctatatagtgacaatatttaagtactactactgtcgatgaagaacatggtgagagagaggagaaagaagtacaatgtttttttttttttaattgaaagaagaaataagtagatggtctattacattattaattttgtaggtagtagtgcaatatttctaataattaatatattttagctaggtacatgataaattgatatatctctagctcttaaatgatgatgatgatgatctattgggagagtaaactcctaataattgcagcttgagcagtgtctgtggttgctaatagctcagaaagtctctcacttagatcatcaacctctctgtgcaagcttcttatgtagttgcatgtctcctgtaatacattagctgctgaaacctgttcacaaacatacataataaacatatatcaattaataaacaattcaatccaatatcaaaaattataataattaatactcaattacagtagaccatacattatacatattaataagaaaaaaaatctaaagaagattttaattttcatttaatactctatgcacacaagaaaattgtttgcttctactaatttttcaatatatatatatatatagtcatacatatatatcaaattaattaatttaaatatataattataacaacggatatatatgatcttattgcaagtcggttgacggttgggtatatactatagagtactgtacaataggaatttgtaatttgacgagtcaatataagaatagagtttttttttttgtttttttttggtgaacttataatggaatattgggaatttaatttccacgtttcttttcaataatgatggcggaaagctctattcatgtccttgctttttattgctagctaatacatatattcttgtataaaaattcaaacgatagtaaaaagaagaaaaatagaaagtgataatgatgatttttctttttttcatatctatctatctatcaatatatgtattatatatataaatataccttgtctgaacgcctatcgcgaatctcaggaagaagctggttcaacttggaaacaagatcattgatctgatcatcagtaatccttgccccacctgattgtcttgaccttgatcttctgctagacattttgggtatattaatttctttctcttcttatattcaaagtagtatttattataatgttttacaaatccaaaaaggggaagagagagagagagatgaataatcagctatatatatatatatgtatagctttgggggaatcgtgctaattattattctatagctatagcttagctgagagggaaaactacagaaagaaactcaaaaaagagagacaaaatggaaagatgagcagaagaaggcacaaattgtaatgtagtcagagttaagtgagagatgacaagcaatatatattcagaatggtatatataataatctgtagcttccttcactctagagtttataaaaagatgagagagagagagggagagagagattagatgcacagtggggagtgttgaagattgtaagagaagacaagtgcatgggagaaagaggtgggtaaccattcatttaaataagggtttcatctttgttggagacttgagagagagagagagagggagagctttgtacgagtctgtcagactatacacaattgaaaataccatacaaatattattttaatggtttttctttctttcttacatatatcaaagttagtcaattatttattcaacttgggaaactaataataaatagctatttcattgtttagaaaattgaagaaatatagaagtcactagtagtactactacagacaatctccagtagtaatactgctcacaccacaaaccctctgtatgaatgtacccagacttattattgttattgataactaaataactaattaagtatctttgtaaaataaaatagaattaaaaagtggagagagaaaacaagctaagagagaaaataacggccaaataattaattgagcttattggttgactggtcaaagctacaacttatcgatatgaaaacactgcaccgacctgattcctgggaattttaattttttaatctattaatatttttaaattatggtcttgtaataatttataaccatagtattttacaagagagagagagagagaggggttcgtgctgactggtgaggtcagacactgatgggaatttattgcgaaatcgccatgccaattttaagcaacaaaatttcatcatcaacattaaagttttcaagtgatgttgaatcattaatttctttcttgaatagagtacttctttcttcattatttgtaaattaaaaaaaaaaaaagagagagagagaagatgaagatgaagatgaagatgaagaagaagaagaagggaaaccttttcttgctattattactttcttattattattagtccccatgtcccttcacataattaatcaaatgagtagtacggagggaatgagtattatagaaaaacaattaaaatgagatgtcatgtttatatacctatataatatacatattgttgtatatatttgtgagtatgcttctgtattatttggtatttccccacttaagaatatgttttgttaaaatttcaaatgcgtaaaaattgtggtttcttttgcatgcaaatttatataatatttttcaacgtacaccaaatgacattattatcattattattaattattcacttcaatattaaatgttaattaaattttgtccctacattatttctataagtccaactgttaataatattctttgtattttaaaagtacgtactatatattattgcaccaataaatctatgaaatttataacatattatgacgtaccatacataatataggatctctatcagctagggttgcaattacttttgtttggattctaagtgattttatattataaaatttgtccttttgaatttattagacccactgtagtgtggccaatctcaaaggcttatatatatatttgatattcattaattagttatataaatatatatggtttgataaagtcgaatcctatgatatatatctctgattcttttgatgatgctcttctgtttatgtacaatcaatttattttgggatcttaatcttattattttaattacaaattattactagaaaaaaaataggttgtcatcgtggatgcacaaataatcatttttgtctgagtgttaggaagatctaatttccaataatctcgaatttgggagacataatgaacatggtatttctgaaagcacgtgcttgtgactcgtccaatagttggaagcattgaaggtttggagacacttaattgataattaaaaccataattattaataatacaaataattaactattctgttacactgttttgtctatatatatttatataaaaattatacgtgtgtagcacattaacaaaattatcagtacatatataaatataattgaagaatttatcagtctccgcgcgcgatcacagtggccattggccaattccattctcaaagggcaattttagagtgtaattaatttacacattttatcaccttactatagtgacttttttcaaacaaatataacatatttacaaaaacatta

SEQ ID NO: 21539 - DNA, 2054 bp, Cannabis sativa
  modified_base (66)..(67): a, c, t, g, unknown or other
ggtaccgaagatctctaagtggcgacatacaattaattagttatattctttaaaagttattatatnnaattatatgagactcgatacttagttggaccaatatcgacgtaagagggaagatgctagacactactgataccttttacatttctggggtactagtgatgtttagcacaagtgtgtcatataattagttagtaatattctttaaaagttattttttaaaattttatggaatttaatacttaattatactaatattaattatgacactaaaaaaaatgttacagtgttacattttaatatttctctctttatatatataatagggaatttttaaagtttgttctaataaactctttatctgttttataattgacaacccgagcttgaggaaatgtgttaaaagatgcttttgtagggtttgggagtatatctttctactttttctaccttttatattttctatttcgataaaatatacattagaatctctatttaagaatattactaacttttaatttattataaaaaaataatttgaatataattttattggtaagtgtaatcttaataagaggttctactatatattataattagaaatttttgtagtaaactttacgggtgggtgttcgtgatgccaattgtaatttttttaaaaccaaactacatatgtagtttttatagtttctcaaactgcaactgtatctcgagatcttaaaactgtaaaaaatacactgcaaaaatataatgcggcttgaaaagtttacactatcattattatcattcaaaagaaaactcaaaaatcaatcaaataaagttttaacaataagaaaaattttattaaaattttggtattataatatatatatatattaataattaagtcattatattgaattatttctgaaaaatagtgtaatatacacatatatttgttcttctataagaaaatcatattgtaaaaattagtaattttataatatatattgtagtatggtttgaactgtaattattaaattcaaaaccgcaaatcgcactacaccgcgcggtttagcaaaaatgaaaactacaattgtactgcaaatgatttcaaatcgtattttttatgtgtgcgggcaatttgtgcagtgtgagtggtttgatgaacattcctagtagactccctatctgttcggctagagttttttagtttatttttttcatgatcgcatacattataggtatttaaaactacttataattttttttaaaaaaataaataatttacagtactgaaaataaagtttaaagaattacttaccgcatgtataagaatatagtcatgtgtgcaataaaatatacaaatcttattttcggtattgtaaactactcagaattttctaaaaatttacaggtggacctaaatagctacaacatatgcgatcatgaaaaaaattagactaaaaaaatcccatgatgtcttaacagataaggggactatcaaaacaaccttttaaaggtgcactgtagatttatcctatattatatcgctattagcccaattaagtatcaagtcttatataattaatataataatttttatagattattgctaacaaatcgcaagacattacctctagatggtgttagggaccaatggtgaccaatagtaataaaatcacatcaagaatttatccaattaccaaaatcttatcatggagttatagcttggtagcaaataaaaaccctacacgagcactcagatcaaatattttaaaatagaaaatctctaaaatatttaaagaattaaactaaaaatatgttacatccgatgttctaaactctttctatttattctctgttttaaactttctttaaaattcataattaaacatgttctatatttatagaatattatttattgctctaaatatattttcattaattattttttactttttatagtatgtaaatattaatattatatgtttgaaataattgaaaaaagtaaaattttagtaatgtattttaaagaaattaatggttaatgtaaaaaatttgagataaaa

SEQ ID NO: 21540 - DNA, 2933 bp, Cannabis sativa
cgatgaagtatgaggtagaggattttagccagaacttcgggaaccagtagcacgagtttgaaccatggtgaatatcaatggcagaacagagtttgaacaatgaagatgaagaagaagagagaaaattttaagcatttgataccatattagtgaaagtaaaactgaattgatctttattaatgaacaaagggtatttatacagagtaagctaaggacatcagcaaccaattaacaaaagttagttatgaatatcactaactgtaactaacatgacatcataatgactaacagtgtctaagagaaaggggtaatgaaaacgaaagggatgagactcggtggtgatggtcattacgttgaccacatgagagagagaggatgaggagattgggttaaaaggagaaaggggaatagatatagcattattaatctttcgaaacaatatgaataattaggataaaattaatattagtgctttgtgatcttttcaaattaatgtcatacaaaatcatatgaactcaattttcaccttgcgaaaaaaagaaaaatatgtactcaatttccttatattgataaaggtgaaggtaatgctagtttagcatataatgtaatcatgttatctcttatttttactttaagcatagaaatttccactctcttatatcccactttattttttataaaatatacatttatatattggtcaatattccatggacaaacatgtctcttaattctcgtgctccataattgtctacactaaaaagacaataccccccatttttgattctcataaaaatataattaatattagaataaatatcacatgcttccaagattttcaaatgtatcatttttgtctccaaattcttttatacaagtgttggacttcaaatttgtattttttttttttttttgtttttttgataagtcttcaaatttgtatttgtctatcaagttggctcggagctggagatatacatctatagtatattactagattatataaagaatcaataacgacttgtttttgtcgttgattttttttttcaataaatgattttttttatttatttttttttttttttttgtgtattccttttctcttcttaataataatctctctataataataataataatattttcctcaaaaaaataataatagtttactctatcgtttttagtcttttgtgcatcttatttttttcatttaaatttttatactactcttttctatcgtttttttttccattattctgcacttttttttgttaataataatctcagacttttttttatagtcttttgtacactttattttttaaaataagaaattataaaaatatttttttcttatacttttatatttttatccatcaattttatctgttcactattttatctactaatataatcgtacatattattattaatctcttttgtttttattgttcctttatcatcaattttctttgatcgatgttttatttttatttttatttttatttttatttacttattaatagataaatattggagattctaccaaaaataactataataataataatagtgaaaaaataaagttaaaaaagcgtagtgtactccttttctctctccatgggggaaggaaaaaggaataccaaaaacttgatattcaggtaataggccatgttggtcagaatcttaagcttccttcgatccagaactgtgttgtggaagcaccggtggctaaggattctcatgactctcgttcagagctcgaagttgatcctgctatggagattggggtagaaccaacgtcgttttctaggaacagatatgaataaagatggcaaaacctgcactgaggaggttgaaggaaaggattttcagaactcgactatgaatatgtggagtaaatttaaagcaaactaggtttgtactctatccacgaaacttgaattttcaaccccgatgaaacgtggagaccaattgatagctaaaattgatttagtaagaggtggcattgaaacatctcattggaaaaactctgttatatgtgtggtgttgggtgcgaatcttcccttcctggtgttcgaaggatttatcaaaagagtttaggggaatttaggttgttatcccattttttgcactatgacgtagcaaaatacacaaatgagacgtgtcctacattcctcgcatttgggcagagataaatgtcccgggcaaacttcatattatacatctatatgtataacttctaataacccgagcaaggtggaaggtggactatccgagcaggcacaagtttggctttccaaactacttatcaggacttagctacttcagaatgatctcgtgaagtccaagcacgaatacaatccctttaatcatgggattgaatcaggggaatatgacaacctattctaatttcctattttgtgtatcataattatgtaatggatgttctttcctattttatacattgtaagcaaaaaggaaacatttcctcatgcattaaggccctataaatagtgatctagcttcactgtcaaagggatcgaaagaattgcttcaaagagagatctaagaaaattactcagagatttcattgtaagagctttgagagagaaaaacactttgttctttgtctcaagttaatacaatctaaggggagtaggctattgcgacactcactcggtcgaacctctttaaaatctggtattctttattacttattcagttttgctctatttatattatattcttaatcacttaataactgactcgctgtcattggctaaaagcgaggtcaatattttggtgcttttcattgagagcaataacccaagtttattgtttgtcttaagtcttaacaggcgtacaaaatggtggtgcaaactcgcagaggcctggtcaatcagaatgacccaatggtgacggatcctaac

SEQ ID NO: 21541 - DNA, 2940 bp, Cannabis sativa
gttttaaaatagattaaccacacattaatctatttttggctgggaaaaagattacagaaagaaggggagagctaggacataggcttgtttataggaatgtgagaggtttgagtaagataggctcagagagagacaagaccagcctcataaaccactttctctacatccccaaaaacggcgtgttgcttgtgatgtgttcctatgcaaaaatctttcttcacttccccctaaacacaatgtcattctttttctttttcttctccttcttcttcttcttccacctttttctcgagatccgtaccaatcctggtcccacctcagtactactttctccaagagggccccaccctgacatcatcttcacggtgaaaaccaccgccaccacctctaccatgtctcctcagatgccatagctggtacttttatgttttgctctttttattgtttatgtctggttggttcatcactttgttacatttggcttatgtatcattgtcatgctctaacatgttttgcctttttccctttacgagtgtttgactattggttatttctacagtatatacatatacatataatcttatctatctcatttaaaagtttccaccataatggcttgtgggcatatctgggttttcaccattactcaattatagtacgtggtggtgagaaaagttagagactttgaatgatgtaagcttgaacaattgggcaaagcatgaagatgggtgcaatcatttgtcacccatgtcatcaaaatactttttgtcttatacctttctttactttcggttaaaaagagtgaaatattctcagttttttatttttaagagtttggtccccttccaccccatgagattacgaaggcggaggcaatgctttccttcttgctcttcccatcacagagtaaactccaaatacatttttcttttcttttctccctctctttatatataatgctattggttacatgttagaacttctcaaaattgctcttgcctcattctttttcttgtgacacgactgttattctaaagaatccatatttttatattttcttgttcagagttttcactattagtgctgtttttgttttttcttttttccatattagtgtatagtgattacttggttttaattgaggaaattatgtttatattaatctttgtattgtttcccctgtttaccctgcaattcataaggagtgatctaggccatggttgaggataaatgacacttatttttgaaattttattgtaggttgacgaggatgaaacttactggagacaaaagaagggagatgaggagttggagtggtcacatgattccactcacgtaatagcgcaattagctcaatgttttagtgagtaaaaacatctgtgtttttttttgctcccacactttttagactaaacaaattaatattacacttctttatgccatgtttcataaaggctccatagatgtttgacttttactttagattgatattacatgaattagttacggttgttaatactcataagtcaattgtaatcattcaactccatattttaacaaagcttttacttcttggtaacttaattttcacctagcatcacttgtataagtttgtgctcttatggttacatgttttgggttgaatattcaaccattcttatgggatcttgtcatcatcaacagtttgtttacaaaaatgttgtgctgatgtgaactgtgtagattgcatattatattgctacttttctagttcattatctggagtgttaggtttttagaagggagattaagttcagtagattattttgtaataatatataatggacaggcaaactatggtctgtttctattttcatttgtttccttttccattttccctgatgatatttgtgtgtttgatctcactttttttctttctttctttttctcttcatgaaatttgatttcgaaaggaaaatggaccttctgctcctacagctttcctatgtcttggtctatacaggttgaagcaaattaggatcataatgagaagttttctgtttgtatctcatgcaagtaatgctgcactgaccatgttccttctatactacctggctttgaaatatatttgtaaattcttttatttcactgatctttgtttacttttttgcagcaaatgttatgggcggaccgaggtcatggattggaggactatttagccggtcaggcaataagcgtgagaagtacctcgactacaggttgagccctcttcaggtagtaaaaaaacaaacaccttcaagttggctattacttttgcttctgttgttggatggccttttttttcttttaaattttttcaaagggcactgcttaaacttttgtttactattgagtgtcgtcatactacaagaaagtgcatagcctgacctatattcttcttactaggaacaaagacttcaaaggcttcaagagcgattacaagttccatttgacgagactcgtcctgatcatcaagtatgtcttcactagtgtgtgctctttttcttttaataagtaattatgttttaagcattggcttaagtttgataatttaatgttttggatattactttcaggcattatcactatacaaattgttttttactattttcttgtaaattctgtatattttcattgaaggggacatggatgtgaatttctacatatttgtcttgtatatttacaatgatttgtttctccttggtgttaaaaataaaaataattatttgtttataaaatttctttgtctgatcaaagatcttgttctatatgtacccaggaagctttaagaacactgtggcttgccgcctttcctgatattactctgaagggtttgatctcggagcaatggaaagagatggggtggcaaggtcctaatccatccactgactttaggtacaattctttcccacacatggaatg

SEQ ID NO: 21542 - DNA, 2634 bp, Cannabis sativa
  modified_base (93)..(94): a, c, t, g, unknown or other
atttattcatttactcaaattctataaattaactcgtaattagcttaagtaagattataatcctactctaatattcatataattacatatttnntaaaatatgtccatttaaatattagtatattttacaggatattacaactatcccctccttaaaaaaattttgtcctcgaaattttatctgaacatctcgagatacagctcccgcatctgccactctaaatcgtactaaccttgcctctaaatcgtactaattcatctaatgaaactgagaagccctttttctgacccggctttaaacttttctttttactcttataattctagatcactctctagggctatcttgattctttctaacaaattagactgtaacataatattggctagttttccaactatgaactcaatccctgctctggtcatatcctcagccaactttggtgagatcttcttctattcatagacttctcttagacccttccaacttagaacatttgctaccacatttactttatcaagatggtaaaggatctcttagtcataatgtttaaccagttccaaccatcttcgttgctaattccatatcatgtataggataccgctgttcataatttttcattgcctagacgcataggtaataaccttatcggaaattcttttgagttaatttcgttaaggatgtagagagcttgacaaatccttcaacaaacctcctgtagtatctcctcatctcaggaaacttctaacttcggttgcagacttggatcgaggccaatcttgaaccgcttcaatctgtactagatccaccaaaataccacctttgttcacaacatgccctatgaagcttacttgagacaatcataattcatgtttcttgaatttagcatacaacttatacccctgaagacgttgcaatagcatctaaagatgtttctcatgtgcctcttttgattcggaaaagatctgaatgttatcgatgaagacaactacaacctcatctaaaaagtccttgaacactcggtttattaaatccatgtatgccaccagaatatttattaatttgaaggacatcaccaaaaattcatagtgtccataccgggtacaaaaagttatcttggaaatatcttcctctcaaatccaactggtgataaccagttcgaagatcgatcttagagaagatagtcttttcctgtaattgatcaaatagatcatttatccttggcaaatgatacttattctctacagttaattcatttaactctcggtagtcaatacacattcataaagtttcattcttcctcttacaaacaaaaccggtacaccccaaaagtgaggtattcggtctagaaaatttcaagccaacatcccttgtaactgaacctttaactctttcaactcagtaggtagcattcgatacggagctttagatacaaactctgccccagggatcagatcaatttcaaagtcaatctcccgcttcggttgtaaccccggtaactcccctggaagacatccaaaaactctcagactactggaacatgttccgctcccattagtatttctttcgtaccatctaccacactagctaagaaatcaacacattcgtccaaaaacaaatctcttgctctgagcgccgagattaatggaaatttaggattcttgaaccttgccctatcctttcccacaaacacaaataggtcctctccttctgattcaaaagttaccatctttcttttacaattgatggttgcattatattttgcaagctagtccattcccagtataacgtcaaaatcctctaagtttatgtagatttccaatagctatacttgacaaatatgaatgtattgcaccagaatcaatttaaaacagtcaacaaggtatcaccaataaaaaattgacttgtcccggtagaaagaccaacatcgacctctgtctgggtcaaagcaaacccctgaacaggaactaaggtgtcatctttcttctgttccggtcgctgtaactgtaggtaatttctttttagatggcccactaccccacactgggagcaggatttagtttaacatttttttcttgatagcatctctaacacctcgggcactctggatagattcgcaaacttttgtttccaccttgtcaaaaatcttggtgaccttggaatctcgaaatatcggtataacaaaaatgaataacatctactaattcgatccatgaaacagagcacaaaatgaatgtagcgaattggaatttgtttgtttgtctattaagaaggtgaacaaataattaataaattatatatattatttacaaaaatgaatataatgatgcttcaaaaaaaaaatgaatatgatgatgctacaaaaaaaaaatgaatatgatgatgctaagaggcaatgaggcagcatcaacgtcagtgatcgcaaaattggagatgtcaaagaataaatatactaaatttagtattcataaattattgagaaaaaaaatatatatatatattctaaaacaaatgtcaattttagagggaaaaaaatctaataatacaagggaattttgattttatatacttaaaaaattaaaaaatttattattaaacaaaaaacctaaaccctaaaaaaactataccttttt

SEQ ID NO: 21543 - DNA, 5575 bp, Cannabis sativa
ggggattcggttttaagggttttttcctttaatatataatatctgtttttacgtaaattatttttgtgattaggcatagatggactgggagatatgaagcccatttgtgggataatagctgtagaaaagaaggccaaacaaggaaaggaagacaaggtgagactagctatgataaaataaatatattttttaatattaaagaaaacatttttataaatgttttggccattttttatttaatagggaggaaagtgaactgtttgtttgttcaagaatcttgaatcaaaggttgaacttaaaaaaggatgttctcttttacatgttttttgtttgcaaaggagtaaggaataatattatgctaactgtttgttacttcgtttcatgcattcctttggggggaacgacttgtttcacttgatcaaaaacttcagtttaccttggtaggtgaaagctgataaattctcattcctttgtttggccatatctatttggatgtttgcttttatatatttattaatttatttcttgcacttagctttttcctctaaaatcatttgtatatatatatttctctcaaagcatcgaaaggtgtgctagattttgtttttaaaattttcatgtcctaacgttatagaatcaattaatcaggtggttatgataaggaggaaaaggcagcaaaggcctatgacttggctgctcttaagtactggggaccaacaactcatataaatttccctgtaagtttttgcaaccaatattattattgaccaactcatcctatctatgtttattgactttataaattttcagttaagcacatacgaaaaggagctggaggagatgaccaatatgacaagacaagaatttgtagccaacttgagaaggtgtatatatatttctatatagtgtataagtataaatttatctacatactataataataccttgttactttttccaccataaattttgtttttgccgtttttcttaaatgataataagtatcaagtttggaccttttttttatttgaacattattattgtcaacgaacttataaacaggaaaagtagtggcttttcaagaggagcttctatgtacagaggagtgacaaggtatgggagaaagccaactttaataatgaagcttttccattatttattattgcctttgcagctttttttttctttttttctttcttttaaagacaaaatgctattaatattattagtgcaataatagagaagcagtgttgggtatatattggacatgccatattagtaaaataaggtcaccatcggccgtacacgtttatcaatttttatttattttttctttcttatttctttaatggctggtttctttttgttccgacagacaccatcaacatggaaggtggcaagctaggatcggacgagttgctggaaacaaggatttataccttggaacgtttagtaagttaatttttatccttaataacctcttcagtcttttttttaactataattattatatagttaatttttttataggaaattgttattatttgagcctcacttgttataaaattctaaaattctaaaaaattgtcacaatagttaccaatctttgtcattcatgctaggatatataattaagtagttatttgcagcattgttatttatttatttatttatttatttctaacaataggcacacaagaggaagcagccgaggcctatgacattgcagccataaagttcaggggcacaagcgcagtaacgaactttgacataagtagatacgacgttaagaggatttgctccagttccaagcttattgctagtgatcttgcaaaacgcaactctccaagagatgtttctgttgcagtggcaaccctcgacagcgactttaactctcgcgtgccctcgacgtcctcaccgcagccactgttggccataacaaacagttgtgaggcctcggatgagcttgttgacatgatgtggagtactaatactgctcccaatatggatgatcgtcatcaccagccccaagagattaattccgagaccaacaatagcacgtcgtttgcggcgcctttgaatggtaggaactcaccaagtggtggagagtttggggaaggaagtggcggagaattcgctcatgcttattttatgcatgggaatagtagtagtggtaataagtacgagcagaatggcaatggtggaaatattggtttggttcaacagcatgctcctatgtttgcgctttggaatcatgagtagtggaagtcaccagttaatttgaatttccaaaaacaagattttgtgtagaaaatgtggctctatttaagttataggttgtaatggtatgttcaagtactatcctagttataaacttagattgatttagactttttcaaaaaaaaaaaaaaaaaaacttcgattgatttttgtgctagaaaatggaaagctaccctgaatatgatcaatgtggtatttaaaatatttatgttgctttatattgtacttaattttcaactcttttggaccctctatgtttctatgatgagaaagtgaagtagaaaaggttaagaaggttgagcatgatgtttttcctttggtggttatttattattaaatgtgatatatattacaaaccttgtccacaagatctcgtatttgttttttttaaaaaaatctgatattaatatagtctgaaatttttatcttttgtttaagtcttctaatgatttatgcattattatgatatctgtacatttaaacatatacaacttagttttgaagatgatccacgtacgtaactatgtatcagctgttagtacgacaggggttctatataatgatttataaatcattctcatgctttcatgcatgtaataagttgatgggtaaggttccagtaccgggtgtttcagtaaatttttatttagttcggtatttatgaaaatttttagtctaaattttttaataatacttattggaaaaagttttgagttgtttgccaataaattttacatatattattgtacaggcatgataaataattttttaattttattttcagtattgttattttattataaattatttagaattttttaaaattttaaaaataatattacataattacaatacaacctaagcattcatataaaaaattagattaaaaaaaataaaatttttctaagttaattattacatatttacgcaaggggtttaaagtgagggtgtttgaagttacggtggggttgcgtagcagaggatgatgatgctccctctagccggcgcaacaaataaaacaatcggtgtacattcaaataacagtacgtacgttaataaggctgggaagataccagggtgcatagtgaccaggtgcaccgcaaggaaaaagtcaaagaagtgggggcccttttgactatgacatagagagaatctaagcagtaaacactttacagtgaactgaaaggcgtgtcttaatttgcgtgcccttttgacgcaaggctttattaacttctatttactctcatttccttttttttttttttttattattttagttttaatttgttagtagtcagaggcctcctctgcccgttttaaagagcccatcaatctacccaacctcttccaatccggccctataataatttatattctacatttttttcttcttttattagggtcaccaaaaataattaattctgccaaaatgactataatataaaatagataggcagttctttaatttttttgtttaatttttttaatgttattttaataaaaaatactattattttttattattttatcaaattaatttgtattaatttaataaatttaaattataaaatattatcaaaataatcaaatgttaattaaagtagaaagtataattagaataaaaataataaaaatgtctctccactctaactttttaattactttaactaaaaaataaagaacatgagatgcccttaatgaaaaattattattattttatttttaaactagctatgcctcacatatattcttcatataataaataatattatacaaaatggctaattatagagcacgtactacaaatttgtgagcacttcaaagtcttaaatatccatatatattcggatactaatgtctatttcggtaaagaacttgtgttcattagttcatattttatctaaagcaaagtaaataaatttgcatgttatttttatgaactaaatccacaagaatgaatggccttataattaaaggaataccagctactactactatatactggttagctaagctatattgtttagggaaacgatgacctagctgaaggatatatatttatgcttttaattgcctagaaacacgagaaggaaactgaattgaaaaaaatgatgtaaattttgatagaagtttatatgtacggacatgtggggttagggggtggggtaatgaaaatttagatgtatagatatgggagcagaaggaaatcaacataaatctagctaaaagaaacttgcagctcagcacgggacatttacgtacacatacgtatatatgttatagaatgagacaatatatagacaagatacctcagcagagacatttctctatcattacttattaaataaataataataacctgctctctctctctctcaaggtctctttctacgcctacgtactaagtattattaatagatctctcctcctacgttttcctatatcttttgattaattaatagcccttagatctccctaccctgttagctgatcacctcagttttcagctatacattatatatatatgttccccacggttcctctctctcaatcttaattaatttccagctgggtctatctacctagagtacgtattctagctgttgaataaaaaaactgtcttacttcgcggttcaaacttcaaatacattttgttctttatttctttcaactctgtttacaaaacgtgaaatgaaaagttaatagttacactacttcaaatggcattcatttgagaatttttttttattatttttggagccattatgaaatgtaacactttatttgtaggtgtcgacagttaattaattagatactttgaattatgtcaactggttctatttgttggctgtattgtgaaaaataatggtaaaagtgtataatgactttgcgtaaggcgcctgatttggttgttgctgatacatatatatatatattttttatagaaggttgttagatatttaaatgtgtggtattaatatttataggattttgggattttattagctcataaataaagcgtgggggtatggcattgcaccggtatttgttgaatttaatttctatatattctaaattttacattccactgaaagaaacggggttttagctagcttttcggcacaagaaacccaaataaatgactgtaattattagacgacaaatctcactgtattctgtaaaagcagtttaaatttgctcagacagctgaataaatatgtatgtactaatggacagaaattcaaaaattatggtactatatctatctcattaattatctctcttaagatttttt

SEQ ID NO: 21544 - DNA, 3288 bp, Cannabis sativa
  modified_base (584)..(589): a, c, t, g, unknown or other
taattactgcttccaaccaatctctattttttcattgcattttgactttgatcacatgctttttgctaattcattttttttttgcaggaacttctaattgatccaaatccttcaagtcctgcaaatgttgatgattctcagctgtatcagcatgataatttggcttacaacaagtatgttaatggtaccactaattgagtatagagtgtgtcgctgtgctcgtagttccaatagtatattatagaaactcaataaaattttgtgtttatgcaactgatctacctagacttgtctaaaatgagcactcactttctgagattgcctaaaaatggtttgtagttagaactattattgattatatctttctaatgatcattttctacatatttttgttatttgggctcattttctctgccagtgaaactaattaagtatagtaatcaaataataattacatactaaaaggctgcttattgtattttatatgttatagaagttgctatatgaaatgaaatgagaaagaagaaaaaatattttattttcttatttatgttgtataggcattctctctctctctctctctnnnnnnatatatatatatatatatctatctgtcttgtgatatacaaaatagataattcgtcatatacttaatttaattgctgaatttttgtagggactaatgtagggtagtgaaattttcttgatttcatcactttttgctgattcaatcaaaatgtatttggttgaattggattcatagataaatttgagtctagtctttagtattaataataacatactatatttgcactcattatttatgatcttgtatggctgaaagcacagatctttcttctaaattttttactgtttttggtggggactacgaaatcttaagttgatcgatcattccttacaattcatacgagtcttctttgtttaagaaagtgattgccataaaaactcattttacctcttctctttagcagttgtctaagcaaaaatctcaagacaaacacttttgttggatagataatctttacaatgttataatcaataatgattgcttgattgacactacttacctatataactttttttttgccttttccaatcttcaatatgcaatattgtaccactgtttttatgacagtagaaaagaaactagacaagaattttacaccagaatgtaaaatattttaaaaagtaaaaataaaaaatcaaccaagtaagccattgaacaaagaggagagatgcttggaggcatttcagtttggtcttcaaaggataattaatattttacattgtatttttaatatttgacttacaacatctatttggttagtgactgaatgtggatagagaagacttcaaaatttagcatatgtaatatttattaatgtcccatatctaaatagttaaacaaataaaaaagaaaaagaaagaaaaaactctgaagaatttgatatacaattactattcatacctcaaccactaataggaagaaaagaagttgcagattaattactctcaaaatggtttttcttcgttgcatatcttaaaatggcatgtcaagtctgttataaaatttaagtttacacaaaataatttcttgataaaattgagttaacaaaagaattaggaattcaaaaatggtgcatttcaaaagcaactatccatgaatcttgctttgattgtagtttgtctaactgtagttagtataagaataaataaccagttgttgatctgcccaaatttggtcatgtgctgattttctcttctaactgacagatttggtggaaacttgattatagaaataatttaccagagcattatttttgcttctttcaaatgtaacatttgacacatttgataatcttgatgaagttgaggtatgtattttgacctttatttttgatttttttatctctcgtaaataaaaacgaaaccatgctacaaccaaaatttttaacctgatcaaatgtttcacaaaactttttaagtggttcttgcttaactgctatgtgttcaatggtaacatgctcaatattgtttgtggattaagtgtcctttttattataactattttaatggattagtgttaatattaataagtagattcctaataaagaccaagccacatatgtttatttttatggtgaaaacaaaatactaatgtggtagttttttgtgtactattgagattatattctttacaatggagaacatgggaagcttgtttcatacaagccgcgtggcaaagaaattgcaagagaaagcttgacagtctttaagggaggcagaggataggctacaagactcttggtgaatgagattggaagcacacaaagccttggcgccactatttatgcctctgggtttgttgcagggcaaatgcactaagagacttaagagaaagcggtgtgcgcagctctagagccacaccgagattactgcctttgctatcttagagactgcctgagcttgatttcacttatgaacatcacaagctacttagcaagtactactagtggtatagtgtcattgtcacaatataaattgtgtctgtgcataatatgaatagtaagcttggatttctaatttaagtagaaatctttgagaattatatatataccgggtaatttaattgttgaattacgggaatgattttattgttattattgtttgtatgtatagggatagttaagaaaaaactattattataattgtttaaattttaaggttttatgtttaattttaaaatcaaagtgttcattactacatattcatttttttcattcctaattgatcatagcgctggaaaaataaataaataaaaaataaaaaacgttaatgatataaattatgttttagtttattttatttagggtacagaattgaccgcatgttgtttacctaatttaaaagtagtgttttacccttttaaagataaattatgtcctaaataaggtaaatgacatgcctcattaggtaaactacatgcttagaagaaagtaaacaacacaccttattaggtaaatacattgccctaaataaggtaaacgacatgatttagtacgtaaactacgtgcctaaaataaggtaaccaacacaccttattaggcaaacatcgtgataaataactaccttaaaattaagtaaacaacatgatttattaggtaaatttcgtgtgttaattaaggtacacttaataaggtaaacaacatgtaaactattagcttaaaataaagtaaataacaagccttattaagtgaactactaacc

SEQ ID NO: 21545 - DNA, 1869 bp, Cannabis sativa
aacttacccctaatttctaagataaaattaactatgggctttcacaactattgtgatggaagaaaatgggccaggcctataggccttatggatggagaaaccaagtccaggggccagacttatccaattcgtatttcccacgtacgaacagatttccttattttcttcttcttcttcttcttcttcttcttaccggttaaagaactcccactaaacgaccatggcgcaagggcttctgctatggagtccttgcctgctccactcttactcacttcgcttcatacctttcaaacctcacaacacaaaactcatcaccctctccatctctgccaccttagactcccaaaacgaaaccacccaagagctcactgctagagagagaaggcgtctcagaaacgagaagagagagagcaaaatggggaacaattggcgggaagaagttgaggagaagcttctcaagaaacccaagaagagatatgccacttggaccgaggagctcaaccttgataccctcgctaattcgggtcctcaatggtgggtcgttcgggtttctcggctcaggggtcacgagactgccgatcttatagctcgattgctagccaggaactttccccaactccccttcaaggttcttcaattttactttttgctttctgggttttttctttctttttttttttcagtgttcatttttggtactttagacttggtaatggcagtaactcagttaaataagaacgtagtttcattgtatgaactcgatggttttagtggaaagttatggcataattcaattgataggaataaagtaacaaatatcacttgaaactactgattttaatggttgtatgttgtgatgatatatatgctgtttagatatgtattttacaagctcaattgtaagatgtcaatgagtgaggatttaggaatgtgttaatcttattcttactatgttgatatgatattgtaggtgtatgcacctgcagttcaggtgaagaggaaactgaaaaacgggtccatttcagttaaaccgaaacctttgtttccgggttgtgtttttataaaatgtataatgaacaaggagattcatgactttataagggagtgtgaaggagttggaggttttattggctccaaggttggaaatacgtaagtatttactttagaatttaaccaagttagtttttgtttttaaaaaaatccatttttctcatatgaaggcaaccttggaagaaaaacaaatagattgatagaatcaaaatcactttaagaagtttacatggaatctaaaagagtttgttattttaagccaacttatcttatcgcattatgtcaccgagtgtcaaaatataatctgaaggaagataaggtactttcttcaacaattttacagttttgaagcatattatatttggcacaatagctatctgcatttttctacttctgagttttgaccatgattttctctgcttcaggaagagacagattaacaagccaaggccagtgtctgagattgacatggaagcaattttcaaaaagtcaaaagaagaacaagaaaaatatgagcaagagtttaaggagcaacaaaaagaagaagagatccttaactcttcgctacccaacgcagagtcacagtcagattccgtaccgaaacgccgatccaagaaggcttctgatccactgaagcttcttaccccaggctctactgtcaaagttttatctggggattttgcggaatttgaaggatgcctcaagaaggtcaatcgcaaaacaaaaaaggtatgtgatgtggtgctatatattaaggtagcaaagtggaaaaaagacctaattatttaggcttttgtgaaattgagttcactggttgaa

SEQ ID NO: 21546 - DNA, 3783 bp, Cannabis sativa
atacccccccccctcaagatggatggtagatatcaaaaacagccatcttgcgaatatgagatgatagtgtggtagagggaagaggctttgttaaagcgtctgctaattgtaatgttttgttgactggtattagtcgaatagttgaagctttaatcttttcccgaatgaagtggcaatctagatcaatattctttgtgcgttcatggaagcttgggttatttgctatatgtatggctgactgttatcacaatatatgaaggcaggtgtaggttgattgatttggaaatcagctaaaaggtattgaatccaagttatttcactgctggtgctagcaagagcacgatattcagcctctgctgagctcttagaaacggtggtttgtttctttattttccatgatattaggcaatcgcctatgaatatgcaaaaaccagtcacagaccgtctcgtggtggggcaagcagcccagtctgaatcggagaagcccctgaggtgtagtgaagattttgagctgtaaagaagtccctgacctggacttcccttgagatatctgagtaaatggtggatggcttgcatgtgtgtggtgcgaggagataacataaattgactcaacgtgttgacggaaaatgttatatcaggtcttgaaagtgttaggtagagaagtctgcctataagttgtctgtatgaagaaggatcatcaagaaggtgtccctgttcattgtcgaatttcgttctgggatccattggagtcttggcaggtttactgcatgtgtagccagtatcttcaaacagttgtagagtatattttcgttgagataagaacccgccgtcatctgatttggcgatttcaaaacccagaaagtatttaagtggacctaaggcttttagttgaaattgatcattgagagcatcttgtagttggtggagaagatcaatgttcgggcctgtgatgataatatcatcaacataaacgagtagagcgatgaagtcgacattagaaccgcgtgtgaagagagtgtaatcggctgcagattgagagaaacctgctattaaaagagcgtcagagagctttttataccattgtcttgaagattgtttgagagcatatattgatttatgaagtttgcaaacaaggttggaattgtcctctgtgttagaaggagagaatccaggaggcaatgccatataaacttcttcttggagatctccattaagaaaagcgttgttgatgtcaacttgcaaaatgggccatttcttgatggaggaaatggctagaagtaacttgaaggttaccatctttgctacaggtgaaaaagtatcgaaaaagtcctatccttctagttggctataaccttgggcgaccaatcgtgccttgcacctttcaactgatccatcattgttgaatttgatcttgtatacccaacgacagccaattactcttctattgggaggaagtttcaccacagtccatgtcttgtttcgaagaaaagcatatatttcgttgttcatagcatcattccacacattgtgttgtctagcttggttgtaattccttggttcaaaaagggcagtaactgtaagaatgaaagccttgtgagattttgacaatttatcataagaaataaattttgttaggaagggtggagtggatgattgatcctgtattatagaatgacactcataatccctgagatatgtagggggtcgagttgttcttgttgttctccttggtagatcatgcaatgaggggttgttggatatggttctgttgggtgaatctgtaccaatatcaggtatagaaggagtgtcctgagaatagctggtattcggagatgagtgaatctgcatgtttgaaggcatggcaggagtagtatcctcgggccaacgagtaacattagtgctgtcagtatgattttctgcaggaaaatcacttacatttgtgttagatatattagaagatggaacaactaagtgagaaaagggatcaacatcaatattagatttatttagagcttgaaatggaaaaatattttcatggaaaatcacatttcttgatacgaaaatttgtttgctattcaagtcataaagtttgtaacctttgatgccttgtggataccctataaaaacacacggtttttctcttggggcaaacattgtacgatgagcagtaagagtacaagcaaaagcaagacaaccgaagtttcttaggttagaataatcaggtgcattgccaaaaatcaactcaaaatgagtcttatttttaagaagaggtgtgggagtttgatttattaaggaacttgctgtcataacacattcagaccagaattttattggcattttagcttgaaagaaaagagcacgagccacatttaataggtgctgattttttctttcagcaatcgcgttttgtttaggggttccaacacaagagaagtcatgcatgattccaagttgagcaaagagattcttaaacacaagttcatgagcattatcagaatgaaatttcttgactgtgcattgaaattgagtctgaacataggacaaaaattgaggtattatttcagtgacatcgaatttatgtcttagaagatagatccaagtgaatcgtgtgtgatcatcaaccaaagtgagaaaatacttgtagtttgaatgagaactaatatgataaggaccccaagtatcacaatggacaatatcaaacttattgacagcaaaagcatttttattaggaaatggaagctttctttgtttggctaaagggaaaatatggcaaggttcatttttatgtaaagagctaacattacaatctaatttgtcacttagaagggcaagtcttctttgagaaggatgtcccaatcttgagtgccaaagttctgcagtcacaacagagaaggcatacgaatcttgggttaaggtatccattacataaaggccattgatgaccttacctctgccaatctccctctggttgtgcttgtcctggatataaaaactgttagattgaaactttacagaaatagaaccattatcagtaagactactgactgacagtatgttatatttaaaactagggacatataatacattggtcaaagtgaggtatttatttactgctatggaaccactttgatggacaaaaaaggagtcattgttagggagaatcaacctggttttacatatattagacacatattgaaacatttttatgttgttgcatatatgttgagtagcacctgaatccactatccaggaaccattattaggagtgatataatgatgagataaaatgatacctgttggccctgaaggaggaataggatctgagtttggcatacccgtttgttgactggcaagaagattcaataattgctggtattgtgaggcattcagctgaggtagaatggtgtgactttcatcattcgaactcttggaatctgagttggtttggacctgattagccgaggcatcctttgatttgttgttcttgaatcctggaggatatccatggattttatagcatttttcaatggtgtggccaagcatattacaatgggtgcagaagggtctattcttctttgaagaatgattcttggaagcttgaatatcagcctttgaattgttgttcttatctgatttgaaagcaaaagccatgttagtgttagaatcacttccagagttgagattacctttctggttttcttcttgggtaacaagatggaaaactcgattagcttctggcataggatccattaaaagaatgctgctgcgaatctgagaaaaatg

SEQ ID NO: 21547 - DNA, 3230 bp, Cannabis sativa
actaatcccaacattttcgatgtctaactatatagccttgctatactaaaaatactaaaatatgattctaatagccaaacgccgcgttctaatgttgcggggaacaaaacatgcaaaaatataaaatttcatacatgacatataaaatgcattctgaattcaaataaatctccgtaatatgataattcataactaatatgcaagtttcataattaaaccctattgatttgctaatttccaaattaaaattaagcggtctttacacgcgatgacaatgaagagccccatgatccccgtgtgattgatcaaggcactcataatgaaaataatgcggttaatctagccaacccgccaacaacaccatttgcaaccggagaagtgataatcacagctaacataacagtagtagctaatatacctacaatagctcagacaaaccccatactgcttggaggagttgatcaagaaagtctcttgtgagagttgagtctaattgagtagcagaggaagcccgcttacaaacttcatgggatgtcaccctttacagaagaagtttgataggccagactccctaaaggctttaggctctcagaatcactcacaattggcaagtagtccaggtaccacaattggcaaaatgtcgaatactcgcaacaactttggaagacaatgcccacgactggtagccagttatccgaggcatcaatatcaacctgggagacctttttagatttgttcctgacgcatttccagggcacgatgacatacaaactgtcatacacaatgttggccaatatcaaacaagatgctggtgagtctttacaagactattttaaacattttgatggtgaaataacaaagttcaagaaggcccctgagttttcattggtttgtatgttaattaggggtgctctaccaagaacggacttttggaaggaattgcaggcgcgacaactcgagtcattggtggaattctttgccatggctgaactgcacaaaagaattgaggattctctagcaaaatttgaaagaggaaaggataaacgtgaatttaataccaagatcgtgttcccgaagcttacaaacaaaaaactccagaggtcgaagccccaagagacacagtccatccaggcgacgaagtctaaagcttgccaagtccccaaccaaaaatgatacatccctaaaaaggaaaaggggcccacatttttgttaactacattgaactatctgctccccacgaccatatttatgcaatcgaggaacataatggcattttcaaaaaaatgcccccaatctggggaaattgtgacaaaagggaccccaaaaagttctgcaagtaccacaaagatattgtccacacaactctggaattttggttcctatagtacaaaattgaggaattgaccagacaaggggagttcagtcagtacaagaaaaacagagagaatcgtcctgagcagatgaggcaaataatttaggagatgcgagtggttctagagccctttgtaatatcttaactatcataggagggccacatgtcggtggagattctaagaaaccataggagcactatgcaaaggaggccaaagaaaagcctttgacgaatgtaaataacctgagtgagcaacctaaaaagttatttaaaaaggagtgtgacgacatcactttcatggaaagtgatgcaagacgggtacaccacctacatgctaatgccctagtggtagtcgctaacattggtggcaaaaatgtacatcgagttttagtcgacaatggaagttctatcaaccttttgaatctacaagcctttaaacagatggggttgcataaaaaagatttgaggctagtgacatagagcatctttggtttcactggagatacaattgaattgaaaggaatgatcaagttactaataactttgggaacaacacctgttattgctaagttaatgattgactttgcagtaatggaccaacactcttcttataaagcagtaataggtcactctatttttaaagagataaaaatagtaacttcgatctaccacctcaccatgaaattctctacccctgcgggtgtgggatcagtgtgaggattacaagtagattcaagggaatgttataatactgcgttaaaaattgcaaaaaaaaaaattcagtgaataagatttatctactctcaaggctcctcccccacgacatgagtcttttagaatcaaagagataccacacgtggagaagcccgatctggacccgagagtcctcgattatacgaacattgtgcaagtcatagaggaaataattgaggtaccattgagtcttttgataattctaaagtattaaaaattggttctaaactgacttttcagcaccgagagaaacttgtaatgtttctcaaacaaaaccttgatgtttttgcttggaaacattcagacatggttaagataccgcccgaggttatgtgtcaccgcttgaacattgaccccaatgtgcgaggagtacgacagaagcactgcaaaatggaccccgcaatgtaccaagcacttaaggaagaagtagaccgcttattggcatgcagcttcataagggagtcattttacccaaattggttagccaatcctgttctcgtaccagagccaaatggctcatggcgcacatgcatcgattttatagattttaataaagcctgtcccaaggataccaactgtttaatgccaccgcaggtcatgaacttcatagctttgtggatgcacactcagggtataatcaaatcccgatgtacaaagtagaccaggaacacacctcctttatcacagatcgaggtttgtactgttataaagaaattcctttctaattgataatgcatgagcgacgtactaaagattggttaacatgatatttgtagattttctatgaaagacgatggaagtgtatgttgacgatatgctcgtaaaatcgcaacatacgggagaccatgtcgcccacttagattccatgtttaaaatcttgtgccattacaagatgcgacttaatccattaaagtgcgtctttggcgtaggatcaggaaaatttcttggttttatggtaaactagcgaggaatcaaggcaaacccagcaaaaataaaatccttggtagagatgcgatctcctacctagcccaagaagtttaaagccttataggtaaagttgcagctttaaatcgcgaagaaacatgtattaaaaatgcacttgggg

SEQ ID NO: 21548 - DNA, 4820 bp, Cannabis sativa
aaattatctctcaaatttatcaaataaaagaaaaaaaatatctccatcacttttttttttcactgcggttcttcttcttcaagtttacccaaaaacatgtggtttaacataaaactccaatccacaaacacataacataaatttcaaatctacaaactcgaaagattaaaattaagccctaaagtagcccttttgaactaaataaaaattgagaaatcacaaacaaaatcaaaatacaaatgaactcaaaaacttagatttgaaattcaacttctcagtattggtaacaagctttcaaccaaatgacaacctagatatgtccgccattaatgccagagtgaaagcctctgaaagagagaatgagaacctattagcaaattgcagccaagatttgtcagccattaatgtcaaagaaggagctaccggaagaaagtcaaacataatttgtggtatagttcttccaaatgaaaagatctccataagactgtcccagtaatggaaggttaattgtctcccagaagtgtcttcatagataactaacttgtctatccagaagaagtctggtcaaatgatagttgccatctagaagggcgttctcgaatgtctatcatgtctacttccgggtgtagtcttcaggaaaactaattttcctccgaaaaggagtttcggatggttagttgttcctcctgaaagggtattctgaatagtcaactccagttggctcttttactatccagaagtccattcagcattcgcttatgtctgttatccaagaagtgtgcgtctcatccgaaagcacattgtattttgtagatgtggagattttgttacaaagagtttattaagtttgttaagtcgtaactaacttaacaacttaacagttgaaaccactatcttaggatctttatcttgagcctataaataccaccaacacttttcatttcaagtacgttgaattatcaagatccaagaggaaactttgagtttgagagagaaagataatgaaaggtgtagagagaggtacagagaaaagagagacattaatattgggcttggatttgtatgaagaattctctgtagatgaagaagattctttgggcaagagtgagagactcgaaacatcttgaagagatccaacagagaatctttctcggttgtattgtacatgttcttgctcaatcaataaatagaatttggtggtgttctagaactccagtagagacatagatcacatcgatagataggatttaaaccaatatatatctttgtgttaaatttgttgtttattgctttaattttttctggttttagatacctctgtttatccctgttttctctgattattgtttgtgactttaatatttccattgctaactatttgttaatcaagttattagttgatttgttctgcactttagtcttaattttaccacaaattaaagcttggtaatcgatcaagaatgcaaaatcaagattctttccgctacaattcttgaagaaatagttaatgtcagcaatgacgagatttaaattggagaggtttgatggaactggggactttgtgctatggagagaaagtttaaaagggatcctagtgcatctgaaagtctccaaagttcttagagatgacaactattggctaaaaagaaaccataagataaagcagaagtggaggagatggcgtattatgcgatcattatgtatttgtcaaacagtatttgaagaaaactcattgcagagaagacgaagaaaggagtctggaacaagctagaagaattataattaaacccatcgattgctatcaagattaatttgctagaaaggttatacagttttagaatgatttcttctatttttagatgataatattgacaagtttaatgagatcactataggattggctaatataaatcagaaggttgatgaagaaagtcaggccatcattttttttgagatcactcccaatcatatattaagaagtcaaggctgccatcaagtatggcagagacgtgattgcattggaggatgttttttccacactcaagtcaaaagatttcaaattacaattggcgaatcaaagaaggaagaagtttatttggaaagaggaagatcatccaagaaaggaagttcaaagagtacacacatcactctcaatcaagatcaaagtctagagagaaggaaacttgaaagtgttgcttctgtagaaggttcgggcacttgcaaagattttgcaagaagtaaaaggagcagtaaggcttcaacaaatctcacaatagagataggaagtacaacatgcattatcaccacaagaaggacttagttacagttgcgaaagatagtgacggctccgcaacggatggagaattgttcgccatgtcagaatcttcaatgaatagggagtggattcttgactcatgatgcacttatcacatgtgtccaagtcgagaatcaatttttgattatagatcatttgatggaggttaatttctgatgggaaatgatcaattatgtagggtcattggaaccagaaaggttatcatcaaatattatgatggcggaatcaaggtgctgacaaacgtaaggcacattctaaacttaagatgaaacttcatatctctgggtgcgcttaaagatgaaggttatgggtacaagtccatgcacaaaagcatgaggatcaccaaaggtttgctgatattgatgaaaagtgaaaagagcaatggtttatatgttctctaaagagaaactattctagccggagaagctagtttcgtgaaaggtctaaaatcatatatgaagctgtgacatcacatacatacgcatattagtgaacaaggccttaaagaactgcaaaaacaaggtataattgaaaatttaaattcttgtgccttaccattttgtgaagcatgtgtgttagggaaatgacataagctgaagttcactccaacaaggcacataactaagaagatacttgaatacatgcatgctgatcttaggggaccaacaaagtggctactcattctggtaagcaatattttctttctatagttgatgattatagtagctgcgtttggacctatttactagcaaccaagaatgagtgcctggaacaatttaaaatttggaaaaactcaagtggaaaaccaaaccgatctaaaacttaagaaacttaggacagaaaatgggttagagttttttaacttttgatttgacatgttgtgtgaagagtatggaatcattaggcatagaaccatgtgaagaccctgtagcaaaatggtgttgctgaaaggatgaatcgaaccttgttgaacaaattagatgcttattgttcagttcagaattagagaaaccattttgggggaagctcttgctactacaacctaccttataaataaaagcccaaagtgagttataggactaaaaatcccttatgaaatgtggtacaatagaaccccaaacctaacacatctaagaacctttaggtgtaaaacatatgtacaccaatctctattgacaaggtggaacctagatcaatttaggaaactttcctaggttatggcttaggtaccaaggggtatagaatttacatttccaagaagggtagaccaaaggttgtgatttctagaagtgttattttttaataaattggaatacccttacttgatatttggaaaaggtagtgtgtcttcttgtgatgcaagaaaaatacaaaactaggacactacaagcatggaaatggattacagaacgaaacatgtggaagaagtttcatgggcggatgctattgtggaactagaagacagtgtgtagatgtaagctgacactgacactggcagtagtacaaaaaaatgaaattgaagagcctagaagctacgaagaagcaatttcaagtagaaataagttaaaagagctccatgcaatggatgaggagatggattcactccagaagaacaagacttgggttgttgtacgaaatttggagaataaaaaaattgtggagtgaaaatgaattctcgaggtaaaaaggggaattaatgagaatgaatcagtgcagttcaaagccaggttagtggctaaagactttactcaagtggaaggaatagactacactaaaatcttctcacttgtggtaaagaacatgataataagattgatgttatctctggtagctcaaatggagtttgaagttgaaaaacttaatgttaaatcttcctttttcaatggattcttagatgaacagattgacatgaaacaaccacctgggttttaggaggaagaaaagtgagttgaattagtttgcaagcataataggtccctatatggtttgaaatagtgccaaagataatggaataaatgatttgatacttatatgcatcaaatcggcttgaaacgatctatatgatcactgcttatatttcaagaacttagagcaatctacatcggtgaatatgttgctctatgtggatggtatgctcatcatgcgcaaagataaattagtgatcaaaattttaaagagaacttgatatgaaagagctttgaccagttcaaaagatactcggtattgaagtttcaaagaactagaaggaagggaccatcagtttgaaacagtctgggcacatcaagaaagttattttgaagctcaacatggaagatgcaaagagtacatccgttccactagggggatagtttgttttgttgaaggaatagtgtccgaacagttcgaaggagaaaaaggaaatgaaggatgtaccctatgctatagtcttaggatttttatgttagggtttatgccctcaaaaacctgtaaaaatatttttaattat

SEQ ID NO: 21549 - DNA, 3767 bp, Cannabis sativa
  modified_base (193)..(197): a, c, t, g, unknown or other
  modified_base (1841)..(1841): a, c, t, g, unknown or other
ttttttctcttccaacttgtttggaccaaatattgggaccctcctctctgcatcatcactggtcaaaccttctcttgttgatttgagcacctcaaacacttcctcaataggaagtccctcctatagtcacaaaattaataggttaaatatgcgttttacaaacttaatcaaattataatatatatatatatannnnnatatatatatatatactttttcactaaaccccatatagccaaaatttatcactaaaccccatatatatatatatatatactttttccaaattgaattacgctagagtcacattagtgattcatcaccaaattgttaaaaaaatttaaccgaatgaaatatttacaataattttaatagttaagagagaggaaaaaagtaaaattatccaccaaattcatgattcatgatgaaccatctgattctacaaatacagattacaataaacaattaattttttcatactaaaaaatattaacaacaaaacaatatacaaaccatataaatgttataacattatcgaccaaaatcatgaaattcatcatgaaccaaaagttgtacattatagaaacacttatattaaataaataataacacaaataaatgtcttacgagatcaatattttcgttctttaattcttctaaggaaatatcagaagccataatgaaattcccaacactacactgcacggagtcaatactggtcacttctacacgtaacttactttaatttttgtatttgggctgaacatgctgatttatttatataatggtggagagactatcattttttttaaaaaaaattaaatataatttctcaatatatcttttatcaattttttaaaattttaaataattttttaaatatcttttttttttttacgatgaatttcttaaaatatcttttaaccacttaatttattcgaatctttatttaaaataaatatcagtgtaaaaatctttatttgaataggagatagaaatccttgattcggtcataatgtgggatttatgttaattaaaaaaaactaaactaaacttaattgaaatatattttttaaaataatataaattaaaatttaaactcattaatgtatttctctattaaaaaaataataattttatatgaatcaaaattttctattaaaaaatggtgtctcataataatatattaaatcaattaaattctcatacatcaattaatttaaacattttaagaagaggaagacgtggaccacttccatgcataacttcttaagatttgatgaaccaatttttaattttaaaaactaattacaattttttaaaatttaaaagttaataattttcatttatatttgaattataattcacaagatttcacagttggtagataatagatatacaattgtgggaatctgttgcatgaaattgttcttttcctttccatgttgttggtttgggatttttattttaatttttgttatatagaaatagtaaatatattaaaaaaaataataaaaaaaatagatacagtcattacatattatataattagagagaatagaggaaacatcgactttgccatcatatatagtcaaaagtgcatccagcaatactgttaaaataatttaatcaatcccacagacaaattttttattttttttttttatttttacatttttaaatatttttttttttttacattttgaccaaattctacgtaaaaactctattgcaactagctacataaatcataaccaaaattcataaaacaacccacacagaaactaccggagaaattactttagaatctcaaaccttaaatttaaaaaaaaaaaattaanaaatagtatatgaagtaatttcttaaaaaataaaaattacactatgcacttaaaaataaatttcttttttacattgacttttttattcatatttttacaaattatgttttatacagtttttgcttgtttttttttcagaaaaaaatgttacttttacgctaattttagtagtaacgtgttaaaaatgttgttatgaaactacaaaaaaaacaacactctatattattgttaaaaaaaccatattacttttcgtagtattaacatcaaaataatatcatttctaaaacagcgaaaaaaataacactacatttttgttaaaaaaattaaacaattgtagattgataaaaatgtaaaagttgttatttatataaaataattccaaaaaaactaatttcaatttttgtaaatcaatattgaccattactaaatcatacttaatcgattaatatactttgatattccgtatataatttgactcattagctaattaattttttaatcttatagaaagcaaataatgccaatacatccgttacatacatagtttcatatcctagtaatttctcaaattacaggcattaatttgaaacatatatatatatagtattatacagtcacaacctagtagtttttgcttttggataatgataataattttttaaaaaaatattacaaatataccctatatatgtttattgaggtattagcaaaaacacagctaaataacataatgttacagctgtctatttcaaatggttgaaaattctctttttataaacaaccaaaatttgatgttatatagtccatctatctatctatatatataagtgagtatatcataagtttcaagcaacaacacaattaaattattagatatttttagtgaaagaaagtgtatagtgatctctaatatttcttctcaatatataaatataatatgatgattaattctctactcattatcactgtgttagtctccatattatttttgattaaaattgtagatgaatgtgaagccaataataatacaacctttgacaataactatgtgattacatatggaaatgatcatttcattcaactcaaccaaggacaagaagttcagcttacaatggacaatacttcaggttcattttcatcttcttcttcttcatgttcttcaaatattaatatatttatttatttatttacaaatatttgataatatattgtgtttatataggaacggggtttagatcaaagaaaggttatggttcagggtattttgagatgaggattaagacaccacaaagtcaatctccatcaattgtcactacattttatgtaagtattttctttcatttgttttctcaattaattaccatgtataatattaattagtgttagtttcaataattgattactattttttcttattcttattgttataattattattattattttgggaaacgctaatcggtgactagctagctcttttatgaacaactgtattgtaactcatgtaaaagaaatgttaaaatgtatgagtagtgttacataatttaatttaataattattataaaatatcgttaactgtttacaagatactattttttattgatgtcttaatcaatatcaagtttttattttgctttaattaataactattataaaaaattgttaactatttataaaattcactccatatatgtactagacactaataagaatgttatttgtttataggggttaggcccttcaaataaaaacaaatatctattaaaaataatatatttttttaataatttttaaaaatattatttatttttataataaggatcaaaaaaattatttttcctaaaacctatttcaacctttatttgactatcttaaatgtacattttggtgttttacatttcttttttatttttaagtgagctttt

SEQ ID NO: 21550 - DNA, 1707 bp, Cannabis sativa
caaattactatattttttttttatagcagatgatttgaactttaaattcaatttttatatttatctcattattacaataattaaaatataactattaaatgtgagaaaaaataaacattagcacggtttggacgggttaacccgactaaactgactaattcaatgggtgggttgaaactttttttttcttaattgggcgtgttacacttaaatttttgtaacccggattttaaaaatgtaacgtaaactgaccaaactgacagatgtacacccctaatatggaccataaaaaccaacatatctttctaaggtctttctcgagttcccagctaggtgtgggtctccaatcataacctcgagcttgcatgctataggcgcaggctggagaggtgcattaccccgagttagagcttcagatcgtatataccactgaagagcagcatacttctgtctgatcagaaactctatctcgtctcttaactgattacactcatttatatcatggccgtaattgttgtgatagcgataagttattcatgttaactctttgaagggaggagttttgcggtacgacaccgttgattgggtggccatatggatctcttcacttggggcagatggtgaaacgaggttcatactcttgcatgggcttgttcccagttttggctttctttttgccatgggagtttacttgtttccctccgttattagctcttttgccttcgttcgaacctcattttcccccatcaccctgcagtctagtgttaagggttggggagtcttgcgatttttctttttattttttgagtccttggcttgagtgacagcttcttcaagcttgataaagccatctgctctatcaagaaagtcattcatagtatagactgacttgagacgaaggttggaccatagaggactcatctccttgagcgtagctacaagtgtcattacccttgcattctcgctaagtattttttttcttagcggttgcctctaagaagcgttgaatgtagttcttgagggattcatcttcttgttgtttcacatctattaaatcattgggttcgatttggagttgttgaggagtgaatttgttgccaaaagcagctattagttctttctatgaatcaatagatctagggggaagcttgagataccatcactgagctaagcctgtcagtgtggcagtgaaaattttgtaccagatgtcatctcttactccttccaggtcggtctgcactttgaagtaatgaatgtgagataaaatgtcttctttctcgatgtactcatgccatgaaggattattgaattttggaaggatcggcaaagctttgattcagtctaagagcagtgagcgttgctctttgtctagttcaaatataagcaacttgaagataatttctagcacgaataaatacaaaagatatacaaaatcttgtcataatacctctagatcgagttgttattaagtttattttgacaaaaatcaacatagggtactattttgtactagtttgaaaaaatacatcgaccaatttatcatctaacaaaacagatagttcaatcgatatcttttgtaaaatacatgatccaaaaagtttaaaatggatcaaatataaattaatattaagtttaagcctataaaatacattcaagggacgtttcaatacacttcttatatatttcagcattcataagagtttttta

SEQ ID NO: 21551 - DNA, 4054 bp, Cannabis sativa
acagtgtgaacttcagcagacataaggccttcaaaattcttcaactgaggtgcaaccattctgaagagataattcaaatcatgtttccaatgaagatcatacaattaaacatctataatattttgtgttgaaagacaatagaattttgttttttgtccaacatacgaaaaggaaactgattgcatttatttacttgttccttatgtctgcctctctccgaccaagtctaggagcatcaactgtccagacaatagccttaaatccatttctttcagccctttgcaccagctgtgctgatacatcccgtctcttattaacctatatggttgataagatcaatatacttcagtgtaagccaatttctgctatgaaaaaaataacaaaaacagtgatgacaaactgtaataaaagaaggttaaggagggataagtattaagtacgtataactgatagaaccgaacagcattgcagctggaagcaacctcttccacagcacagttagacatgtatgataaaacctaaaaaaaaaggaagaaacctgaaaaatcaaaccccttccaaatactgattcatttatattctcaaaataagaaaacctcaaatgtgttgggctaattaccatgatggtgtcacatgaagccgctgctctggctgtagctacctcccctgcagtaagaaaaggtcatgttaagtccaaactttgataccaaaatacctcacaggaaattctcttctattgaatttacaccttcagggtgagctaactgatgataagcagttggagcaatcattataggggctgagattttgtaacccaatacagttgttgacatatctattctgctaacatctacaagaactctaggccgtaacctagatatccataccaccaatacaaaccaatcaaaatcaaaacatgagagtttaaaaaaaaatgaaaaaaatgctaccactagtaagcctgagattacctgattctttggtatgcctcgatgttctctcttaatgtattctcatcctcagctcctccagcataataatcaaagtacattttgggaagagcttgcctagccaattccttgaactcattcacgttgactggttcaggtgccatttttctgcctgcaaacaaaaccagaaccatctaatattgtaaactatgatgttgggttcgatccatccatctatttatttatataaatacatacaaggaacctatatacaatcactaaatcagataaccatttaaacttacttaaatattaagaagctagtttaaaatattgcagcaataaattaagaaatacaaaagacatgtaaagaagattatatttgcaaagaaaataaaattatgtcgcatatcaatggaaaacgatgacacgatgattacccattagagagcaagaggacaataatagatcttgcataacataacactcgagaaacgatatatatctatatatatatataaaactagtttgaacttaccttgtatgacctgttttctcttggcctataaatcgagagaaatcactaccgaagtgaaggttttgaaaacttggatctcctttaaaccagcttatatatatatatattattattttctgtgtcagagaaagtatactatgaaactgaaactcttgcttaaacttttgggaccggaaaaacgccaataatttggttttgttggtgtcgccgtgatttgtttagactgtcaaggttaaatttgtcatttgaatttgaataatgcatggtttcgtttgacaacagttgagtaatgattgaagatgatagtcgatacagtggaagaagaccaatttcaatcaattgaatatcagaggggtcagattaattctgattgacaaattatagaaaaaaatactctcttttgtctttctagcatcattgtatgtaaactatttataggaacccatcgaccacttggaggtttgcaaagtcaatagagtttacttgtttagcaaaaaaaagaatatgacttcacatatgaatcccatactttaaaattaaggaaaaaccaaaatcgttacatatagtaaaaacttgtttttggatacccatactctaaaattaaggaaaaaccaaaatcttttctttagtagaaacttgtttttggataggggaccatacaaaacaacaaaacattgtcctatgtcggtctctcaaactctcccccttgggtcatgggaccatccctggaactctctctgctcataagaccacctctcttccctcctttgaccaaattcctccctcatatcatgagagaatttacaggtatctccataatagcacctgccttgagcataataccggcatagcttttgtggcatttcgttttgcttccttgacagacacatgggaagataggaataatagttatcagttacattttgtcttcttgatggattcataggatgatacttttcaattccattttgtctccttgatggactcatgggatgatagttatcctttccattttgtctccttgaaggactcaggagatgatagttatcagttctgttatgtctccttgatggactcaggggatgatagttttccacgcttgttaatggctgcctgtgattaccgctcttcagaggttcctttgtctgattcatacttgagcatgcatatgtgggaggttgccgaccaattatgtgatgaacatcaagaatgtcataatgtgttcttgcttgattaatattccctaccaaattcttggaggcatgctggttgatagagacatgattgtcttgtcttctatttttcagaaacaggcttggatttgaggaaacttcactaaaattagtagttgagcttgcatctcgagctttagtagctgccgcaggtttcccagaatcagtggacaacctcatcggttccttttctttgttttctgaactgatagacgaaacaaaattctctcgtggaattgcaggctttgagtaacgctgacaaggctggagacctgcctcattttttgaaatcctgaagcataaaagaattgatcatgtaacaatacaagaaacaaagggtatataaacaaggaaatatttgataaaataaacaatatttatccatatcattcatattgtttacctatttccattttgcatttttctatttttcttctcaagaattcgtgtttctctatcagatctagcaagagatccccttgagtgcttctccatcaaaatcttttgccttgtctcttcattttcccatttctaaacacacaacaataggtacaacttaatctctctcagagttttcaagaaacaagaatacaactgaagctatacaagctcaaaccagaggaagaaagatcatgcaaaaccgacctgtctcaaagttttcaaccggtaaagattccgtcccttaattaggaggggatgaagtgggggaagtggcttctcccctttgctccatagtacttcaatctggtggcattgaccaaaaaactgtatattaacatctgtgataaagtatgcaaagttcaacatcattgtcaacttgatgattttatcaatgtactaaaatcagcatgtgtctagttgcattacatggatcactactactccatccatgctcattattatcttacaatgtcatctaatttcacaccacctaaaaaagaaataaataaggaatttatgtgtactattcttatatatccaactaaaatattactcatcaactcactgtgaatgtatgttgttgctttgcagcaccatagctctctttcacaatacgaccagcaaccattctggtgccacaaggaggaccgctggctctccgtgatgctacattgaacctgaaaaagagtttcagaactctaagaaagctaaatggacgtattattgaatcagcaataataatgttttacttgtaagtgaagagcacaatttcttatcaactagttcacagcagagaaaacaaagatttactatttgttaaagcttacatgtcataaacattttgttcaaacaaaactacatcgccagtacatgcatcgcctgcacaaaaattc

SEQ ID NO: 21552 - DNA, 4718 bp, Cannabis sativa
aacggagtacatgtgtcacgtgggttttggtccatgcacactacatgccttagggaagcatatgaggtctagggaggcgagatgaagagtggtttatgttagtggaattttataggcaaatataatcccacatacaatattaaatgtagcctttccgtatcccaaaactgttggatcttctttgtgttttttaagacatgatctagactgtttgcttcaaaagcatgttgattgccacttttagtataaatatagtgaaaatagaccagtcaaaattttctccatttcagccatcgaattaaaaaatttccaagagaagaaaattgtctaggaaagacaaaacctccaatgctttttttggtgaataacctgcatcatgactgagatacttaacattcaacttcaaatttgatcaagaatagatccagacatgccaccccagtcctcacaattgatccttcaaagccattttggtcacaagatttttgatcaggggtcaatgaactattgtagagaactcgagactttcaagcaaggctcaaatttctatatcaagtaccctcaactgtcatttccataagtaagcatttttaacttcaaacttgtactttaatttttatcaaagtcattttttttcgaaatagaaattctaggtggctagctatgtagtcgaagatttgttagaatctttgttgcatgctctgctgtgtagggtggttcttaggatatttatcgtgatggtgggttattaggtcgattagaggaacttagcttagtaaatttattctgcagtggtggtatgttagctttgtgaatactgcattttctcccattggtccctttcacttctggatggtttattttagaattttcattttgtatctttatgttgccaatctcattattttggagcaatgttccttagagaactttcttctggattctgggtccggcggggacctctcaaagtagttataaggaaggactctcccgtactcttactaagtctattggtttacagtattaattgcttgatttttcttctttttccaagtttttgctatggctgaggtagatagattcgcacaagagatgatttttgaccttgaagatgaacaagctcaaggagctggaggtgtggagccaggacgcatgcaaggccactcagttaggatgcatgcaaggccacttgactagtatgcatgcaaagccactcgaccaacatgcatgcaaagtaactttgtcaacctgcatgcaaggccacttagccagcatgcatacgaagccaatcagccagcatgcatgcaagcctcttggctaaggatgcaccataagcttcttggtaatgctcttctcgatgacataaccatgcttagtgaatccaccataagtgttaaggacaaaatcagttgaggcacaatcacaaggatgaggcatgcatgtgaatggagtacgaccacgcctcttataattttgttaccgagaaggtacaagtagtggaggcaccacacttgcaagccttgacatcccaaccaagaatatacaatggcaaccacctctgcaacctaggaccacctgacactagataaaggtacaaggcacaagaccacctcctacactagtagcttgcagtaccaggacgtcagtttgtctcttggggaccacaagtgtatcctaggccattagaacctataaatactctatttttagatgtaagagggtttagaaaatcattttgtaacactagacttaaagaaataaaaagatacgttcccctctattttgctcaaaacacacattgatattttcatcttcattttatgttttaagttcaaatcttaagttttggctattacgtagttaacaatttcataccatcaatagtcatgtgcatgatgtcacaatggtacttgaacctccttttaggatcccttttgtgatttccatccttatacataagtgggggaattctataataaatcgaattgcacgtaactctttagacattctctctagtgtcaatcaaattaatatactcagtatattgggctcatatcctttcttcaattttttatgtatcctccctacagctctgactctttccattcatcttattctgcgactggcttactcctaactctggaatttttgtttgttgatttgtctatatgtttatccgggagaaaaactatatccaacatgtcctattccaaaactggagaaatttgtttacagaagtgcataacctgaggtaactaggccataaatgattggattggtatactgggttccgggacgtacaataaccataactaagagttgtcatgcaaacatagaattactgattctgtgatatggtgtcggagttactccgaagacttcggtatatgcttcttccaaactaattaaacattaggctattgtaagaaatgtgacaaagtatcagacctttgcctttgtatttcattccagaatagggatcctgccacaatccttgactacagggccactaatttcatgtcatcattcacttttatttttcctactgcctcaatcatctgttggatataagcatttaggctttccctagcttattacctaatgttggccattgagctaacctcatatcaaagtcctttgcggctactgctcccgcaacatggattgtagatctttccaatttcggatggacatagacgacaaccacttccacaagtccttgacgagtttggacaatgttaaagagaaatataagcatttcccatcttcacttacaccaattacattagtctgttgtacttccataggtaggctctggggtttgtgtttcccacgcgcaactctatttgtggcattcaaaaactctctagcaactgtgtctcaatgattctctttacacatggctctagatcttcatcttttgagtcagatatggcaccactttgtttctgggccatatagtccttaagttttgttaatgtagttttctgatcttctaaccatcttgtatgatcatataggagctcgcatccttagattctatcgtttaggttgtttcttaaatcacctctacgaggccttactttctcactctttggtttttcctaattttcattcagtgtttcctggggtccgtgttgtcatgctatcatccgagttgaggtcctccacatgaattctctggttaatagaatcactggggaagtttttccatcctcaaatgttgggtccatgtacctaagcacttggcccattgttatgcacgactctattgatcggttggcttggctttggggtttaagcgtccatttctttcggctgaggttggtcaactgctttatagttgttccgtggaacattgcttatgggtttcctcagaggggcacccattataccttttcctttatcatttgctgggacagatggcctagctccaagatggttgaatgatgggataaggatgttttctgttgggagatttgcattagcatgtagttgtgcaagagcttcttgcaatttttaggaaactcttcctactcccccaatcttttctgagtatctatgagttcctatcccaatcttaccacttcaggatcttgctcatagtactcttcttcatattcctagttatagttttcattgtggcagtctttagggtcatctccatgaccttccaactcatcctcctcaataggatcattaacaagttgttccatacgatactggtcttcttggtgtgaacggtttcccacctatgacgtttccctgccccctacgacaattaccggagaattttttaggggagctggttctcgccatcgtcagtgacattgttcctaccatctcgagcaggtggtttgaccactaccttttgggttgcaaccatcattgtcgatgacaactttggtaattatttcctcaaatctcaatgaaagcacctaatttttaaccgacattttcagacactaattctaaaataaataagcttaacaaagaaatgaatgaaagaagaagaggcaagggtttttacgtggttcgagtgttaatgaactctagtccacgagttaatattattgaggtagaaagccttcaaggtgttattacaaaattattttttccctagatgaagaaccccaatccttagttcttgatcccaaaaattaatttccaatcgatcgattgcctttcatgaagggattctgttctatttataggctacaacttggtatggatatactcagacccaataggattctaaggtgcgaaataggcccaccgatggagacaaaaataaaatatactgactttgggctaattgagtgaggccatattgacaagattgcaatcgtccatgcgagcggggaccattttaggatgcctggttttgtgggcagctatgtctgtaccgagaatttcagagaatatggtattggaaaaaaaaaggtgatatgtttttagtgtaaaacacactctacggggctaaagtaggggacaaacctctgtcatagccaggccctgtgtttggtgggcatattggaaggtgatatttgggaactatctgaatgtctcttcaactacctacgtctagattaccccatgagggtactgaatttgtcatggtggactctttgtcttttgaaccaaacagtatctcacggagtagagtggtctaaccttattatgtgtttaactacacttgcatccgaatttggagccat

SEQ ID NO: 21553 - DNA, 6639 bp, Cannabis sativa
tcgtttggtggagatgttcacagaggaataaacacaatctatgtcctcttctgtaaataactgagccgaccgagggtaacttaggaaaactaaagcttgatccggtagaataattacttctctgatagaaatcgaggaaaggatatccaatgagttgccggagattgatttctccggcatagctctccatcttaaaattaatactggttcgattttacctacttcaaaaaaacaaaaaaaaataatttaacacatttttttttttcaaaaaagagcggcaaaaaataaacaaataaaaaataaattagggtttgtagtaccttgaaagagaatacgaaaagtggagaaggtaaagccggagatgaaaacgcaagtgaagacgacgacgagggtgcaccagaagaatctgctccacgaaacgacgacgtcgcttctctttctacgatccttcatttgtgagtgaaaccacgttacagagtacaacagacagaatcgattcttcttcttcttcttcttcttctccttcaacctcatttcttttttccaaaaattaatgttattttcttttcttaattaaataattttgaatcaaaaattacatatttatatatgaaaaaaattgaaatgtatatttgaagctcagtgtacatgaatctaatggagaatgaaaatgattaattaattaaaaaataataaaagtgggaattgagagatttttgggagtgttatagagagaaggagagagagaaacattgctacataataagttattgtaaatagaattttgatattggatcagaaaatttacatgaaaaagtctcatgtaagaagccaatagtagtattggatttggggtgtttcttgcaacttgagaagatttgatcagaaggctggtgagaagggtagtagacgccatctttgtctgtttatgattttttttctgtatgaattaggaacaatatgtgttgagaaattgggtatataaagaagcatgagagactttttttttttttttgctaattactttaattatgtatgcattgagagtattctacgtgaaaaactaacctacctcaatgcatggtcaaagaagatccactattataggacagttatatatataggttactctattatttagaacttgttttaattaagcatttgaagtttggctttgatcccttgataatcagatgtattgatcgatggtttcatctgtaaattaaatctcaactttaacttaaaccaattaaggagttcattaagaaaaaaaccataccaagtaatatctatacaccacgctaagttagcttaaagaattttttgggccaaatgaagggcattgggcgtggggtcctgtctcacccttgctcatatcacttctaaattattaaaaaaaaatatttttataagattttgggtatgccttacctagactcgaactcaggacctccaacactcacacacctacctatggtctcttgagctaacctatctaacctatctaatctaatttaattacaattaatatatattaaaagctaattatgatttttttcctcaaactttacatctatcaaatcatgtgccttaaattattttggtggttaaaaattttcacttaaatttttgtctaatttaatttaattttactaattcagtaattatttatatattacttagattttaattttgaattttgaaaatattgtaataatttagttccaacaataaattatttaaaaaaatttagaatatataaagacatttacaaaaattaaaaacagcaccaatataagctgcaccataactaatttcttctgtaaaggaaatttcgtattataaatatttttttttgagtaattattataaatatctttaaaattattctaataaacttttcattttaaattcaaaattaaatatctaaattagattcccaactgattaaaatttaaaaataatttatctaattaaaaaaaattccatctataaataaacgatgtataatttttttttccttcagcaaaacgatatggtattcaatatctgaaaatcatggccactggtactaagattaatttcccaattaattctcttcctatgtttatttattacttataacctgtattcactttttgatttgatttgatttttgtttacagtgaaatttgtcaagagagttggtctcgatccatacctaccagaagaaacgatagaggaaattctattgagattgcctcatgagtcactcataacattcaaattggtctccaaatcatggtacaacttaattaaatctgactattttataaggaaaaaccttgatcatcatcatcacaataatgctactattactacagctttaatcttggctaggaattcagattttccatcattcattaaatcaccacaacatattatccccatctcttgggttaatcatattgatgatcatgatcacagccttcgaatccatagtttgaaacaactcaatttgcctccgaatccaagtgaactattggtaaaagggcttcattgtaatggcatcatttgttttccatataaatataaatctaaaattatcttttgcaatccaactttgagacaatgtaagattttagacaccccagttctaccaaaatttttgtttatagcacatggatttggctacgacaaaagaacaaatctttacaagtatgtcatgatttcactatccacacctagtaattctaatagcacatttagagttcaaatttgtagtttgagtactacaactagtagttgtagtagtaacacttggagagagattgatattgagccatataaaaatgtgttagtatcacctcatcatgagggtgtgtacttcaaatctttttattattggatcattcatggcatcaaaattaaaggaattatttcgtttgatatgtgtagtgagaaatttagtataatatcgccacctcagattgaagaaaaaatttatcgtccaataaaacttacagtgtggaaggaagaattagttctctttacgagaaatagagaatcattattgtgtgtaccgtcattttctttggatatgtgggtaaataatgggagcaattcttggaggaaacatcttacaattagtctaacagaatggtatgtgttctactctcccttggatttttggaaccatgaagagttgttgattaaaccttccaatgaagccatggtgtcttacaacattcgaactaagaagattaggagacttgatatttccaagtactggtctcgtttaacactctattcaaaaagtctagtttcatttaacaattagtttttagattattattatgatagtgataattaattaataactttttgttctaattttggatgaatgaatttcaattatgatatacttatttattatttcatcttatgagagtttttatttaaatcttattttatcttatgtttagttaaaattatgattatataaggataatcctgttttaattattatttcgattaagatagtttttgttactatataagtatagtactacaatactataatgttttgaatggagtattgctattaccaaagtacataataccattagaggtatacctttataattagttaaaagttttttataatttttattaaaataaaataagtaggaccgatattaaattacactaatatcgatattacattttataagagtgctagacatcactgatactctttaatatttttcttttgtatgcgtgaataagttatgatcttcttttttggagttataagttatctatctactgaaaacaatatcatgtcacaccgatgaagtaaataatcctacctaactcaaacgaatcatattagataacctccttcagcacaacataaaatattgaaatgatttcggagacctaccaaaacatgaaagtcaggatctttcaatgtcgtacatacaagttataaaatctatcttgtttatcgtgatgaaataaggggaaatggctatcacaatttcaaaaatatttacaacatccaatctttattataattgaagaaaaaaaatatcaatttatgccttttgattataataaattgatttggtattattggattgagaatgaatgaaaaataaatgtattccctcctatttatttgtattggtaatccattgcaaatattcatatgatatagtctttcctaacccaacaaaaaaaaaagttaaaaatgaaatttgtaaaaacaaactttatgattacatgagaaatttttattggatgaaactaacatatatttatttaagatagaaaagtggattggctagtgtaaaaaaacaataggaaaaccaagaaactctcatgttttcaaggttgatgaatttgattataactaaaagacagaaagacacataggcaacaagaaagctaaagaagaaaacatggttgtgatgagtagacttggaggagtccaaccaatggcaccggagtctcctggcccagcccccgccccggtctccggagatggagttggctcagtggcacgtaaaaccccattagagggccaaatagagtcagccaaactaacagccacaaacatggaaaatgctatccaaaacaaggcaaatggagcccattttggtgtatttttggccatttcaaaagggttagacttagttacttaggagcaatgattattatgcttagtccccacattacttagctttatttatagaaagagtttggttaaggacacgtcataacttgcatggttaacccaagttacaatgtcattgttcttattatgtcatcaaagtttgaaattttggtcatgttaacataagaaaatcatggttatgtgactcataatgcataataattttatgataataacatagaagaaaaagtcataactgtgtttcttaggaaacttctcaatttgaatggtgtgaaaatgtcatattttgctgctaatcttagcttggtagttggtgatatggtaccatagatgttataatcattaactgacattccaactaaaataattagttaaaaaatactggatgtggacttaatctgttttatatcataattagatgactttttatgaaaatttgaaaaacttgttacttgtcaactcaaaaacttgaaacagtctggggtttatttaccttgcttgaattgacttttagaaaccaaatttcaataaacaaaaacagaaataaacagtgttgcccaaagaaataaacatcaatatttatgatgtgaacatttcttaatacataattgtaaaaaaaaaaaataacagttttaaagaatgaacaaccctgattttgtgcaataactcactcaataggttatattgagtagaccaacaagaagtgtgaactgaactaacttgagaatttgttataagaactcactcaataggattgattgagtaagagcaataaagaaacacccctgagacactaaaattaactgttttgtcggcctctaactcgaagagtaatggctctagatgccatggccctcaagttggctctagccaaggaaaaggaattagtactagattggttttctctagcagaagaaagtgagctactagtaacactagattggtttggtctagctagagagctattactaatagtactgggttgagttggtctagctaaggaaatagaactgaaagtacttgaatggttagtagtacccctaacaaccccaaggaactcttccctttgtaacctcagagctaaggcagcatcctcatcttgacttggtatccctctactgctacttctggtacttctatctcttgttgacaccctagtagctcgatttgaagtgaccccgtctcctcctgaactcagtgtagcgctgatctcaatctgagcttgtctggttcttcttccccttgcggtttcagctctcgttgttaatggtgaatcttgtggactttcactcctcaaactgttgtaaaaggtggattcagtgactcgacgctctgattctcgaatgttcaaggctccagcttcctttcttgcagcaacttcttgaggaaaaagaagttgtatagtgttccaaagaacagtattcactgtacaggaccttccattactgaattcaaaccaatgatattaataatctaaaagaaaattgactcaaaatttggtatgtgaatggtttaaaaaagagaaattaccttataagctgtctgcatttgggacacttcttcccacatttgcttgcagaagatcgcaaacatttaagacagaaactacacacaaggtaagagaaataaacaattttggtaagaattaagaaacccaaattaaagattcctaattcactatgaattgggtcatctagaatttcataaagctagaaaatgaatcaactagtttacctgtgtccacaaggagttgtagtaggttcaaagcaaatgtccaaacaaatctgtcaagtttgccaatacatacagtaaaatgactagtcttagactatgctttaatcgaaaattgaacaaagaaagaattacatcacagagaatcaaaaagaatcttactgcgcaagaaagctcttccctgagcttatccatacaaggaagtcccgaactcgaggcactaacaa

SEQ ID NO: 21554 - DNA, 2848 bp, Cannabis sativa
aagagaaagaaaacagaggaaagaaatggagaagaaagagtatctcaattcattatgaaagagaagagtacaacttatatacaaccaacacaatcgaactaacaactaacatgacagctaggataagcaaaaaccagctaacaaactaagacagttataactaacaaccacttctctaacaaacactctaacagactgccttaacaattttgtaagccgtcaagaactcatatgtaacatgtcttttttttttttaactagtttttatgcttcaattatcttttaattgttttaactgctattatatttttgtttcaattttttagttcgttgtatttggtaagcattcatgtgtgaaaaggtctgtgagcgtgcatgcaagcatgcgtgtgtgaaaatgtctgtgagcatgcatgcgtgtacgtgtctgcatgcaagccccttagcatggaagcgttgcaaagtaccgagtatattgtatgtgtgacgagaagtgaaggtaaaatttgaatgcatatcaaagaggatattgttagagggggaatcaacgaacaaggcgtgtaatggaaaaacgtacaaccacaccttcaacaaactctaaaatcaaggaggtatggatagcggaggcaacactcctgtacggtgtgaggaccgactgagggtatattgcattcacactcctacaatcgaggaccacacacttgcaattggggaccgcacacctgcaatcgaggacaacacacttgcaataaaggaccacactcctccaactggggaccacacttctacaactaggaaccacacacctacaattggggaccacctgacaccagacaaaggtacgaagtgcaatgccacctctttcacctgcaacgtgtagcctgaaagtgacacattgtccccttgggaccaccttatacttgaggccattagagcctataaatacccctttctcatatatgagaagggattggaaaattattcttgtaacttgaccttgagagtaatagaaagttttgtcattttctctctattttgagatagcaattataagccatatctcatctttcttttcgtcttaaatctgagcttgaagtatagtttgatttttcagccaataagttagttgacgagttctcaccgtcaacagttttctaccacttatgggaacaaaaagcttaagccaagtcatttctttacacacaattgatacataatgcctagatgctcttgctgtcttcaagacatggagattttccttgatgacaaccagttgatcggtttgggcaacctccatttgtcattagagaagaaggcgtcaatggtcacatacctcaagtaataggagaaaatatgaatgttgtcccgcctcaagtaggaggagagggcgcgagtaggcgagatctcaagcaaggcaaggagacaatcaccatgaaatgatcccaatggacgagcaacgcgacggagttaccacccccatcacgaccaaaggttaaggtggggcaaaaaggaagagggtcccatcattaccaaggcaccctccaccataaacactgcgagattcaggtacctcacgacatcaccttaaaaaggagaagcgagtcaactctgtgagcccaaaatcccaaactcgccgctatgaagacgagcgcaatgatatttgctgaaaaaaccaaaggctagaaactaaggtggccgacatgcaaaaggtactaagcgccattcttaaaagcaaaactcaagcttcacacattctgtacaaaagccaccagcaagagcacgggatcccaagcgtacatggtgatgtagagaactctatgtcatcaacggatagcaccccaaaggatgagagtggagagggcctatcacgagacaagaatgcaagaggttgttcaaagcaacgtgaatctatccactggcataagactgcaatgagggaaacatcgtgtaatattatgaagagacttcaaccaatgaatcttgtggtaggaggcaccacgcctacaaccccttttcaagagcaaggcaggaaaaaggtgtcacccctcaaccatagtggaaggtcgcatgatgaagagatgagaggagtaatactcacaggctccatgcgaactgcaagaaaaacctaggtttcgctcaccaactctctaaaaaggatgaacaagagaatgaaagagctagaagcagagatacaagatcttgccatgttatggatggtcgtgcctcaattcgaggaataataggcaaataggttacatctaggctagatacgacaatggaaacgagctattgttcagggtgaggagcacctacaggggcacgattatctgcctattgttattttttcttgagatatattccaccatggattgagagtctttgccgaatgtttgtatttttgtcttgtactcgtccatttatagctttcgagtgtgctccataaagagcttccaaagctctccatagatctgctgaaatagataaacccatcacttttgtagctatgatttctgtcatagaaacatacagccatccccataagcaactggtcatgaacaacccatttttcttagtcagggttcatttctgcaccaaaaccagattgaccattaagattcatgactgttacaaactcctgcgacttcacctttgttcctgttagaaaaccatcaaacttgtgtcccttaacaatggcagacaccattgttttccaaagggagaattgttcctatccaatttaagagtaaaggggtggtttaaagtactcccaaattgtggaacaacaacactcgcgctagttaagatattataatacttactgttgtatctttccaagtaaatatcacta

SEQ ID NO: 21555 - DNA, 5114 bp, Cannabis sativa
agtgaaaagcctaaaggagaagagctgaagagaatggtaatactcagaattatgatgccaaaataaaatttgaatttatgtatgaatttaagtacttaactgctaatgctaaattcagtaaattctttaggaagtagatacaacagttttgggactttcaaaggaagaggctgaaaagaagccatatattgcttccatgggagtatatgtcttcaagaaggagatacttctgaaccttcttaggtactgacaaagctaaagaatttgtctatattagaagatcatgtcaacttttaccaggacaaaactactcacaacatacagaacatctattcttgtattacggtttcattgtgctggactcagtgatatgatttgataagatttcttgcctacaaatgatttaggacatgctaataaactagatttgttgtctacaatatgtaacatgtagtttaatatctttgaaatttgttggctgagaaagtttatcaagggttcaaaattgaattagtaagatgagatattaagatgaaaaggttaaagaatgttttagtcattggattgaaggatagggacactcttatgtgttttgttggtgtatttgtatgtgaatttaagtttcaataatgaagggatgtttccttttcataaggactcaagagtagattctctttagtaaagaaagattataattcagaaggtgggcaatgaaaatctatgcgggatttctttcgagcacaacaatgaattattttgttatgatcatatcaaatgtgtgcacttaattagtaatgcatatcagaattctcacaagcactattgatatgcataaaggttcaattaatttgtgaccatagatacattgcagtgctaactttaatgactgacattcatctgaggattgttaaggttggtataaaggccctattagtgaacgaaagactatgattgagggaattagcagtaagtgaggacccaataaaaagagaagttaggttagaaaaggcttatgaacatacaagatccttagtgggtccatagaattgagctatatatattctataatttttgttgttgatgatgaaagtgattgtgtagctatggatttcaatttattgttcaaaatacagaatatatctcataaactttttcagaacaaataaaaataaactctttaggggtttgtacttaaagatgataccttagccagaaaaaaaaaaaaaaaaacttaagggaaaggggttatgcattgtgttttattaaactcaataattattgcaatttattatttttatcaatagagatataagtatcttaatgttttgtagtgattgcctggcaaatgattgccatgcttgacataaaatttcttttgatgattactgtgtattttttaatttttatatttgtggaaggctttaacattcaatttgagtaggtatatgttgacattagttcattgcaagtgtatgattggactaaattatactttcattgtgttcggtgtgatcatgaagaactgaattctgagcattatttattgcaggcctaatagtcataggacaatctcatagggtcatcattagtgattatttgtagcccattcaacatcttttcagctcaatctacatcaatttatggtgttatttacatggaacatactattgtttagtgatcaattttctgtgtggaagatgctctgtattccgaataccaaaaattaaccgaaaataataattatgcgacatcacacatttacgtatacatgttaaatttacctcattggtaactacttttttccctttgtcggaggcctttgtgcgcttagcaactgacttgtcatcttcatcgacattgcgctttcccgatgacatctacaacaaacatttaaatcaatcaactaaatatcaacgatttttggcttttaatttaatcaactgttaatattctttctggttgtttatacagattgttgattcaatcatatctcatgggagtttcttaactaatagtgttatagagcatagtgttgttggtatcagatcccggattaattctaatgttcacttaaaggtttgtttcctaataagtcgtgattaattaacaatggagtttggagggaaaaacaccaaaaactgaataatgaaaaaaaaaaacatgcaggatactgtgatgcttggagcagatttttatgaaacagaatctgaagtggcttcattgtttgctgagggaggagttcctattggaataggagaaaacacaaaaatcaagtacaaagaaatcttcttgtttttttattaccactaagagaaatagattttgttagtcaagttacattgggcaaggatttcatgtttaaaaccattatcttttgtccatttcacagagaatgcatcattgacaaaaatgcaagaattggaaagaatgttatcattgctaactcagaggtaataccttcatagcaatgagtagaagtgttattatataatgaaatatcccaagttattgaatttttctttcctatttgcagggggtccaagaagcggataggtcaacggaagggttttacatccgttcaggcgtaacagtcgtactgaaaaattcagtaatcaaagatggaacagtgatctaagttttactacaagtcttcaatcctataccctttttttcccctttctttttgggtagcattaggattggaaaggagcgaattaagaaataagagctactatgttctgtaaatcaaggcatccctagttctttactatgtggattggaagtgcaacatgcttattgttttgtaaaaaatactgcaaaaatgtgtttccaagccatttgaagtgaaaaaataaaaacactaatatttcaaagttaccatctactctcgtattttcttttgctttaatccgaaaccctcttaatttttgagctttgcaaacacaagttacaaattaaaaccttgactcttgtgcaaaacagacagttacaatctagggactattatataacgctaactaggtcaagtaaaatcttgaatatcagaactaagtagcaaatcatgggcagaaggatgttccagggctggttggatgggttgttcaacccgcctaactcacaactcgggttgatatgtactaactttgacccctcaaaataatttcacttgtgcccaaactaacagtattaatagttggtttgaaaaacttgtgtttttctctttggagttttcaggttattaatagtttgggagctttaggttagtcgggttgtcaaattttattaacaattcaagttttgaacatacttctttgttgtgaagagttagcttaacttttctgtataatgggatagccagaataagtcaactctgcataaaactctatataagtagctcttcacagttaaacatcaactcattttcgtatctttgcaaaacaaacctctcttctgatgttaaaatgttagtgacaaaacatttctcgtctgaaaatggttttcttcctgttcttcctgcccgatgaagatagttagtgacagttcttggcagatcaaaattgtatatgtgagtagtttccggcaggtcaactcctctggcagctaaatctgttgagacaaggagataaccacctccttgtcttagttcctacaataaacaagagaaatatatcagaaacttctaaatggataagattagaggcattgacataatcggagaacatgactggaacttactgataaagaagttgctctcaaattaaaattcatgtcttcttccaaaaggaggatatctgaatcacccttataggaagctgtcaaaaaatccattaacagtgtagttgggggagcatttcctgccttcttcgacttttcagactgtattcatacgatattatcaaaaacacaatcaatttgctttctttggtgcaaaaataaaaaaaaaaaaatcaaactttttaaaattaaataaagacctgttctccaacaaaaataattccagactctggtgcatcagtctgtaacaaagatagtaaggcatgcagcctcatgtttttactacatatctgttagccagcaagcacaatagaaagatttttgagtgaatcatctttcaagagaaatcaatacacaaaaatatctcatgaaataaactattgtagagatttgaaactggaaaacttataaatattcgaggattccattgtgtaaacaatccttaccacaaatctatgatgtaaacatgatggcatgggctcaactggattgacatggacatgaactacgttgctctgaaaggtacataaacataaaaatgcagaatgatagcaagaacaagtaatattgtaaactactaacgaaaataacatggaaatgaaaagtttatactgcgaaaccttggtccatttctgttgtatacagtcatgtacaaatcgtctgtgttgtgggattgatgcactggcaaaaatggtctggcggttattgatcgaggagtatgatgtcaagagctttcgaagagaactgacttcttttgaagagttgaacatgaaatcaacctgaacaaagagggaacataaaaataataattgaaaatatgtacattagaaaaaacttcccctttttttccttctctttttttttcattattattagattcttgtcatttgaactacaccttgcaaacattttaagctgctttcattgacaggaacagaaacaaatgtagttcgagaatatgttttcctggtcaggacaaagaatacttttctagaagatccgtgtctttcactaaacagacagtagatcacacattttgcaacatgattctgctaaatgggattgacatttaaaatcttagatacaagatagttcagtcagcttcaataaatagctaaacaaatactaaacattagtatggatctagtttacctcgtcaattaccaaaacctgcattgactcaagagtaagaatacgcttttccaacatctgacataaactgcctatggttgccactacaattgtaggaggctctgcctgtaatatggaataccaagaaatgtccgatcactaatgagcaaggatttgtcaaaagatcaatacaaaattacagctagaat

SEQ ID NO: 21556 - DNA, 3010 bp, Cannabis sativa
  modified_base (2930)..(2932): a, c, t, g, unknown or other
gaaataagttaagggtgcatcaataaaaggggtgcattgtagaatcacccataattatttatcccttaataccgttgagatatacacatttatatgccatatatatatatatatatatcttatagagattatggtgatataaatatagaaattttataattttttttgaaaggggtatataattcattttgcaaagtataaaaagtttaatagtatgcaatatacaagatgttattcgaattctaattttgactgtcaaattattaaaaaaaattcgaaaatttataagataccttaattttataatttatttatagaccaaaagcaaactaaaaaaattcctcccattcctaccaatttgaactgaaattttgttttatagctcttaaattttgatagatttagattatataatgaggcacttttcaatagttgttacttaataaatttaattataaatattaattttaaaaatattaaacaattaaattttaatccattaataaataataaaaataaaatttaaatttatatacttaattaaaaaaatattcttttttatactatatcaaaaatatatttatatacaaaatattaagtttttgaaaaacttttttttttttaaacagatgaaaaaaatgcatatgcttactctggagttgttatgatagagaagcattccaatccttcatgaccagccatcatagaaacaacaaaagaccttggcacaatgaccaaatgaccagccttgatctcactctccaacacaagcttaccattaaaacccacaacttgtatcatcccacctccactaaccacataaatcacttgagtagatgaatcacacgtgtaaacaggggaagtcatagcattagcctcaactcttatatgatttgcacacaacccaacttctcccaagaaaggaaattgggattttgtcactttactccaaaacccactttctattttcaaacactcctccaagttattgtaaaccaagttgttgttattgggttcattttgttttggtttaggtaaggtttttgtgtcatctaatttgatgaccaaaaccccattttgggatttgacaagtttgtttgcctcttcattagtgtccataccaaaggcttttttgacaaaatcagttgagaatcctcctaacattgaaccacccccagctatgaaaaagtaagtgatattgcctgggaaatgagcctgagaagtgtctcctaggaaaacaatttcaaggtcatcattagaatcagaatctccatcattgaaccaccatgacactgctccaagtggcactggtattaagtctcctttttttagtttcaataccacttcttttggttcatttgctaataccattcccgctactccattattgcctgtcacatgcataaattaatgtataatcatcagggtctcatcagggccggccctgaaacaaaatgggcataggggaaaaaaaaaattttggacatgtgggcctgataatcataagatataataatacattacatgtgcatatatatatgtagtaatattataatcaaatagataggaagaaaagaaaaagatggcatgtatataatattttaatatattgaaaattgtgcagatctaaataattggtaaaggatatgattaattgggaaagaaactactgatataattaaatattagttttatatattttactttaataattattataaaaaataattaactatttataagcaacacctaataatattactgaacacgataagtatgcttagtgctcaataattatagggaacttcttcaaaagcactaccctttaaaatggagtacaaggtttaattttttttggatcttattgtattgtattataatatttttatgaattgtattatatgttgtatttttatataatactatatttaatattaatatctatatgtatttaaatatacaattatttatataaatcagatgagatggttatttattaaaagatcctgaatttttttaaaaaaattacaaataatttatagagataaaattaagatttaaacaatcaatttcacaaattatttttaaagagaaaagtgagatttgtgcaacaaaatatttaaatataatttttaatattataataaattattcagaattttttcaaactttctaaaatgtcttcaatatagctaaaatgaaaacaataataataataaaagaaaaatcaagtttataactatccaaatattgaaaaaaccacaaggtgagtattgaccttgataaagaacaaaactacaccctatatagaatgttatatataagatcaatatacaatacaaggattatatataggcaaatcaaatttatttaattgatttaatatgtaagattaaaaacaaaagaaagtatacacatgcataataaatttatgtagatctaaagatatataagtgattatacaaaccttgaagaacaaaaccaactttgggagaatcagcatagtgaggaagagcaaagccacgagggtgcaaaagaagccttcctgcaccaactttggtgtgagacagtattggaagctgtgtacttgaccaacttctgtactctcctccttctccctctactaccttctcgctatactttggtgttaaatcaaactccaatgccattttatatatgataatatgatatgaagtcaagaatagaagtagttcctctatttatagaagaacattatatctatttaatgcacactctaaaaatagcttgaatattaaattggagtgggttttacttcaaaatatgctattctattttttaatcttaaatacaataaatatatgttgttcaataattcaattatgaacattattatcattttgattattttttttttgtagggacctctattactatatatatatatatannntagtatattgttacgtgcgatgcacgtatactatgttttatattaagtattatattatgagttcggaaggaaataaat

SEQ ID NO: 21557 - DNA, 3370 bp, Cannabis sativa
agagtacaatacccagatgtagactttctatcatcaattgacccagcccagtctgcatctgtgaagacttcaaccttcctctcaattgtcttcttgaagaaaagaccttttcccggtgtttgcttgaggtacctcagaattctatatacagcattgagatgtccttgacatggattatgcatatattgactgactagacttaccgcaaaggcaatgtcgggtcttgtatgggagaggtagataagtttccctactagttgttggtacctctctttgtcaactgggcttccttcaaacattttcctcttgtctccgagctcaattggagtcttgctgggcttgctaccaagcattcctgtctcctccaagagatcaagagtatatttcctttgggacacagaaatcccttttttgcttctagcgaattccattcccaaaaaatatctgagtgcaccaagatccttgacttcgaactcctttgccaacatttccttgattagaataatctcttcaatatggtttccagtgacaattatgtcatccacatatacaatcagtactgccattttcccttttcctgagtgtttgataaaaagagtatgatcagtctgaccttgcatgtatccaagccccttgactacttttagaaagcgattgaaccatgctcgaggagactgttttagaccgtatagagatttgtttaacttgcagactttagttgtattgggagattcttcaaaaccgggaggttgactcatgtacacttcttcttccagctcaccatttaagaatgcattttttacatcaagttgatgcaattcccaatccaagttaactgctagtgacaacaatactctgatagtattgagtttggcaactggagcgaatgtttcagtgtagtcaattccataagtttgagtaaaacccttggcaactaaccgagctttatatctttcgatagatccatctgcattatattttactgaaaacacccatttgcaccctactactttcttgtttagtggtaactccactaatatccaggttccattatgtttaagtgctcttatctcttcgagaacagctgtcctccagtgaggaatgctaagtgcctcgttgatgttcctgggaatcacaacatctgaaagactggaggtaaaagctttaaatggagatgataattgtgaatacgaaatgaaatttgaaatagggtgttttgtacaagatctaattcctttccttaatgcaataggaatgtccagatctgactgactttttgtgggaagagtacctggatcacttgagggaattggttctatcaccggattggactcttgactgtgaggattcgtgacttgtttacttcttctagaatacactcgaatttccttttgcatgttttgatcttgaggaggaagactttcattaggagatggacgttgattgatttctgtttcagaagaggatggaggattttctagttctgaagggaatggaatgtcagggggtaattctaaaccccacgaccactgagtttcttgcttgtgatgattgttctccccctgaagcgaggtgggagtgaagtacggagaattttcaaaaaaagtaacatcacttgaaatgtatgatttcttggtgagtggacaatagcaacgatagcctttcttggtaggagaataacccaagaaaattgttttggtagctcgaggatcaagtttactccatgttgggagtgaacatgtacaaatgcagtgcaaccaaaaacttttactggcaaagtgtttgtagaaatgtggggatagagagactgaataacagaatatggtgtcttgaactggagaggtcgactaggaagacggtttattagataagtagcagtaagaacagcatcgccccaaagatattttggaacatgcattttgaacatgattgcacgggctacttctaagagatgacgattttttctctcagctaccccattttgttgtggagtatccacacacgagctttgatgaacaattccattttggagaaaataattaccgaggatggtattgaagtattcagtaccattgtcggtacggagtatttgaataggtgttcgaaattgtgtttggatcattttgtgaaagttttggaagacctgacaagtttcagatttatgcttaagtagatagacccaagtgactcgtgtgtggtcgtcaatgaatgtaataaaccatcgcttaccagaagaggtagtgatttttgaaggtccccatagatcactatgaacaagagagaaagggctagatggtgtatacattctttgagggtatgaaacacgagtatgcttagcaaattgacaaacatcacattgaaaatcagatacgtttttattaataaacaaagaaggaaacaaatgttttaaatataaaaaactaggatgcccaagtcgacaatgccataacataatagtttgaaaatttgaatcagaaacagaaatcgaactcgaagtcaaacaatgcaaggaaagttgcttctcttttattggatgttgaaagaaataaaggccatcacgaatcctagcactgccaatcatcctccccgatgatagatcctgaaattgacacgaattggacacaaatttagcaagacatctattatcagaagttaatttgtgaacagagattagattgcattttaatgatggaacataaagtactgatttaagaattaaatcagtagataatttaatggtgccaactccaacaataggtgaataagaaccatctgcaatcttgacactagatgtagtagaacatggacaataagaatcaaacaaatgaggtaaacctgtcatgtgatcagttgctccagaatctatgacccatggtgtttggcaagcagaaaagaaattaccagagtgtgcaactgaggcactatgagactcggaaccagatttggatgtcatagaagattgactgaggagtgtgtataaatgttcaagttgttccttactgaatgaaggggcattagtactgctttcagtctgagtgtggtagacttttttgtcatgttggcgacgaggagtccagtttggtggtttaccatgaatttcccaacaagtggatcgagtatgtccgtgacgctggcaatgatcacaccaaggtcgatcacccttacgattaggccgcggatcagggttcgatttgccagatggtagtggtccagactttgagacaagagcagaactttcaatgggtgacacatcaggagttgtgagcataacacgacgacgtgcttcttcacgtctaacctcagagaatgcttcttcagtgtcgggaaatggagaacgaccaaccaaacgacctcttacttcatcaagatt

SEQ ID NO: 21558 - DNA, 1402 bp, Cannabis sativa
  modified_base (1188)..(1189): a, c, t, g, unknown or other
cttgttagtaaatctaagatcctgataaaatatttccaacagatttagggtgcatttacttttttttttcttttttaaatttagacatatgaatttggatgcatatcagaataataagatatactctctaaatctaaatattaacatattaattagatgtttgtttattcatgaatatattttctaatatttttaattatataatattgatttaaaaatttagactagacttctaattcactaccgtttgctaggttgacgaaaataaaaaagtagttaagtaattataagagacacatgaaatttatagtagttcacactccctatattgcaatagtaatagagttacgtctaattcaagtttttatttctcacgagatggtaattaaagcaatagactaagtgtcagaagctccaaattctagagagagaaaatttaaagatagaagctttgaccttgtaggtagttttctgaatgtaaaaaatgagcttatggagctctccctttatatgtgaaggagacccacaaaaataaaaaataagatatttgaccgttgatgatgatataacggtgaaaattagctcttggtggtgatggtcaattttcagagcccggcgggtcccgctgcgagtaacgcggagcttatttttgtaactcccttgggagtgaattttgacgacgatagctttagatttacattggtagtgttgataaaagacttgataggatattgaattagcttcggaacgcaagttgaaacgcatcaatcaaataaaaattgagtgagttatggctgttttactgaaatcagtttatgatccagtacgcaggctaacattccagcggtcaagttgacatataacgtcaacctagacgcttagtaattgttaaaacgtccaagggatatactttaagattcctaaggaatgtaatattgatgcttgtcacgtgttacatgattagaataataaagtaaatgaacataggattttatagaggttcgccccccttaattagtgggtaatgacctactccccttttagttatattgataccgagagaaatactactcaaatcactatagtgatgggatctgcagtagctctctaagggttacaatgtatgaatcagagttagcaaatctcaagtataagaatagtagtgggcatgtgagagagagagagagnnagagagagagagagagagttagagctatggttttgagatttaatcacttggacattagagcttatggtttgagggtttgattaaggctcctgtgacagttagtagtctcgtgaccgtaaggggatataccgggtaagttgtgcaatcccacaccgcctggggaaggtcaagtgagatgattctgagactgtataggtatgggactacacagtt

SEQ ID NO: 21559 - DNA, 4215 bp, Cannabis sativa
taaaaaaaaatatatgtatttttataagaaaaaaaaaaattagacctttaagctaggtaggccattagtaaaggcttagtcttcctatgtcctgtgattaagatcgggccggcaaaccatacagtttgtgaaaataggaatgaaaatcttaatagttcattcgaccaaaataatgataaatcgctagcgttgaagcttcaaataagcgcgaagaatactagatcttcaatctaattaaatgaatatatatgtgacaagccatatcttactatcatatatactctataaataaattaatatgtaattttagttttacatattttaatagttttaattataaaattataatatttagtataatatttaagttttattattattttaacttatttattattgaaaaaaaaaatatatattataattattaaattataaggttttaatgtttcgtgttgtgtcatactttttgggcttgtctattcatacttacatgtcatgtcttttgtatttctcgtgtcatgttctgcttaatcgcatattttttgtgttgtgtcgtgttgtgctaatttatagcatcatagagtgtcgtgtccaagcccatagattttcgtgtttgtgtcgatttcatgtcgtgtcaaaaaaaaattattcgtatctacaaccctagataatagcatataaaaaatgaatgagatattcctctcatagccaattggttttgagatggaactccatgcaattaccatacactcacattaacttaaattctaacatggtatcagagccaaataaaaatctaataatgagtatttgatccaaattcgataacctggtacgagccaaaagaatcgttgtgagctaaaagtatctccattcttaaaaaacgagctaaaagattcgcttttgattcgatgagccaaaaaagtgtcgtgtgatcgagtcgtccaagattggtaagtaaaaaatagccctcatcttgaatggagattttagagagagtaccacatagctaatatgtggaaagataatgacatatataagatgcatgagctactcttctcattgccgatttgttttaagattaaacctcatgcactttttcattcaccttcatcctaaattttaacatggtatcagagtaattaaaatttttcaactaatatgtgagtttttaatgttgaggtctttgacctgtttcaaataaatctataaatttctcgatatgtacttacaaatttatcgatttggcctagtgtaattattttaaatgtcacattcgatattgtggtctcttatacaacatttattatacctatactttctaagcccaaacataaaattagagtatgaaaattaatttcacattactaatgtatgatagatatgttttacattattacacttagtatcatatttttttcttttaagaaaaaattaagtttcttaataacgtcaatatttagttgcaatctaattaattcaaataaatgatatatacaacaaaagtacttaaattgtaataaaaattgtacttaagcatctttttattttttgttagcagcaaagctacaaaaatacataatatcaacattttagcattatttatgtatgaataactattttgataaataataataacaatccttatattatttatatgttcacacattataaggaaaactaaaaaaaaacttaaaaatataaataaataaataaaaattaatgtacattcacctagtggccttaatgtagaagtaacataagctttacataaagagccatattaagaggaataggtaagaatctttctttttccttttctttcaaatgaacatttggttgccatgtcacccctaaataaaagtgaaagatcctcaaacccataatatagttaacttaatttggacacaaataataggtaaggactacaaggagtattgttattagggatatgtggtatccacaccactatgagatagtgctttgtaagttgttaatatattctataattattaaattaaaatatataaaacttgatatttaatttacattgatagtagtataaactctaatcgtctaataatactggacacaactagtaccttaaacttttagcattttttcggtctacaaaaggctttggtggcctttattgattttcacaaccatgggtggatgtacttgataaggtggggtggccctagtcctccctcaatttgttaagaatttcatgtaatatatgcctatatctcatattttccaactaaagaaaaagttaatctcatctaaagaaattatcaaaatattaacatatgagtaaacatattcctaagacatatataataaaattatctttttgtgtgatatattagtgtaaatataacctatgaataataatgtttctaaatgtaattaaaaataaattatttaaataatatatttatcttttatggaaattataattttattttgtaatttatattataattacaaaattattatttaatttttttataatcatgtatgttgtacttaatattatcgataaatttttaaaaaattttaaataatttacaataacgaaaaataagattcaaacaatgtttaccatacatataagataaaataattatgattgtaaccaaatatttatattttatttttgacactatatttttttttaaaaaaaaataaaaataaaccggtaatcctaaataactgtaaacgtacacgattcatgaaaataaaattgactaaaaattcttttggatgctgaaacagagagaggtgtaccaaatgacctgtttttagggtgtgtataccgtaaaaaaatatttttatatgtatgacatgttacaaagggtcatcttgatctatttttcatcatttattgcattaagaagagttttttagtccaattttttatttcatgattatgtatgttgtatttttctaggctcacatgtaaatttttaaaaaagttcagaataatttataatgttaaaaataaggttcaaatattttattacactcgtgactattttttaagtatggtaagaaactatttgaactttatttttgcactataaactatttagaattctctgaaaatttataagtggtcttaaaatactataacatgcgatcataaaaaaaaaaaaaaaacagactaaaaacctctcatgaatgctaaactagataggggtggaccgaaataatcttttatgcactatagattttaaaaaaaaaataatagttggccgcttgccccctagtaattaagtcctagctccgctcctattcacaatatataaacatttatatatattgtgaggttgtagtatatataatttgtattaattgtattaatacttaaagttatgctaattatgttgcaacatttatatgtagggccgaccctaggttaaggcgagttagggccactcaaataaaaaaaattaatatatatttttaagaatttttaaaaataccactgttatacccgaaattcggctacacttcaaaggttgacacgtgtctaacagaagaaatacaaaataattttgaatgatataacgatatcattaaatgcatattgaataactcgtttattaattaaaagttaaatagataatattcaaaactcattgacttcatagtcaatagcgagacaaggatggtaactattaatctgagattaacgagacatatgcacctcttagagcagactaacaagaaaggaatattcattcgtccgagcgaagtgagagtatcagcataagctgcctcgtattacatatagcgagaagatcacctcgcattgctaaagtcacaaagagaatatagcgagacagaaaccttctcaacacttagcatattttcttatcaagatggacagggaagataactcaaattaaagaagaaataacctttcacgtcaacaataaccatctaaaggataaaactaatgaacggtcgagtagttacttaatattatctcacatgtgatttaaataaaacgtgagaattttctacatttcgtgaacagttacatttacatatatcccaaaaaagataactgtcaacctatattcctataaatagggacagattctatgggaaagacgacagaaaaattgagaagtaaattattattattcaaattctgaagttgtactttgtattcaaaaaaacatccctaataaggactcgtgg

SEQ ID NO: 21560 - DNA, 7095 bp, Cannabis sativa
  modified_base (6798)..(6803): a, c, t, g, unknown or other
tacgattaagtaatttagcaagatgttatacaaattgcataattcaccacctgattaatgcggttaatcactttggcgtctatgtgcgtactgccatatgcactatataagagtattgaggagctgatcaaaagcatcccattttgagagaatgcatcctacctagagcaagttagtgagagactcaacaaagagagagacttaacattttacactgattaatgtgtagtgagaaattggacttataatattctatatgtttaatttttccaattaattatttatgcttgccacattacgcctttttgtcagtgtgaactgagatctttaatgcaggttagggaaatggttgcagtgttggacattgatgttttgttctatccttgcccaagaaatggacccaactttcgtcccaaggctcttcagatgggaggaaagcagcagttcccctacatggttagtatatatgttgtcccaagttgtaattccctcaattgggaagttactgcttgtaaattcaagttgggtatatgtgttgttggactgcaacttggaaaacattctgaattacagaagttgctttgtctaactaaacaaatgcacactgacactgaactatgaactaacatatacaatcacaatcttcatacttatcctactttttaatttgtatttgcactcctacgatacgtccctttttcttcaaaagaattatatatttgcattgcaagttctcactgtctttctattttttcttcatttgagtaccttgtaacaccatactttgatggaaaacatggcttgagtgggatttgaactaagaagttcatgttcgctacaggtggatccaaacactggagtttcaatgtacgaatcagatgacataattaagtacttggctgagaaatatggtgtgcagtttcttgacctgctttaatcattatttcctttattttaattttcctttaatttcataatatattattgtctttatgtgcaggtgatggaagtgttccaataacattgtcacttggtttgttaacggttagtcttctggtcactagatagttcccgtttagtttgtattgttttgtttgcattttatcttctttttttccttgcagactataactgcaggccttgctttggttggtcggtcagggaaggttagattgtctttattcaattgagtctgcaaatgattcacattctttatgagtgactctttcctagtaggagctttatttgtatcagatataaatgttgagtaaccaagagttggatattacaataattttgtggcgcattcttacctgaaccatctcttttgttatgctcagggttctatttattctcctgcaaaactaccacccaaaccacttgaaatatgggcttatgaggtgagtgtttacctatgatgtttgatagtcataaaaaaagacctgtggtattaaaacagcatatttttcttggttttgttggccttgattgattttttatttataatttcaatattgctttctgtagcttgaaatctgcttcttctctttcagggatctcccttttgcaaatacgtacgtgaagtgcttgtagagttagagctccctcacatacaacggaggtaaatatagtatatactaggaatctatttttatgtagtgaacagttggtttcgtgcaacatgtatgagatatatgtatatgtacaattaggtgtatttccttccatgtatgtacgtctttcttgactatgaactcaatgatactctgttagtagtattttacattgaaaattgcaactcactacactcccttacttcttgagtgcaaagtgctgtaaaattcttcacttaagcatatatttctatgttctttccagttgtgctcgtggcagcgccaagcggcagatactctacgaaaaagttggacattttcaggtattgaccaataattcctataataatttgcaataatgtcgtgttaatcatttgtaggtaggcttttaatcttgtgttagaggtgatcaattgttggaataacataatatggattatactataatggctgacaggttccttacttacaagatccaaacactggagtggaaatgtttgaaagcgcagaaattgtagaatatttaaaagcaacatatgctaaccaatgatcggtgccctcagaattttggcccctcctttttttaataggtttgtatataatctccctctcttagtgattaatattgagattattcttgggccaagctacaataaacatatgtatagatgcattcaaaagatggttggttctcaaggagttggagtgctttattctgctactctatgtgtatcaaaatctcaaagtcatatgctgtaagtttgacacatattagagcatctaatacttatgatattgaatgatgtgtgtgatagtagtgattctctaaagagataattctctctattccataaccgcccaaccctaacaaaggttgttttggactatgttctttgatgcgaagagctttccaaacttaaccattcagcatcttctctttctcaagttgaaaaataacattgatcgatctgaggattattttgctgtcactatgactgtgatatgatttccaggcaatgtagcatctaaacaaaaagaccttttgtgtcactataaatttcagcctatgccctcatgtcctcatatagtggaatggggggtttgaatccattttctgaacctcatatattgaggcttaatgaagctcaatcataaaccatacttttccttttagccacaagagcatccatagttgaccctatcactttgatgggagaatccctatctcttatttgaagctcataataaaagttaagtccaccagagttgctttcattatggtcttttttttgtggctaaactgaatgttaggtacttttaagataaggaattaggaatacacctcttcttatcttctttgtttttttgttctttacatttcaatgtagttttattatagtgcctgtaattgtaggaataagacttttaggcatctgattcctgcacttttttatctgctttattattcaagcatgtttcttcaagattcgggatttcgcctttttcccgtttactttccactttgaaatgactaagatcagatgagtctcaatcattattccttaatcttaaaggttaatcatgttttacctttcattagtatctggtctatatgcttcttggcagaatttgttttgctgatatattgaagattaacaatccaaaatgggattacagttatacccttctaagattcttgagggccaaaatgatttaattttattaaattccttttaattagtagaatcttgtcaggggagagagaagaggaatttttcgatcacgttgttttgttttttctttttcagctaaataatgtttttattctgttttaatggcattagctggattataactcatgttagtttgttgcatcaatctaaagattctttgtgttttaggttcacgtgtggcaaataagccccagaggttttgaatcttattaacaacctttaaacaatggtgtgacaaaagataccacaattatggctcgtgatcccccaatttgagaaatatgatccatttaatttactttttgctcatgtgcttttgttcttgtttttgggattttgaccaaaaaaaaaaaagatttagtcacagtacattattatttgtaggtagaagaagatagagcaagttacatatcaataagggtaaaagtagaataaaactaacaaaacacaaaatagagaaacaacaaaaaggccatttatatttatatataggttaattaaaatttttgctccctttatgtactaaattatgtctcgaattttttaggcggttaagaattctctaattattgagattgttggatttaatgacttttgtcaaattttgttcaattttattaatgtgactaatgaccttgtattaaattgtgttcctcgaattttgacatgtactaaattttgttctctgaatttttatttacgttgggcttctgtaagtaacattggacaaaagttccaacaatctcaatatttcaaattttttttttaatggtttgcaaaatttaagaggtatgattttgtatatgtcaaaacttggaagtaaaaatcatagtcatatatatatatttatatacattcctttgatctaactcttatctttactaaatctaaggagggaagtgcaagttctatttcttcgatctaattggctatgtttttagagagccatttcaaaaaataaaaaataaagttacaaaaaaataaaataaaatgttgttttctattttaaaatttaattaaatttttttaatgttttctctattttatcttacatgatgttgtctcatcactttctcttttctcatttttcctctagctactctctgtctctcctcattcattgtgtttcatattattttttcgggtgatgggagttgggggtcgaggttagggcttggtcaaggttacggtccaacttcaaagccgaggtcaggtcaaggttaagttctgactacgaggttgggtagacgtgacaattcgtgttcacgggtcgtgttcgtatcgtgttgagactcatgtgttacaggtatatgcttgacccgaatataaaccgtttaataatcctgttgaaaaatgaaactcaaacacgactcgtttataaacaggttgacacaagtacatgacccgtataactcatttataaataaaatttgtttaaacatgtcaacccactaatatattaatgatatgtttaagatgtttatgacatatttaatgcgtttatggtccatttatgacctattaaagtactaaaataactttaaataggtcattaacaagccagttttgtgttagttttgtcaactcgaatacgacccgaacccatttaagacaaacctaaaatcgttaactttcattgggtttcgagttgtattattgtgtttgacatgttttgtcgaccctagggttaggtcatggtcgtggttcatggtttggggtcgggtttggggcctggtcaaggtcggggtcgaagcaaggtacaatctggggttgggactgaggttcgaggtcaaggtcgggttcaagttcgagtttgaggttagactccaaggttgggttcgaggtcgagttcgggttcgacttcaaggctgagtctgagatccaaggttgggtctagggttcaaaactagggttaggactagggtttgggtcaaagtcaataattggggtcaaattggattcaggttcatatttgagtctcaaattattaaagtgttctttgctgaaaaaaatcaaaaaattgaaaatcgattttagaaaacattaaccaaacaggtgttgtgtttagaaagcttcaaaaattaatttttgttctcatttctgaaaacacaattgtgaaaataaaaaataatgccaaacatgcttttatagtgttagaaaacaagattcaaatatttcgttgtttgcatgtgaatttttgaactctgttttcaatatcgtaaataatttataattttttaaactcagataagatgcctactataactataatataaactattttccatatatatatatatataaatttgatttataatttattgaaatgccaaaaatataaatatccttactgaagtcttatcttatatatacatgaaacttactaataagtagttaatttaaaataaaaataaaacgacatgttggttttgcatttagttagatggggagctcgtattctttttgtatattcatcctattaatgttgatttatctaaagctctcatctcaatggcccttggaatggagttgcaatggaaaaatgttgatgatgttgtgacataagtaagggctgaatattcgggtaagaagctgacaagagttagcatatgccttgggacaaagggcccagaagaacccaataattttattgattgagtttcacagtggtggtgaccattgctttggtgggcccctcctctatttgcctacaccagaccatagcattcatctagtgcaggtcatatgtatgtatttctctctaaggttatgtttggtagctaagaataagatatatgtaggaaaggaaaatactgtttggtagaagagaaaatcagagttaaaaaatgaatctgagtcatcaaacactacgctgacctccctcccttctagaataatccacccattttgtttattgaaatcttatttatagtacaatatattgttttaaaattctatttaagaaataagatatatgcatcatcaaacataatgatcatgaggatccattttgattagaataatgcatcaccatgcaatagttatgaattaattctgttattatatatatatatatatgcatcaccatgcaaataattattcatttgcatgcatatgggttattagaatactagtagattaactaattactttcgttttatgttgttcttcttgtgtggaattgaagttaaaaaacatgattataatgaatgaatgaatgaattaatgaagcaattaaagaagtgaaagcagtgtatggctgggtggtaggtctgggtccactttttagtgctgcaacttataactctttatcttatttttctcttatacaaaccatccaaattgcaccacccaaacacaccatccccacaccatttacttcatcaaaatcaaaatcaacctctctctctctctctctctctctgatctctctctccctccctctctctctnnnnnnctctctctctctctctatatgtatatgtgttgtcatagagaaaatgatcatatttgagtggtgcatgtctccatatgtatttatctgtttttgggccataatttaaaaatatttgaaaagtaataatatgtttggttggtggaatcaatcgtatccttgcattaatacacagtgaaaatattttagaaaaaataaatgtcattagagaaagttattgcaacactactaatacactagaacggtgctaaaatatatgtctttgtttttatattattcttctattattgttagt

SEQ ID NO: 21561 - DNA, 2438 bp, Cannabis sativa
  modified_base (2263)..(2263): a, c, t, g, unknown or other
tttttttttttttttttcgggtttcatgtatggaatagccggttcatatttttttactcacttatctgtggccttgtatcgtgtttagatatctgtagtttttttcttcaaatatctttgtctactattatgtttatgtttgttatgttggtaagaaatgaggcatgtcttagtagatcagttgtttttggtttcatggtgtgagaaagtgggtgtgttctggagtaaatttccagtcaatgatcactttcctaaatcggggaatatgtttactttgaccaaattgttcattcagttcgctataccaaattaattgaatgtgttcttgaatcaaaactgacaaagaacccaaagcgggtacctgctagaaggcatttcgtgttgggaacttaaggcctttaattacttaaatcaacaatgaatatcatcagccatgctatacttaatgttctaatcctagaaactaattaagattcatattcaaactatgagggcaaagaagatctaaatgtgaaaacacagtattagggtttgagagataaaatccctttgtttagaacacgaaggcttgccacaagggagatactaagtaatgaaactcatgtaatttaagcacttcaatgggtttattagtgtaatttagtgatcttagcaaagccagagagattgaaaaaagtgtgataaagacttttcaactgttagaatggagataattgcccataataaacatatacaaaaaaaaataaaaatacgacccatatataattaacttgatactccctcaagttagagcatggagatcacaaatgccagtaaatacaaaaacttgtgcttgcttagaggcttttgttcatcagtagagagtggtaaagataatgccattacaaatgacattatgactataatgacattccacttcaatttgcttggtacgctcatggaacatttgattttgagcaatgtagagtgccagttgactatcacagtataagagcatgggtaactaatgagagacacccatactttcaagtaaaactttaagttatttcaactctgaagtgatagtcgccataaaacgatacccgccttagtagatggttgtgacaccatgcgttttttcttggtcttacaagaaatcagggaagaaccgaaaaagaatatccaactagtaaaagattatcgtgatagaggacaagtggtccaatcagaataacaccaacctgttagataactcacaatcactgtaaatatggctgttgtaactttgatgaatcttttaacaaaatataggagtgttctaatgtgtgtgaagtggaaagagtcccacatgagatatttataaggatatatagagtgcaattttggcatttgggtttgggccccaaaggatacctagttttgtgcaaatgggtgaggactcacacacttaacccaccacacgcgccgtctgtccgattcgagctgggttggtgtggtgtgatactctattatttttacagaaaaattatttaataaaataattattttttattttttttaatataattaagaaacgtgttaaattggaactgattacttagtcgtatcagttaatgagacacgttcaaacgaactcaccccacgattataaaaaaaacgttcttattcccgctatgatttttcaatccattcgtctatataatgcaattgaactgatgggaagaatacaacttttccatataaaaaaacacagttttcataaaaattaaaatttcatctgcgatatcaaaattcttggggtgtatttgatggtgctctacagtgcaggggttccgatacagtacgactgggctgttttattctagggacgaccggcaaatttcgactgcttgcacactcctaggcagtgtcgcgaacgtcttaaagagagcgacctagttcgtgactcaacccaaaattttccattcggtaatatctttcctcttttatttttactagcagtttattcaacaattttaagacgttcgttctgctatgaatactaccgatgaattttctagttctactgctggcattaatgggacacgttcaaaccaactcaccctacgattcagaaaaaacgttcttcttcctgctatgatttttcaatccattcgtctatataatggtacttatgccgttaaaaataaacattaagtttatgccgcttacaaacttaaaactttggtacttatgcctctatttacacttataaagttaccccaaattattattattattattnttattattattattattaaactgatagatatgacccacgacatccacgtcagatggttgtcaaagtatgtttcattcatatcttttaacactccttttcttttgaacgtataaaactcttaagagtgtcgatcattcttatttctttccattgctctgcttccgcctttcgggtc

SEQ ID NO: 21562 - DNA, 4026 bp, Cannabis sativa
aagtaaagtgagcatgtgttagttagaaaataactaacttggctctaacaaaaaggtaatcgtaacagaaccaagaaaggtctaattgtagtgtaacagtcttgaagaacaggggtagtattgtaatacattgcaattacagaccaacttaaatcgtaattcaaatttatataacaacctacatagtaaccaccagaactacaactcaaatcataaaaataaataaaaaaaaaatataaagtaattcccttaataataattaaatccacccaaaaaaatatacatgttattattatatagtcaataatatggtttggttaaaaacttatttgagtcactcagctcagaatttttccgaccaactttattggctggattaattatcccaattaattagaaaatatatatatattcatgatataaagatgtatttttatgactgtattataaaaccgaccattaattgatattgtatgttgataaagatgatgatgatataaagggataacctttaaatatgctttcatgatatttatcagatctttacaccatatcttcaataaagatactttacacgtgaatattatatatgtatatatatattatatatacgtaatccctagcgttttgttataattaatgatggaattactaatataatagttggtgattataaatataataataatataactcaattttgtgtttaaaaaatatctatgaaaccaaaataatttacatatgtagtaactacgtaggtttttgtttgaaacttacgtagtgagatatatacatatccatgtatatatacattataatatatttactttatgattttttgtgttgatatacattatatatttatatattttcccataatcatgatataaaatttatatatattatatatgattatagattaagatcacgagtcacattcgactgcttatataaaatctatatataaaattatgaatatttaattatttgcactaattccattaattcaaattcatattgtgaaaacaataaaatcatcaaaatttaagtaaagtgaccaaaagctgcgtacgtaataacataataataaatagatatgaatatgattaattaagtaataataacaataataatacaaaatatttattaattaaaacttttctcactgccattacaatatattttcaaaacttccaacatataaccatggtctcatgaccaagaaagaaagattaaaactaaaaatattaagctccccctccatggattacattgatcagattatatatataatagatcttttgtatattaactggactaataatcctgatcatgactaccttattaataattaataatattacatataacataataacataatataataataataagaataataataataataaatgaataatattttttttttctagtggaccatggcgacttaattggcacactgaaatttactacgacttctaaaagtagacacagctgagaaacttcggcgcacttgcaagaagcaagtggctgatgatgatgacaagagatgagatgtcggcgatggcttaaacgctgtcattttgaccaaattatcgtcagttttaccaggattactagtactcgtagttctaatactactagaactgcaagtactagtaacgtaaatttcttcttcgtaaattgtgtctaaggacacttcgtgtacttggattttgctagaatagacggctagaaacctggccggtgtaacagcagagaatggtgtcatttcagactcgtcgatgttgaaataaggagatgaggtagtcttgaatttgaggagtggtgatggtgggagagctactggagaaatttgaattttggccattattaatatatttctccttttttttttattatttttctatgaaaaataatattttatcccatataaatatagatatgaaatagatatgagaagatagagaagggaatagaagagaagggaattgtacatgtgaaatttttggtctggtgggtgtgatttatatatagggtggtcttagctaaagtgtccttagcttttcaaacaatgacaagaatgccatttaatattagggcaagagtatagctgtactagttataatattatatttaaaagaggtctactgatatatttttatctattttggtatttgggagaatttgttagtttaatttttttatagtcgtcgatattatagttatttaagataacacactaaaaatatagctcaaataatctatttcatacgtatataaaataaatgagtcgtttgaattttatttttgatgtgttaaatttttttaaatttctcgaaatcttgtaagatatgttaaataactataatgtagacgactataaaaaaaattaaattaactaaaaaaaattgccaaaatagataaaagtgtattgtaagtaagaatacagtgtaaaagtaaccatatatatatatttatatgtaattttatctttatttattttacttgtttagtaatattctagtttatcaagttgcatgggaaagtggcccacattttccttttcctttttcctttttctcttttcagttaataagaacacacgatgaacttttccatattccatgtagacatatattgttagatatttttggtctaatatttatattaagtctttttttttaatgacttcaatttcattaattaattagaactaatgcaaaaaagaatttttattttttggattcatatataagacacatttaattggcatataaatatattattaattagttaatgttatatacaatttcagatctatatatatatatatagttctatagtaattatgtggagatatagtaatatataaatatatatttattttattgtatgatttttgagtctaagctctcacgattttattcttgatactttcttgaaaaattttatactaatagaaatatctccattcttacatactcataattctttttattcttaaccaatatgaaattttagttacacaccaacatatataaatgtatatatatatatatatgtatatgccaaattggcaatgaataagagcaagctaggtagtatttttcatgaaattaaatgcaaaatttggatttattatacatttatgtatatatgttgtaattttaaatttgaagattatgggcggcgactactaccaccttcatcatcgttcatctatattattattattattataagactgtgttatcactattctatatatataatataattatatatgtggttttggaattatatattagagataatttccactcaatttttggccttattattagcactttattggcgtggaaatttttcactacgctacaaattagtactttattgctatcctccttttaatatataatcgttttctctcgatatatatatagtgagatatgatgttattttgttattgtactttcacgtaatgtattccgtgatgtatgagagccgtcagataagtgacttatttgatttgacggctgagattaatataagggtaattagggttaaaaagtaaaaacgtacattgacactcatttaatgtaccccgagacccttctaataatgtaccacggaatacattccgtaaaagtacatcacgggacaaaatcgtgtccctatatatattattctcttcatatctttttacaaaattaatattaatggttttgagcttgttatttagatagacatgatttcgttaactccacaactattacatacaaacttgggttcatggaataattaattttaaatcaattaaaatctagagtataataaactttgattaattaaataattaataaataaaacaaaacaaaagtacttgtaatatacataaatcaatacacattttctttttcctaagaaaaagaaaaacaaaattgtattctcaatatattaattatggaagaggtttcaatggttacatttttattataaccatcatggttacatttt

SEQ ID NO: 21563 - DNA, 1841 bp, Cannabis sativa
catacatacatcttttcttggaattaaaaagaaaattacactactaataaactaatttatagatagaaagtaataaaaattattgaagtcaaatatatgaagaaagtcaaagccagagagctccagcatctttgagtagaggaacaagggttccattaatatggcaagccatgagagtttccacaccacctaagaacttaccgccaacgaagacagccggaacaggcggctgtctccgtcctgatcctcttctacctccttctccaacagcattaaggaggtcgaagaggacgttctcgatgtggggtccagccacgagtttatcaagctcgaaaactgtaggccccacaccgagactaaaaaggagttgtttcaccacagtactcatacaacactcgctcatgctaaacaccaccaccgctttacacgaccccatttgcctaaccatctcgtacggactaccgtcgctattctgatcaaactccttcatcatcatcatcatcactgatgatgatgatcccgatgattctccaccctccatgttcatcattcttcctctggatgatgatgataactctaaagaataatattagtacagtgacttaattttatagtataacactgatcatattcatatatataataatcaaagaaaagaaaaagatgagtgtgtgtttttactagggtttagctggggtgaataattagagagtacctgatatatagcagaggtgaggtgaagcttgagtatggtggtttgtactgtacggacacttttttcttcctttctttctttctcttttttcttttttctttttgtttaggtttaacgtgaagatagttgtggtagtggtagtagtaagagagtatttatagagagagagagagattatatatatatatatatgtatatgtttgtataataatgttaatatatatttgactgagagttctatatgtatattggttaattatgtgtttaaataattatgttttgtccccggtccactaacacgtgtcagactaaggtcaatccaaaattaaacactagtaagttagtaacagaacaggggtataaattaataacacttctttcacaacacacaaaacaaagattattaaatgtgtctttctcttagggtgtgtttgtgtcatattttattgagaaatactaaagggcattagtggtgcctagtactttcctatgtgttagtatcgctattggtctaactaagtatcgggttctacatagtttaatataatagatttaaggaatatcgctagttaatcgcaaggtgacatgtcaagaaagtactaggcaccactagtgtctaatagaaatgctctattttatttgattcctttttatatttcgtgttaagtatatcgatttgtatttaattttttaactttaatctgacttgtaaaacattatatcgtgttcatgttaactcattttaactcattttactactagaaacttaagttataaagaaaataataaatttaaagttggattaaaaaacttatatatttatgtttttgtgtatataatttttttatatacaccaaaaacataatattgaatcactaaatttgtattaataagtgatcgtatttgatctgtttttattttgtatcagcctaactcatagaattcatgttatatttatgttaatttgtgtggtgtgtctaaatccattttgtccctctttttctctctctatttatatttagagtataatattataaaaaacgaaaaagggccaatcttaacggaaaatgaaactttattatattagtcacgctataaggactagtggtacaagtgttatgttatt

SEQ ID NO: 21564 - DNA, 3471 bp, Cannabis sativa
tggtcctcttttattttacgatcttcttagatcagttgacgaaaaactgcgtcaacatcatacaaactaaaaaagaaaattgaattgcaactgattcttctaggtactagtgcaacttggtatggcataggggtgcacatgggctaggtttggctgggctagaggtattttaatagactaacctaattattgcggtttagataagctataaaccattcaaattttttattatacacccaactctacttaagtacaataatatgggaggtgggttgggttgagctgaatattttaaactttaatatttatgctacaaacaggataaaattatttaacctagtgcatatacaaaaaaatgatacatatttgtgtgtgtaatatagtgctttaaaagtaactatagactacgtgttaatgatgtgttttagtttattcactttctaagattatcacaatataatttatttatgtatgaaaacggaaactatatatatttatatattttttgtgaatgtaaaatacattttatgtatgaaagttgtctcgaatttggaacatctttcaataaatgagttggtttgagttatataaagttaaaatgtatccaacccataaccaacccataattatatgacctatcacttttcagcccaatgagccatgacctactcttaacataaccctttactataaaataggttgggttgactaggttgaatggttttacccatattttgttcacccctagtatggcagactgtttcaaattgtttgcccaccttgacttaattaagtggtaagagggtcccagttcaaatcatgtgtctgatttgtcaaagaggtgagaaaattatttttcatgcggtcattttctgttcattcgctgctcaatgctattgttggcagaggtttttggctggggttaggccgattgatgctgtttatttttgcagctggttcgattaaatttggcaaaggtgcagtaaagacaactgtgaggaggttgttatgttgtgctgaggattatggaaggctcgaaacgagttagtttggaaccaaaagtatgatgcggtggatggtgttcttatctcatccatgagttatcttgtgcaatgaaaatcaacccaaaatagaggtgcaaattctttattttagtttttgaaactggtgatggagctaaattttgggttaaaccgcatgagaatacaatcaaggtaactgttgatgtcgtcatttttcgtgattgagttgcgtttggtaatggttatggcataatcactctagacttttaagggatattagtactggttaagtcgagcaattttgttggtatatgcgctccgaatttggctgaagcaattggtataaaggaagtgctaagctgtattgaaactcaaccatgacgaaaagtggagctggagtcagattgcttggtagcagtccaagttattcgaaattcattacctatgctttcttttttgggggttattataaaaaattatcgtaaacttcttgtatctttaaataatattttcttattttttttattaaatgatctgctaacattgttgttcatagtcttgctagagtatcttattctttttcagatagagtgttcaataggggtgatatttctgttgaggtacaaccttctcttttgtctgatttggtaaattaataaaaactatatttgcttttttttttttaaaaaaaaaaaaagtattggatcccatataaattaatgtgatattttttcaagaatatcgctaacaattgtaggacaccacctttagaaggttttgggggcaccactggtgcccaatagcaatgttctttctcaaaatattgaacattgctattggcacccgtggtgctagaaccacttaaaagtatactttattagttagcgatattacctacaaaattattaccttaatttatgtagcattgatattggacaatgatgtgacaaggtacacaataattttttattaacctcaagcattatattgattcaatctctttttgttatgcagattatagttcttgtgtgttggattcatcgaggaatgctgtatcttctgtttggacccctccaccagtaaattaggtcaagatcaactgtgacgtgaaagttagttgtggctcgatatgcgtgatggctttagtttgggatcatacagaggcaattttgtggatagctatactagcaggcttaacttttttgatccacttattggggaagctgcagcctgtctgatagttgttgagacatcagtttcatggaatcacccttttgtgatgatatagagtgactcagacgcagttatcaggacgttgacaggagcttgttctagttggcgtattggtaactatgttacccaatgtaaaaatctctctcataattttttaagttgtaatttttcacttgtctctagattatgtaactttgtaactcataaagtggttaggtggacttttgctatatctgaatgtttcgggtatgatggatccttctttcatactataattaatattttatgtaatgaccatgaggtctaactttattgttttaattatacgctgtttattaaaaaaaaattatatgtaacaatttttttgtacattaccataaattttttatgaagaggaattatcgaaagtacaaataaattatttattttgtgtaattgttatttataaaaagataaattcttaatttatttgtatatatataattttgtaatatttaaaatatgtttttaaaaagtaaatataaataaaaatattttttttttcaaaatatattatattctttatattttgtctttatataatttaaataattaataatttatatattaactatttaatttaaattttaactcttacattaataatttcagttaaaataccaaattattagtaaatatattcttttcaaaatatggttaaggccaaatctatattagctattatttaagctaaactagtattattataaggctaattaataatttttcccccgaactttgacatgtaacaaatcatgcctcttgaatttttttggccgttaaaaatttccctgacctattgagattgttagatttaaggatttttgtttaattttagtaaaatttttttaacatggatgaaagttgagggagcatgatttagtacatatcaaagtttaaggggcatgattttgtagatatcaaagtcgcaacataatttagtacataaacaattactcaaataataaaattgaatgaaattagacaaaagttcttaaatttaacaatttcaataattcgagaagaatttttaatggccaaaaaagttcaggggcacgattttgtacatgtcaaagtttaagaaaaaaaaattactaattaaccttattataatataagttggttgaaaattgaaataaaaacactgttcaagaaaatataagggtaaatactattt

SEQ ID NO: 21565 - DNA, 2823 bp, Cannabis sativa
ttatatagaatagatatatagtatgtttatatagtttgatgctgcctagaaagcaactatttacaaacaagtagccgttaaataattctttctttatgcgattaagaataataatatggagaatctttattatatatatttttgtttgattagaaagagaaactattttaaaaaagaaaaaaaaaaaaagagttggatatatactgaatcacacccagattgatgaaaacgccaactgcatacggttaaaatatattgaagaatttaatatacaataatttcttacaattttttaattttatgaagttttgacttttattactttatatcttttaaaatcatatatcctgtatatatataaatattgtacctataaacgacgcactaatttcttaccatatatttaattttgcaatgtatttattttaaaagtatacaagggaattatcattaataagcacaaactaattagcttggataatatatatatatatatcaacaaattcctcctaagcctcaaaaaagggtgagcaactgtatcagtgttactttataataaatatataatagagatacaaaccattgtctccataccatcccaatggcaaaagtggtatacataagtccttataaaggataaccaactaaatagttagttaataaaaatagatagttttaggcttactttatagttatttgtcttcttatacttaccctaactaattttgttacaacagaatttttgttgtaagggtatgtctatgaataaaagctatgatttttttagtattgttcggaggcttttcactctgaatttcttctctctatcatcttttttcatagtatcagaacctctcagacccacgtcaatagctttttctatagacaactcatctccaattgcggtcatcgatctcaggctaatcaaaccacacaacaagttcctgttgttcaataatagaatcctttctctaattctctgttctcatctcttaccattaagctcgatcgagctaattttcttggaagtcccaagttgtctctactttcatgggacacgacctagacgagattttgttcagtcacatctctccacctcctaagcttgtcaatggtgaaaacaactctatgttttttcaattgcggtgtaaagatcaacttcttctctcatagctttgatcgtccatgaccgtagtattcttggtactgttttgagttacaatatctcctatgttatgtgaaatgcccttgaacataagttctttaatcagccaaagcaaactcaaaagtcagctcttagacatatccacaaaggtacccttagcatttctgactatattgataagatcaagtctatctgtaactttttagctattgtttgacactcgatcattgatcttgatgtgattcttcatctccttaatggtcttggtccggagtttgaccctgttgtttctagaataacttctcaaagtgataccttatcgctcaaagaagttcatgttcttctcatgtcctaagaaactcaacttgaatgtcatatatgaataatcctacaacgataaataaacatgtaacagttcaagaggccttgtaattgttgcagtagattataatgtctccttccttttagtactataacccttgttccattctgttgcagagtagtaacaagtactgaaccttgatctccttctttaactcaaaaagagatagttcttcacaatcttccacaaaagtttgagcattaccttgtgttatcccaaaagttagtcgtgtgacgtggcaggttcctctgagtgacacgtatctctaccatgggacctgggcggacaaaagagatccataagtcagccacccaagctattttccaattagtaagaaagtcattcgagtagcgaaatgtgctggtaaaagttatttttaccagcaaagtagcaaactgtgctggtaaaagtgacatttcttgtagtgagttcgtcgcacatgttcaagacgtgcaggcctggtcggacgaaaatagtatgaacctcacgtaggccggccaaaaataagacgcaagtcttaaatataattaataacatatcttagcatgtaattaataccgagtaaaagggaatcacgattatacttccttgattttaggaaaaggagttggttccctaaattagtggaatgagagcttgatgagcttgaatcttattttgaatattctctataaatagtagatcaactttactcaaaacagagctaaaaattatttcttgagagagtctatacgctgctcaatttcctgtaaaactttcaagagagagcagtcattttgcttttcttctcacaagtcaaatacaataagaaggggaataggtcattaccaaaacattagggttgaacctataacatctggtgttctttattttactatatatgtcatttatattctctaagcttataaatttcttgttgctttaaggactcaatgtcgttgaccaaaagcaaggttaatgttttggtgctctcattgagagatgaactcaagaacacgatttgattagtttgttcaacaaagagtgaaaatggttgtacaaactcgaagaaatcaagccactgactctgcatacccaatggctgctgatttgaatgcccaaaattctgccaatcagagaaatccactcgtggttaatccaagcacccaaaaccctggcactgaaggtgtgggggagagtgatcaaggttctagagtaccaccgagtagaacacaagtgatgatcaacgatgatgcaaaactccaaaattaaagggaggcagtggctcaaattcaaa

SEQ ID NO: 21566 - DNA, 2480 bp, Cannabis sativa
aataccatcaattttgtttatatacactaatttgttttttaatcaggcaagagtaatacgtatttattgttttattggttagggtgaagggtattaatttagtttttatttgctatgaaaatgtttacaaataaagtctcatagcaatgttgtcatattcttgtgtggtggacaggaaatagagcaggaattgttgacagaggattaatgttcttaagagaactcagaacagtttttgtaaaatagaaaaattttaaagaaaaataccttatagtaaatgctttaaaatatactatttatactttatatttgtataatattattcattactctaaatatatttaattaattattttaaattttaataaatatttttatatagggatatgtgtatatattaatattatatatttaaaattaattaataaaatataataaaatttaaaaaaatgagttttggtaatgtattttaaagaagttggtgtatgatgtattgtaaaagtgtgttgtaaaatagagaaagtagagttttagtgatgtattttaaaagatagagtagaacaattattgggagtactctaatattaaaatttaatctttgttattaagcatgcaccattaatattgttgtcggagaaattttgccaacactaaaattatgtgagtattcaaataaagttaggatacttaaaagtagatgtttgagtactcaaaatatagactatagttagagcttggtctactcagtccacttttgataatgattacagcttagtttatttgatttgaatcactcctttatatagaaagcaaatatcctttagaattacataattgatcggtttagaaccgtttttataataaatgataatatttaatcgaaatagacgtttaaggaatgaattaacgatttcatccattcttgaattgtcacaatgtatttgacttgtctattcatattccaacacacgggctcacagactctacgtcgttgtactcgcaggataggcctttggacttattttgtttgaatgtctgcgttcatctttgatcgcatagtcgaacattctatgcattgacaacgtggaacatgcgagttcctgatgagtcctcaaacacattagtctttcagaccaaacctctgtaaataaatgatctttactcgtctcaggagatcatatacttggtcatcacatatcatcggtatatatacgtgatactagcactaacgcctcttggtcctacttattattttgactatgcgggacataatatgcgactagaccctgtctcggtcgtatcttctcgcaagttcgtgttaagcgaagttagctctattaaagctatttattgattcatcatctttttccaccgtgaactaagtccacgtgtaagctatttatgagactgtactcgtatttttagacaaaaaaaaattcattataacaaatactagtattaggtgacactttttaggtgacactttatttggtttgtgatattttataataattattaaattaaattatgtgagatgagtatgatactttaaaaagtactaagcaccattgatattctttagcatatatattcgttaaaagagactaataaaattggcgaacatttatattatatctatgctatattaaatgtgaatatataataaatatgtttttttttttcaaaagattacacttcaaatttaaactaaatacacatatctctattatcttatatcttatattaaatattaaatgtgtctatataatataattatttttttaatattgcaatttaaatttaaactcattgtacatatttttaaaaaaatatatttctattattatttttctactaaaaaataaaaaagtatatgctattttaaaaacaatgaaaaatattatataataaaagtattatcaggaacggacctacttgcattcatgtgggggctatagccctcactaataaaaatattgcatttttaaaaaataaatgtaatttttttaatttaataattatagattaaaatagtagaaaagccctcacaaaattaaatcaatctagtaaattaaaatgattataatgcaagtataaatatttttaataataaataagccctcacaaaataaaaattctgagtccgtcactgattattacgatacttaatctaaatttataattaataacaatttttacatattattatattttttttataaataatacttacattaattattttataataaaaaatattttgttattgaataatacgaaaaaattatttatataattaaaaataagtataattaaaataaaaattaagaatatagtaatattaatttaatatataagatattttgaaataattaatgttatagagcataggaaaatggaataattacataaagtaccaatttttgtaaaatatatacatttttacgtttaaagaatgtttttttacatttttacagttt

SEQ ID NO: 21567 - DNA, 2218 bp, Cannabis sativa
cttttagttaccataaaaatatttggttacctttatttaaattttttgtattttttaacttttttttaaattttttataaaatattatttaaaaaaatatggcacaaaaattataaaaattcataaataatttataattaagtttaaataatatttttctcgccgtcacaaaagtctctaatttctataaaaatctccacattatcgtgttttgaatttgaccttaattagtcaaacataaaattaaaaatatccttattaattagttattataaatatggacaatgtatattatagtcctcaatcacaatcaccattattttgttcaaatttattaattttcctataaactaaatattacgatatgatcacgcatgtatatatatcatgtaaagataggataataatctgtatgtatatgaacatatacatttgtatataaatattcgagtttgatgtatacgtgtacaaaattatagtgggttgcatgtgagatttggtaatgggatatagctagtgagacaaaagtggatatatatataaaactaatataaaccaataagacctagtatagtcacacaccacatatatttgaagatttagttatagggctcaaagttcaaccatatgattagggtttctttttctcattttatcttatataatatatatataagattatatttatatatatataagatcatgcatgtgagatgtctaatgattccttcatgtgttatatagggttttttatgtgttacttaaacggatggttaagctttagacctaaagatatagataccaaaatatttgacttattgtttacgtatatataaaggaatgattatttcgtctaataatttatataagtttattaatacttatatttcttaaactatattttataatgccataatggtgttgggcatgaaaaatgacttggtccgtgaaaacatgtcaaactcttcaccataattacaaatattgcaatccaactctttttcatcatttggtttattattttaatgtcttctttttttattttctcatttgctttattaaactagatgaatgtcaaatttagttatgcatgaaatcgacaaaattaaatttccaatgggttctttaactgttaactttcatcaagaattttgtccaaccatttatgttgggcccttaaatgtaatttagcattaggcccactgaaattattataacataaatttatgaaaatactacatttttaatgtgaataatacaaataatttttcttttcaacacaatttttttagtattacatgtaattatattttgttgtagaaatctcataataacgtggggaaagcgtgtttgcatgaatatttatgacgaaaagcttccattttaatgtatttaattatgcctaatattcaattttgaatttggtaatgtaaatctcttaataaacaaaataataaatggtacaagcaaaatgcaacataaggtgacttggggttgaaatggaatccatcatacttcaaattttgtattaattaattaatacgataatgaattttggggaagaatatttaatatcaagtttttttatgtttaaaattctactatcacaactacttccgccaatggaaaaaatgtacctaaagaaaataatcacagaaatgaccaaagtgattgatgtctagtattataaactatctatatattcctttcaaaaaaacacaacaataaactatctatttataaaaatatatataattttaattttttaaaaagaacatttacgagcaataaatattctctttcttacctatctatttttatttattttctatcttgtaatcatttaaaccctagtttgggagcaccactccaaagtgttatttttgggccgtttgatataggagactgaattggactatttgttaagattaaattagattgtctcgaaaatttacatcgtgtactacttttgttatttttttacaaaaatattactaggcggtatttttttttcactgtgtatttttataagtttcatactacagtatactgtgtttattttttttttaatttttttttgttttagtgttattttacggttgtttttcattaatttttttaaggtgtctggttcttttagtgatggtataatatatatatatagaatacttcttaatgagtattacctatgaatggttactaaacaaatttaactata

SEQ ID NO: 21568 - DNA, 1782 bp, Cannabis sativa
atctttcaagctcatcaataaaacattagtgaaattaagttatgttatatgatgttgagttatatatttagttatatttttgagtttgtagatatgcatcttaatttttttttttcaaattatttgaatttctatattgaaatttgacctttttagtttaatttatattctataagttaaattattacctcatttttttttatatatattgaaaattgtttaattatttttctaagtagaaaagttcgtacattcaagcagctgtaaatttaaaaataatttcttagtcattcaagcagaaatattagcattaatgatcataacattccattttgatgtcacacgcttggtcttcctttttgttatgtggatagatcaaattgtttagctttaatttttgctctttcaagcgctcatccttttataatgagctagattgttttttaaatgatattgttagtttgtttttcagtttttatgtggcaattttaggtcacgttcattgtataattagtaagattgtttataaattaattgtgcatgcattaaggtagatgagaaatttgattgagaattaccttttctcatgtattaatcttgttgttgtaaataggagattaatttttataaaaaaaaataattgtaataagctataatatataatttttggttgaattaaacttcaaatcaaaaaaataattttggttgaaacatgacttttcaacgtattttttggggccaaaagattagaaagtatggtctagtttacgtgtttttgattggttgtcattattttgtatgtacgtgtaaagtcctcttaagaaaatttatccctatattattcaaagttgttcaattgatcctctaaaaaattggtgattaattttataataatactcccgttacaatctctcatactatcataatatatcttcaaaaataaattatataaaataaagttacacatttatcaaatttgaaaccaatatagtccccttccaatcattcaaaatgtcttttattattgttaattaatccatttaattaagacttctttcattatcagctgtctgctagttgttacccaaaactacccagcaccgtggtcaaaataattttactttcgtcaatcgaaaatagatcacaaaataatgagaaatgcaagtaccaggaaaagagagtcctctaacttcttaatcgatccatgtagccgaagtctttataattgtgtcacaggacatacatcgaccagaccattatcaacatatggcgaaaatttcgttacttatctcttttcttctgtgtaatatattccttctagttgctcaacaaaccacagcccaaccgccaagcttcttatttcaattttgtctaaacgacaaaggtaattacaccctcaacagtacctaccaagcaaatctcaatcacctcctcacaacacttcccacctcccaaaacgacaatggttacggcttttacaatgtctcctacggcaaaggctcagaccaagtttatgcagttggactgtgccgtggagacgccacatccaatgtctgccgaagttgcctcaacgactccatgcatgtcctcacagatatctgcccgaaccagaaggaggcagtaggatggtacgacaactgcatgttgcgctactcaaatagttccacgttacgctactccaataggtccatgttgggcactccagtgactatcccattaaactacttgtggaaccccgagaacgtatcgtcttctaacgttcaagagtactttgatgatctt

SEQ ID NO: 21569 - DNA, 1555 bp, Cannabis sativa
ttttgtcacacgtggcaaaaagaatgataacatagttacttatttagttgccacatcaataccctttgtataatttaaaatgaataatagaaaatatgtttttttttaagtattattaaactaaaaatcagattaacaaaattactaaaaattaaatcttaaaaaatatattttttttcaaattaattacacacttggtattgacgtaaaaattgtctacatcataccaagtgttccaaaacttaacagagcaatttataacaccctgaatagttcagaaattatttttaacactgaaaaattcaggggtacaataatacacaaaaattctaaataacaatttataaatgttttgttgttggtatgttatttcaataaattagaaaaagctttattcttaaacattacaagacacaaatttaagtaaataaatgaagagtattgttattgggcgctagtaatgcctaatacttctagacattttgtcttgcggttggctagtgatactctttaaaaattattttattaaactatatagaatttgatatttaattggaccattattgacagtgacatatacactcgatactaaatgtagcactaatcttccattttcgtatggaatggggttttattaaacatggtacatagaataatgatgggtctctgctgttaaaactaacagctgttctcatatggtgataatgacacatgtggcagaaaattatgttgacttttctacatatattttcacaactcccaacaaagccaaccaaagatacttggtcaacttttctactctccacgtcacaataccaaattttaactggtttttgtaataactcctttcaattctctacagactacagtcttgattaattggatttttaaattgcactttcaccttaatcaatatacatctttcaataaaaataaattttagaagtatatttgtattgtgaggatagacattattttagactacgtattttgtaaaaattattgattagtcattgtattttgttaaattacagttttgactgtgttttacaaaaagaaacataatgataccctgaactcgattttagtcaaacttattttgggtgtaggagttcaatataacttgaactatgattgttagagtttgaaaataagaagttttaggttaagaagacggatttttaaagttgagataaatagtagttcgaccaaaatcaggcttagggtgtgttcttttttgcagaacaaaaagaccgatcggtaacttttacaaaatacaagattcaaaattttttcttaagaaaaaatattttataataacatttcaatactttaaattgcaactaaataaaatactaatatagaaaagaagaatttgcacgagaaatatttcgatttgttgtacttaggtggtatttggttagaggtaatgaaatagaatgtatagaaagaaaacaatttttatttcattagtattgaaatgattttttcaccatttcagtagaatgtctattcttttttgaaatagaagaaatgaccactctaatacaagatg

SEQ ID NO: 21570 - DNA, 2377 bp, Cannabis sativa
cgagccctataaataataatttaagaggaatgaattcaagagcaaaaaaacttccatcaaatattttgagtcttttcaacaaacataaatcctcttgatccaaagaaagatacaatttacatcacattttcatgcccaaacaaaattaaaaatcgttaccattaaataaagtgatgagagaatccatattattttttaaaccatgcataaaagaatcaatgaagactgacttgaccaacacaagtctccccatgcacatttgaaagtgaaccacatttaacaacttgaataatcgttctcatcaaatttatattatttgttaaatattattggctaattagaatttttactctataaattttaacatgtattaaatcatgttttttgggcttttctagcagttaaaaatttctcctgaacttttgaggttgttaaatttaaggatttttgtttaatttcattcaatttactatttcagtaattgtttatgtactaactcatgctccccggactttaatatctaccaaatcatgcccctctaacttgacatatactaaattattaacgaccttaaaagttcaaggaacacaatttaatatatgtcaaaattctttagtaaaaattctaattagctaatattattttgattttgaccttccccacaagaaattattcagatgggttggtaagaaatgtattcaccaagttaaaaaggttaaaaacaaagtttgtttttttacccccggggaagagaatgaaagtgttggggtgattttattacttgccaaataaagtagagctggaccatttttgatgcatgtgtgtgtgagaaatgagaattaaaagagggaaaaatgtgtgtggggcccagcggatgtaatagtggtgtggtgggtgaagtgaggttgattcatgagcccaccctcggctgatctctcgcacatcgcatgcctctctactcttaatttaccctgatgggagtgaaatcgataggatcaaaccatttacggccaacccaaatacccaccaacataccacacctgtcctcttctatatttattatatatatatatatatataaatcttggaaatatatgctcttattattgttcatatatcaataatataatacctcttcatattcttacgttggaagctagccaacttagctttttattggtcacattttgggtgatccacgatccagatatataatatatctttaaaattgaataatgattgacacacttaaattgtgagtagtcgctatgaggtcagattttgtaaattgttaaaggatatatttaataatttacatcaatgaaatcacacctagttacacatattcttttctaaatacaatgtgtaattaatttgaactatacaattcaaataatgtggtcctcaattaaaaatactaatattaatacatatcattatataataagtgtgtgcaacttaagtttgtatatgccattactcattaaatttcagaaaatcactcacttctcatgaattaacaggtaaaaaaaataataaaaaattgttataaaaaggcgtccattcagttaaaatagttcaaaattttaaattatgaataatatttttcttcatttttcaaatattactttaataatttctctttcttttataattatttttcattagatatttttagtttataaaataaaatatatttaacaatataatatttaaatggtatgaaaaaaatagagaagtgtatgatataatgtaaaaatttaatgaaatttgaaaaatatagagtggagaagttgatatgagtgttctaacaagaaatattaaaaagcactagtggtgtctactgtctagcatatttttaggtgtcatataaatattggtgtaattaaacatcgactttcatataatttaattttataatttttgaaaaatatcgttaaccaatcacaaaatgtaaaatatcacgtatagatggtgctataggcaacaatgttgcctaatagcaatgctatgctttaaagggacaccttaaggtgtcaagcattacaagaggtgatataccgctattggtacaatttaatatcaaatcacgcacattttaatttaatacataatatgagaaattgttaactaacaacgagccacacagtatggtgttaggcaccttaaaagattattaaattttaaatattgctattaaatatcagtgatgtcaagtaccatttacataatgtcttacaatagttagcaatattttttaaaaattattaatttaaattatatgagactcaaattatgccactgaggagagtagcaccaaatgcttttaacacttatcttaaattttttatcatagtctgcaaggcaaattataatt

SEQ ID NO: 21571 - DNA, 2694 bp, Cannabis sativa
attttagggcagaaaacccaacaggtatgaccgtcgatcatcagacaattgttgatttaaggagtactcatttatatttcttattttcttttctactttgtgctataagcttactaacttgattgtcagagtgccttcagtcggtaccaccctggtgacgcaaggtttcacgaccatcctttatctttgtcttgtaggttatcggtgcccacgaacattaattttggtcattgtagattttagcctctacaatttggtgcccactgtggggccctgacaaactgacagtgagcaaggtgatctatcgttgaccacacttcagatggtagaagaaggagagttcattgcccaagatcaacctaatgtcaatgaacaacttgccataataatggcctaaatgcatgagatggctgcgcaaactagagttttggaacgagcaaatgtaacatttaagaaggagaacgcattgttcatgagtgaaaatgctgcaataaaatcacaaatagagtcactgaaggctaccatgacaacttatggtgttgctcaaacttaattttcagttccacttacaccaatgggaccactccactcaactctatagaggacaatgacccaagtctctcaccaacaaatactcggagggacatcgactgcaacattcagtaataggcggttctcaacctcaacagtttgagcgtactgatatgcatacagatgggacagactctagaggtctaatggacaactgtatggcatccgatttgcctacgaccaacctcaaaataactgacctacctacgatcaacctcctgacgactagcaacttaggggttgacactagaactaataacatcttctctagagggactgccatcatcacatgtaactaccacacaggtaatggtaaattcagatatgattccatcttttgttgatgcaggtcagaccactactcctactccaactcgggagaatttgattgaacgagcgatcattcagacatttaaagggatggaagtaatgattcaacatatcctaggggttccaacactaataaagaaagcctgcctagcagtttcgctttcgttgacgccattgtgttggtggagatgctaaagatgtttatgttcccattgataagaatatacgacagaacaaccgatccaaatgatcatatagacaattattttgaggttgtcatcccttccaagttgcacgaggcatgcatgtgtaaggtgtttgagtttatcttggtcggcccaaccctccaatggtatgaaagtttaccaaataatttgatttcatcttttgctcaactaaaggattttttgtagaacaatttgcaagtagcaggaaattggataaactctcaaatgacctataccccatcaaacaaaagagaggtgaatcgctacaagactatgtggccatattaatgctaaaaaagtttccatcataacatgcaatgtagacacaaccattaccgccttccataaaggcgtacaggtagaatctgacatttacaatgaattgaaaaaatatccatgcaggacaatgtagggtgtgcttgccaaagcttgggcacatatcaagtgggaggaagatgaatccaatatacaatcaacatcttactcttactctcgtgatagtagaaggccaaagagggtagaatgatggtcatcctatcattacctgaaaccttatccaacaaacagatcacattcatacttgaataataagaagtacacccaaccacacaaactaagagattacactgcaaagtcgatactattggttttatgatactaaatcaggtatgcaacagaatagttttgtattatcagattatcatcgtaccatagcccctaggatctccatatgtgtgtacattaaatcaaaataataaaaatagttagtttagtgtatacctcttgaagcctattagggtattttttggaacttctcgtaagttatatcccttaatccagttgatgagaaactagcaatttggactcacaccagtgtcttccaaatcaattcaccacacacaaggaatattgtgggttattaagaacaatagaaagaaaaaatagtttgccttttctctttagggtattcaaaaatagcagagtaaagtgatgttctgatttctcaaatcaagctcctatttatagtagttaaatccctttaattatatcattatttaattatttaaataaatatctataaccgaattcggttactgatatttatgagagaatctctcaactacttgagagaatatctcaacaaccttgaaatatctttaaccactttttaaattagatatttacatattgaattaattaaataattaatgaacctaaaaagacaaatctaatgatacaagcctaggcacctaccttgttgtttaagacaatgctagtgtcttttgtcctaacaacttttgtcttaacaaatcttgtctcgacaaattctgtcttaacaatttttgtcttttttcctatttaattaattttaaaaaattatttatttttgtaaattttgccaattcaaaatagattttcttcgaactctttattcaactctttatccctactcttaacagtgtttcaaggtggcaattcggagaccatagacctataattccaagcttcaataaactagattatttattgagtgtcatcaaccaaa

SEQ ID NO: 21572 - DNA, 2598 bp, Cannabis sativa
catgtgctagacacagaaaaccgaggtcgtcctgagcaacccctgactgtctgatagacaccgtaacctcggacaagtataacggtttctccacggacttgttccgaggccaacttgcaaggttttgctcacctcacaggcccacttccctatctttcctcaacaaccaatcataaccaagtctctctttctctttttgggccttttccaaactcacagccgaatacttgctctactactcacaataatgatcattactgacattagttgatccttttggaaacattgggaaatatgaactcactaacattttttttttcttttctgaaattggactaacgtttgtttcactcacaactttggtgaaaagttattttatttgcaatattttagtttgacagtaacgcccctgattattgtcttaataatggtcattttcatagttgtatcagcaatttggcaccaccacctaccgttttgtgtaggtcaaaatataaatgtgtattattgaaatttttatgcgtgtgaaaatacttgccttttgtttttaaaacaattatattttcttcttaatttcaaggcttttttcctgtatttgaaaaagtagaataataatgcccctttagcctttttaattatttggttgggttttataaatatcaaacttatttatatttatttatatttgctaaatttttagtgtgatggacatataaggattattaaagttttaagatgttatccatcggacaaatgatcatatgcgttggctcaattaaaagtcacaaattgtattatctcaaccacttcagcactacacaatatacaaatatagctttttttttttttaaaaaaaaaagagatataaatatatagatattaaaaaataaagaagataagatcataaaagattatcatattccaaatctacacaatccttattggccaaataatagtagtggtagcacattcaaaatttcactcattttttaattttcagagatattaaattaattagtgtgataacgaaacctaagtaaatactacatattattttgtagaccacaacaaaatccaaattccaaaccacacaaggcaagtgttgcatctaaaattacataaattgtcctttcattccattatcgtaccatgtaagagtaagattacatcggtcacacgtgttaaatggtcatttcccatgaactgaaaacaacgaggaacaacctgtcccaaagctactgtgcaaatatacagacagatcctttattctcacgtgccactaagccctatccaatcacaatatgtatatatatatatttatagcaatctgaatatctgatccttcacccaatttctcacctgcaggttatgtaaactctgtctcaccttcattatcaatctaaagcacaagaaccaaccgtccttgtcttctcttctcttctcttcacttctcccttcgctcactcatttttcccttttacatttctaaagtggccaactttggtagttttgcaacatgaaaaggttatttaggtaaattcataattttctttgtcaagaaaaagacaaaaagcaggtcagcggcaacaaaaaggaccggctccctagcatgcctactataattttgcagctttaaatagaaaaacaaattaataaatttggaaaaagttatttactttttctccttattttttcaatgtttgtcccctgaaattaccaatttaacctttcatccaaattttaaatttatgtttctcacggacgtgaaattgtttcttaactaaattgtatttatcgggtttagtaaataatttaatattaatttcctaaaaaataatagtataataatctttcattactcatttaacttacttttatttttatttttatattttattgttattttgtatttattaatttttttttaccatattgctcattttctctctctagtctctgttttcagacagctttggaaaaaccggctagtggtctttttattttttagactgaaaaaaattatatattttaattctattttctattttctggagttcattttctcagaaaacaaacaggttatttttaattgtttatttttctgtatagttttgatgagtaggagtactgtttgttgagctctaatgtgaaaagttaagcttagtcacaactttgagctaaccggagtgtggcagttacagttacaggttatgatctttatatttttttcacttggatcttttttcttttttttctttctttttttttttccctcagtttatgtttctcacaatttttgttttttttttttgtttttttaaaatttttttattaactttacttgagtttttcttttaaaatatttacatgctatttactatttgagttacttatgggttatgtcttaaaggttttgatcttgaagaacctggaagcccagaactgaacttcactctgttttccccctcaaaactttctttttttatttttatttagtgagaaacttccttttgttcttaccataattataatttagtcttaaaaattttctctacaaatttgggtcaaggggtttttgatgttttgatctctatagtt

SEQ ID NO: 21573 - DNA, 6284 bp, Cannabis sativa
  modified_base (5463)..(5470): a, c, t, g, unknown or other
tatgtaatttaaaggtcaaaagaccaaattgccccctagggccaaataaagcctaagcataaaccaagggcaaaaatgtcctctcacacccattaaaactcaaataatctttagattctacatcaataaatacaatgccaataattcaattccaattacatttcgggcccgaaccaagttcggcccgaaatacccggttgtgactataccctaccaacctgtcagaacacacctgaaaaatacaacacagacatactatataataatatagtccctaaagcacgtaattaaattcatttcatcattttgcccttctcaggtcataattacttaaatgcccctggctcacttattcataattatctaattagggttttgctaatccatttcttatttctagggtattacacagctcgtgctaatttgggagcaagaaaagatgccactaccaatatactacaccagcaaaactttttctagcatagaaggaagatatcccatgattgagaagctggcttgggctcttgtcatttcagcaaggaaacttcgaccttatttccaattccatacaatagccttaattacctcatttctattagaaacggtgctgcataaacccgaggtatcaagacgatttatgaaatgggaagtagaactaagtgaatttggcatacaatacctccctcgaacgatgattgaagggtaagcactagtagattttgtggtcgagataatcccaaagcccatacaaaacaaagaaagctctagaaaccaagaatggatactgaaagtagacggatcatcgaacgtccatggaagtggagtcagaatagtcctcctatcactagacggggaaatgctagaacagtttctcaagttaggatttagagcaaccaacaatgatgccaaatatgaagccttaattcacggaatgaaactagtcaaggcaatgggggccgatagagtcctagtttaatatgattcccagttaatcttatagcaagtcaacggggacttcgaagctaaggaacaaaaaatggttagttatttggcccaagtaaagaagttggcgtcaacttttgaacatttccaaattagtaaagtttcttgagaagccaatatgcacgccaacgctctagtaggatgggtcttcttcccgactccaggttactaggacattaccatttgatttcatccctgaacccatcatcactttggaagaagaagttcaatgtacaaagatgatgacataatcactagaagaatggagatagccaatcatagaatacctaagagataacagattgccgcctgacccaaataaagcttggaaagtgatatcataggtctcaagatacacgttattataagattagctatacagaagatcatatcacgggccctatctaaagggcattgggaaactggaaggggaactgatcttggctgaggtacatgaaagagaatgtaacagtcactgtggagggcacatcactgcacagcgagtccaaagacaaggttattactggccgacggtgcaataggactcaacaaagtattctagaaattgtgaaaaatgccaaaaacacgccccttctatattgggtcccccagggaagctaatattagttaaaagtccatgaccattcatgaaattagggatggatatagtaggtccattgcgaagggcaccgactcaaaaaaggttcatgttggctctaaccgactatttctcaaaatgtattgaatcatactcctttactcagatccaggatagtgaagacaaaaaaaatttctggaagaatattctgtgtcgatatggattaccccaagatatagtggctgacattggatcccaattcataagccgtaagttcaaaaattcctgcgagcagtggaaaaataaccttgtattttcaacaccacattatccatagagcaatggacaagctgaatcctcgaacaaggtcgttatgaacaatatcaagaaatggctcaaaaacaccaaagaaaggtgggcctcggagtcctctgagcgaacaggaaagcacccagggtcaggaccagagagacccctttttcactactatatggaatggaggccatcatcctaacataaacataggtctcgacttgaagaacaagcattaacaccaaggaaaatgcctttttgctactgcagacggcagaagacctagaagagaaaatggagcaggcttttatttcgaatgcaaaaccattactcaaaagtggccatgcaatacaataagaaagtcaagcccaggaatttcctcccagaggagttggtctgaagaaaagtttttaaaaacatcgaggaatacaaggcgggaaaattatcttccaactgggaaggaccgtacttggtgataggcttgacgggaaaaggagcttacaagctagccaccatggatgaaactgagatggccaggagttggaacaccaggtaccttaaaatttttatgtgtaatcacttaaaacttgtaaatgagagtagacgaatgcactaaaactatgtactattttgtcccataaggaggaaaaatctcgaatatacataaataaaagtaatcaaggtgagattcaaaaattagtagaccatcacaaagaccttttatgaaaggaaaaagataagtggcttccatagagtaacacgacactttatagaagtatcatataaacatagcaaagaccttttacgaaaggcaaagtacaagtcccttccacggaataagatgacatttacaaaactaattgcatgaacatggcaaagatttaaaaaaaaaaaacagagagagagagaaggcaaagaagtggtgaataacaaaaaaggaacaaccctcaatataccaaatacatatcgccctcattagggaaaaatactgcagactatcaatttatataatacagggtaaatgcagacgtaaataaaaaaacaaaactaccaattgtacgaaaggtatgattaattacgaaaaaatatagattacacacaaagaaaagccagctaaagaagcaaaagataactttatacataaaaaacaaacaacaaggccactttccttcacaagtatactcaatagttttgaagttaatacaattacattcgaaactaggggagtagtgatggcactatacaaaaaagagaagccatcttcctagctaattgtcctatgatcatctaaatagaaaaacattcacattgttgtaaagccctacgcattgtagcccatcccttttggttgaacgtcgttgggggacgaatagtctcagaaacaatctgaggcaattcttgtgtgaaagacgaggcagagatgcaaaaagttgatgaggaatcaccatcatccacaatagtttcaagcttaggcactgaaccaagctcagggtaatacgcaactgtagtctgggtagagctccttctgctctgggtcctcttcagcttcctcaataggagcaagaattgtagggatgatagaaaatggacatgctgctaagggttgtgctggctccacttgagacgaagtatgagttcctaagttaaaagaaaaatgttcgaagcagggacaactacataccgcagagagaggattggaggaataggaatgggctcgaaatctcaaaaactcgagaaaggatttaaagataacaatgcaggattcaagggctgcaaacctaaaaaaatgtttgaagaagagagattctattttagggatggagaagatttatccttgagcaaaaatgccatttctgcaagctaagttctccgaacaagaaactctcgtatgttttagagttgaaaaatccttttctacatcacttatgtatagccaaaatagttattcaaaatgcactaagggaatgttgccacgatcttgcatatggaaattctggatcaattaataaagcaacatgtgtcaactgtactgttaaccaaaaacccctcaaatctcgagaaactcaaaagacagaagtaccttttcattaacaagaaaacattggatagtttttgtaaagaaaaccaaaggtcttactctttcaaaaaattgtgtgtatcataaataataataaacacaataaaatgattattaattatatcaccctcaaagctcaaaccgatgagcactacatacatgaaacaaaaacaaagttaaaaatttagaacacaataaataatatatctccaacaaaaatatcagatccacgatcgtgcaaatcaagcaagaagtagccgaattgagaactaacaaatatgaaaaagactaatataaaaaaaaaaaaaacctaactgaaaaactaaagttaaaactagaactaaattattacatgcaagtacaccgagagtcttattaaaaattctcatgatcaagatggtgccaacataaaataaacaatgagcccacaatcacgatggaacccctcatcagcctcttcttgcaccgacaacatccagtagggaagcctgaagggtaaaaagggaccccatctcttaagcattcctccatccacctctcattttttaaacgctcacattcaaaatcttcgtcccatgaatggtgtcccctagctcacatacaacaaagctcacggggactttcatcccgcagacgaagagcatgaaattcaaccagaacattggcagtatagggaacttttttcccttcattttcaaaaaaaatctaaagccattcctcgtcaaaagatgaagaggcatcgtcaaggtcaagcacgataggcccgcatcatcctcttgattacggcctcaatagtgggccgatagctataggcgaatgattcaagacaagtaggggaacagtccgcgacattagagtgaaactaatccccactagaagattgagggagtggggagcttggacggtttgacatctctttgagaaagaagaggaagagtaaagagaaagataaatatgatggttatgtaaaaaaattgttataaacgataatgaagactcaaacaagaatatgtgtttaaataggctcattaaaaaaggtagatgaaaaggtagaactaccaattgtcaaagcattaaatgtcattaataagttggattcccacatgtggacaagtgtaaagtcattttaaaaattatttaaactaatataaaaaatgaggcatacaaaccaaaatctccccattccaccgaatcctgataactagcaaaggattaaaaccgtcgcctcattgtcaacatacaatcctcctaaccatatttgtgccaagaagataatagcaaaaacaattaaagtaataacaaaataaatagcaaagtaaggtcataacattaaaagaaacttcagattccttgaaatgtatctaaaaggggggataccgccatgaggcaggagttcgagtaagaggctccgcaagccacttacatcaaattgtcttaaaatattacatcttttttaaagagagagagagagagnnnnnnnnagagagagagagagagagaaagcgagggcaacaacacagcaaatcaaaaaagaaaataacgttcaaacatcatttgtgtcgtcatcgtcatcgtcactggacttgtcaaaataagagaaagtctccatgagatcctcatccttttcgaactctatgtacctctgcaaaaacttgtccacgtcctaggaggctgatttgccttctttgatttcagagtatagctcgtagacagactcataactcttactgaggaatgttttcttcacttgcttagtcaggaccttactctctttgactaaagagcttttttcatcaactaaagcattctttgcttgcttcgccgtcttctcagcttcgaaaaactttccctttaaagaatagacttcagacttcatcgtttcgctagccaagactaggttactgtgctcctgaggtaaagtatctttctttatctttagctattcatgacccaatttgagctcagcatactcagcctcaagggaggcaaccttttcagtaagagcctttttctctgagtctaggaccagtcgagcaaggttccagttcttcttctcgaaatcaagaccattgactttaattttcaataactcgttatcaacctccaaagtgctaacttttgaattaacagtgttcttcccagcaatggtagcttcataattcttcttaaagcaagcacaattcttcaccaggttatctttctccttatccgttcgcggggcaaatttcatggcatgggcgcaccttaaggctttctataacaaagaaaaatccatcacttaaaatcaaacagtat

SEQ ID NO: 21574 - DNA, 3658 bp, Cannabis sativa
acctgatctacctatgatgacacgtaaagactaggtcgtgaaacaacaatatgcacaaattatgatcacatgactctcatcaatacaaccaaaaataagcaaataagaataataaaagaacacatctttttttttaagaaaatatggcagcataatagttgtattctgaataaacccaaaaatcataacctacataaatatttgtacaaaaatatatttggcactcagtgccccaaaataattcagaaaaatatgcagattaagtttcaatttttcaaacattttataattcataaaaaaaaatgggatatgtctaatgttattcaacacatataaaatcaagtccaataatcaagttgagtccctacctctttaggatcgtcaaactttctctaaaagacatgctcctaagcccccgattcttaagttccaaatagcttagtcactcaaaagtcactttgtcctacaatcttcaactgaataaataattatatcattgtaatgtactcttcaaatcgagtccaacgacatatagcaaagctatatttgaaatttaaagttctgaaatctcagctaagcggtgcacaataacgatcggcggcggtagaaattggtataccagaaacatcaccaaaaataagagcagtatatatgaaaacgactcccttgatgagtagatcatggatgtacaactttttagcctaaacaaacaccgaaatcatcagaaaatgcttctaaagaggcgagtatattcaaatctcttcagaaaaagtaacgagctaggacaaatagcttagtgaagattgttctcctcgggatgttgattctaactgtaccaaacactcctcaaatgttcaatgaagttggcttcaatgttgatttgaagttttgacgaaaaaaatttagagcttacgtacgagcacatcttagctccgattgccaccaaactttgggtgtgagttctagtgcattttgaaaatggtggctcggagggtggtagatctaagcttgcagttggtagtgtttgtgtggtgtttttgaatagtaaaagtaaaagaagaagaaaagtgtcggggaagggggatgagcagaaatgaaaggtaaataattaatcatgtgggtcccacccctattataatatagttttttttaccaggtcttacattctttttcccttaaaaaatttcatcccgaaattttaagatacgacctcaagctgaaaattaaataaataagatcttcgactccctaatttcttaatcggtcctatgatctctatggttttgccacaagatcatgactattggaatctctatgttccttagtacctttaacgctcttgtcaagatattgacagtttgttcttcatagctcacatcttcccgaaaatgggaaaccttagactcaatgccaagcgataggtatggagtgtactttctcaccataaacatgtggaacacgttataacatggtccaaccacgctggtaagtagcatcaataagtgacccccataatccctcaataacctcaaaatgtctaatttttacttggggctaacttatcatttactccaaatctcatcataccgtacatagagtaactttcaagaaaacataaacactaattttaaactcaacttattcgttaatagatatcgacacaacttttatgataactctgaacaacctaaaacctctcttcgattcctttaatcttctctgtgatactactgacaatttgaggtcccatagtgacatgataatccagtttagtctaacatagtgacgatctatatattctcccatataaggcctcataaggagccatgcctatactggcttggtagctaatactgtatgagaattcaaccaatgacaagtgttcccttctagctacatcaaaatccaaaatacaaggacaagaaatgtatctaaagtttgtatgatcatctcagattgtccagtaccagagaatgacaagtgggaagtacaacttagttcttaaaacttgttccaatgttttccaaaaccatgacttcaactaaggacctttattaaaaataatacttgaaagcactccatgtagttgaactgtattgtccacatgaagttgagtcagcatggtaagcttgtaatcctttctgattggaataaaatgagcaaacttattcaaacgatcagtaaacacccaaaaggtgtcattcttcaagggtgtgaatggaaaccagttacgaagttcatagtgatcttatcccatttccactctagtataggtaaaggtagaaacaaacctggagatctttagtgctcaaccataacctgctgacaaaccatacccctagcaacaaagctagccatatcctgcttcatacctttccactagtattgcctcttcgagtcttggtgcatctttgcaccaccacgatgtacaataaacttggagctatgggcctcgatcataataaactgtctaacatcactgatatttacaataaccaatcctctctagtagttagggatgcacatggggacggggtggtgcagggaatgtagtccccgtccccctccccgccttttattatttgccccgtccccgccccgtccccgattattctctgacgggtaatagggcggggaatccccgtcggtaatagagacaataacggggacccgtttatctaaaaatacaaaatttctagtattgataattttaagaatatttgcaaacatcaaagttaaacaagtaaccacataaaaattcttcattccataatctataatcatgcacaccacttgcaactacaacaaagacactacttacaattgcagagaagaatatagcgtagaagtgtgggattgattaggacataggatagaaagaactagagaaaatatatatgagatgagagaatctttatagagttccagcttcttcatatttatggagaaaatgctattcaagtatttcttgtattcaaatactgggtggctactggctattaaaattctaaaacagttaacatatgtgtagcacaagaatttataaattataattttacatatatttagtttcttatatgtatatgagttaattaagggcattaactaaattttaggaaaataagcctaattgttagtaattgatacatatatacgttattaaatttcatcattaattaaaatataaaacctaatcaccctaattaatatatatagaatcataataattattatttatcaatactatatatgtatactcggggcttaattggggcggggagtaccacacccgactctgccccgccctcgatccgggaaatgaaaatcaaccccgtaccggccccgctcgccgccaagtcgaagattccccgtcccattaggggcggatccccgcgggtccccatccccatggagcttttgtgcatccctacttgtagtataagtaccatttatcatcaattgtctatccatctaaatgttcaccatcatggattcaattccaaataagtcttaattattctgcttaccactgatgttacttaacttgttaaagcgacactagtgtagccactacactatagagggacaatctatcccttcttctttatatgattacaaatcataataccagtcttcaagagccaaatataccacggta

SEQ ID NO: 21575 - DNA, 5654 bp, Cannabis sativa
aaatgtatgaaatttttattcactataatgtaattaagtactataatgtacataaagttataaatttctctctatatatgctggtttatgcaaaatttattatcatgcattagtatgtgtatacatgattgttaggttaactactcttttaaccctgaatcaataaatgcacattttattgatattaggttgatttagttcataaaagttggtattattataaaattaaaactcatgtgtccatgagtccaatttaaccaaaaactaatccaacatatatagcccaataaccctcgattcaaaaccaaacccttcgacatagctcttcttcggttcctagggtttgaaccacttcgagaaaccctttggaagaacacttctgctagggttagagattcacacacaaatcacaaagaaaaaagaatgaaatcaaaatcacaaagagattagagttagagaaattcaacgaatatgaaaaacaccataattttctcaaagttcacccctaaaaatatgggctacatccttatcgagcttgccactgagaaagtcaattttccactatcaaatcaagtatggttacatatatcttcctttgatttcgagtcgcatttgctttagtgataatcaatggtacaaaatttgaatctttttcttttttttccttttacaatgaattcagtcaaactttcttttatttttctttcaaaacaaacatgaatggagcttaactcttgcactcgtctctttctctttctctatctctctcactcactatgcatcttctctctttagctttggtataaaattctagctttgatctagtttaaataggtattttagggtcggttggagaagtctttgaatattcggtgagctggaaattagttgtaaatgattctgtttgaaaaattaaggtctttattttttttctcatgtagtcttgagcccaggtgtaatcccttgtaattgatttgaatgtaatgcttgagctcaataagaaaatttattcttacaaattctacctaaattatcttattgagcgatgataacaaatgtaatctcggtgggtcttagctcattgaccatttaaggtcatccaccatttccaatcactagcaggttccagcaatttttgaacttttctatgggtaccacatagttcccatgtctggagggttgtcctctgtgggaaccatttccatagacacttctccttgtgtcactttttctcagatgaagtggtacttaatctccagatgttttgtcctgtcatggaagacttgaattctgtataggtggatacaactatgattatcagagtatattataggattttcccctaggatatttagttttttaggactcctttaactcatactacttctttgataacttctatagctcaaatatattcagcttttgtagtagatagtgcaactggaccttccagcttacataatttccacatattcaaaagaaataggaagatgtagatcttttggtgtccctatttccaacataattaaaattcatagtatccttctatcttagttggttcttgtgccttcttatagtttagtcctatttttgtagttccaagcaggtacttgaatatcaaattaattgctaactagtgaagctttcctggattagccatgtacttacttaggacactcatagcataggctaagtcaggcctagtattcaccattaggtacattatagatccaacaacatttgaattagattcttgcttatactccatttctttagcagtagcaggacaaaccttcttagaaatttgacaatgacttattataagcttattaatcttcttagcatcctccattaaaaaattcttaataagttttaccacatagtccttttgacataatctcagtgttcctttgttccaattttatttataaaaattcgtaggatcttagttgcaataccgaggtctttcatttcatatttggaacattttatttctgagcagaagagcagtttttattttcaagtagtgtttgatcgattacgtattaatcaatattcagttgattggtctgaagttattgacaaaaaagatttgtctaagacttcctttctttttgtccaagttacttcttgttttttttttttttgtccaagtttcttctctttttgtctaactcactttctttttttctttatgagtttcaggaatatccccatttataggtcattttgtgctgagtagtcctttaaccaggtttaccttagctctttccgtttctgattgtcaacatgtcttctacatgagtagcaagtaaaatgacatcattgatgttgtttctttgaaaatacaggcatgtgtcaaagtaacttcttttaaactcctttttagtcataaatccatcaaacctcttattctactgcttaggagtctgctttagtccatacagtgacttaactagcttgtacactagatcttcctttcctttaacctcaaaatctttaggccatatggatgtcttcttcaagttcaccatgtagaaaagttgtagttacttccatttggtctatttccatgtaatgttaagttggaagagctagctaatattagtcttattgtcttatacttgactactggggagaatatttctatgtagtcatttccttccttctgagcaaaccctttggccagtaaccttgccttaaatcttactggttctcctttagttctaccttctttatgtccaaatagccacttgcaagatactgtgctctttcctttaggccttttcactagtatccaggtcttgttcttactagagaccctatttcattatcaatggcatttacccatttctttgaatctttattatttatggcttcctcataggtctcatgttctagcttagctatttctatagcacgtaggaaaatataggcagtattgtcatcccaaatgttgtagctgtacttcaggtttggtcaaggttccctactttccctatctcttgctaacttgtagttggtgagatcttcaaattctgtttcctcctaactctcttgagtttccacttgaactgtgtctatctcatctcttatttgttctacctgaacaatatactggttatttctagcatcatctttatgttatgtttgttgagtagtttttggttctccaaaacctgggtcaaagctaactgtgctacctgcattgttagttttgtctacattttttgaaatagttgggttgttagtaatacaagacaaaatattttcattaaaaataacatccctattgtttatagtttttaaaccatgtttttcttttggccatagtttatatcctttggtaccttctggtatccaaggaatacacattttagagctcttggctctaatttcccaacactctaatgtgcatatgcagcacatcccaaatcctttaggtgagataaatgaggtggtttaccagtccacctttcgtctagagtcttaatttccactgcactttctggacatatatttattaagtaaacaatagttagaattgtctcaccccaaaaacctgtagcaagtccatctttgaagcatcatgcatctagtcttatttaggatggctctgttcattcttttagatacactatttcactaaggtgttagtcttactgttctgtgtttttggatacctgtctttcgaatatgtgtcaaacatatcattgccaaaatctaggccattgtcagtctttaagattttgactcttttgttagtcagattttcaatcaaaattttacaatcctagaatttatgaaatgcatcatttctgtgtcttaatagaaaaatctagaccttcctagaataatcatcaataatagacataaagtatctacatccccatgagtagctatcttttttggtccctataaatctgaatggatgtattcaagtatgtctttggatttatgggttccaaccttaaattttaatatgtaatgcttaccaagtatgttgtgctcacaaaaatttttaatcattgcatattagtttctaatcactcataattttcaaacctctttcacttatgtaccctaagttttcgtgccatactataactttagtgtcctctggtgtagtagagattgagttgttacagctggtaattgcttctcctttgaggtagtacgatccaccttccttgtgtcccttcattattgtcatatctcccatactgagcttcatagtacttgcctcaatcttactcacaacaccaatgtcatatagaacactaataaaaattaaatttcttgctaagttacgcacaaatattgcccatcgagatttcttaccacaccatcaaacatgttaaagtttactattctagagccttcaatgtgacatgtttgattatttccaagtatcacatttcctctactaaattccttgtaatcaataagaagagatttgttattagtcatattgaaagtacatccaaaatctaatatccattcattattgaattttgaagcaacaacgtagacttctccactgtcatagccatcattcaggttggattcttggttgttatgcttaggttttgataagtgactttctccctaattagattatgagtcctatttatcatgcttgtttttgttcccctttcattaataacaatcccttctgaagtggccatacgtgccataatgataacaaccattaggatctttaggacctcttgattgggatctgcatctttcattcccatgtcttctatttggacctttgctatggcttttcctctattattccaaagtttcttgtgatgtgaccttccatggctcaaatttaattcatcatttgagttttctcctttctcattttatctcaaggtctaacgattttaaggatggtatgacttcttccaaagtaatataagttcttacatattttatagcagtctccacttctctgaaagattctgacaaagaatttaagataattatagcctggttttcatcacttagtgcctcattctctcaagaattagctagctcaatgtgcattcttaaaaattcaccaagattttaatctagtctttgagtgactcatcttgtagccaaagattcttccctttagaaatattttgcttgtaagagacttctattggaatttctcttccaatttcttctaaatcattgctagagtctcttccttgtctaacaatttgattattgcatcaagtaggttaaaggttaagatccctattgtagtttcaaggtactcttctttctatatcttagaagtaccctctggcaattcaattagttcttcaagaaccctcaaaagcttttattgtcacaacaatgatcatatcttccttctccaaatcctgtaattacttgaaccattaaattaatctatatcaatattgatgatactcaatttattgtaaccagtacataaatctaaaatagaaatgctagagctagggttaggagttttaagtggatttttaggtggatcttcataggagcatccacaagtccttcagtgctaaggacttgttcttgaagatcttgctccctctgttctttgggacctcctgttgggttttgtgtcctaaataaaacccattgcaatctgattagttatcaattta

SEQ ID NO: 21576 - DNA, 3275 bp, Cannabis sativa
gactatcactaagacaaagataaatatataagtactacttacttcaagttttgattatattataaaagaagtgtagtcatgatcattaaactaatcttaactctctgttaggagagttgaattaccttgacattgttattcaaagaatgaacattagcactaaacacttaaattggaaacaaagagagaaaggtagaagaaagaattacaaagatggagagaaagagttgaattgtattgaatgagaacggttagtacagtacttgtacaaggaagctgaaagcaactgattaagatcagttataaccaaaaagacaacaaactaactgaaatgaacaagaagctagtcaactaacataacggtctaactgaattaactaactgttacaacaaacaacccttaacactcccccgcaaactcagcattggaaacatcaacaatagtgagtttggatcgaaaaaaagagaggttttgactggaaagagctttagtgaggtcatctgctagttgatctactactagaatatgtttgacagcaaattgttgagtctaaaccttttcccagacaaagtacgaatccaattcgatgtgtttagtgctggcgtgaagaacatgatttgcagtgagaaaaactgtgctgagattatcacaccaaactgttgaaagttggggcagctgtaagtggagctcaaaaatagagatttaagccaagcaagttcagcaaccacattggcaagacttctgtacttgatctagaaatggtttgctatttttgtgacttgcaggcaatgagattgaagccaaaaaaaaaatggcaaaacatgaagtgggctttctttcatcaacatcagaggcctaatcagcatcataataggcctttatttcaaagtgtttggtgagatgaagaccatattgagtggtgccagccacatatctaagaattctcttgacagcaagccagtgatgttgtaatggtttttacatgaattgaaaaactttattgacactatatgatagttcaggtctggttatggtgaggtactgtagagcttcaactattgacctgcacatttgtggattgggaaacacatcactaccataggcagacagtttttagccattgatcatgggtgtagaaatcagtttggcatcatgcatatcagctctggagaggagatccttagcatacttagtttgagatagaagtaggcccttgttggtttttgtaacttcaatttcaaggaagtactttagttcatcaaggtcttttaaggagaaagtattgtgaagtgaagtaatgagagaagcaactgttctagggtcacttccagtgaccaaaatgtcatcaacatacaccagaacaagtgtaatggatgatgcattgtgtagaatgaacagagaatgatcaaactttgatgaagtgaatcccagggacaagagacaatgatgcagtctttcaaaccaagctcttgaagcttgtttcaacccatagagagccttgtgtaacttgaaaactaagttgggttgggttgttatcacaaaaccaaggggttgtgtcatgtagacctcctcttgtaataccccattaagaaaggcatttttaacatccaactgtctgatgtttcatcctctagaaatagctaaagtgatgacaattctgattgtaacaggtttaacaatagggctgaatgtttcagtgtaatcaaagctaggttgttggtggaatgccttgacaaccagtctggctttgtacctgttaacagagccatcaggattttctttgactctgagaatccatttctagccaatgggttctcttccttcaggtagaggaacaacagtgtatgttttgtttctgataagagctaagatttcttcagacatggcttgcctccatttttcatattgtatggcagacttgaactttttggtatcttctcagtcaaataaagttttggtttatgtatccctacttcagccctggtggtcattttgtgtgtgtttgttggtggttcaagattggtaaccgtaggaggaatggggttgaaaacaggtgggataacagatgactcaatggtgacagaagcaactggttaataaggaggtatagactgagtgtgagtgttgttagatggaatagtgggtggttcgatgaggtcagatgtaggctgaggtgtgataatgggatgctcattttgaggaacaggtataggaggctgaccagaagtcaactgagttggtgggacagagttggtgatagtgtctggtgtgaggtgattattggttgtaggtctgagtgagtttgtggagttgtacatattgtcatgacttgcagtaggtattagtgcagatggtagagattcaactggtggatcagatgagagatttgaaattttggtttaaggaaaaacatactcatcaaacttgacatcactagaaatgtagattctgccagttgaatctagacacttgaagcctttatgattgatgttgtagccaataaatgtgcatgaggaggatctaaattggagcttgtgtttattgtatggtgtaatgttggggaagcattgacatccaaatgctttaaagctattgcagtcaggttgtatgttgaacaacatttctatgggagatttgtggtttaacactgaagtaggtaacctgttgtgtatgtacagagcagtcctaaaagcctcatcccaaaattttaaaggcatagaggcttgaggtaggagggttagaccatttttaactatatgtctatgtttcctttcagctaggccattttgttcatgggttgtgggacatggatgcctatgcactatgccaaactaattgagataaggggtgaaagatctatattctcctccccactcactttgtagaacttttatcttttttgctagttgaagctcagctttagctttgaaaagttgaaaggtttttaaggcatcttatttgtttttgaggagttagatccatgtgaacctagtgtaggcatctaggaaatgaatgtagtatttgtaaccattagtggaggtaatgtgagagggaccccacagatctatgacaacaagttgtaaaggttctgtgtacacagttttagataatttgggaaagggtagtttatgaatttttcctagacaacaagcattgcatggagaaaattgaactttattgctaacaataatattacaagagtttattacatcttttacaattttctcactaggatggcctgttgggttttgtgccctaaataaaactcatttta

SEQ ID NO: 21577 - DNA, 3189 bp, Cannabis sativa
  modified_base (45)..(47): a, c, t, g, unknown or other
tctgatctttattagtaaatatgattatattgaaatgggttttannnagggcacaaaacccaacatctgcaacctctacaacttcccttgccacctttatggagtcattaatgtgttagtggtaagtggtgtggaaccagtggaaagttctggcaactatgaaggccctaagcctttcaaattctcaggttttcttatccttcagcaaaattttctcatagttagcaagtttcctctgccaatccttctccaccaatagatccatctccaacttgtgaattttttccctctgaatctcagatttagcctcaaattccttgagatttgcattggtatcccttagcctaatgttcataccattgacctcaatctacgcatcattgtgatcgttgacctcttcaattttcttggacagagattccactttgggcttagcagcagacaactcagtctgtaactgttgggtttttttttcttatgggattcactgcccttgttaacaaagtggttatacttagcctcggtcatccaattagcctcttcaatggccctcttttggaagtccttggcttgaattttgatctcctccactttggaagccagtgtccttttgtcaccctgaagttgatcaagctcaatagccatggagttaacctcctggaaagtccactctacaaatagggccatctggtatactgagataaagaaaagttaatatggagaaaactgcaaaaggaatgcaataagtcaaatttgcaagacttattgttgtagcttgttatttggaggcgtgttctaacatgacaagatcagtgctgctactaactgcccatttttctactcacaactcgcatatgttgttggcagtcagatctattatgtctctagcaaagggagccacatcaccctcaaccataagagccaagaatctagacatggtcagtcaatccatgatgggattggggctcatccctttgtcactatctgttatttgtgccttcctttaggcatgcaagattcttgatgtctttcgggcgacggacacagatcacaatgtctcttgaggtaaaggtcgacctctactaccttcttaaagacctcagactcaactgctttagggcacaaatgccagttgaaagtaaaagaagggatggctagaagggtagtggttgtggctattgttgatgctgctattgttggagttattgctgttattggtgttattgttgttagatgttgctattattgttgttgttgctactgctgctacggttggctaggagcatggatagttatggccttgcttgaacctccctagcagggatcttgacctgcctcaaatctccctcacctttgggagacttataccttgcatctgctagcttagcctttttttgcctctctatcagaattatatgggggtcgggacgctttagataccgagcgacttttccaaggaagaggtagccttccccactttcatctagaaggatgatagcctccatgccaccttgggaaggttcagggacagagctcccaaaaaaaaccctgtcaaatgcgagtagaagttgtaggaggggctgaacttccataatttttccaatgactgggagcccctagtttgcagaagtcttctgaacacccgcagatgttttctcaagactcacgaagccttctttagcacaaggagaagttagagtggcaactgagggagtaacactttaagcttttgatttagaggccctcttttccttgctctttcctttgcctttagctactctagaaagcatcttagctctagtattggccttgatcttagtaatgttcttaccaatgttgcccgtaagttcattctgcaatcccattttaggtgtttttgagttctctgcaaaacaaaggagagtgttaaaaataaatgcatgtcaaaagtgtttctgacttatagctagttagaaacataaacaaagcttagaaatgaaggcaaccatcaactgttctacaacatgggttccctcgatgaaacaaggttatatcctcccggttcaggggactaccatgttcttcaaagtttcagaagctacatccaaatgacaaataggataccgggagtagcctcccccaaatctgcttacacaggtcccttccggactcatcaccaacaaggttactctcacaaagcaacctactatgttaacaaatcgagaacctagacacacaacagtagcaaaaagcccaaattccccttttcacaaacaaagcaaaatgcatacatgtagcagagcaaaggggaactatttaagaaactatggcgaacgcaaaaatatttgacctaatcatctgaacaagaaaactccaaataagaggcgtacgtcttaacataaacggaagggaaagtacctcgacagagcccaagcttgaagacatactatccctaagttcatgcagataatttctagaagtaataaccttaattcctaaaattaaatcctacgcatgcatagcaatagatttcttcaaccacgaaactatatttcacaatcaagtctagaaaaatagtttaattagggggaaatacttacttgtaagatagattaagagaggagatgatggttgttcgttgtcatctagaattccatggactgtttggtgacaaggccttgcctagctcccgcagtagattaatcatttgggaaggtaatgaacgtcaaagaaacacagcggcagagtcgaggaagaaggggttaatctttaattcaaagaggtgagtaggggcgaaggtttctgggcaagcaggtcgtctaagagagttctctgggcaaaaagttgctgctaaagtggagaaggaaaagtgacttcaatagccaagactttcatttatatggatggcaacggttcacacatttttaaaatatggggtccagattgaattaattagagtctacgccatccaacggttggggatacaaaaggtttgcatttaatgcacctgaagaaaaagaataaagtatttactactcgtcattttgtggctgcatccctaatggactaaaagcctggcatcttttcaagcacagtcgtcacttgcttcacacgagaaatacgcttaaatttagagcgtgggcttcacaactccactaaacaagcaccatgctctagtaaattgacagcaatattgaagaacatgataac

SEQ ID NO: 21578 - DNA, 1356 bp, Cannabis sativa
gcagtacagttcacgtgtatctatggcgcgtaaaaagttgttttaattgtgcttttcttttttcttttaactcataagtataattggtttttttttttttaagaaaaaaattgtaattatattttatttattatatttaatttaatgtttagaacatgtttggtcaattagagggtgttgcatctctaataatagattagggggaacacactacttctactagtactagtattacgattacatttacatgattagtagttagataaatattactacaaagtgtggttaaaagacacaaatatttattttaatttaataaatataatatacataaaagacacaaagtgatggaactgggcattactaatatttgatataaaattcaaaagaataagaaaatgatgttaaaaggaaaatgggtacactaatataaaatgtaaagaccctgtttgtagaactggaaaaaaaaagggtaaatttattagaagtcattttgcttcatttttattaatatacctttcttcattatggtaagttactttatagctatttgactatgtgttcattctttaagggggaaaaaatcaaatagctcagctacgtattgatgcagcccttacttgatgataatgatgatataccaagtactaattaagagtcataaatataatatccgcacaattgataaatataattatgattgaatcttcatgattgataccgacaaaattcaaattaaatttcctataatattgtacaaacacaatttttttaaaaaataaaaaaaaaaataatgtgcttatatactttaaatacttacttttagtttaatatagacaattgcagttatgaagcagcactgtgatcaattagtttagcaaatatcgatagggttaactaaattgataattttgtgcttatattattaaggaaattaattcaatatactaaacaaaagagtcgacacacaaaaaaaaaaaaaaaatagtgtttcggttttctttttttaattattattattttgttagaaaaaaattgactgaaaaatacgtacacatttggatttaagcggaattattagttgtagtaaatttgcatatatatatatatattttatattttataactgtatcctatacatataaattatcagcattgtttgtgtatgtcagtgtacatatctatatgtataagattgtccaaaaataaatgagataattgatcaagttaggttgagatgtggaatggattgaattaaaaccaaatttttattactataaatacaatttattctcaacttccaccgtattggtttaaacatatataactacctagctaccgtataattatatgctg

SEQ ID NO: 21579 - DNA, 2520 bp, Cannabis sativa
tgtaaaaattaaggtaacttgtatgtagtagtttcctattttgtatttggtaattttccatttaatctctaactttatatataaatatatactattttatgaaatacaacacacaattcaattcactattctctacaaaaactaaagttttcaaatagaaatagttcggcttcaaatgcttcacatggtcattggaggtactaactttcccatttataataaaattgaatataaacttcccattttaaaagaaattgacctccatatttaaattagggatagatatatttttgaaattaaaaactctaatcaatctctacaataaactgaaatatcaaccatggcacctataacaatgacataaaacactttttgttgtcgcaataacacacctatcgtcgtctttatgggtcaaaaagaatagtgtgaatgttcccgcgattcgtgagatcgttgaacaaatattttatctaacaacaattttgaaagtcatctctgttgaacaagtatttaattttttaaaaatatttatttgttgaaatgatatattgtgagataattttttaacattgatatataaattttaagttacttattcaattttgataatgaaatcagtgtataagtttttaatatgtttttgccttaattttttactaacgcaaataagaaatttgcgtcagttagaagataacaaaaaccagagattgtttgcgcagttcctaatcgatgcaagccactcgtttgtatcatcacctaacccacataaacattttcgaaatttgaattacgtaagttcgcgtcaattgacaaaatattttataagaattttaaaacaacgcaaataacatgttttgtaatctacattatgtactattgggacgagattatagtaacaacattttagttacaacataatcattgttccatgaccatgatctaccaagccttttgtaatattaaataaatattatttgtgattttacatatataaacaaaaatgttttctaaaaaaattttaataaaactatataaaatataaatgcactacaaattaaaatataaaaaataatgttaacaatgtgattaaaaaaattgtattaactaataaaaatttcaaacaaagaaatccagaaacataggattttcttacacatggttttgccgcatataatatcataataaaagttttgaaaaatatttcatagaactaggtaatgtatcattttaaccaaattacaatatgaggagcagaggaagaaacaaatgaacagatttagattatcatatacagccaattttagttacaaaattaatctcaacttcgcaaatatcttcttctgagattgagcttcacagccagcaacttcccaagaaaggattctggctaaaatcttatgattatttctttatggaatttcaaccacaagtaaacctcgtgtaacgtggatcaggaaccacacataagcctgcctaatgaccattctttcccttggaggaaaagaatctgctgaatccgcgagaatgtttctccggggttgccgaagaagatgaagtcgaggaacctgacttgggggatttgtgtactgcattctttgaattgactggtgacttcaagatgtttgtgtctgagtgggatgggctacacggagagttatacacatcaatgggagactcggctcccactctgttaagagtggcagaaacagcagtttctgactcagcttgatcacactccagcaagctcaggccactagtagtaggttcttcttcaccttcacctttttgactcctttcactgtatggagatcccgtgaactctggttgaggacgcatatttttcaactgcttaccgagaagaaatatggtttcttgacactcagctagcttttctgctgcagctgccaactctttttcctgtgaaagacaagttcatgaaatacattttagctttaaaatgattttcttttgtcacgtacatacgaagaggacatagatgttaagtaataagtagtgctattatatgttatttcaactttgagaatgaatgacggcaaataaatcatcacctggcttttgtcgacttcattatcaccgctgctctccttcctgaaaagattaaaaaggaaaatctaaataacttagaaacagagaattcagattaatcaatatctaagttttctttaattaagacttgaaagaattttatatctctttgatcacttgaactgacctttgtaactgctcttgaagctctttacatcttgccaaagcatcctgatgattcttcttttcatcttgaagctcagtttccatactctccgtcttgacccggagcaggttcagctcagtttccaattcttgggccttggtttcaagtgaccggtatgattccgccatgcacttcaactgtgtctcagacaagctatttgagttctgcacagaagccaattgtgatttagcatctgaaagaagctgctcggtttcctgcaactgagacttagtcatctccagattttc

SEQ ID NO: 21580 - DNA, 1568 bp, Cannabis sativa
accgcgtgctgggtcttcccgaggttagccgaagctcgagcagtccctgtcataacccctctcgaacgtcgagaagagataggagaagatctctgcaagccaaatgcacggtcgcctgaggtcgccggcaacgataacacaggcccaccatggtttcttccagccgaggatactgagcttcgagtgataccagatgaagggccagagaaaactgtcaggtaggaggattgaaaggagagccaagggccaaacatagggaaagggatcccgtcaatgttcgcaaccgtcaccggcgacgagagagtacagcccctgcgttggtgccccaaacgtccacagaaataacgaaaaatgccaatcttttcatatttcatctgcacccatttcttcaccccagaagctaagtcaaagaaacaacccgaaaacaggggtttatcgacctcaacatccacctcaaccttgagaaacttgttccatgaagccggcctgtcttcctccaattcgacttggaccaccttaccagccaacccccccagcagcctaccattagccttggaaaaatattcatggggaagattgtgaatttgtaaccaaacacgcaggaacttgaagtcaatcggaccattactggacggagtccaggcttgaagaattagggtgtacccacgaacacaccatggtccattatcgagggcccaattcctatgatcagaacactcaaaacaaaacttaaaaacattggaagtcttcccttcatccacgagcgccacaacagacactggtattttccagcatttggccacaaaatcagtcacatttaattcctccaccaccatgggagcaacaactttcccaaacaaacagcacgaggccagagccttaagagaactatcagaaggagttaggttgacagaggtttcaaggcaagaaaagcatttgcctttaagaggggaggatggaataatgattgacgccataaatatctaataaaggagaccaaataaaagcttttgacactcaagacaaacttaccaacctgaatcttaccaaccacacaaaccaccaactcgagaatggataaaaaaatacaaatgggtagagaaggttaacaaggcactaaacagagaacacacattcaaatacaggagaaacaacacaaacccaatgaaaaaggcactacagaaaggcagctaacacacacagaacagaatagaacgacacaaagaaaaaaggaagagagtaaatgaaaccagggatcgacactttggatacacgaaatgaatgggatacagaaacacacactagagagacagtagaagaccatctctcccctattattaatatttttatttatatcatgctagtaattagtgttttatagttttgaattttagtattatttagtatattttttcttaatattgttaaagacagacttttagctcccctttaatatatgtatattttgtttataccgttttacctttgcatatttattgttaccctttcttaacatgacaaagctcccccttaatcatatactcaataaacttgttaatacttgaaaa

SEQ ID NO: 21581 - DNA, 1214 bp, Cannabis sativa
ctaattgtatattttggtgtagtgtaaccctgattagaatgtgagaacaaaatatctaagaaagacaaatatgcatttgcaatatcatgcactaatcagagacaaacaaataacaccttaatccttatttattaatcacaatttttatttatattccattccattctatttatcattgattttaaatattgttaaaactaaaaattttcgttataattgccaatatatatttattaaaacaattattacatagaaaatataaattaatattttatttataaaaatattttcataaagtgtggacaatatttatacattttatgtaattttaattaccaaaatacttcttacactatcatttacacaatggctccagggtaattgttgtgtggtacttgtgcgatagttgcattagacgaagattttaatcagacaataattattggatagtttaccgaaggttgcatcagacgaatgtttcaaccagacgaaataacaattagtaaaatatgtatgcaagtgtaattaatgcaacttttatgaatattaaaaaatagaacagtgttcccacgtacgtaactctagctacatgtctttctataatttaatatgaaaaaattcaccattagaaatttaaaaaataacgaaaatacacaggataaatattttatcatagtattgatataattttttgcggattatacttgagttggattgtttgggaactccagttcaactttttgagatctgcctttcatggatttaaaaattaaaatcaggaaattagttttatgcaaattaaactagatttccgattaaattttagtttagtagtagtttatctacaatttttttttcatgaatttgaaacagtctctgttttgattgattccgatcgtcttcttagttgaagtcgctgaaattaatgatagttctctttctagttgaattttcgtttcggttgcgttaggttgctgcgtggttgtgcgatagttgcccaagaagcatgaatcacatgttgaaagtgtgtataagtggtatttgtataatttttttatttgaactgtaaatttatttacttagccaattaaaagtatttttgtaatattgttattattttttttttttgttaaaacggaacaaaaaaaataaactctttattaaaagaagaaactaacaactaaaccttcccgccgtaagtaatggaattacta

SEQ ID NO: 21582 - DNA, 1227 bp, Cannabis sativa
gtaaaataaattccaacatgaatgacatcagcgatgctactaattggatggatctaagccatatggcaaagctctttaaaactggatcgggttttacttggaccaacaatcaagatggggacaagagaatctactcaaagattgatcatacccttgtgaatgaagactggacagacatctttccctcagctaaagctcactatagctgggagactatatctgatcattgcttatgtgttatctcgatggcttctaatgagaaaattgggcacaaaccgtttaggtactacaatttctgggcagatcatcctgaatttaaagctgtggtgcttgaagattggcataggccaatgaagagagagggaatgaatgctttgtacttaaagctcatgcatttgaaacacattatcaaaaggttcaacagagagaaaattggggatgttggaaagaggtatcatgaggccaaggagtattatagggagactagattgcaagctcaagaacatagtcatgacatgtcctaccagctggcagagaaagaggcagctatggagtttaattcccaagaaaagatgtatcatagctttctgagacaaaggagcaaggtcacttggttgtgtaaaggagatgagaacaatgcttatttccatgcttttcttaaaaaaaaaaaaaaaaaggaggatggaaaatagcattgttacttatacagatgagcaaggtgagatcatagatgactttaatgaagtggttaatcacttcattcaacatttctgagggtacatggggactagttctatcaccactcagaacctgagatctgattgtatggagctgggaaatagactcaacttggaacaacaattgagtttgataagacctttcacaagcaaggaaataaagaaggctttctttagtattcctgattcaaaatcccctgggccagatggatatggagctggttttttcaagactatgtggcctgaacttggagtggaattcactaaagcagttgaagacttctttaagacaggctttatgcctcgagaattacatgctaccatgatcactctcataccaaagacagaaacccttaccaaggctgtggatttcagacctatagcatgttgctcaaccgtgtacaagtgcatctcgaagttgttatgttctaggttttctcaagtgcttcctgtgctgattaattagaatcaaggagcgtttgttcaaggg

SEQ ID NO: 21583 - DNA, 1776 bp, Cannabis sativa
aaaatacagaatttatttcatcatttaacaaaatagaaagtctaattaataatttttacaaaacacaaattcaaaaaataatatttactctattttgaaaaagaaaaaaaatacttactctttcttaatttaatatgaaagaaacaaaaacacaaaaaatcttgattctcttgtcattattgcatattgtttggttccatgaatcaactttaatataaaatcaaaataagttttatagttttattacataatttttaggcccaagcccaactcaacccaatttacaaaccgaaacgaaacgattatagataatggcccatgaaaatcacacgtgtcaaattcttacaaaggtttcgacaaaaacagttatggcggcggttacaacagtacgactttcgccgccattttcagtgtcactcccaccaattctccgacgtactcaactccgaaaaatctacacctcaatccgtttcaccatggattctcagaccaaccaccccaaacgaattgtcgtatgcggcggcggagtcatcggagtatgcacagcttacttcctagccaaaaacggcgccgccgtaaccctcgtcgagaaatcttcaatcgccggcgccgcctcaggtaaagccggaggctttctcgccctcgactggtgtgacagcggacccgtctcttctctcgcccgagctagcttcaatctccaccgctcgctctccgaagaactcgatggccccaaatcgtacggatacagaaccctagacactctcagtctcacgatctccgaaaccctaaacgaaaatcctccctcctccggttctcgatcctccaaattaccgtcgtggatcgacgggagtacagctcggagcccaagaacaattgggacagtggaaaccacggctcaggttcatccccaactcttcgcgaggacattgattgcgaaaggggtggagagttacggcgttgagattgtgattgggaaggtagaacgagttgagttggaggaggaaggaggacgagttaactcggtggttcttgaaggtggaagagtgattgagtcgaacgccgtcgttttggcactcggaccatggagtgggaagtttgagcttttatcttgtttgtttagggtttctggtttgaaagctcatagcattgttttggagcctaaagagcctggtttgataactcctcatgctcttttcttaagctattatccttctaatggtggaaagccattggacccagaagtttatcctcgtccaacaggtaattttagattgtttgaatgtttgaattttcaatacagcatttgggtttgatttgatcaacatttttgaaaaagtggtaaagaaaaaattggtttttttggggagtatggtgggtgtttgagaaaatgcccaggagactagaattatgcaaagttaatatttaaagtgaaaactttcctgtacttacacaattggagagtgtaattggaacctttcaatcaccataattgaacggttagacaattattgttgaagttaattctctcatgaacattcattttatgtgttgcaacatgggaggacagcctgttattagaaaggctctgtaaagaacagactgttattgagagctttggtgtacttggggtttgggaaagtgagtgagatatagagagagagagggacaaagagaactgtaatgattataacttgttcttttctttaaatttcttaaatatggttgattgtttctgctgatatattgttaagtaacagattttacaacagttacatt

SEQ ID NO: 21584 - DNA, 2742 bp, Cannabis sativa
ttgctatattaatgattactattagcgttaaactatatatagttttcaataattactattaacgacaatttatgtatgtaataatagatgagactaataacattttgttaatggtaaatgtgttgatttcgtaggtgtttggtctgaatcgaagagttttgatgaatatgaagggatcggacctattccttcaaagtggcgtggaagttgccaaccagttgttacagataaagtccgttgtaataggttggtcctcgtcctcatcatcctattatttttatgtaattatattgttattatatattagtagtgtctaatactaccacatgttgaaatcttataaataatacatcaacgattttacataataattattaaattaaaatatatatctgataaatattacgtcgacaattttacattttcatattatgtcgttgacgattttacattttcatattatgtcacaacttatatttgaaaatcactaatttccattatattttctagaaagctaataggagcaaaatactttagcaaaggctatattgcactcatgaagactctcatcaacaacacttcttcgcttcaatcctttatgcgaaaggtgaactttttcactagtcgagatagggaagggcatggtacacacacactttctactgcagggggtagtttcgtccatggagcaaatatatttggaaatgggaatggcacagcaaaaggtggatccccaaaagctcgtgttgctgcttataagatcggtggttggctaaacgctgatgatatgcctaatgcgcctgcctacactgatgctgatgttatggcgggctttgatgctgcaataagtgacggtgtagacataatttcactctctctgggtagtgatacacctactgaatattttgatgatgtagtttcgatagggagttttcatgctattatgaaaaacattgttgtggttgcctcggctggaaatgaaggacctgatccaaagactgtaactagtgtatcaccatggactataacagtggcagctagcacacttgaccgcgagttttacaattatgtttctctaggaaacaaaaaacaccttaaggtacctaattatgctaattattgttccttgatcataataaattaactaacataatgaattgtaaattgtgtattaattgtatgtgtcagggagtaactctttcttcaggaggcttgccatcacaaaagttttatccattgatttatgggtaagtattaaaatgtcttgtaaaataaattttatgggtttaatatttattgagattgttaaagagttcaacattgatcatgcttgaaatgttaatatacgctacaaaaaaattgctacttttagtcacaacataaatttttatgactataaagtcacaacaaaaagttacttattactaaaatatagtatttagccatgtgactaatttagttttagtcacaacaaatattgtgactgaagatacatttagtcacaacaaattataattattgtgactaataattttagacaagaacattttaatcacaacacaatgagaatttataattagctacaatttttttaagatttttttgtaatgataccatagctagactactcatttatcatcgtgattttagttttgagataaaactttatacttataaccatatacctcatcttactctacttaccaaacctccatattatattctaccatgttaattaatgaaaatccatgcatactagtcacttgtagccagtctcacattatcatgtgagtttaatactgttgataatgcaataagctatttcacttctcactaattgattgagatgtagccttatacttactcttaccatattataactaacactattatactttttgaaacaaactttcacattatcctaacatattgtatgaagagctaaagaaaaatctaacgagtattcaaccataaatccaaaaccctaaccaaaatgtagagccgaaaaaagagtcgtgtattgacaaccttttgtagtcgcaacataaatttttagcagtaaatgtgatttttattcacataaaaaatgttaatattaacataatatttaaatacaagttatcactattttaattttagtcactacaaatattatgactaaaaatatatttagtcacaataaattgtgatttttgtgaataataattttagtcacgaacatttaagtcacaacataggaacgatgaattatataattagtcacaattttttttacttttaattataaattttattgtgactaaaaataaaattttttatagtgacgatacttagttctacattgtggtaacttactttctaatatgaataaaaatagttatgtaaaagtttttaaggtatatcatttagtatggttttgatagaaacaattacaaaaacattaatattgtaataataattgtatatatgttttgtctagtggattctgcaaccctaaaagtcttcaaccaaatattgcaaagggaaagattttggtttgtcttgttggagataatactacaacacttgaaaagggtcaccaagcttctcttgttggtgctgttggaatgattcttttcaatcatcccttaattgggaatgaagtcactcctgagtctcatgtgctcccaacatctcatctcaatgccattcaaggcaattttctagttgattacctcaacactacaaggtattttctaaaat

SEQ ID NO: 21585 - DNA, 6440 bp, Cannabis sativa
atatatatatatataacaatattataacaaaggaatccaagaacaaaagtacatatatatatggtatggttgtatatatagatttggaaatgagttctttgacaccaataatattactatttctcccatatgttcgaaaccaataccattagggttttttaggactactaccatttatttattaatttatttttaccaaagagggccagctccttgggagagaggcttcatttagaaaagaaacaaatttagaaacatataccttcctttttgaaaagaaagatacgatctactttactttcactgttctttcacatggtagaactatataaagtaatattaaataattattattatcatttatcttattaatttatttatttattatttgagtaaactagcagtatttgcttggaaatgctgccaaaaagtctcccttcttttgtggtgtttttcaccaaacccaaaacttggtttttgtttatatgtccatatttgttattatttttaaattatgtacgtggtcctagtgtagcttattatgaaagtcataataagtatatacgtatctccgttcgtgtttttattaattagatagtgtttcagtaaaaaaaaatgtaaaaaaatgaatttaaagattgaactgaattagggagaatacagattattatgatctatatatagctctagtaacaaattgagatgagtctactgctaattcagctccaacaacacactcaacaatctacagctaactctttacagcttaccaaagctaactaactaacacaataatacccccttatggtatatatctatcaatctaatattgtccttaagcattttgaactgtgttgagaacaaagctttgtcaataagtcggaaagttgatttttagttgaaacatgagttgcttggatcactccttttttgcaccttctctcagattagatgataatcaatctcgatatgttttgctttctcataaacaccacactggttgttatatgttctgcagttgtgttgtcacagtacatcattgtaggacacctttatactctatctttaattctttaagcaaagacatgatccaaactaactcacaagcaatattctctacttctgctgataaccttgacactgtgtgttgcttttttgctcttccataaaattagagaaaatactaagaaaaatgcaaaaccctgtgatggatctccttgtctcaatacaatttgtccaatcagagtctatataggcttttaactttaggtctgatgcaacaaacataaaaataccttgcctaggacatgattttatgtactacaggactttgtatgctacttgcaagtattttgtttgaggagaatttatgaattgattcagcttattattaaccgagtaagatatgttaggtttagtgatggttaagtattgtaacttaccaatcacttttctgtatgaggttgaatatgtataagtgtctttctcaccttgacactgttttaatttccccccataagtgagttgacaggcttacatcccaattagctaagatcttcaagtacttggagagcataaggtctttgtgacacaaagatccctttcttcgatctgactatctcaaggccaaaaaattatttcaagtccaagactttttaatttaaaatgagtgtttagtctagccttgagagcttctaatagagacaagtcaatactggccaaaatgacatcatctacatagactagcaagatgataaaactcatcttgaaatgtttcataaacatggaatagtcagttgctaactaagtgaagccttcatctaacaaggcatgtgaaatgttttcaaactattgtctcgaggcttgttttagcccatagagagtttaagtgagaaaaataaatttaggggtaaaaaagtaattctaaaactataaaataaaaaaaagaactgatattgaggtgtggaaggtttgtaaagaaacacattgtttcatttaaagggaaccaaaactaaaataagagaggatctggagcaaaactcatgaaagtaaagaacaaacacttaacgggctctaaaagcgagaaaaagaaagtgaacaagagagcgaaatagtattaaaccatgtgggccaattagaacatgcataaaaaggaaagttaacgatcttgcatgcctataaatagaagatctcatcattcaaaaaagagacgaattctttctcacacaagactagtcaaaactttatgggaatacatccttaagaacactttgatcacgagaagcagatgacccaaacaaaattgagtaaattgagagaaattgtgcaaactgacagagactatattttgattagaccgaacctagtgtaaagaattcaaagtcatattataatttttttgtggagctaagtttcagcatcaacagttggcaccatctacgggaatctctagaacaaaaatctgaagttaaggatacaaactaagttgggttttaagaaggtgtcagagaagggaacaactccaagcaaaagagatatgtcgaatccaattattgatctggctactatattggcaatagaaatgaaagaaatgaattaaagaacgactacgtgagacaaaaataatgaatagaagagaagttctagtaagagcatcgtgcagccgaagagaaatgttagcaagattagcatgagaataggcaacatcaagaggatgttaaccgcattatgcagaagtttatggatgaaatggccaatatagggccaaaatgaacagaactcaaactcattacgatcttgggtatatgagtgggtctgaacctcagcatatttttgacaagttgcaaccagtagcaatatctcaaaactctgaaagagaaatgagaaatcagcttgcaccaacgtttaaagagaaagaagtgttagaagggcgagaaaggcaaccaaagcaagcaaaagctatggtttcgtgccagaatgagctaacgacgtaagcacagaacaaatattccaaaagtacctcaatcaagaaggaaggatgagcaagtaaggatagattgtggtctaacttcaacaaaagtagcacaaaaggcaccaatattcaccgcacagacgcaacctttgtgttttgaccgatctggagatgatatgtcacaaatgaaatgaaagagattatggcgaaaattgagaatgaaggatcgtggagctagatgattcaatagaattgaaatcatgagaaacgcgactaagtatccttttgctaagtggatcgtcgacgatcccaaactaaaagaatttaccataccaacttttgcattgttcaacaatgaggaatatctgttagaacttgtgctccaattttaacagaaaatggagttggagacaagtaatccaattcaagtgcaatgcattttctacaaccttaacatgataagctcagttatggttcaagcagataagagaatgatcaattggctcatttgaggagctcgcacaactcttcgtcacacaatacggtgaaaatgttaaaagtagaaaagaaaggaaatacctatatcaaacagtacaaaaagagggaaagcatcctcataaattcttacaaaggtttttgaatataatgtatcaagtgaggaaagtaaccacaaaagatgtgatagcctactttactacaaatgttctcaaaggctctttgctcaatgagcaaactcattttttccaaaaaatcaagatttattttatttataatatataataaaagggggtgactattttcttatgaactttcttaaaaatacttatattgattttgaatgttttgtttcattaatttcttagaaagtatttttgctctaaagtgttgatttatgtcctatgttctttagtgttttgttaatcttttatttttttggtatcataaaaagaatgaattgaaaaaaaaaaatacaaaaataagggggtaatattttcgtgtgttgctattttttattatttttcatttatttgtggtatcttttgtttatagaattttattttggagacatgtgttttaattgcaaaattattttttgattccttttatttttagaaataactagaggtgctttgtccccatggtggctcttctaaaggaagaatgttagtctctttttctttttggaaaagaatatcaaagatcattctcttttattttgtcctctgaatatgtattagaagaagaaaactgagactacaaaacaataatcaaaggatgaatttgatcgaagcaaggatttttcaacaaaaagaaccattcattgatgattctggttaagaaagtgaagttctagaagaggatattcctattacagattctgttcctgctgccattcaagagaaaagcaaaggtaaacgccccatgacacctcccaaatctgctcctcctcagaaaaataaaaggtcatctggtatctctcttgaaaactcttgaaggctcactttcattactatttctataatgataacaaaagagatatgaaatttatgagggtcaaaattttatttttgaaaataatgttaatgtgcttgctcataagccttttggagttatgaattttcttcaagaaagacaatgaatactttgattgggtttgatggctatattgattgagtggtgaaggagttttatgccaacatcacagatgaatatcttgatgaaaattccttcatgtttggtaaagtctttgtgcagggtcactggttatcgttcattatgaaggatgttgttgaagttctccaactaccaaccgaggtggaaccgactgagattgatttttatctccaagaagtgtttgctacactcacttaagacaaagatgtcaagctttctataaaaccatgcatatttctcaactcgcttatgaccatgttggacttatggggtttgcgttgccgaattggttcccttgctcaaatttattaaatgtttctaatgaactcgcctttcttttgttcaaaatattaacatgagcttgttttgatttaactgatattatttgtgatcaaattatgtcatttaaaaaagggacaaagtcggaactttatcttatttttcccaatttgatttataagatcttatctggccaaggaaaattaatccttgagaataaatccattgaaccaccatcttttggtcccactttcaaagtgctaaagaagcctcctcaaggtaagacatctaggaaaaaggctcgttcaacatctcttggtgctctatacgatacatttgctgcttctgcttccacttctacacctacaaaattggcagaaatcaaggtgcatttgggcagaatagagacctatcaaggtgtgcttcttagaaggataaacagaattatgaagtactttcatgttggagaaaatgactgagtggttcatttttatttttatttctttttgtcaatatttatttaactgttatgactctttttgatttttcattgtctttggctcatttgatagacaaaaagtgggagtagtatttattttgtattttttgttacaactctggaccttattttcaggggaagttgtttgtttgcagtttcttaaacttttttagtttaaaaagttattatgttttatgtgttagtgaactttcatgcaaggcagtatttttatactctttattttgtttctaagactttgtacaggttttttccatgtttgttttcttataaattttaatgtcattcaaagtgccgaagaggaagattgttaattctatttttggcatattataattgacagacatattttataatttattaatatatatattcagttgaattatatattactttccattacatgtttttatttgattgatttatttaaaatatatttagtgtttagcttttcttgtttgaaaaagtaaaataaatataatatgtttttgatgatgaaattaaatcattttagagccatctctttctagctgagattcatatgttattatgatcttatattgatattctagttgatttgattagattttgattggagaaaattaaaatgaaaattttcttttctataaaaggaaacttgcatttactactcgcgattcaaccggtgcaaaacaagaaattctgggctgattaaagatttttttgggaaagtttcttatatgagttgtggatgagcatagcccatgtatgtactgtctaatatgagtatattatctataaatagttatgttagtagctagggtttcttatcaattttttctctttatatttcattctatattttgtaagaaagagtatctttgttttgtagaggaaagtgtgttcaactctaccatattttgtgtcatgtctttgttattgttttgagtctataattaagtcaacaaagaagaaacaaaattgcaaacctttggaagaagattctttaagattttggga

SEQ ID NO: 21586 - DNA, 5350 bp, Cannabis sativa
attaattagcaaacaatatggtttatcttaatataattaattattacctctacaatagcaagctatataaataatataagctaaatcttacaatagcaagctacacactaaaagagaaacataatatattattaacaatatgataattcctgttatagatttcagtgtggaaaagttgaaacctggatctgaatcatggatttgggcttcgaaagaagttgtgtatggactggaagagtatggatgtgtggaaattatgtacgaaaagtttccaattgagcttcacaattctatatttgatgcagccaaacaagtattaaatcttcccgaaaaagcaaaaaaacagagagtgagtgataggcctggcccaaagagctatattgttgtaaacaataataataatgttgcagataatgatgatgatgatgatgatgaagctaaagatgttccacccttccaaaacatcgcaatagataatccaaccactctacaaggagctcaatctttcaccaacattatgtggcctcaaggaaatcataatttctggtaaatatatatatttttgttaacctttttaattattatttataataattttggatatatattttggacgtgttatgatttgatatatgatcgataaacagtgaaagtgtgatgtgtttctcaaaacggttagaagaaatatatgaaatagtgatgagaatggtgtttgagaagtatggtgtggatcaaggtgatcgattcgagtcgtttaagaattcaagttttcacctattacgaatggtgaaatacaaagttcgagaaaagggtgactctaacgttgcattgattgatcatagagacagtaccatcttatccattcttcatcaaaatcaaatcaacggtcttcaaatcaaaacgaaaaatggtcattggattcctgttctaaaacctaattccacttcatcttttatagtccttgcaggagaaggactcatggtaagtaactactacaactcgtaattcatttattattttggattctgtgttttgaaaaattatgttggtcaggcatggagcaatgacagagtgcgtggatgcgagcatcgtgtgatgttaaatgacttaatggaaaggaagaataaagagagatattcaattgcactatttacatttataaatggagtggttgatgttcctaaagagtttgtggacgatgaacatccattacgttataaaccatttgatcatttcgaattcaatcgttactatcatcatattgattcgcctgatcatccccaacaacccaataagagtcttaatcctcttattaggcgtactatcaagactttttgtggtatttgaagatcatgaacatcatcacacattattaattatcatgcttaattttatgatgatgatgatgatgatgactgatcatgctcaatgtttatatatatgtgtgtggtgcactaataaaaaatatatatgcattcatattttactttttgtcatttttgtatgtaactttgtatggagttgtgcttactccaaataagactcgcttaattaaattgaatgtgttaaagttttatgtgattatatttgttttttttacttttcttactacacatatataaatactacatgatcatgttaaaaaattacacactccaaatactaaattgcatataattgagaacattatgactcattgaatgatttatatagaattaaatcttagattcgtgtaataataataatttgtagtgcaaaaaagtcttgtcttttgacatgttggtgaaagttttttcaagtctctagtttgattcttttgtcgtgtgtttccatggcttcgagtagtcacgttggtttcgatttgaatgagcaatatgcacaaatcagtttggaagatgaggaagaaggagttttgattggaggggatgatgtgagtgaagaattgccgtttgatgataggtggtgtttggtagggaaatttctaacggggagggcagtggattttgatgcgatgagacatttgatggcctcgctttggcagccccgggaaaaggtgtgttcatcaaggagtggagttggatactaatcgctatctatctttttcaattctaccatgaattagatattcaatcagtcattgatgggagtccatggactttcaatagaagtcctcttgtttttcaccgattgcagaagggggaagatccaaaggctgttccgcttcataaacttgatttctgggttcagatacatgatctgaaaactggcttcatgctagagcgtgtggttcggagtgcgggcgagtatattggtaagtttgtcaaatccgatcccaagaactttaatggattttggcgagactatttacgggttcgcactacggttgatattgagaagccgctgaagaggcgaatgaaactctgtaaagaaaatggtgactggatttgggctaattttaagtatgaacatcttcctactttttgttttgtgtgtggaattattgggcactcggagaggctatgtccgaaacgattcgaatgccctattgagcagctatccaagccttatggcagcggcatgcgtgcccagatgaagaagaaaaattatttaataggggctcaatggcttcggactgggaatgagaatggtggagccgctgttggtggtggtggcgatcggttgtacaaggccggtgatgaagttaatgctcatcctaaaattatggaagttgatagtattgaccaaggaggcaatcgtgatcccttgattgtaggagataagaataaggagaagttaattatggaaagtgtggtgtgtgcacgtcaggttggtgggaatgaatctagccatgatgaggtggatgctgatgatagtattaatgaagaggatatgattattcttttagagaataaaaggaggcgtacagtgggtgaaggagtagttattggtggacatgtgaatatgactaatatggttgatggatcaattggtaataatggatcaaaaaacaagttacaggtgggccttggtgttcaggcccacccatcatcatgagccttttattttggaattgccatgggcttgggaacccatgggctcaacaattcttgaaggaccttgtggtccaaaagaagcccaattatttgttcttgtgtgaaactattgcaaagaaggaagtggtggaacgtttgagggtggcaattggttttgatggtgctcttgcggttgaggctcaagggagaagtggaggggtggccttgttgtggaaagtagaagaagaagttaaagtgctagaatatgggcggacgtatattgatgttgtggtgtgtgatagtgaccgtgggcattggcgtttgacggggttgtatggagagccaaacagaaatttaaggaaaaggacttgggatttgataagggagttgaaatgcaagtcgagcttaccttggtgcatcgttggtgatctcaataatgtgacttctaatgaagacaagaaaggtggaaatccctatccgagttggttgatcgatgggttcaatgatacgttgaccgaatgtggtttacatgatcttgacttgtgtggctatccttttacttgggagcgttgtcgtggtaagccggagtgggtggaggttcgtattgatcgtgctcttgttaaccaaccatggttagatttttttcctttagccaagctttataatttagaagtgtctacttccgatcacactcctttgcatttgatgttggctaatgatgtggttgttgctagaaataatttctttcggtttgaaaattcatggttgaaagagcctttattttttgagattgtgaagagtagttgggataatggggagtcggctggtattcttcaaaaaataaaaaactgtggcgatgagttatggcggtggggtaaggagtattctggtaacttccctaagcgaattaaagattgcaaattggaagttaaaaaatggaagagaggccgagatggggtgtccttggaaaactataattctgcttcggctaagttgaataatgtattacttcaacgggagatcttttggaagcaaaggagtaagcaactttggttgcgtgaaggggatagcaactcaaagtattttcatgctactgctactgcaagaagacgaagtaattccattcggaagctaaaggattcgactggcgtatgggtggattggcaagggagattgccttcggtcatggtggaatatttttctgaacttttttcatctactgccgtggttgatggggatgttttgcaatgtgttcctactgttgttactgccgatcaaaatagaaggctgcttgaaccagtttcggatgatgaagttaggcgtgctcttttccaaatgcatccagataaatctccgggacctgacggaatgacaccgggattctatcagaaatgttggagtacagttggtaatgatattacttctcttgttaagaatttctttttgcttggctctttcccaagagatttaaatcatactaatattgttcttattccaaaaaagaagcatccagagtctatggttgatctacgtcctatttccttgtgtaatgttctgtataagataatttctaaggttatggctaatagatttaaggaagtgttgccggttgtaatttctaataatcaaagtgcttttcttccggggcggttgatttctgataacataatggttgctttcgagattatgcactatttgaaaaggaaaagagtaggaaaggagggctacatggctatcaaacttgacatgagtaaagcgtatgatcgggttgaatggatttttattgaaaatatgttggaccgaatgggctttagtcaacactgggtgcaattgattatgttttgtgtgacttcagttacttataatgttactcatggtggacatttgatggggcctattactcctggcagaggattgagacaaggagacccactgtctccttacttgtttttagtttgtgctgaggggctctctttgttattacggcattatgaacgacaacattggttgactggttgtcgtgtggctcgtggtgctcctatggtgtctcatatgcttttcgcggatgatagctatgttttttgtaaagcaaatgagaatgaagctcaacatgtattacggttgttgcatagttatgaagttgcctcgggtcagcaagttaactttgcaaagtcatctgtttttttcagtaagaatgttcatggggctatgcgtgaccgtgtgtgtgggcttatgaggtttaatgaggctgctgatgatagtttttatttgggtcttccttgcataatggggagaaacaaaaatgccattcttggttt

SEQ ID NO: 21587 - DNA, 4596 bp, Cannabis sativa
ggcattttaaaaaatattgaatattggatttggattatttagttttatattttagttaactcaatcaattattagaaaaaaaatgaattgagcataatagtgtttggtgtattaaattgagcattatagtgttgatgatctcttaatttaaatggctaatggcatggtccccaatccatggttgttgtcgagtcaatatttataggatctgtttggcatgtagaaattggattaaattaaattaaataattttactagttcagtgtttggcaataataaagaactggataattaatctagctaattctatatatgtgagattatttatctcaagtactgtgggataaataatcactcctggtaggatttttttttttaattttgtaaataaattttatatttaaaaagaatttaaagtgaagaataaaaaatttatttacagatttaccatcaaaattttatttatcaaaattagtgtaaacatataatattgagttatcatagatagtctattaaaattttaaaatgatattaattaaaaaataaatatttgcatctaagaaatatattatagtactttataggacatttctttaataatactcctcaaaatataaattttaacgtagttcttccatcttattttatttaattttatcgtgaaaggagtaacgcggtagatagtagttgataaataaatataaattaagtacattttatcatttttattactttaataattaagactaaaaatacaaatttaaattattataaaaaagaaaaactcttttattctattatttatttacgtaaaaagtatttaatttgtaattatttatcaattatcatccacctttcactcatttcacaataaaattgaataaaatgtgatgaaaggactatgttattgtaaagaaaatattttgaagggcattattaacgagttatatactgtagggggcacaacttagtagtgtaaaaagtttaaagggtaaaaatattaattattcttggagttaataacattttggactatgtattttgcaaacattaccaattggacaatctgttgtataaaatgagaaattaaaccctatattttctaaactgatacatttcgataattttattttttaagtataattttttatttttctagcacaaataaatagagaaaatgtacttaattttatcataacaactctagatcgggttattaacttttattttgacaaaaaatcagttcaatgtatttttttgaactatttttaaaaaatacagaattcaattttttattaaataaaataaaaagttcaattaataacttttacaaaaatatacaatttaaaatattatttacaattattttttattattttagtgtaagtatatattatttttaaagacagcacaaatatacaaatgctgaccaaaatgtatttatattttatactatagcacgagctaattagtctaaactcagttgcaaagtcaattcaataaggctaggagagtaagagattcactcaattttttttaagaaaaaaataaagggatattagactatatttttttagtaaaaatctggtattttgaaaaatacaaatcattaaagaaaacgatcaacttgtctgattactagatattacaattaaatatttaataattaaatttactaatcatttataaagcttaataataatgttaagatacctaataaaaatgttaataaaatatagttggaggaattggcaaagcattgccttcaaattattataatactttttattacgaaaatttgactagttaatggtatgaaatgaaatcttaaatttcattaaagaccaatccaaaagtaacacatccttagtcaattataataataattagagcattgctattagacaccagtagtgcatagcactttctcgacatgtcgtgttgtgattggctagcgatactctctaaaagctattgtattaaattatataggactcgatacttagttaaactaataataatattgacacatagaagggtattagacacaactagtgctctatagcatttctctaataattaattagaaaaagtttggctggttaaactaaaaactgctttggaaaactggtcaatctacaataagaagaaatttcagtcactaaaagtaggagacctttttgaaagaaaagtatttggtttggttggtaccattcagtacatatttgctaattttactgaaacccatttttgaaaagctaaagaagaaaacaaaaaaagaagaagaagaagaatattattattattgtattgtgtttttgttctcactcaactcaagtagtttactagtcagttagggtgagctctaattagtcatatttggacacccaaaaaatttccagatgccgtactaaaacaatctctgaataaacaatagcataagtatcatgattatgattagtcaaccatatctactaagataacattaaaatttaaacaataataataatgatgagaaaaaatagatgtaataagccttgtattttgtacataaatttataggattgaattgaagccatcttttcatgtttgttgagtgaagtttggtcatgtggggggtagactttaacattacgccatcttttgttattgttataatttattgagccttttttttattttatttttttaggatatactatattggaaaaattaagagacaccaacacaaaaaggaatagatctcttcaaaacaatatatatatatatttttttttcaaagtgagcaaacttaacggtttaagaccgattcaagggatattatggaccaatttaatacaattatgctataagaaaaaataattgtagcttagttgtactagtgtattgtgaagaaaaatagttctagttgaactataaattgttgagattctaattatagtaatgataatattataatttagtttattataatcataaatatatataaatttataatttagagatgcacatagactccattagaggtattttaatatgctaaaccaataattgcagtttggaaaagttataaactattcacattttttagtgtacaacgcaatcctacttaatgtaacaatataggaaatgggttgggtcagattgaatgggattgagatgaatattttaggttttaatatttagggatttttcataaatatatggtctctttcgaggtgttccattatttgaaaaggaagagaatatgtaagaggatttatgactcttaagcttaatatgagcaaggcttatgatagaatcgaatgaccttttttggaggtcatgctctgtaagatgggtttcttgaaacactggatctgtttaatcatggtttgcatctttacagccaagtataagattattgtctagttttcttaaattatcttggcatgtttttaggatacacaaaaaaaaaatattaattgaaagatatacattttccttcttgtgttggtatctcttaattttccaataaagtagatcctaaaaaaataaataataaaggatcaataaaagggaatgacgtcgaactactatgcaagactttgcaagtggagcataagctattctactttgatctaaaagagaatccttgaggtcgatatctcaagaattctaagaaaactttcgtcacttgttccaccatcattgttcttttctatctgatatcttctggtttttaaatctcttcaattactatgtcaattttgacgattagatgtcttcagcaaggacttggttctgatcgcgttcccatagaaaaagacgacgacagaggaaatagagcagctaacgatttcaaaattgtcgaatgtacggacaaaaaggaaaaaggtataaatataattggacaaaaaaaatatgggaatataaaaatataaaatatattattttaaatgagtttttacaccacatactgaaatttataattttttttacattttttactgtggggcaatttttttttttcgtgtaagtttaatactgtatactgtattaagtttttatagttgttctatggttattttttagttgtttcactgttgttttaattgttctgttttcttgttttatgattgttttataaaagacagtatttttgcaaaaaaaaattcatgtgacaataaaattataaacttttactcaaaattcaatattttataaaattccctattttaaaccataaaaatataaatatttgtaaaagctcacaacctaaatggattaaaaaaataccataaaaaagtaaagtctttaaatcttctcatacttcgtgtaatttctttttaatacttatgttacaaatatgatcaaatgatttaacctagtgcataaaaaacatacataatccataattagtataaatattccaaatagtgttgtaaatacgggttgggttttttgacacggcacgagcccgaaagacacgagcacgactacgcacgaaaaaatacaggcttggacacaacacgatacgatactacaaattatcacgacatgacacgaaaaatatatccttaagcatgatacgcatgagaagcacgaaaggcacaa

SEQ ID NO: 21588 - DNA, 1651 bp, Cannabis sativa
aaaatacatggtccattttgtcatttaacaaaatagaatgtccaattagtaacttttacaaaacacagggtctaaaatgatatttattttttttattttgtaaatattattttcatgttgctgctcataacatgttttggaaacaactgtagattggtatttttgcaatttctttgttatttttagtatttatgaaaatatctttataataattatttttttggtatatttacttatttttaaaaattatgataagattatatgttacacatattcattttgaaaatacaatttttgtaatttatcaacaataaaaaataaaataaaggttacatataattatttgtttacttagtggaaattacaatgatttttttgtacaatatgtgaaaatatatgtttcttttttcttttaaaaaaattattttatgaaaatattaaaaaaaaaaagtaaaaaatatgaaaaatagttattaaataagttattattgtttttttttgtaattatgattattgttctcttatatattaaataagttatttttaaattgtatgaaaaatagttagtgggccaaacagatagcactacatacaggttacttgcattgaatatggccttagaacttgtaataatcatagcttagtgaaaaaaatacattaatcattgcattaatggtcaatctctgtaaactattataaaattatacctcaatttttatatattgatctcttattttttacattcttcttattaaatactataatatcattttatattttttatttgataaaaattattaagtagattttttatttttaagataataaattaaattctatattttcaaaaataatataaaataatatactgaacttagtttttcgattttttttatataacaaattttaaaataatttctagcacgaacaaatataaatacaaaatagaaagtactattttattaaattttataacactatctcaaacactctttttatttattttattattttaaaaataaactaattagctaattcttctaaaatgttataaattaaataaagaaagattaaaactaattcacacatatcattatattatcaattaactcactataatatttaatatattttagcaatctttctcgatatcatatcactattgatataatcaaatatgtatcccatataattaatataataacttttaataagtattgctaaccaattataagaaaacacgtctaaaaggaatcataatcaaagatgatcatcatcatcagtaaccctaactctcctgtgtatgaatggagcaaaagtacttgaattgttcatctccggcgggtgccacgtcatgtgcccgaactcctccctaacttgccctactccagcctgatgatcttgctcatccactaacccaacaccgtgttgcacaaccaaaactgacgcctccgccgcgaagcttgagcacaccaagatatcccccaaaggacccaattcagggtactccgaccagtcagatagcccagacgttagcggcgaaaccattcctctccctctccccaccacataaagatcatacttattttccactgtgctcacaatcctcactacctcttctccattgtcaaccacttcttctatcaacatg

SEQ ID NO: 21589 - DNA, 3568 bp, Cannabis sativa
  modified_base (3540)..(3540): a, c, t, g, unknown or other
gttatcaatacggcctttccaccagaattttttgactaaagaatcgaactccttgcaataggtgattgggattttacaagtgctcatggtataagtaggcaacgccatagccacagaattaatggtcaccattctcccaatagtagacaaagtcttcatacaccatccttcaagccgtttacaaagattagatttgaggaaattaaaatcctttttcctgcttcgggagaaaaggaacgggttccccaggtgtttctcctctcttttaaccaatccgatacccaatttatccattaaaattctttgaagagcctgagagcaatttttagaaaagaggactcccgatttgagtttactacattgttgcccagaccaactttcataaatcatcatacaattcaccagcgactcaacctccttctcattggctctgcagaataggataatgtcgtctgcaaacatcagatgggatatagcgggggcttctcgagcaatacgaatgccattcaccctcccaagggattgctccttggcaatcaatctggaaaaaacttcattacagagaataaacaaaaatggcgacatagggtctccttggcggatccccctctagggaaaaaacttcttcaaaggccgaccattaagaaggatagagtaggaaacaaaggttatgcaattcatcaccaaggtaataaaatgggaatgaaatccaaaaacctcgagaactttcttgatgaacttccactcaagtctatcatacgccttattcacatcaatcttaatagccattaagccacccttaccccttttcgatttgattgtatgaaccaactcttgagtaagtagagaagactcagcaatccacctaccagggacaaaggcagactgaaaaggagagtaggacgattcatgatagaacgaaggcgatgcgaaataattctagttaccactttgtaaacaaagttgcagagagcaatagggcgaaacttttcaaccgaattaggattctcgcacttcgggatgaggcatatgaaagtatgattaagtgaagaagggattttccctgtcctgaatatcgattgaatacacttcgaggtctcaggccctatcgtattctagcacctacggaagaagcacccagaaaaactgtctgagccaggggacttcaaaggatgcatctaaaaaacatgctgagaaatctcttcatgagtggggatagaaataagatcctcattctctcttgtagtaatatcccccgaaatcaagccctgaagatcctcaggaaaacaaggattagaggaagagaacaacctcttaaagtagttattgagaacttcacctttctccttttctttaaaaactacaaagccaagatcattcttaagagaccaaataaaattacgcttccttcgcaccatagttgacgcctgaaagaattcggagttgcgatcaccatctgtcaaccaaatctctctagatctttgacgctaaataagctcttgcttctcccaaagtttagaaatttccttttccagttcttcctcttcaacaatactgcttgaattcacctctctagactgtagcaaaagcagtttggattccaaggctttgagttttttattgcaatcaccaaagactttcttgttccacctctaaagagctacccgaattgcatcaaacctcctagaaatattctcgttagagtcaattgaaccagaggaggtccaggcttgttggatgatctccaggcaacttccctccttgaaccaagcttcatagaatttaaatggtgtagaacctcgagatctttccatcacagagtcgaataagataggatcgtgatcagaggaaaggattggaagatttctgacacccccacgagggaagagatttatccattcagtatccactaatgctctatccaatcgttctcttataagtccccccgactgtctcttgtttttccatgtaaatttgcagccaaagaatcccaagtccacacccccggtctcgaacaaaaatcttctcagaattgaaccatccctcgggacaaaggttcttcctcccgatttatcttcactcaagagaagaacatttaggtcaccaacaagagcccaaggcccagagcacaggtttatatcaccagagagggtatctaagaacacttgtttatcatgggtatcaaagagcatatctataatagcattctttaaaaatattaaaaatttacatattatttaaaaatagaatattttattttatatctctcttacattatttttgacatttttacttctaaaagtttcaattttttatcagaaaaataatgaatagcatcaatgctataacataacatcggtgtaaatttctagaatgacatcttcttctctccaatagtataacatctcaatattttatcacataatatgtccacatcaccaaacatcatctaaaattttaccgttggagatactctaagcgcatctccaaagttaaaacttaaatttgtgttgaaattacactaaaagaatatattttaacactaatttttttattttctaaaacactaaaaattaaaaaaaaaaaacaatccttcattattattattcttcaatattcgagcacctatatatagaatttttgtttttgaaaaaaacaaaaatatgttccatgactctttttatttttttaattttaaaaataaaaacaaacatgtgttgttctgtaaattttagttttatttttagttaagtcatgtctaggtctaggtcggttcgggactgggatgggagtccgggtccctgtccaagatcggggtcggggtctaggttcgagttttgaggcgggggtccgagtttgtcttaggccaattctgggtctaagtcttggggcagggcccgagtctgggtcttgggcaagggcccgagcctgggtcacgacccgattcgagtttgggtcagggatctgagtctgatcaagggtccaaggtcttgggtctaggactaggtccgtggtttgggttcgatgtcgggtctgtggactgatgtccgggtttggctttgggttagggtcggggtccaagctccgactctagggcccaacttcgggagcagggttcgaatttgggattcgaggtacaagtgttgttctttgttcgagattcgggtccaggtcctagtttggtgtttaggtttgagtcccaattcagggtctcaattcgagggtcggggtcgtggtctaggttttaggccgagtctattgtctaggtccgagtctggggttgaatctgtggtccgagtcttggtgtacaaggccgggtctaggtccaggaccatggtcatccaagtcctggtttcgagttagggtccagctctaggtcccgagccaggatgtaggtctggggttcgatgtctagttttgggtctcagttcaaggttcgagcccaagtcctgatctgagattcgagttgggtcgaggtccgggtctaaaatattaataaaaaaatatataaatagactattgttgcccctgattttgccnaatatacgtggaccaatcagacaaggac

SEQ ID NO: 21590 - DNA, 2017 bp, Cannabis sativa
taattttaaaggtaaacgtaagttttcaacaatttatccacaacactactttttttttcaacaatttatccaaatactatttttttttttttgctgaatatccaaatactaattaaaataatgtaatataatttttttaataacatggtaacaaattaaatacacgaggttgtggtgaaaattcaatatatatatacatatatatgccctattatatatttatatatatatattgcgtcagatattctggagcctatccaaatcgtcctaaaaaataaaattttgttaaatttgagacgaatgcataatatataatctgtgatcaacagtagtagctgatgaaggacgaaatgatttcttcaattttagcatatatatttcgatttaattgcaacctttcaaagatttagtatgcttttatggtgggccaattattatacttgctttgtgttataaaataattcgataatttttataattgcgtgttaaagctaaattttgtggataacgtatgtatccctaaaccacatctttgggtgccacaatataaatatattatatattatatattatatatttaatatatatatcacgctgtgtttatttgcaaaattgaccctaacaaagtaagaaatacatctcttttttcatataaatattaggacttctatatacattcttatctccagagtacatactttttctgttttctttggtgtggataaaatataattaaagttttttatacaactgttactgtattcaatttaattattttaagacatatatcttgatgatttataataaatttagaattatttaaagtctcaaaattaaatcagattatataaataacttactgcatatatgtaaggaaaaaacaaagttatgcttctaatagtctatattagaactactataaataatcgacaccttcaatcctaaatcactacaataaagaacatcttataaaaatattagcattattatttcaacacaaaccaaaacaaaaaagaaaaggtctcgagagaatttccatataatatataaaatacatattatcttataaaactcaggtcccatgcatgatcaccatcatgagaatctcatattcatgatataaattattattacaaaaccaaatgccaaattaattttggacttttattgcaaaaactacgatttgatttcgagtacaacctgtgacagaatatttaaattatttaaaaaataagatactaaaatactaataatacaatggttactgacttacacgttgtcatgggttatatgaaaacattagagcaactttaattaatgctgtaaaaatactgaaaatatgaatgtatttttagcatctttaatagatgtttattattaaagtgaaaaaaaaaatataagtaataatatactgaaaaatgacatatccttgctatcttctcttttttatttttttattattattttataaaatttaatcatttaatatattaaataataatataatagtattttaataatttttaaaaatacttaccgatatattttaaataaaaatgtcaaaaataatataaaaaaaaataataaaatatattaattaatggagagtatcaaatgaggcaatggcttagagcatcttcaataatagcattattatttaaaggtgttaaaacttttcatatcatctaaaaatataatattttattttatcttcttttcatattatttttgatgctcttacttctaaaaatacttcaatgatataatacctttcaagaatgctattataaatatattatttgttttaatcataaattgaataatattattttatttttatttaatataattttttttttttattttttgtcagaaaaaaaatatcatcaattgtatagcatgatcaatataaatttctaagataacatttatttttatccaatggtataatacacttatattttgccaattataaactatccactaagtattttttaaaatttaacaattagagatg

SEQ ID NO: 21591 - DNA, 4622 bp, Cannabis sativa
  modified_base (163)..(170): a, c, t, g, unknown or other
atcaaaataaaaattaaaccataaatgaagatttatgttactgttttttgaatttcaatattttattagaaataaatttaatattttaaatatttatgtcacaaactttttaataataaaattaaaattttaatatatttttattaagtaattattattaatnnnnnnnnaccatttattttttatatataatttaaaatattttatatattcgcccctggccgaagcaatgtttagtagtttgaaactaaaagattaaaaataaaaaaggtcaccattttatcttcttcgttgcggtagctcagtaaagcgggaagcaggaagctcgaaagtttcttcagctaaataatcagtatccaccattagcagcaattacaagcttcaccgagcgaagcgaacaagatacaccctttttgcaaactcgactatccctcactttagtccaatccaagctttttccgcattcggtgaaggtatttttttttcctatatctctctcattcacccaagttactttcttctttttgtataaatgtctagttttctcatctgagattgagactaggaaacgatgttgtaaaataaatttgggttttgagcatagcatgaaacgagtgtcattactcaggctttctaagagaacctgtttggttgccgagaatgttatataagagaacctgtttggttgccgagaatgttatagaaagatgaacaatttggtagtgtgatgtttccttaggattgtctttaaaagcactgtctgcactacaccattcttatccgtgaagatttaggaaaaaatcatttattatggataatgatattacatttttgcaacttactcagaacaggcagtattgtgtggccaagtacaacattgttctgttttaggattaattatcatttattatggataatgtcttcttctttagctgagattatgaccatggctgtacagatatgtttaactagttgctggagtagaaaagcgaaaatgacattttgttgttattattcttctcctgcaagttcacatctcttagtcaccaacttttctcagcaatctaagagtctaaagcttcctgctcaggtatattaccttgtttaattattttctttaatttgagtaacttgtttttaattgattttgctcctaaccaaagttattctttattctaaccagcaagaaatcttagtgtttgctctgttgtgtatgtttcatatatttatgatattgtctaagtgtatcaagacttgtcacgactcacatttccattttaattgtttactcttttagtagttctagtaaaatgtgctcacatgtaaaattttcctctagtaatattgtgaaaaaaaaaaaaaaacttaggttgtgtgtttgatttttaattgttatttgccattgcttttttttttttttttatatgattacactctgtagcaggactatcatctaaaattttgtatatgtttgaattcttcctgacatcttcaagggttttatataactttttgttaatgaatttgacatatagttggtgtgtggtgcagaaaagatggcttaatgaatctagtagagcttccaaagtttatgcttatcatggcttaaagacaccgccatataaacttgtaagtaactgcaatatatgtattgcttagcggcgtaaaataaaagggggcataatgacttattcaatcaagtactgaatagaaacaaaaatcaagaatgaagctgaaaagctgttgtgtaggttaattactaaactacttgtaggaacactatatcatgttattatacctgtagcctctcccacaaataagttcatcaataatatacgcaatgtcatctgaagagattcatgatgtttgatttgttttcttaatgtcggatatatgagatgatttacctcctgactcatctaactgttatcctgtggcccatttcaatacatgtcataataaccacccctgtatatttaaatcctttttacttttatcaaaataataattatgataataaaataaaagaaaaaacaaacaagagaggaagaccacaaatgtgtgcatataaaagataaagctgtgtttgctagttgggttgatgtattagaagcaatgaggaggaaagacagttagtgacctaaataagagtaaggattgtatgtttttagtatttggaatatgtcccatggctccaataattgaaaagaaaaatgaagttatgtgaattctaagtaaatattatcaaaggaatcaaagttatgggcatcgctttgattatttgcacacagttatatgataaaatggaaaaacaattgatgaaagaaaatcctttactgatttgacttcgaaatcatattttaactgtagactgatatttataattttgtgctagaaacttattatacatgtagctgatttggagttctggacttaaaagttataaacttggctattttacttttatttgtaggatgctttagaaccctatatgagccaaaagacgctagaggtgcattggggtgcacatcatcgtaattacgtggatggtttgaacaaacagctggagaagaatgacatgttgtatggttgcaccttggatgaacttgtcaaactaacgtataataatggaaaccctttgcctgaatttaacaatgctgcccaggtattacaattttgtcaaatatttacttccatgacttgatattggaatctgtttgtgtgattttgtccaagtaacatgtggaatagtacatttcttgtctgtccatctccacctctaggccctgaagactgtctttaaggtcaaaatctgattgtcaaacgctgcttaacaaagttcatactggtttgaatttagcccatgggatggttgtaacctagaggttgcacaacagagaaataaaattcttttctctaacgggtgaataaagacgagaagccacattcagtatcttgttttgataagaaacattgatgtattgataataaaagatgaattaaagcaacttacatcctaaaagccattataatcaactacaccctaagcaacatttaacaagacgaacatgtacactgcttggtcaagacattttcaaagccatcgtgccgcaattcaaaaggcagtatggtgtgttgttattcttgataatcgaaattgctaccccgtatttaaccttgtcctaaataactttcacatcctactcaagaggagtagctcaaacaacatagtgtgttgttcgctctaaacatgtttgattccctcttaggcacctacatattgattgctatttttttctaaacccatatccttttctttgtcattgaaattctaccatttttttccaaccatactgcctagagataccaatgtatgtttgcattttacattttgcactctaagtccatctgtgtgaggtatattttgtaaaccaaatatagctcccagtaactcctaattatatgatacaaggtctggaatcatgacttcttttgggaatccatgcaacctggaggaggggacatgcctgtactgggcttgcttgagcaaatagaaaaggattttggttccttcacaaattttagagataagttcacagaagcagcactttcactttttggctctggatgggtttggcttgtctgtaagtctttcaccactttattgtgatttattttgtttttgagttttgtgacaaaaaggttaatatattacatactaaattttgtgttagtttaatgtgttaaaatgaatctcatctctagcaaaatctgttttatctgagaatcataaaccagaaatactaatgagtgcttgcattttacatttctccctcttttatgtttttttttcctatttcaagtgagttatgttttaagggatcgttatcattaccatcatgggaatgttctgtcaccaaaacctaattctgctggtgttatgttgatacactcatcttttggttacctattatttacatgtccttgtttgtttgatcactttagtgaagaggaatgagaagcgacttcaaattaccaaatcatcaaatgcagttaccccacttgtgttggatgatatagtaagtcaccatttctatgtcgattccttacacattattgtcttgcaaaaattaaaacttaagaatcattttttcatctcttcttatgcagcccataatcagtttggatatgtgggaggtacgctttctctctctagattattttatgtttaagattacttattctctatagtttgatggtattgattatatcttttctctcatgcagcatgcatactatctggattacaaggtaagtgaaaccgccatgtctaagtccttctctgaacagtatgattttctctgtgtgaccctttttctgcatctcttaatagaatgatcgagggaagtatgttgatgtgtttatgaaccacctcgtctcatggaacatggcaatggctcgcatggcccgcgctatggcttttgtgaatttaggccagcctcaagtgcctattgcgtaaagtgaaacattttcgaagtagctcatagcccttgcgaataaatgttggtgaaatatgcatagcttgtcttcaattgcctttagtgtagcaaaatgagagttta

SEQ ID NO: 21592 - DNA, 4049 bp, Cannabis sativa
tagttaggattaccaaaataccctcatgtttgatttgagtttaagggttatatggggggcaaaatggtcattttaagtttaggaatttctaatttgtcctgtgtggttttagttcatattgtagtggattgttaggttaattgttttattccatttaatagtatatagtagtttaaaaaaacaaacaaaacctagaaactaaagaaaatcaattcaagagctctctctctccctatctttcggcctaagaaggaactaaggggaagcaaattttcatctccttttagtccaagattttgctagaaatttatcgtagttgttttttcatctattgaggtaaattcttgacactttctcctttggttctcttaagttttaagttgaatttttgctagggtcttagggtatttggggctgtggtgttagacttaagtttgataatgtttttaggattgttttagggtttgtataagtttagactgagtgattttagatgtctatggtttggaattggaaaattaggttttcacaacttaatatcttggtttaacttggtaatttgtttaaattgatgaattgttgtgaattgatgctttggatatgttgtgtttgtcatgttgaactgttctggaaaagtatagcaggtttggtggatgtttgatcggtttttggagtggaaaaccaggtttccccatggctgcccagaaaaccagtcgatcggttttccaagcaactagcaaaccggtcgaccggtttggccagcatgggaaaatttcaagtttatcttctccagtttgtttttgttcggggtatctttcaggtgtaattcagagtattttagagatatttttggttagtctgatctagagggaaatagggttgttcgattatgagaattagggtttatccccgagaatttaataaaggtttttattaagtttcggttgtcgtgacataggaccgagattgcatagcttattttccactcacgtcggcccgcacacttgagttctggactgaggtaagaaaaagtattatatatcacttagagttaaatgattaacatgtatattataaatctcgattatgatcgggttcagttatgactaagggttgagaaatggtcattaccattacgagtaattactcctgaaaccacagataggtttcttacttatcgtttgctttatcgggcaacgatagtgacatatacagctcataattaacgagtggtaagggtactttatgatgtaccaggattattattataacattgtgtaaatgcttaagtatgttaattaaagtttgatcgataaatgttgtaatgattattattttaattactttttcttgctgagactctatgactcacatgtgccttatggtgcaggtaaagggaaggctaaagctgagcagccatgagttcgaaggttgtagcagtaatgtacatatcagttgcggtgttacggctcagtgaacatgatgttctatttagattgtattttgaagtataaacctatgttgtaaaagcactgattagccggtttgtaaatactttgaaaataggtggtccccgtaaagattagtaaatattctaatgaaagtaaagtgtttatttaaattgaaaaattttaagtaacctcactttttgatataattatacctattagtaaatataaattttaaaaaagcacacacacgtggcgtccctgttgaaaagggcgttacaacatggtatcagagcgccaaggtttttagatcctaaagactggtttgataggtgcattggttgcaaagactcgtttgattcatgtttcaataagcttttattactagacaatttgtgaattacctggttgtttgttcatttgaattgtgttattattggaaatgtgtgaaaagggttatgatttatggagatacttattagaattgttattacttggaatgtgactgcaggtgtatagcttatgcaccctaggcggaccagtaggggtaaccgcgagctagttgggctcggggttgctggtgagggtgagaaccctctaccaccacccaacttagaagaattatatgctgccatgcaagaaactatccagcagtaaggtgatccaatccgtgagttgagggagcagtgagctcagcctgttccaaagcttaatcctggtccttcagcacctctggtagtgccaccgaatgtcgggaatcatttggagccgttgtatgagcgattcaggaagcagaacccgccagtgtttgaaggtggtgctgacccactaaaagcggagcagtggatgagtatgataacatccatttttgattttatgcgagttgaagacaatgatggggtaggtgtgccatttatatgttgcgagaagatgcccgtatctggtgggaaattgtgtctcagggtcatgacctaaataacatgacctgtgattcttttcgagaactattttacgagaaatactatagtgagtctattcgggcagcaaaggcagaagagtttatatgatcgactcagggcagtatgacagtaacgtaatatgccactaagttcaatcgattgacaaaaattgcttctgatgaagttgctactgaagctactagaaaagcaaagtttatacgaggattggatgaacaaattgcacgggatgtgataattgctgctaaacaacctggggttgttcgaactttttctcagatggttgaaatggccctagctgctgagggtgtagaagactagatatgaattaaaaatattgcgagaagagactcatggaagcagacatctggtgttggatctggtaggggtactgaccttggtgatcgcaagaaaaggcctaatgaaccatcaactgtaggcccaaataagagatttcatggtaaccaaagtttccgtcacggtggaaacgagaactggcagacctttcgtgaatgtccaaggtgaaagaggctccactagagcgagtgttaggctagagcctgttttcactctggggtaggggtcatatgaagaggaatttcccacaattgctgcgacaaaaataaaagaaggataatacacttgctcctgcttgggtgtttgctttaactcaggccaaggctgatgctagcccttctactgtgacaggtcagctttctgttgctggtactttattgactgttctaattgattatggtgcgacacattcttatatatcaagtagagtaattgagaagttgaatagacctagtgatgtacttccaagaggcttcgaaatcttgttacctactggagagctggttgtcttcagcaggtgggttcgatcccttctagtttttgtggaaggaagggaatcctcagtcaaactgatagcactaaatttggaagtctttgatgttattttgggtatggattggcttgcaaaatataacgccactattgattataaaagaaacctttcatcttgagggcaaggatccttttgtgtttgtgggtaagatacaaggatcctggattcccctgatcttagcccttaaggcgagagacttgttgtgtgaggggtgcatcagtttcttagcaagtgtagtgggtactactaaggaaccacaagctggaccggagcatgtacaagtggttcgagaatttctggatgtttttctagaagagttaccggggttaccaccgaagcatgaaattgattttgagattgatctaatacttgggctagagcctctatcaagagctccttacagaatggcgcctccagaagtaaaagaatttaaagtccaattactggggatgttggatttgaaatttacaagaccaagtacccagtcttgttcgtgaaaaagaatgacgaaactttatgaatgtggattgattaccgagagttaaacaagttgacagtaaagaacaagtaccctctgccaaggatagatgacttatttgatctgttacagggaaagaccatcgtctccaagattgatcttcgatctggttatcaccagttgaggattcgggaagaggatgttgggttttgtgcccaaaataaaactcatttcaa

SEQ ID NO: 21593 - DNA, 1260 bp, Cannabis sativa
ttttatttataattaaaaagaattaaaaaatattatattttaaatttcattcctaataaaaaaaattatttattttaatataaaattaaaaagatatttaaaaatgcgcgaagcgcaagcctattccctaattaattataagacattatcataatgtatatatttatgagtaataattataaaaagaaaatatactatcataatatatagaagccaactattcatcaacatgatgcatagttataagttttagatgagatcttttattatatctatacttatattaaattattaaaataaaaataatctaaaaaacttatgaaatacaacagtagtaatcttaaaaagatacctcatcaacttgtctatatgatcttatgtattttcttgactcaaatttttgattggctaacactatttcttttctatttatattataatgatttagttaataagtaaatatatatattaatagggatatgattttgtcccgtgatgtactttcacggaatatattctgtggtacattagatggttctcagggtacattaaatgagtatcagggtacgtttctactttttaatcttaattgcccctagattaatctcaattgtcagatcaaataactctctcatctgacggcttccgtacatcacggattacaatccgtgaaagtataataacgggacaaaatcatatccctatattaataaatttataattaattatattgaagactttaaaagagctataaaagtattacatgatttgatgaagataataatatgcataataatgcaaccatatgaagtattgggtcaatattattatatatacaaaatagttattttatcagtttgtcaaatattgagtaataattatattgtcaaaccaatctcaaaactatttcactttttttgtttttgcctctcagttttttatcattaatatgattataaactactaattattaatactcataataaagaataataattgtcaaaattacaaatatagaagttacatataactaatactcatgtgtattacaaaagtgtgaccgtcctaaaaactcttttttggggaaaccgttactaaaaaaattaagtaactgttaaaaattgttgggaaaaattaatattctcgaagatttataatagtaattacaggaataggcgacggttttaattgaaatttgtaaaatttattgagcccttataggcaacggttttaaaccgtcgggtataaaagcccaataaa

SEQ ID NO: 21594 - DNA, 1934 bp, Cannabis sativa
  modified_base (1784)..(1794): a, c, t, g, unknown or other
acatcaacctaatttatatatatctaattattattttcttcatataattatcagctgttgtgatcaggttttaaaacttaatgttttataattaattaatatatatttaataataaatgtaattatcagtgcttattaataactcacacataagcatgttaattttcggaacacattaatgtttttcgcttagctaggttatctcctatgaagaaacaaaaagagtgtgtttggaaatggaatatacatattattaattaattgttgttattgtattctctttattatatttatatatatataatataaaataatgacgacaatattaagcatatgggacatacataaaatgtttcacttataaagtttagcacacgattggtagtagagacatttttaattattcctacaaaatcttctaacttggagtgctatatatatataaatatagtagctactcaaataaaacatttgagctatatatatatatttatatatatatatatatattaataataacataaataagatatagctacatagaagcaaaaaagaaacaataataatactattatggggttagaattaatgagggtatatatatatggtccaaaaataaagaacaaccagcaatcaaatccatgtttcacaaaggactaaacaaatatatatatatatatatatatatcttattatcttaaattaagttcattaattattcaagaatatatatacacatcaataatattaatacatacacatatacgtgtgaaaatatatttattatatatatgtaatatatgaagatcaccatcactaccaaaccaaactaatcagttgggaaacaactcattggagcattaagatgagagaggcccccccatcccatgcatgaaccctccttttttcttgtctacatatatagatatatattaatattacttactatagtatgatttataataaataataatagtaatgtatgatatgatatgatgtatatatgtaagtatataaatattcaataattttccatcaaatcaacactaacgttttagtgtatatttttccagcaacggcatgtgattgccatgctctcgtacccattcttaagctaaacttcatgtgatgataagattggtgttatcatacaaagcaaaaattatatatttgtttcatggttggggataggttttctttcttttcctacacttttggccactttcttttctaattaagtttttttgttttttttttcacactactactagtcaatgtttttgtctttgtgggggccataatcacatatgaaatttgttttgacaaattaaacattgccatatactaaacatttatatatatataaatattatatatcatcataacaacgatatttcaatatatatatggcaaatagtttaaatcatgttggtggatgatgatgttgtgtacttgctcataattatagagcaaggtcggttatggataattcctatttttctttttggtaaaatcaatttaatgtatatttcaaacgtgtggttattacatataatgtattaattctagagatgagataagaatcctccaggtgtggaatattaaatgtcattaattagattagattagacaaatatagaaagactagtcattagtacatgaaaaattgtatagaggttctttacttcttttccttttcccatctttctgaaagaattatttagaatattctatttagttaggaataataacaccttttttgtctattattattattattattnnnnnnnnnnntattattattattattattggtggtgatccattgggatgcatatcttttattttgtaaaaatagttctttcaataatttttagaaatttttacatgaaaaatcctttttactctctttattacattattaccctcacacg

SEQ ID NO: 21595 - DNA, 2128 bp, Cannabis sativa
aaatatttaaaattccgtaaaaccgtatttctattatttttttttgttgtttttgtgcatttgtgaaattaaccctaaaataaattgtgttttctagtcttcaccctttttatgcttgtgaaacgtttgtgcgttgataattaatattagcttttaacatgatgaattgaaaatctttgtcaatttaatttctcaaataaatttagtatgcttagtaaaggtctttattactctttctagagaaccagaggcaagatgagttatgtgggtagttcttcgaatttgaatagtttacttttcattagcttactcgatgatgcgaatttaaaaattggattttagtgtttatcaagttttgcataaggaatgattcttgtggaaataaagttgtaaagtttattaaattttatgctgtaacatatagatatcatattttaagggtttgtcagcattaacttctgttttcttgatttaaaaacaaattattgacaaatttgctagcaacgatcataattgctcgtgaatttgtaaaactaaagatgtacatagcgtatctctacatatacacatttgcatacatacttataaatttaaatttaaaaaaaagaaggtaaaataaaatatgcatatttttttaatttgaaaactaaagacaataattttactttcattttcaatttatttaaacagcaaacttgtgtccaatccagcccttacaatatgaacgctttttttttcttttgataattacaattattttccttactttgtttcttgaatccttttgcctgccagtgccaacaatcataattgctcgcttcaccatttcatcaattttaggtatgatatttttcacatcttttggtcaaatacatttcactctataatcaatgtatgttgaatcaggaaattaatttttctgcatttacatgaaataaaggatcttttaaggcctgatttccttttctaataaatattgtaagtatctttccttattatttgatctagtcattagtatgctttcttctatgttaaagttatgtttctacaatttccatatcagtatgttgatcatatttgttgttatcttgttcgtgtctgatttttagctcttcttcagagggcttctcgagatggagtgagaaaatggttgatgttgcagaagattcaacgtaaggttttatacttttgacagaattaggctatttgctgatcaattttatcagtagagttatttgatacgcttaaatatcgattaggttttgttttgttctatctccacatcctacacccgcaactctctatctgacagaacgttacaaatgggcctcaaacattagctttactatttcaatgatcgatctctttaaactgttatagttgaattggtggacattcttttcttgttctctctaaatgctaacaaacattagctttacttataagtcgtaagatatataatgtttgtgttatgtttatgattgtaggtgtgttctctgactacagttatgagtgtggaggttagggttgaagctttcaataccttaagaaatatagaagtggtatttggggatattattttacaaaccctctcgtagaagcttcttgaaattgttaaagggaaagaaattacttagtcggtggctttgtgagcaaattgaaatattggcatcaagtgttgctgaagctttaatgagaatgaatcttatgacgtaacattttcttatgttttccaaggcattaaatgttaacttcagattgattatgagttgtgatagtgacaatgggatcacatataaaatgaaccaaatatgttacgaccacctcaccaaaattaatggttcccatggtatgttatcattcttatttcttatagatcttcattgatcttataatgataaagttggtcgatttaagtatgtttttagggttttttgtcagttatgtaatagtatttgatgaaactgattttagttatatttttttgtttgcgtactaatttttaatttgttcactttaggtaattaatttttgtgttttgttgtaataggattactctattttttgtagtgttttgtctattttttattttaagtttgtcttattatttttttatatggtcgaaact

SEQ ID NO: 21596 - DNA, 4094 bp, Cannabis sativa
  modified_base (32)..(34): a, c, t, g, unknown or other
  modified_base (2113)..(2114): a, c, t, g, unknown or other
aaattttatgctgaaataaattagtaggatcnnnatcccacttattacctgattaactcataataaaaatataaaccctaattatttactgttaggcttttcaggatagtacacaagtggtagacccccacctccaagagtagacccaccattggcgcctactactaaaagaaggacccaggggcaacaacccttggaactacaactagatctcgtatctagttctacgctggagagatatgcccaagatttggcgagcctacagttggcgacccccatctggacctaggagaagactttgagttggccaaacttagagaagttgtaggtcatccagacctaattgaagaaccatgcactactaattgcgatgttttcgatcagtagagacgcgaactccaaagattgatggatgaccaagagtacaccctttaatctcaccaagcagagttagattgccgcaacagagaggcaagctatatgataagacagttcaacttgagaaccaatagaagaggccaggatctcctcaaagatccacttaaatgaagacttctacccagttcctcaagaactaagacagatcttcccttcccaaagggaggacagacctttcctcaaaggtcaaacggtgaaaatagcaagatcttgacagctagtagcacgggccagccaaggatctctagctcaacaacaccccccttttttgcagccattggccggccaaccattagcaggagtacccatggttgttcagagtacaacagttcctccctaagggggacggggtgcgtagaggtcaatcttcaacctagaaggactgggaataggtggaaacacccaaaatgaaagttcaagaagtgaaatcgatcactttaggcatctagatccaccaaactccaacaattagtgtgatccacccccattaacacatatccagcattagtagatcgtgaagtcacgggcgacaacccgtgccttctacaggtctggccagccatgcaagcatcacgggcggtcggcccttgccctttgcaggttttgctagccatggaggattaatgggcagccagaacctgcccaatgtaggtttggaaagccaagcaaaatagctaaatgtaggcctggtcggcctaggccagctcccgtacatgggaatggccagttagggtctgtagttcaacacgagactagttgaccttcaccatacactcacctagggtatggccagtcagcccctgtctcttgagaatctacagcgtccctgtggagggacaattcgtcaagtccccacagcaacagatccttctgtgcaagcacaatttgaccaagttagggacattatccaaggcatagctagctcgaagccttaagaccttgaacttgatcagtcaaggggatcacaattctcggcatgtctttcccttgccaaagttcaaatgtttgtatggaagatgtatactggtcgagacggcgcacttgctcacatcaaatactttgagatgcaactcgatctctagaaggttactggtactgcatattccaagccacattgccagagacaacacaacaatggtactttaaactctccctagggagattcaactcatgggctaagttctcacgagaatcttaaacacatttctcgtcctcgagacttttaccatcacaactagaagaccttgttaaagtcaaacaaggacaaggggaaccttttaaggattacatccagtcgtttatggctgaggctaccaaagtcaaatgccttatagaagaaggttgttatacgtccatactagggggcatactcccattgaatgacttctggaaagatatctaaagaatctctactaataacatgaatgagttccttgatagggctgacgactttatcaaacttcaagaagccatacgacaggcccaggcggcgcatgtcaataataggcagtcacgaggcatccaactatatcatgagccaccaagcgcacaagaagacactagatattctgcccagacttctagttgtaaaaacactagaaataagcgtggcaccaacagatctgcgaggaacaatggaaaaaagggaaggtttaatacttctcccatgccacannagaataaggagaagaagtacacctaattcaccctcctaacagaaaagccgtaggtaattttcatgacttcggccatgacaccaatgagtgtcaaaatttgaagagggagattgagtatcttataaggcataataatcccaacgtgcgtcattattcgtaacatgaccaaactcatgtacaaggtgcctataacagatatccaatgccacctcttgtggcaggacacctaggggtcataataggtggaccccacattacaggtgaaatcagtaaagcaagggagcactatgcttggacactctgttacgagcccaaaagcgatatcctaactgtcaaaggcaagagctccaagcaacaaaatcccatagagcgcatgatctccttcaccgaagaacatgcagctccagtcaacttctcacacaatgacccccttatcattactatacaaatcgggaacatgactgtagcgatatctttggtggaccatggagcctcctccaacattcttttcaaattaacatatgaaaagatggggctccaactcattgcaagtgatgtatagcttctttggccaaggcattacacctgttgagtatatcagattaccatcatagttggagaaaatttgactacaaaaacattgataacatagtttgtcgtgattaatgttcccttgaccttcaatgcaataaatctatctaccacctatgcctcaaatttccaacaaggcatggggtggcatgtgtgaggggaaaccagaagtttgctcgtcactgttaaccattggccctatccaaggccaaaaaggagaagatgctcaccaaaaacccgaaaaacgagcatagtaaggggcaatgaagtctatcccaaggtggggacacaaacttagatcctcactttagggaacctacaagaagcttcaggcctgtagaaaagttggaagaagcggaggttgatcccacttttccaacaagaagactgaagattggaaaaggcttggctccagaaattaaatcaattttggtagaattttttaaggcacaccaggacctttttgcttgctcacatggagatatggtcataatcgacgcctctgtgatgacccatgtactcaacattgatctaagcattcatccttttttaacaaaaaggcagctactggacaaggagcgcacctaaacactcaaagaagctgtggaaaggctgagcgccaatgacttcacaacagagacattctacccacaaagggtatcaaaccaggtattggtgactaaacctaacaagaagtgaaaagtgtgcattgacttcaccaacctaaacaaagcatgtccaaaggactgctttctactcccaaaaatcgaccagcttgtagatgcccaaactggccatgaaatcctgagtttcatggacgcaattaaggttacaatctgataaagatgcatccatcagatcaggagcacactagcttcatgacgaacctaggcctatactactacgaagtcaagccctttgggctaaataatgcaacgaccacatatcaaaggttgatgaacattctatttagtccgcaccattatcctacgcttgggtagaattttgtcgaaagtgtgcttggcaatggtcacagcaaaattggcaataggtctgcctgtaccagtagggtttgggcagcccttgggcatattgtcgaacgttcagatggattatatacatctagttagtaggaaggtaacacctccaccatttcttgagttcccaaatgaaacgattgtatccttaaccttgaatttggtcgggatataaatgatgttgcacatcgggctccggggaaggggtatgttcgctacttacttcccaatcatcgaagctagaatttgaaagatcatcgcttgatgaagatgggctagcacgaagatgaggatgatgttgggttttatgccctaaataaaactcatttccatataatcagatttacttatt

SEQ ID NO: 21597 - DNA, 3529 bp, Cannabis sativa
aaaaccaattatacatcctatacataatatagtattaaatttctatattatcaatataaaattttataataattataaataacaagagcttaactacttgaggctagttcaagtggccatagatgagtgtgtgagtgttggaggtcctgggttcgagtcccaagtaaaacatgtaaaaaaaaataaaaaaataacaagagcttatgtgaataagtcattttcattcacaattatttatggtttattgaatatatgacatacccaaactctttataattttcattggaaactagataattaggttattttgcagtgcatttagaaataaggttgtgtagtaattatttaaatttatttttgtttttttaatgaattaaatttattttgaaaataaaaataattaacccaataatatgttgaacaagtacgcattttgtaacacaagctcaattgacacttaatagttaaaaaaacaccctacaataaaataataatgaaaggattattgtcgtcttttttatctattatttattaaaattatatgtgtaacaattataaatgataaagaatttttcagacaactctaaattttaatataataatatattataaaaccaatcgatcatacacttaataattatattttatactccataataaaaattattggagttcgtttagtatgtcaggttgtatagtattgtgttggattgtattaatattatttaatacaatactatcactatgtttagtattaactttgcattaatagcttgtgtaaaattatattatttatattataaactcaactccaactccaaatcccgtttagatcagggtatggcgtatgggaccagggccgggggtcgggggcttgtgccaggttcaggcaatacaatacaacttactaaaagctgtgtcaaacgggccataagtgccataacgaaaataattgtctcgtttggaaaattttctcctaaatttaacatattttttttttgtttagatatttaattaaaataataaataatttttactagaatgttttcttaaaagtgtttggacaatcttgtagaaaatagtttctcataacatcttttgagttgaaaaaagacaatctttaaaaaagtacttttttttttttaatttgaaaaactaatcatagcttaaaaatgcttaccaaaacatggccaatatatctttcttgtgcacgaaattttgtagtgtcttaacttcttttgcagaaaagattttactaattgtgcagagttttgtttcaagacatttggagacagagtgaagaactagataacattcaacgaccctcgagttgttgctgcacttgggtacgataatggtcctcatgctccggaaaggtgctcgaaagcatatggaaactatagagttgggaactcagctacaaaatcttaaattgcaactcgcaatatgatccagggccaagactgggatcaggaccaagtccaagtcgagatctaagatctaggtccaaatatatgttaagattcgaggccaaggtcttggtacgggtttagaatctcgatccatagtccttaatcccgaacttttataaatattataatattaaattaatataaattatttgttacatattaaataacacaattatatattatttaatataataggacacttaataaaatatttatattgttgtaaaaattttaactagcacactaattaatatatatatcatctaatttttagttttgaaaaagtaaaaacaaaaaaaaaaacatatatataataaattaattacaattatatattcgtaacacataacaaacaataaacattaaaggtcctattgaaatgtttgaccaaaattaggttaattaaaggtattaattttgataggttttgattatagttagaatataaaaaagatagaaaataactaggaaaaaaaaaatctataatttataatattatacgattaattaattagctagttctctcctgcaaagggatgtatttgaaattatttttgagaattgcttttaaaacattaatcgaaatattattattcttttttttttcttaacaaatattattaatatcatgatatttaaacttttctgttatagatttttttgtgtttttgaatttaagttcttattatagaattttttttttataaatattttctaaaacaaccaagaaattaaatatctttacagaaaaaaaaaattaaatataaaaacatatgcaaatttgaataaaatgtcaaacgaatttacataaactaaaaacttttaaaataataataaaaaaaaaaattgttgactgtaggtatattttccttcttgttgtttttttttatttctttaattttcttaatataatttgtttttatcagtttctttaatcttcttatcgaccgaagagttttttttttttttgaaataatatcagtgaagagttttatatagtttgatttgttaaatattatttctattaatatatttaatggttaatatatccgattatatatcgagctattttgaattaaataaggttaaaataatatattattattaacttaattattataaaaagataaaattaaaaaaatcaaattaaatattcctaaacctaatcctactcaaactctatcatctacttaattctataaatacatacttttcgaagctaaaattcttattagtcattattaattattaattgttctctcaaaaaccaaacaatggagattgttacaccaacaaacgaatccaacaatgcaaacatcaaaacaacatcatcaatatcaatgtcatcatcaattaatgatcttttaccaacaacaactataaccgaaccaccccaaaagaaactcactctactccctctcatattcctcatctacttcgaagtggccggagggcccttcggtgaagagcccgctgtgcaggcagcgggcccactatttgccctaataggctttttagtgtttcctttcatatggagcatccccgaagccctagtaacggctgaactctccactgcctatccaggtaatggagggtttgttatatgggctcaacaagcctttggacccttatggggttctatgatgggaacttggaagtttttaagtgttgtcattaatatcgccgcctttccaattttatgtgtggactatttagaaaggctttttcctgttttggattcgggttggcctcgctatgtagtgattttcggcatgattataattctagccctaattaactatattggtatcacaatagttggctatgtagctgtgatcttagccttagtatcaatagcaccatttgtgctaataatatgttttgccattcccaaaatcaagcccgtaaggtggattagtttagggcaaaagggtgtgaagaaagattggggtttatacatcaatacattattttggaaccttaatttttttgacagtgtttcaactttagccggcgaagttgaaaaccctcacaagacttttccgaaagcactattc

SEQ ID NO: 21598 - DNA, 2625 bp, Cannabis sativa
caatatttttgtactggtttttttgacacattataggtcattaaattataagttcttaccttattacaaaataaacaacatacaaaggaaggattaattcttttacaaaataagaggtagttcacaatttctcatttaaagtccacactattgaaaaaattgatcattgtcttaaaatcgctttctacaataataaatttgtaacatttatccttagccaacttcaaagccaagcaaacagaagcgaccacaaagagtgtttggaattgtggtttgattatatatttttttgtttgtttatgtgttatattataattaaattttttttaaaaaaattattttcttttttgaagaaaaagggatgaggaggctaccaagtgtggatggacgtaaccatgagatcatgagagctccatcccaacccccatgaatgtacacccaagaccctttaaggtgggtcgcctccccctacaattgggtgcatcacgtaagccccaaccaagcacttagcactaggtttataaatgctcctaaaatggatgttaagggtggttaggatgacaaacattgtcctcatatttaagacttctatatgagctacttaccttcaacttagaaaactacttagaaataaacactttgctactaaatcattccctctgtgatttataaattatacttactcttatattttagttgacgataatacaagtcaaacacaatagtaaaatttgaaatcaacatgaaataaatagaacaattttattaaaaatacacgtattgtaaaataatttactgcgaaatatataagttgatctcccactacaattaaatgcctaagtaaatttgtagggtacgttaaatttctcatggtacttcttcattttctaccatatagtgccatggttgtagttggtagacatgttataaaatggttgtgaacataaacttgtcacaaaccccattttttcaaaccttgtacgttgttctatttagtactcgttttaaatatttcatttaaaagcgtccctatctttctctcacaaaaaaaaaaaaaaaagtgtcattatttgttaataaaaggcttccaaaaaaatctttgtttcatattgtggtcgctgattacaacacattagaaaaccattctataattaattttaaaaaataactatgaaacgataataatgagcaaacaaattgttataagttatgacatagtgatagtgagcaaaacgtatgatcacttaattaatatcattttcacaaacgactcgattatttgtactagcattatattaacaatttaggtaatggagactgcagagaacttagactaataaaaagtttctttaacaaatacaatttctgcataattaagtgtgttgtcaaatataattaaccttagtaaaaaagtaaatgaacatggaacagccaacatactattttgtactcatccaatcatcaatggtcttttgcttttttgttttgacctcttggacttggttcttcttatcatcttcctcatccaatctttttcttaagctactcaattcttcttcactaaccaacccattcaactttttattcaatgcataagcttcacccatcctcctcttacattctttgctagcagaatcgtgtaataccactacaagagaaattaaaatcaaaaatcaaaaggcaagaaggagatatggttaaatctgtagagttttactcagcaaaatgaagaaaaagactgacctggttttggataatcttttccaataatgcactttgctttagtttgaatgcttaaaggagccgtccagggctcgtagatgtactcccttggcatgtctaagcagtgagtgaaaagattataggagttaattataagaagccaggagaaattggtataggagaatcaaggtttttgtttgtagtacctttcaatataggaagaaaatatctgatatagtttccatttggatcatacttctttccaaatgagataggggagtatatccggttgtactgatcacagaaaataaaagagagttaaagacatgtcaaacataaacattcatagtggaaaaatatgtcaaggctagaatgaagatgaagtgtaataaatgagtgttataacctgatagaaaaatgaggagcatgatagccatagccaatttccattattaatagcccaatctgaatcaatcagaagcctttcgaaaacatcgcgacctttctcccagtgaataaacttgcatatagcaatatgtcaaaataagatggataaatagatagatagataacaaaaataaaaaaaaggtcccatgaaattatttaaaataccagatccccgcgggtcagaaaacacgcaacacaatgtcgagctagatggtgcatccaaccccacttgtgaagctgcaaaatcaaaatgtacagattttaggtacactgtctaattgttgtgcaagaatacccccaaaaattaattagcacagtttaactcaaagaatataacctgcaccataattgcatcaatccaggggtacccagttctaccctccctccaagctgcaaatagttcatcattatcattccaaggtatctgcaacaataatagcattctgaccttatgcc

SEQ ID NO: 21599 - DNA, 954 bp, Cannabis sativa
  modified_base (850)..(855): a, c, t, g, unknown or other
actgtagcgtgccttagcattagggcgttacaagaacgcagctatgctgggaattgtcttatcaaaagagcaacaggttcaatttgttctcaatagcttattacttgagtatagaaaatttgttgtatcctatataatcaataattagaactcgttcgacatagataagttggacgctgaattatgtgcttatgaaaggacatttttgattgcaaggaggtccctctctagtactacaagcaagagcaaaagaaaagctaaatatattgagaaagatccctccgacaatactgcaacttttagctcagtaaaaaggattggagaaagttctactacttccttggatcatcttaaacaatagattataccagcaatagagaaaatcaaagaacaactaagcatacatactattcaatgttctcagtgtggacagaagggacattttaaatctaaatgtcttagacttcttaaccctaagaacaaaggtaataccttagtttttgaatcatgtgttttatgttttagagaatgaaaaagaatgaaaaatccatttgtccatttggattattgattctggatctactaaccatgtttggtcttcattccagctacttgaaacttgggattacataaatccaagtgagttgaagctcaaagttggtaatagctaattagtattggtctaagctagaggaaaagcttgcctcaagtttcagaataaatttttgattttagataatgttttgtttattccaaattttagtagaaacttgatttttaattgaattttttgagttctatatctactatttcttgtaatggcattcaattatgtgttgctcacatggannnnnngctttatgttttaagacctgatataccaattgcgcttatgagcgaactttttaatgttgttaaacctagaaaccataaaaagcaaaagattgataatga

SEQ ID NO: 21600 - DNA, 2137 bp, Cannabis sativa
actagtaacaacatgatatgtttcatcctaataagtggaatcgtcacttagaatagtagcaagggaaaatacaaaaatgtaacatgtagtatgtatgtagttaaaaaaaagttaatatgtgtataaatttggaaaaacatagtatttatagggcaattagtatcccttagttactaatattagtagtagaaaggtttgagtacaacgtacgatttataaaacacaacaaaatgaaaccatactattctgtggataaaacaagaaaaaggaaagatattagacgtttatcacaagaaaactggtagctgtccatcaaacagaggttactccataaaattatagcaccacatatatttattttgaacctacaatattctaaaattttattatatttatagatgtaggtacatatagtctctcatggtggagtagtaacacctgaaaaaaattcatgcataggattagggagaataatcaaacttcaaaatccaattatataaatttggtagctatacctaatagtttgattatcgtttcttaactaggagaaataaattcacatggagatattataattcatctaaattaattgatatttaatatgaggaaaagcatcatatatattataagataagagagtgagagatcaagagactcactgccgcacttgaagttgcggggaacagtcctaccacaaccttggatttgcttgatactacgttcaacattaacgagattggctaacttgggggtgacataggggcaaacacactccacatgagtctccctcacccgcgcgcagcagttggccgaagggctttgcctgaagatcactgccttgcacgcgcttacgatgttgttccgctcttgcttgcactgacttggactcgtctcagctttcgccgtcggtggcgcaaccacaaacaacgccaccaacaccatcatcatcaaccatgctactatatcacgcctcatcatatgatctcttttaattaatatcaaatattatcaactactaagctacaatatatatatgtagtgtgtatatatatggaatacatgccatgccaatgcctttatatatacatagatggagggtaggaatattatattatatgtgtttctagctattgagaaaaaaatttccacacaagataatattaatttggaaataatgttggaattttccatagtgcgattgactaaagttcttgacgttgttgctatgcacattcctagtacggttaacccactcaatggttggttcaaccgtttatacgattagctagtcttacaatagtacagctgctttagtaatagagaaatgctaaagaatattctatcacccacctatgtgtcaatgtcgttattggtctaactaagtatcagatttcatatagtttaatataataacttttagggaatatcgttagtcaatagcaaagcaacatgtcttgagatgctaggcactactagtgcccaataataatgctcttaataatacattgtacaaagactgcatactgttacttaattgtcgatagctatagcaattatttagttgattggtataacattaatgtgactatttaagttcagtttttagtataaaaattttttgtaatgtttttcttaagaaagtaaaaggaacatttgttagaaaatatcaaatataataataaaatgataatacttgaggcatgcaaataagacattgtctttaaagatttataaagtaatttttcaagattcaacatgtcttctgattacaataaaaagaactaggaaaacagaaacaataaaataataataaataacccaacaactctcttaaagttatcatgtatatatatgtatataggagctagcactgtatgtatattatgttctttctatctataattataatgatacagatatatatatataaagaaggaatagtaatacattaacgttactattaacgctagcgctagtggagaagaaagtgaatctttgcaattttttaagaatcacacttcaaatatatatatatatctatatatatatatataaattgccaagtcaaaagataagttttttttattaaaataataattgagttttttttccttaatttaaaaattcacaatattat

SEQ ID NO: 21601 - DNA, 2583 bp, Cannabis sativa
  modified_base (262)..(266): a, c, t, g, unknown or other
cccaataaagcttaacgattattaattcatcaaattccatacatatacagtcataaacagccttttctacccattataatataattaataatggggaaaaactaactcttaataaagatttctaagataattttataattatcagctacgtacaaccccacttaaagctcatctcaagtattgaatttccaatttaattgcatgcttccatgaccttataggaaaacttgttttatttaaaactgagagagagagagagagnnnnngagagagagagagagagaggttacattatttattaagatgacatgtataattgtaggcctaaatagtacatacaaatacatatatatggaaatatacaatataatggttctagctattcattgaatgataatgtcaaacagtgtgaacattttattttgtcccacaaggaaaatgacttttggagctgttgaatattttagagaggtgtaaatttctatatagggttagctatatatatattttatatacaactgaacaagcaaggtattattgtatttatagataaattctgaacaataaaatgagaaaaaatgttcattctagaagagagattaaataaataagtgaatatataatatataataaatatgatagtagtgaaaaggataggacccatgtttcatgataatattatgaaaaggatataggacccatgtttcatgataattctctctaatcagaaagagagagaggaatcttctctctttctttctctttctctctctctctctctccctctctcttgtctgtttctctctctatacttggatttttgtccaaagctgctattagtttttgaaagggagtataggcatagccaacagcaataataatcatcatggcctcatcctccataatattcatcatgatctttctctctctctctcttcgatctgactaataataatctctcactacaccatcattacaacctcttcatcactcccaagcagcagctttgctttattatttatgatgatcatcatgatcatcatctcccagccctttcataaccaccttcaatataactcaaaactactagaagaagaagaagaagaagaagaagaaagacgaagaagatcaaagaagagaaagaagaaagtaaaagaagaagaagaaaataaaaaggttggtttagttggcaaaaaccctagctttttcacacttctttatatggtgttaattagctagagaagtagtacactactactactactactactgcgccttaatttcttcttaattaacggggaatcaagcgtatcggtccgatcgatcattaatttgctagatatcatcaccatcaagcaaatcagtttatcggtttttttttttttttttttttggaaattttgctacatgggatatttttgttattccttcattttgaaaaactattataaacgtacgtgatttgtttctgtcttcatcatttatatgatctgttaatgctagtaatatttttagagtcatccattttcatttcactttcatattgaaaatattcattatttcacaaaaaatgtctaatatatattgttggcttataaatggatagttaaataaaaattattattttgatttgttttgatgaattgtagagatctcttctctctctaattctgagatcgatcgaatcattgaaaggaagcatatattttggtgtgttgttggagtttcgttttttaaccgttttgctcagtttaaactgatgaaagagatagacaaaaacgtacatctctcttctcgacatgtaataaatatatcctaaattataaataattaaattttaagtttttctgaaataagggtatcatcatattcttctgaagcaactcccgtactgagtaagaaaaaaggaataaatttaatgccttaaaagtactgctattattttcatcacactctatatatacaatatgttcatgtctagctagctagggttttgtattatatttttgatagttttgttagtttctttaatataaatatttataccgtacatgacatttactcagtttaattacatttgtctattctagaatattgaccacataatcattaagaaattacagttttaatggtacgttttcgtattatatatgtacatgtacatctagacatgggaattactcatagattttatttttggctgggaattatctccattattttaggctttattataatatacttcatcaaaatatgcttacatattttgataataatgcttatatatgcatatataaatattaactaatattatgatcaaaaccattgtgattgtggccgcttacattgacccaagcaataagtataatttttagctagaaaggaaagaaaagaaaaaaagacttaatattagtattacaatcggaaagaaagaaaaaaaatattcaatagaagtggtatagtgataaaaaattcatgaaagaaataagaagaaaaaaaaagtttgtatatattaagattttacatcttatatttatatatagagcattattattgaacatataagtggtattttatgattag

SEQ ID NO: 21602 - DNA, 2594 bp, Cannabis sativa
ttggcgaggaacttgtatgaaatgaataaatgttagataaactcttctcatcagctaaatatttgcaaattctttccctttcttattatcgtataatatgattgtgtagttctatcggcaaatcaaggcatttgaggtacttggacttatcatcaactctttttaattgttgtcgaagaagatttgtcatttgtacaatttacaaacactactattgataagttttaagtacctcgtccggttacccgttgatataggaagattgataagtttgcattatcaaaacattattgatagaaaagtaacaaaaatgctagcaggaatgtcaaacataaaagatgtgcaaactttaattgattttatgctatcatttcccagaataaattagttaaagtttgcaaatcgttcatattagacattactccttgcatttatgttatttttgtatcaatattgctttgataatgcaaacttaccaatcatcctatatcaacgggtaactaggtgaggtacttacaacttttcaacaatgatgtttgtaaattgtataattatgacaaatctaacccgacaacaatataagaagagttgttgatagatccatgtatcttaaacaccttaatttggcaataaaactagacaattatggtataggataataaaaaagacaaagaatttgctaatatttagcaaactgcaagagtttatctaatacatgtttgtttcatacaagctcctcgtcaacttccgggtattctaatggtaaaaatgtcgcaaaaatattatttcagcaaagtccataaatttcgttacactgtcaatgtctctttttttatctgacatatgaagagtaaattgcttctaatgttatcaaattcatcaagttttatcctgcaactaaaatttcctaaaataaattttaccaagacattcaattatccatgcattataaaacctgttatccccgatctttggatcaatgacctagctacaagatgctcaaagtactcttccccaacatcttctatctttttctctatctcgcattgcaaaatatcttctctcatccacatccagactaattctttttgttcaaattattaatgcttggaaagtatcgagcaatatgttattcatttcgttagatgtgttagcagataatagtaactcaaccacaaagtttgaatgatattactttctctctcgggtaactttcatatgtcgctcttaagtaaaatattccatttttttggatttaattctgaacgcaaaagtacattgactgatttcactgtcaatgtaaaattattacactttgtaataatctacctatcagttgtttctaaatttgaatgtccacatgagttttgagcattattaaaagcatgcttagcaatctccaacaataatcattggatagtgtttatacatgtgatagcttgtggcattactaactttcgacgctacaacttaacttctagtagtctttacgattttacttccccaagctcaagactcaaaataacttttaagataatctcacttgttgtaatttcgttttatatgtcatctaggacaaaaaagaaattgctggccaaaaagcatttcaagtaaatctggagttgaaatcattgctatcgtaaagctttttattataatagctttcgtatctgagactcattttctctaagttgacaatactattaaaataatcgttcactctatcatcactataaatgagttagttatatttgtctccccaatcccaatcattcatactgtagaaaggacatcagtttgagtactgcatacaattgaatttagctacccaacaatatgattcttgtcaaaactcctacttaggatatcgcattctttcactaaaggggcaaggtaatgatcaaaatgctttatttttaatatctttttcctaaattgagaacatttgtttgaattaaattgcattctacttcatctagtagctctcttattttggattctactttgataactagaataagtgaaagtgcttaactttcacaactgcttccaggctcacttttcactatgcattccaaaatatttgttcttatctcatttattaagttctctaactcatgggaagcttcttttagttcatcaagtcattcattcacacttctatttcttattttcatcttctcagcatcactagtaacgatattgactagtcgtaattttttaattatttttttgaacatctttcgatcttattttttttgccagtataaagtctacaatctcttgagaatctaccatttcacaaatttttttcaaacacattcgagtgaatataaccaacaagcacgtctgtcatgatttatggagtcataaatttctgaaattaataagaaactacaaaaatatatatgacagttaaatttgatagcttgaagcttaaattcaatcaagattaaatgaaaatgacaccaaatattaattcgtaattgtaaaatcatgcttaaaatgagtaattgtacttaccatcaaggtttgggtatgcttgattttttagagttagtgagcaatgaattaaggtaatcatttagacagtt

SEQ ID NO: 21603 - DNA, 1163 bp, Cannabis sativa
aatagaggttctactgtattatttaaattttgtattatgctattgatttatatttgaatcatttttttgtatatgataaatttaaattaacttttagcatattactaagagtaaatattttacaatatacattatattttagcaataaatcaccaaaagaactgatctaaaaagttttactaaaaatggcaaaaattaaatataattttgttaacttaataatcataatgaatctttagtatactttatacttacaccaacaccaagtggtccaaaagtccatggttctagacttgattagtgcaaaatgatctattaattggagagaggttatcttaccattacaacacaattaatataattagcatttttttttgggtggaaatataattagtatttgcagacacatacatataacttttcaaaaagctcaaggttagttgccccgtgtaaatcctctactgaatttactttcgctttcatatctttttagaacatatttttactaagtgaatcatattttaattttgaatttgtatatctgtttaagatgtttcaacaccaatgattattatattattgagaatatgatacaagtatattaagggtgtctaacaccatttattatattatattattattgaaataattaaatattagttgtcacataaacacattaataaatgaaaagagatcttggccaatttttttatttttcttttttctttttttttttttgctgtttttttttttgctggaaagatcttggctatttactaatctaataacatgctaagaacgtgttaagaaatttaaataggtacatcaagagattcctttgttgaattgtaattagtgcggtttaattaaaatattttgagatgtttttaatattaatttaaaaatatgaaggaaaaaaatttaaaaattaaatattattctttattcaaatttaatcttttataaaaataaaattctataatgcactcttaaaaggaatgtactaatatgtctttatttgttttagtattcgaaataatttttagggctttttctttcttacactttaaaatagtgtttttttttttttttttacagaaatctacatagaaatccacatagcaattaacggaacaacttaaattgcaactaaaatctacata

SEQ ID NO: 21604 - DNA, 3420 bp, Cannabis sativa
ctctctctctctcactacaagctctgtcctctcacatggagctgcccacattagtgtaggagcaacacgacgctgcatgaccatgacatcctccatcatcccacacagaccaagccacaattattgtgttcttctccaataatgaaggacgagtaagcatctcctcctctctatctctctctgtcgatcactctcttcttctctctaattttcatttttttttcagatgcaccatggtcatgagttttgctgctcgctctcggtggctatggaatttcagagatccataaatattttcacttttagtttaattatttgcaaatctgatttttgtgtatatgtatattggtttatctagctaaaattttgtgtatatatattgatttcacatatctcatatttttgtgtatatagatatatattggtttgctaatataatttttattcaattttatggtttatgtactttaatttgtatctggtatttcgaatagagatttgagctcgagatagttcgagtgcccaaatctaaatttttatttttatttctgtagttgagtgttagttatgaactgatgtatatggtataatttatttatattgtgtcggttcaaaattgacggtactatttttaatgtcgtcagttacgaactaacataatagagtaactatttgtgtcccctgtatatacgtcaattacacgaattgacgccatcattatatatgtcatttaaaaaatgacactaataagcttttcttttttgtagtagtgtatatttgaagactagatgcattatatatgtaaattttcatgaattgcatgttttatgctcggtagtagtggaatgcgacgtttggcctatagaatcacttagatatggtttaaaatatttaatttaacgagatcatatagttagacatctagaatgttggagttacttgggattgtagttttagaccattttacccttaagtttttaggttgttctgtggtgaagaaatggcaaagttgtcatttcattttaagttaagtaaattgttattttgtggaattttattaatattttagtcatttaggctgatattattggggaataagacaaaaaggattaattcttatcttttgatttcttttagccaaataaaaaaaattaattagaaatgcatgtccctcgctccaagtctccctccctctttcacgacctctctagaaaaacaagtagaactcaaccctctcattcttgttcttgaggatttcagcaagctttgaaggatttttcatgagtgaattcaaaggtaagagccctagttcctccacgcctttgttttctaggttttgagtttaattttgaagtgaaattgtgattatggcactgtttaagtttaagttgcttgggattaattttttgagttgattttaagttagtaggagttatttgtacttaattttgttggttgtgattgtgctcaacaaatgtttgagtttttaaattcaaacttggaccttaaatggtgaaatcaaatttagggagttatagctattattttttgttgaaataggtatgttatgacttaattaggttatctggaaggtttgaattgatttagggtagaattgagttgtgtgtgaagtttttgaggattcttgcactgaactggtcgatcggttcagttttgccctgtagaactggtctaccgttcacccaggtagcacccttagaaactgttttttcattagggaatccgtttaccggttgtagaaattttggcaccctagaatttcatattttagaaatatttagggtgttaacatgttaaccatcgagaggaaaacttttagttttgattttaagtccccaaaaagttttcagtacaaccatgattttcccctcagttagtagatgtcatgatcaaagttaagtatggagtttgtgctagataaactcattgattcaacacttcaaccaggtttatttgataaatatagaagtgctcaattgatggatgtaaaattcagtgaaaacccataagaaagctttagcaggctagcttagagatagtttgagctagcctggtattagatcacatgatgttatgttataaaactctagtttgtgttccaagcagtgtttagctcagaagcaatattctaaggaaagctcgtaccactacttattggttatactttagtactattaaggtatactaaaacttgaaaattctacttattaatggtgtagaatgcaaaaggatgtggtagataatgtattcgaatgctcaatttgttagtgaaataggactattcattagaaaccggtaaggttattatgatcgattaattttctcaagtgaaatgggaagaagttgctaggaattttgtaaatggattatttaaaaccacgagtatatctgatttcgtatggtactatttcgatgcaagaactagcatggaaagttataagggagatagtatgactttatgcgaccctaaagtccattattttgaataggaaaccaaaatccatctttaggttttaactaagtctacagagggccattattatgtaggtgaagtttagtacagtttcctacccatagacagatggctagttcgtggggacaatgcaaatattgaaacatatactacaagtttatatgataaattacaagaatatgtagaacaagtatctattttgattaagttctcgtgcagccaacaattatcaaagtgtaatagggatggttccctataagatgttacatggtatgaagtgtgatttttttaaagcttagagcaggaaatatctaaatccgaggtcagtttagtagactagtaagactatagaaaagattaagaagacaataaaagttatgttaacccgaagctcagaaatacaggaatccccaagtaggggaaatattttggggacaaaggtaagatttttcctagattcctaagacttttataacttttcgagaaaattaggttgataatttctcgtttagctttatgattagcattggcagcataaatgatatttctatgttgtataatgacaaattcgattcataacttaaaattatgaatccctagaactttagttagacctatcttatgaacagaaatacgttgaaattctcaataagaaatgtaaagttatttgaagcagaactatagtattggtcaagatacttgaacaaacattagggcttataatcagaaataagtcttaagaaaatattttctcaatttaggagatatatttgaacactaggcgcattatatatgttatatgtgaattttcattaattgcatgttgtatgctcgataatagtggaatacgacgtatggcctatagagtcacttagatatagtttagaacttttgatttagcgagattatgtagttagacatttaga

SEQ ID NO: 21605 - DNA, 2237 bp, Cannabis sativa
  modified_base (952)..(957): a, c, t, g, unknown or other
attttattattataaataatcgatttaaccaataagttacattatttgtctaaatgacataatgttattctcatagtagatatatgtatatagtttcaatataaaagtgattgttgggaagatgtacataccttgtctctctcttgcacaattatatctgttttatgttcaaaatatctattgccgacaaactatcaacagatagttcagagtcctaaaatcttaatcaaacccctagattttctaataagttaaaagaaattaaaacaatataacactattcaaaagctttatatattccaagtttataaaaaaataatatagcacagaggtcataacatcttaatcaacaaaacacaatttttataaaccaaacatccgaaaatatataatgccaaataaatatggactaaccctataatctctagaaaaattagagcataaatgaccagatgagaagttttttttaaaaaaagctaacttgattaactctcaagtgcttcttaatttggaatctctaaccctccaagctttctctacaccatccattgagaagaagaagaagatgagaagaggatagcattgggtgaagtgaaaagaagaggatgaagaaatgaagaaaatttaaatgaatagttaaaaaagtaataactgaaataactgtcacatcaatatttattattatttttaaaaagttaatcggttaatgggtatttttttaaccaaatacccttactgcttatgtgtacaatattctattgaatctcagcccttaaattaattacacacaaaattgaatgatccacattaaatgcgaaaccattcatcaggtaacatcaatccttctcccgctacaaaaaatcttacttttagtcacaacaaaacttgtaactaaaagtaaaaaaataattcctatattgtgactaaatgtattagtcacaaaaattacaannnnnngtgactaaatgtgtttttagtttggtcacaatagttattatgactaaaattaaattagtaacaacttgtatataaatactatattttaatcacaagtaattatatatttttggttgtgattaaatgttaaatatagtaataaaaaaattaaggtgtgactaaagagttattattaaaaatagcttttctttcgtaggatatatagacagagaatcctagttcttatatatgataaccatgtatatcatgaccttcaactactcacaatacatctaacggatctgatcttcatagcatatattttcttatcataaaaaaaaaaaaaaaaaaaaattaaagtaaaaataaaaaggaagtttaggtggtgggtattatggatatcggaagctctagtcatcctttatgtgaaaaagtttcaagtaagaattttgtgaagaacttattccatatcataatcttcttcctcctcttatctcttcctacttatcgaatcgcctcttaccaaaatcatgataccttttggcacctggctttactatgcgagctgtggtttactttctattgggtcctcatcatcagcaccaaatggaatcctgtacactacaaaacctatcctgaacgactcttacaatggtaaaaccatattaataaatttactaactctatctttttgatcttgttctataattatgttgtcaattaataaaaaaagttaataatttataaatgttatgtgatgtcattaggaggggtgagctaccttcggtggacatgtttgtgacaacggcggatgcagtgttagaaccggctattatgaccataaacacagtcctatctttgttagcagtggattatccaactcacaagctagcttgctacgtgtctgatgatggatgctctcctattatcctttactctctcattgaagcatccaagtttgctaagctttgggttccattttgtaaaaagcacaatcttcaagttagagcaccttttagatacttctacagcaatgatgatgatgatacttcctcctcatctgatcatcacagtactaaaaagtactcaaaggattttcaacaagaatggatacgtatgaaggtaaaatagaccacatctttgattttattatgtgcaaatagaatttgtgcacttattttgattcaaacataagatttatttttctctcacatatatcttttaaaattcttcaattctgaacaaagcaaaagaacaaaattatttctaatgtttacgatattagaaatgttaaagggcat

SEQ ID NO: 21606 - DNA, 1499 bp, Cannabis sativa
taactcacttgtatgtgatcattagagccgaagccatcacattgagagtagttaccggtttttcccacattaggatttcttgaaaccgaggcaagacagttttaaccggcttaagcagctcctgtcgagtaaaattagccctgttaagcgcataaaagaaagaaaaatgccttagtataagatatttgagttgcataccatcaaaaccatagtgctttcggttattccttcctctttcaaatgagttgtagtggctttcgctacagcactttccttctcttcttctctagctttatttatagcgctttcgagtgaagtaatgttgtccaatggacctcttaaactttctttagtaacttcatcttctaaactcgagatcattgcttctctcacattcatcctcctcaagagcgagctagcactgcacgaatgccctggactcgccgtcttaagactctcggctatcttttctagtacataatcacccttcggtattttatcaaataaggcgaaaatcaagaatttcgttggatcagggggcgacaatttaagcatctcccgtgctgcgtggagccttataatacttagtatcgtcctcgcgtgcatctcccatgcttggatcggacacttcacattgaatgtggatagaaattggtgtagaagaagaatctcccttgtcaacgcaagccaatgatcgcgtctcgtcgagctagttaactcgggaaactctattacaattccatctgttctaaaacattgaaaaaaaacaaagtatattttcttatcaatacacaagttgatatgcaaattggcaatttcatgtatgtaaaaatgaaattatgtccttacaactccgatgactcgtaaattatcgccttgttgaagagcggggcaccccaaggccctgtagcgatcggtttcacactctgttctatgttctttgagaaatctatcttaagtgcatcttcatatgatattactctagatgcctcaaagtaaagagcatagtttgttagtgtaagtctacctgaaaacataacattttgtaagtacaaatgttgattttaatatttctcaaaattcaaatatgaaacaaaattatgggacaaaccaggccaactagttccaccaatatggcgtacaactctactcgaactagcggttccttcgacatgtagtatgaattcatcgtcaccgagctccacgccacttgggatttcttgtttttgcaagtgtttcatggatctacaaagttaaaattcatgtcagttaatctgttcaactaatttaattgaatacaaaattgaaagtgttattattacttgtcgatttccttcaagaatttatcgtatgcaggaaaatggaggcggtttctagttgaagctgtgagagattcaaaggtaaatcctccattaacaacatctgtaactaatacaaccaaagatccaaaccatacaaaagcttcttctccaacacttggctcattatcaacctgaaac

SEQ ID NO: 21607 - DNA, 2986 bp, Cannabis sativa
ttggtagtgtggttcattcgccgtttccaacccaaatagtctatggatggttctaatgttcacagttacacctgttttgcgaactctgactctttcgtttgtttgctcaggccaatttgctagaaattaaacagccaaagtttgattaacttgctttggaacattcacaaacttctcccactggtggactttaatttgttgcctcatattctcaaacaatggttgattcggtatgggatcttcatcatattctatacctcgatccacaatgaaagctttcttttacaattcaaagtatctctcttgtgcttttagattgacaaatctatctttttcaaaagtgaacttcgacgccggtgttggcagatttgatgatgaagcacccaatggcccaattctagtacgcttggaacccatgacaagcttcaaaattaccacttaaaagttctcgggaaaattcagcaacacctccctttaattttttcacttcccaaaatttcaattgtgcaccaaaatcataccacaatattccaataacaataataatccacaatattcaacaattcctcaaaataaatccacaaattcccaaatactatagaaaattagtcaaacttgcgggaaactcactaaattaatcaaaatcttgaaaagaaagagacgtactaagtgagaatgtcgtcaatcaacctccattgttgaatatccatgaaaagcttgaggttgaagatgatgaatagtagtaatttcggatttgtgtgaaaagttgtgagttttggtgtgatttttgaagagaaaggaagattgatgagaaaaaattggattttaagtgatgtagatggaagaattgaagaaagaatgaaggaaattgagcttggatgataggaaaaggttttgggggttgagaaaagggaagaactcgggtgggatttttattttagggtttatgggctttttttgcgatttggagttttttttattgatgctgaaggggcttcgccgcggtgggtaggaagctttgctgcggcaaaggatgcgagcccgactttaagattctcaccgccaactcccgtcacggcaggcaatgggcttcgacgtgactactgggaggaacctctttttttcgagtttttttcgttgtgaggtcccgtcgcgatgggcaatgtgccccgccgtgaccactgtagcggaccacttattttttttttcatgttttcaaatttttttaacgattttcacgattttaattacaattaaaattgtacaaatctaaacaaaatgcagtgaaacaaattaaaaagctacaaaatatttgcaattgtctttaaaaaatcaaaagaataaataaaataaaataaattgggttgccactcaatagcgctgtctttatcgtcatatagctggacgctgatttctgtcttcaaagaggggccagaattatggcggacttggcttggtcaatatgacctcccaagtagagcttcaatcgctacccattaactttgaaagtttctggactcttgccttttagttcaacagcttcacatggaaataccttgaccaccgtaaacggccagaccatcttgactttaatttgccaggaaaaagtttcaaccttgaattgaaaagtaagacttcttgctcgggttgaaatttcttccagactaaatttctgtcatgccatttctttgtcctctctgtgtaaatctttgcattcttgtatgcctcgttcctgaattcttcaagctcatttaactatagtagtctcttttctcctgcaactgctaaatccatgtttaaagttttcattgcccagaatgccttatgctccaattccaccagcagatgacaggcttttccatacaccaacctatagggtgacatcctgattggtgttttaaacgcagttttgtaagcccataatgcatcatctagttttcttgaccaatccttcttcgatcgttgcactgttttctctaatatcagcttaatttcccagctggaaatctcagcttgaccattactctgcggatggtaaggtaaagcagacctatggtggactccatatcttgctagcaatgtttcaaactgtttattacaaaagtgactcccttcatcgatgatggttgctcagggagttccaaaccgagtgaaaatgtactttcaaagaaaagacaaaacttttttaccgtcattggcgtgtgttgcagcagcttccacccattttaatacgtagtccacagccaacaagatatacagattgttaaaggaagatggaaaaggtcccatgaaatctatgccccacacatcaaacaattctacctctaaaataccaatcaaaggcatttcgtttctccttgaaatgtttcccattctctgacaacgatcacatgccttcacaaattcattagcatccttaaagagagtaggctagtaaaacctgctttgaagaaccttggcagcagttcttgttccactgaaatgccctccacattgtaaggcatggtaatggttcaagacagaatacatctcttcttcaggcacacatcttcttattatcttatcaacacaatgtttgtagaggattggctcttcccagtagtagtgcttcacctctgaaagaactttttttagttgttgacgagacatctcaggaggtgtaacatttgcagccaagaagttcacatagtctgcgaaccacggtaccatcaagctttccctcaaactaaagagttgttcgtcgtgaaactcttcatttatctgcacctcctttgcgttttgactctcttccaatttaagccttgacaagtgatcaacaactaggttttcagtctccttcttgtcttttatctcaatgttgaattcttgaagcagaagcacctaccgaatcatcttggctttgcatccttcttggtcataagatactttattgcagagtggtctgtataaactatcaccttatttccaatcagaaatggccgaaact

SEQ ID NO: 21608 - DNA, 6161 bp, Cannabis sativa
gaaatacatgacctataccgtaggtatcttaggggttaggtggatataatcttttatcccctcttgattgatgtgattcctcataaagtagccatcactatagccttattaatcacatcgtaatagctgcaaaagaggggttacgccatcaatcctattgtttatggtagttccaatacgttttcccccatgcagtattaaatgtgaggtgattgttcaataaagtctagtacctctcggagctgccttagtgaggccctggcctccgggagcataaaggtctttcttgtatcttctctaggagtaaacgtcccagagacacttctccgctgcccaagacttagttgatttctttaagagcagaccctctcagctccacgtgtcgttctcgtacaggtccacgtatttttaggcaaaattaaggcaacactttctaattttcacatattctttttgtataaatgaaatgaagaattttgttttattaaaagataaactcagccaatatagctaataaaatcacatttaataacttaatataaactcacaaaatgacaaaaactccaataggaaaaacaaccattttgcccttcccacactaaaaatcgtaaaaggtcacttaggggtatttttgtcaattatatatctcgactatttctgacatttctattgtctaactatactgctccgctatactaaaatactaggatgtgattctaatagctaaacaccacgttctaatgttgtcgggcacaaaatatgcaaaattatattatccctatttccgctcctaactggattccccatgtgtcccaccctaccattctccaccaaattgatccctccctttccactgtctctttttttattaatcctgatcacaccgggaatgtcgataaactgaagcattttcttcctctgtatcagacgaactcagttctcaaaattcccttggaccctgaacctattaactctcttatttggggctttcatcattctggcatccttaccgttaactctgcttaccatcttgcctcagctacagccaatacaacttctccctcttcttcggaccctaacccttttaagaattggtggaaaactctctggaccttacctctccctcctaagataaaacattttacccagaaagctttcacccatctcttaccttgttctttaaacctgtttcacaagcaaattcttccacaaccttattgttaatcttgtgggggcagtgcagagtctgtctctcatgcacttgttgactgtactggaggcagccaaatatggaaacactccaaattcaaacaatttcatgaaaattatcgaaggctggatattagagaattttatcttcatagccttaattcaatttccaaggaagatctccctttgttgttggtttactttggcaaatttggaacataagaaattctgctctctttcaaaagccgtgtgttactaataatgtccaagagtttgttttaagctatttgcaggattataaggatgctcaaaagttgtcctctacattgtctttgctgcggccttcctctccacctgcattgcatcatatccttcaggaagatactcccgcattatttgttgatgcttctctaaaccatgaagatattgctactggtttaggtcttgttttcaagaaaggtccacaccaaattcttaactctcctaagttttacaaggcaagagcttccactccaatttttgctgaagcccaagctctctatgaaggaattcaatggtatatttcttcccagttgaatccacgattcacctttaccgattgtcttaatcttgtcactaaagtgaacggaacttggcatgatcactcgaccttatctagtattattgtgaagatcaggatctctctctccaattaccctgaggcttctttgctacacttaccacgccaatttaataaaaatgctcattctcttgctaaggcagccctcaggttacgagatgaagacttggaggaattgttttagtttcctcttttggctgctattgttctcttgtcttgtttctttgttgcagcctcttgttcctcaaaaaaaaaaaaaatatataaaatacattctgaatttaaatgaatcaccgtaaaataataattcataactaacatgaagttttataattaaatctgaattatttgctaatttctaaattaaaattaagcggtctttacaggtaatgtattatagatagataattttaattttcttttcattattaaattagaaaattagaggaaaaatagaagaatcaatctatctatatatttatataattgtgttattagattagatgacatggcatgttttatgagctttccttttctttttctgttctctcatttttcttacattatttagatttttgttaatttttagtattatttaattaaagcttaaacctgattatgttgcagcttacaaatttattattccatgataagaattttcttattgattctcatcattttattgtttatgattctacataaacaatttaataaaataaaataacattttgtaaccactcaacaatttaataaaataataatgacataagttattaatagagcaatcaattattaatttaataacaaggaaaatagaagatcatgagtctaaaattatcatgcaccaactttttgtatgctttgaagatcatgagtcaaagaatatcatcagccatatttttttttatgtttttctatattaatgacgcgtatttttttttccttttgaaattattttaattagaatatgatttattgaaaaaaatgtgtttaaaataaatgatacacgtattgtttgaataacatgagaaatcaatcaatttttattaaccttttattattttaccaaatcaatttaacttttaaattcataaagtgtataataaattttcattaataataataagtacacctaaaattttgggaaaaaattctctgtctctgaaaaaattctctctctttgaaggcaattctcccctgagactggaaactcccatgctctcttcggaagagcctaatcaaaggatgtgctcggcaagcatggaccaaatggaggagttgctctcgagcaccagcaaactaacggttaccgacgaagacggatgggaaatcaatgaggaaggagttgcagacatcggaaaatcctgcctcattggcaggctctgtacaatgaagccttttagccgttctttactcaagaacattctatgccgcctctggaatttgggggacaccgactgagatttaaaaatcaagaaaaccacggctacagcagtgttcttggttctttcgttcaaatcgaacattcatttggaaaggatactgggaaaaaccccatgggttcttaatgcttgttttctcattttgaaaggatgcagggcataccgacggactaggaaacgactttatgctcattcacaatctcaggtcgcatactaaaccttccaattaaagccataactaaagcaaatatgctacgattggcaggtatggcaggggaaatcatcgacatttaagaagcggatgttaatcgaattgcagtcaatggtttcttcaaattcgaagctcggaacgccattcaatccaaactcttcccaggctacctattcctccacgaaggacggcaaatttggctccaatttcaatatgatagactgccatatatgtgctttaactgtggcagaataggccatgaaatgcgacaatgccaggaacctagagctacgggaattcatgaagatggagaggtgagaccaatcgttggttcttggcttaaagtggattcgggggcaagggtagaactgaatcacagcaatgaaccaagcccaaacaatcatcgagaactccatggcaatcaaaagatccaatctatgaaagacgcagatcagagaacacaagagagaggggtaacacataccggtactaaaccaatacaaggtaatcttaagacattccctttatttaataattatgaacaagaagttataaatgctaataatatcaatctaactgattcttttaatccatctgctgcaatactggatgccatgaatgaggccacaagaccccatagtcagatggaacattctggcagtggaattcaaaaaagaatgggtgatgaactcaacaatggggcggttactaatcagttgggggaaaggatatgcaaagcaagaactatggcttctgaattcttaaacaaggaaatggaatccaatcttgtggaggttccaataagctttgaaactggcagtctaattcagcaaaaaggcacaagagaaagaagaaggaagtttgttacaaagaaaggcagtagacaaaaggtgaaccatgacagtgtagaagaagggaagagcatttcaaggggtaacaagacacagggaatagacactgaaacactaacaggggaagttttgttgttaaacgattcaacctctgaccaaacccaagaatcgacgaactctgctgggcagggtcgccgagaacaatgaattccctattttggaatgtccagggacttggcaacccttggactaccactgctttggccactattgtgaaagatcatcaacctggtttagtgtttctctctgaaacccgttcaaaaagcacctaccttgaatcaattcgcatccggttgggttacgagggttgtttctgtgtagatgctaagggcaagagtgggggtttggctctcttgtggaaggagccgtttacagttcacttgaattcttttaacgatttccatattgatgcttggatcaataaggaagaggacctcgcttggagatttactgggttttacagggaccccgatccttctcaaagaaaacattcgtggcagctccttaagagaatagcaaggaatcacaacgggccttggctttctgggggggactttaatgagattagaaggattcatgagaagcttggaggtggcgggaagtcggggcatctcatgaaaaactttaatcatgccattgacacttgtgcgttgcgggaaatagattatgagggcagccaatttacttggtgcaatggaagggctgccaacatgatctatgaacgattggaccgtgtgatggtgaacaataattggtggaagatatattctatagctaaagtcaaacaccttagccgatggtgttcggatcacagcccattattactaaccttcaatacaattccttgtggagatcaaaagaaagaacggtggggataccgatttcattacgaaaaggcttgggccgacaaggaagagtgccaacaaataattcaagacaattggaaagaaggaaattctattacctcggctacagaccttgctgagataataaataactgtggtactctgttagatcaatggaataaagtccaaaggaagaccaaccttgccaaaataaaagatctaaaaaaagaggtggagaagtactctaatgaccactcaaccgatggcttcaccaagcttaaaattctagaaaaagacctcaatggtcaactagcaaaagaagagttgttttggaaacaaaggagtagagctatttggttagcccatggagaccgcaacacaagatattttcaccaaaaagcaacatcaaggcgaaagaagaaccgaattaatggactttttgataaaaacctgatctggaggagctctaaagaggacatagaaagcactatttgtgaccatttccaagatcttttctcagcaacggatggtggtcatgctacaacagaaaaccttcaaacgatttgtgccgttacgcttcagtagaacccaaaatgaccgactgctaactgaatttacagctgctgatattcacctcgtcttatctcaaattaacgctatgaaagcccccgaaatagatgggatgcctcgactattttatgagaatcattgggaagttataggaagggacattactaaggtatgtttggacatactcaacaataacaaggactgtaggcagctcaataagactctcctttgtctcattccaaaaatcaaacacccgaaacaagttggggactaccgccctataagtctttgcaatgtgagttataagattatagcaaaatgtcttgccaataggatgaaggatagtcttaaaga

SEQ ID NO: 21609 - DNA, 1649 bp, Cannabis sativa
tgagattgtagtatttgtttatggactttttttctaacttaatgtattattctgcttgattttaaagaataataatgataatattgccaaaaaaaaaaaagaagaataataatgataagatattttaagtcatgatgataaaactattaataatataagggtgtgtggctaattattaattatgcgaagtcttttaaaaataattatgttagtcagagaaagcattatgaaatcaaatattaaagaaacatagtagtagagaagtagagaataatttatgattttacttattgatgtataattaggtgttaataattataaaagcattctaaactgatcaaatattaaagtcaaaaaatgtcttagatgtatatatatgtgaaaactagtgaaaaaaaaattacaaaataaaacaaaacatatcaactggttttaaaaggacaaccaaatatagaacaatagttgcagttaccaacacataattatacttgaaaaaaatagaacagagactaaaatcaaaatgatgtaagtacagcagatcattaaattattagagttctacctttagacaccttagataattaatttaaaatcattttaagcaaaaaaatgtatagcagatcattaagcataaagtccaattaaatgtcagccttagctaccttgaataaggttgttttgaaatctagcactagcatgacgataaaaatactttgtgttttggtcaccaacctgtagccgttggactcttgatctttgttgccaagaaatttcttctttcttgaagagatatgacaaataagattcgagctgagaaacttcttcttgattatacagatcatgatcaacattttgtcctgtagacaatttccgtttagtacaccgaatatctttaggtaatgtactatacttttttaagtaccaagaatctaaattttcagaacaagaggctatatttgtgattacagtatctaagctagagaactcagatacaggcaaccatgagttagatattatatgttgacatttaggatcttcattccataaggcttcataacgaaacctcttccctttgttacatgaagtcaaagaagaagttgggcataatcctaactcaagactaagcactatatgatctgatccgaaaaagtctagatgagatgaccttgctgcaggaaaattagctctccaatccaagttaactaaagctgaatccaaccgtttctgagttagtgcgatacttccaagtaaaacgagttcctgtaaagtctaaagggctcaaggaactctcttctaaagcttgacgaaaatagttcatctgagattcctgacaagttacaccacccattttgtcacttagccccaaaatttcattgaaatcttccatatataaccatgatcctgtaataaaatcacttaatcgtctaaacaatgttcaggagaaatgtctatttgaagtggctggttcactataaagcccccaaatgtggaatgaagaagtgccagtagacattgttagccaacaattaatataattctatttggcatcaattatggaaactaactgacgagtcccataatatcataagaccccacttaaaccaatactaggcacatcatagccatgagaaaaggaaaaattcttacaa

SEQ ID NO: 21610 - DNA, 3027 bp, Cannabis sativa
  modified_base (2181)..(2183): a, c, t, g, unknown or other
tattatgatctagaatcaactgctaccaacgcagcaaggaacacttccttcccaaataacaaataaaagagctattagatcactataaattatacataatttttttgaaacttatatagctaatttaaatctctattactcacaaaatttttctttctaggttgttgtagtggtagttataacattttaaactaaatacatctatttatgaatatatgtgcttctcaaattccattactaaatcacatccctctatctaaaagagttgatgtggtgactagtgtgctgataattaaattaatacacacctcagaagtattatctttataaagttatgatttttgaattattatattattgaactaaccagttgtgtcccaaactatatcactattgttcctctagaattttggacataaaggcctaatttggtagttgtaacagttaaaaaaaattaaaacatgaaattaaaattcataaattaaagtaaaggtaatggttataataattcagaaacaaaaatcatattcattaattctcacaatttttttggatcgtttataatcataaattttatcctcaaaaaaaaaaaaatgtcaagtcaccatgtctttgtcttcggtggttttattttcttctataagcatttattaagccgattagattcttttgtacgtatgtagctatcgcactctaagtagtccactaatgactaaactaatataaattataatataggaattatttcataaattcacaaaaatataaaaaaaattataaaaatatgtttgtacaaaatttgaaattttttttataatttttatgattttatttataaaaaatataatatttttatatagtacattaataatttatttttaatttttaattatttatatattatcttttttgttattgtttggatactattttaccgttatttgtagttttcttattatttatgtattgtttctattaaaaattgtaaaagtataaaaaaaaaaaattaaacataaaaatatattatactataataaaatagatttgtttttctttatcttttttgggaatcaatatgtttcatgtgttgggaagatatttgaaatatatatttttaaaataggcagatatgaataatagtagtgtattcttttgcatgtgggatccatatctttgaaatatattcattaattttctttatttatcaatttattgttaaaaaaaaaaaagaataagtaatattgtaaaaaaaaatttctaattcattgtcgaaaagagccaaaattgtaagttggcattaatttggcacttaccacacaagataattggttaatgagtgattatgaatatataatagataaaaaaaatacaatattattaaatattccatctccttctgagttccgagtatacaaccatatattaagaaacactttattaatgttccctaataaaacatacatatacaaacatatatagtatgacagttttactactacaacctccctccaacaatgaccatattccagttttatttgaccatatatatatttttaaaaagcatattgttattagttaattaatagcagtacaaagttttcgaatttcaccctgagtaccagtcaagacaccaactttactcatcttaaccatggacttagcaaactcaaagttgaaagaggtggcactcctcaaatattggaggacaaagcccttggttgagggatcggtccacagcagctgatccgaggtgagaatgcctcgtctcttgctcaagttgttgaagtagctgttgtcaaaacgagagccgcttcccgtgtcgagatcaactcggttcgaaccgccgccattttgtgggcagagagctcttagtgtagggacaaaggtagggtcgatggatggatcagcaccattgcttgaattcacgttgtatagcctccctgtcactaaaccgcatgctgctgttccaattgtatgtccacctatatataacatcaaatttcaatccataatcaatctcaaatttcctgcatagagtttttctttattgttaaagatgtgaattatgttttcaaattgttaaaatttcacttgaattattgccatgtaatattgtgttcatgctccttaaattattaacatggttaattatgatttttactcctgaattttgacatgtannnaatcatgcccctgaatttttaaggtcgttaaaaatgctctataaactattgatattttcgatttaagaacttttatctaattttaataaaagaagtctagcatatggttgaaagttcagagggcatgatataacatatgtcaaagttcgagagacattatttggtagatattaaaatctgaggagtatagtttagtagataaacaatcactgtaatagtaacattaaatgaaagtaaacaaaagtccttacatctaacaatctcaatagttcaggggagattttaaacggtcagaaaagttcaaatgacataatttagtacatgttaaaatttaaggaataaaactcctaattaacctattaacatttttaccttcaattcttaacactattagatagtgcccttaaaatataaagttagctaaatttttttttccaaaatataatatttaggtaattatatatttttatgttccgtttcttatatcataaaaaaattaattttaaaaataataatttttaatatatatccttaaaagttattatttttaaattaataaagaataaacaatttaaagtaaaaaataaattaaatttacttaatcaaacttaaattattcctaaaaaagcataagctttattatgttaaaatacgtgtattaataataaatcaaacaaaaattattaaaagtttaataaatcttttaaacaaactaagctattttcttttaaaccaaaaaataaattaagcatatttatatttaagagctcacaatttaaaattaaaaataaaatatattaaaaatctactaaaaaattacattaaaaatttagaaaattaaact

SEQ ID NO: 21611 - DNA, 2020 bp, Cannabis sativa
cattgtgatttttgtttactctgattttattatgctctgcattgcatatttctcaaaggctttcattaatataaaagtaatttgtatcataaattgataagttcaattctaaataaatactttaacattgaggaccaaggtgaagtgtaattttataattagttagtgattttttataatatttattaaaagagtattattattaggtgctaatcgtgtctaatacttcttagatgtgtcgtcttgcaattaactagtaatatttctataaagttatcttgatatttatttgaaccaatagcgatattgacacgtaagaggatgataaacactattgtaacgctttaatatttctcttattaaagtaaaacaagtgggattttatattaagttgcaccaaggtgttaacacgataagttatgtttttggaatttttggtactaaactgttttttttttgacatatatgattttggtgttgtattgaagggggatttaaggtctttacatactaatggggactgtaattactgaatgttccagtcacacatattaatagaaattactcttagtaatacagtgacacattatacacaataatctccattaatttactcaagtcacatgtacggatttgttgtacctatatgcatttctttcttctaatcctttttgtctcttcatttggggttgttaacacacatttttaaggctatactataagaaagaagatcatcccttcttttctttctaagcagaagctatggttccttgacgaatattagcagtcatggcgcgaagctctcctgccatatcgtcgtcatcctcctcatcttcatcatcttctgtttcccaaaggaaatttgcatatgcagcttgaacatggctgagattcaaagacaaacaaagttccaaaaagtcaacacatttgaccaaatcataagaaatagaaacacttaaaagtcaaaaaatttatcttgtaagaaaaaatcacacaagtaagtactttgtgtgtacctgtcttttggagaaacttgaatagctctttcaaagtaacttgcagctctttcttggtcatggtgtaattcccatactatttttgcatattgtgataacatatcaccttctttaggatctgctaagattgcccttgagtaatattcttcagctcctttaaggtctctctttgcctgtcaaagaaacaaagtacaattaaacaacttgtattcatgttttcgatattcaaatagttttaaattaatagaatggtttgaacccttgatttttatatcgtaaagatatcttaaataactacaataagaaaactcgattataaaaatgagtttttacctcatatagaaactgagcatagtttctaaggaacaaagggtttccaggattttcctcaaccaatttcttgtaatactcttcaaacccttgcttatcccattcattcccacctgaaccatatggattaaagtctccattaccaccaccattgccattaccaccaccgcggccaccgccgccaccaacctcaacaacccgcattttatgagacaccctcctctcattttcttgttcaaaactactcatactccaaatcttgtccatactaatcatatcatcctcattaaaattcatcatcatcatcacattctccaaaccaagaccattgcttttcatctccctttgatcaacatcttcttctaactcttctctttcatcatcatcatcatcatcttcatattcattcttaccattagaatttcgaaatgagaaagaaggtatggtttgaagcatcaagcacttaggcctccttggaaacattttggtaactggtaactcgtaacctaataatccctctaagttaccttcagattgagttctttccaagcaatttttcttaacttggctatcaattggtgaggaatttgaagaaactgaagagagatttagatacccattttgaagaaaaccaaatttgttgttgggactattgtgactattattattattat

SEQ ID NO: 21612 - DNA, 7385 bp, Cannabis sativa
aaaactctatattttctcaattgtatattgtatgtaacatgtattgttattttgttctttctttttattacttatatatcatatatatagttttagaattatctgtggtgcacccttcaaaataaacgaaagtgtgcaccccctattaataaaatttaattggctctcaagttgtcatttgtgtttcctaccacggggttgagctgcactatagttattacttaaaaggcaaaacacgtttttgagggaggaaaaaaatacgtttttcaatgaggaaaaaaaactcgtgtataacttattatagatttagattcaactgttagcacccagaattaacacgtactataagaaaacaaatattcgatccgttaggaaatcttaaattctactattgtataacatgttcccagccactcatgttattaagctcccaaagttgaagttgtaagaatcatcttctctaagaaactttaacgagtgaatcaaagaacttagtgaacacaaataggagttcatgtatactcaggattcaagttgatctactaatgatcatcattgtgatatgaataactctttcatggtaaatgatacattgataaaagatgtttattacatatcggctcagtcatgcataatcgaactatacacaacacctttagtacatgtctatccacatatgtgattcgaattaaaatcacacacactagaagtatattgtatagtaaaccatacttagcaattctatattaaagattctcattactttaatatactaccaacttgttttattcatgtcagataatcttaattctcttgtacatccttacaagattatacattctccatatgaataaggaattttttgatatttaataattatgctcttataattaatgtatcatttatcttataattttatttcatatattctctaatatattatccattaattacttacttttaggacataaatcccaacacatgtaagaaacgctcgggacgagtacgtcccgcccaaaacactctactaatggggtagaattggccaatttcagctaatgtccagggaatacctcatgtcaacccgttggccagcctagtcgggcaaggattgacaggttaaaacctagctggaaaaggcaagctgaagttgttcctatagtgcaagcatagctggatcaactcaagaacatgatacaaggcttgtctggcccaaagctgtctgacttagagctggataggacccgagggtgacctttttctgcatgcattaatgtgttgccattgccaaccaagttcaagatgccaacttaatgtacatggggaaagaagatcccttggttcacatcaaatattttgagatccaaatggatttgtaaaatgttgaggttgatattcattgtaggattttcctagcaaccttatccgaaaccgcacagtagtgggttttcaaactagttgttgggaggttcaattcgtggaactatttcacaagagagttctacacagtttttgtctttcaagcaaacaccatacaggctagaagacttagttgaagttgaatagaggcctggaaaacctctaaagatttataactgaggctacaaaagtcaaaaatctcgcagaagaagaaaggtacacagccatcatgagtggcattctacctttgagtgggttgtggaaagatatccactgacatttaactcaaaacatggctgatttctttgattgggaagaaggatttgttaagcttgaacaagctgtctaacaagcccaaattgggagaccagcaggtgctagacagacctaatgtggaagatagcactcacttttgtccaatacacctgccaatatgagcagtgccagccagccctccaaaggccaaaacaatggaggcaagtgtaacaacaacaactctggctgagcaaaaggaaaaaaggggaaatttaataattcccccattccaaaagactcaaaggagaaggaggagaggtttacatgcttcactctcctaacaaaaactcctaaaatagtctatgtggctacacagtccatagttccatacaggaagcctcctccaatgaaaaaagacataagtaagagggacacttcaaaattctgccaattttacaacgattttggccatgataccaacgagtgcaagcacttaaagttaaaaatcaagtttctaatcaggaagaacaatccacatctgcatcattgtgtacaagatgaccagacacaggcataaggtgcctaaaatagagacctgatgccacctcatgtggttggtcacttaggggtcatcattgggggaccccatattacaggtgaaacaaacaaagctatggagagctacgcttggactctctgtcaagggcaaaacagtgacatcctagctgtagtggaaagagatctcaaatagctaaagcttaaagaacctgccatctccttcacaaaaagagattctgccaaagttagattctctcatagtgaccctctggtcataataacacagatagggaacatgacagtagccaagtgcattatcaataatggagcctcttcaaacatacttttcaagttagcctatgaaaagttagggctccagttgacatatttagcaatttgtacacagctgatgtacgggttctttagccaaggccttgtaccctttggaatacatttgattgcctttgatggttagagaaagtcccacaacaagaacactaatggctcagttcatagtgattgatgtgccatcaacgttcaatgtaatgattggttggccagccctgtacggcctaaaagatgtgacatccatttacccccaatgtataaatttcccaacaaagcatggggtaggctatctaaggggagattagtagtttgcccagtattgctacaacttagctttgtccaaagccaagaaagaaaagatgcctgccaagagctctagcaaagagtcctaccatgggaaatgaagtttagcccaaagcgaggaggcaaacttagatcctcactttggagatcctataaaaagctttggattggtagacgaattagaagatcgatcccacccttccgactagaagattaaaaatctagaaaggtttagggttggaaataaaatcagcattggtaaaaaatttaagggcaaacctcgatatctttacttggtctcatgaagacatggtagggatcgatccatctataatttctcataccctgaacttaatccaaacttctgacatgtacaacaaaaaagcaggttactgaataaagagcgaacacaagctctaaaagatgaagtcaaaaggctgggtgccgatgacttcatcattgaagctttttatatgctctgggtgtccaatcctatcttggttcccaaaccaaacaacatgtggcgagtatacatagattttactaacttgaataaggcttgtccaaaggattttttcccactttcaatgattgactagctagtagatgctatagctagtcatgagatcctaagcatccactagaccaagaacatacaagtttcttgatagatgtaggcatgtactgctacaaattcatgtctcttagacttacaaatgcacgggctacttattaaaggcttgtaaaaaatgttcaaagacctaattggtcataacatggaagtccatggggacgacatgcttgtcaagtccaaaaaagctgaggggcatatagaggatctaaatgaatgcttcaagatcctctgagagtatcatatgaatttcaatcctttcaagtgttgtttcagagtaggcttaggcaagttctttggcttcatagtgaatgctcagggagtaaaagcaaactcagaaaaaatctaagaccttttggacatgaagtctcccacaaagataaaagaagtgcaaagcttaactggtcatatagcattattaagcagatttgtgtcaaagtccacagacaaatgtgtccctttcttcaacatacttagagaaaataaaaaatttgaataggcatagaagtgtgaagctgccttccaagagctaaagaaacaactagctcaacctcacatcctatcaaaacctctagacaatgaagaattgggcatatacttggtagtcacggagttcactgtaagtacaattctcattagagaagaaaatagctttcaacacccagtatactatgtcaataaaagacttattgatgctgaaagttgatactcactcattgaaaaattgacatattgcttgctcatagctttaagaaagctagaacttacttccaagctcatccaataagagtgtacaccgaccagcccttgctataagtacttcagaaacctaaagcatctggctagttactcaagtgggcaacagaacttggccaatataaaattacctaccaaccaaaagtggcgataaaagactaagctctcgcatactttatggttgaatgtataggcatatctcctaaaatctttcaatattcaggagaaaagtaagagccagagaagaagggaaagcaagaaaataagtgagaataagaaaattcaacatggaaattgcacgttgatggaagctatatggaccacttgtccggtgcaggcattgccctcatcacacctggggggaaacagctacatgggcaatcaagttcccctcaggatcaagagagtcagtcccctcagattcattatcttcattcataggatcttcaagataggcttcttgttagtttgatccttcttatggggactagtcaccttagttggatcttctatgtgtcccgacttagcattgggatcaacatcaccctttgtagggtcgttgaagtgaagaccagatatggtttgaatgagtaccataattactgaatgtaatcttaaatggtatcactactttctttagctctcaatgaaagcaccaaaatatttactgaaatttttggaaaactaattatttaatattaaagctaaggaaaatataaccaaaaaatataataatatatgtagaagacacctagaattacgtggtttgagtgttaacgagccttaatctacgagttagtattattataaaatttgctagaagcctaagggattataatagacatgagcactctattctcttcttgagcaagctattcaagaatttccaaccctttgttcaaaggattcaatgagtatttatagtgtaatagaagtcatacttagttacaattttcttctgatggggaatttacagataatacataagtttgggcttatttggtgaagcccagcccatgaggtaatacgtgtatgctgatgtggagaattgatcacgatcgtatctgtaagaattgtgtcctatgactatgggtaattaaagatatattaattacttgatctctaattgtatagtttcatatctcagcacaattctattctctgtctaagatttaaggaaagtaattccttaaactgcttataggaaatagaaaagtataactggcttctaggtacacgctaaaggattcttccagttacacggagtcatgactcttccaaatgctgactagacttgccagaacctcgtctgggggaattatatactaatgttatcccgaaagacagaatggatcttgagcttggcccaatttatgttatttggacccactgatggaccttaagcttctatttagaatccacgtgtcccttgccgaaaatactgataacaatttccttcaggtggaagtgccagaattaatggagattttgagttatcggagttgttttctcattggttccttgagatctacgcgagaggagttcccgaatttgagtgcacctaagactttatgaagaagttgtatttctgtaatattaaacttaaagggatcgtataaatgtcaataaagtcgacccatcttattttataatttctataatttctttgccctattagactataattgaaaaaatctcttgattaaaattttgaataatcacaaaataaatatgtagaaataaaaaaataaaacaagggattggagttttgttggttgaatatattaattatagtgtagtttttaaacctaatttgagttatttaattagatcggtagttaaaaaattgtatacctaatatcctattaatatataacaaaaaaatgcaattgctaccgtacatccttttatatatttatataaagagtattatcatcaacttcctattacaatcttttagtcggtctctgtgcccgaaaacacatgttaaaatattttttttcaaaatttttttttcatatgatgtgttcgttataattgcaacagcgtccttgtaaattttttaaaaatttcgtatagcttatagtgcctaaaaaaggtttaaacttttctgaagatgagtggtaaactgaaatgtcagaaactctgtttcggtacattaaactattcggaatttttaaaaaatttacaagaatgatattataactataacaaatattaccgtgaaaaaaattatataaaaaaaaaagaatatttcgatatataattttagatgtggatgttatatttttataacattctattacaatttattactcaaactacatcttcaattaattagctttgtcttcctctatttatattggttctataaattgagtgagaaacacaagcgccaaaagcaaatatattacccgaacttttgttttggaatctcattgagtacttttgttggtacatggtaggtaagcttaatatctccaaattacgataatcttttatctattttcaatatatggatgaagatgaatattaaaccagactacaagtctattaatgaaaggttagtgaattgaaacataagcatatataattaagaatatataaaacaactatggctactatggcttcaagatggggaccataatagcaagtattttcatacatctgctacttctcggagacgcaataatttgattactcagttgcacgataacaatggccgtttggttgagtggggctcggggttggaagaggtcatggtgaactattttaaagacttatttgctactgctgctagtgattggacagcagtaacatctaatgtacagccgagagtttcttatgatcaaaatatcgagttggttaaggaggttacggaggaagaggttaagaaagctatgtttcagatgcatccagataagtccccgggtcctgatggaatgaccccgggattttttcagagatgttggcatattgttggtagagatgtgtttcggctggttcaagaattctttgttactgggtcttttccgacaagcttaaatgccactaatgtggttttgatccctaaaaagaagaacccaaggtctatgggtgatttgcgacctatttc

SEQ ID NO: 21613 - DNA, 1965 bp, Cannabis sativa
cattacacacaaattcaattacattatggctttccaaatgcaccctaagattctgaatgcaatagagttttaagatcaaaaagaaaattatgatctaatatgatacgatcagaaagaatacgagaatacttggcaataaaatagacaactcaatttattaattgtttaatgaaacgtaaataaaaattcaatagtaataaaagtaaagatttacaaaccaaaaatagagaatatatattggttactataaattacttgaacactgagcatactatgagttttaatcactacattagtttacttattttgtttagcccaattaagggcttcctttacaccatggcttcaacaatcaaaataggtagtttgttgatgtgaatccaatctactcacttaattgaaataccaatatcttgactttatgaaactattatctacgagcattgttattgaataatagtaactatttaatttaaaataaaaataagtatttaattgtattgggtttataattgaagcacatgtaaaacaaaaatgggtatttaattgtattgggtttataattgaaacacttttagcagttgagaaggacttaactgctcgaggtttatagtaaaatgtggctttgtacctctgctctgaccactctacctccgacatttttgtgctccaccaccactatctcactctaccataaaagaccataatacccttctcccacttcaaatataaaacatcaagtacaagggtaagatcggtatttcacacagagtctttattggcgttttacaatgcatttacggtccaacacgaaaacaccataatacccttcgtccacttcaaatagaaacgattaagcgtgaggggcatgatcggaatttcacacagtcttcactgtccatatgagtcgagtcaaacgagttatgaataatatgactctctcgccattgtttttgctctgagcaaaacaaaaaaaaatgtctcattctctctctctttcaccattttagttaagaataatcctaatatacataccatatatgcatatacacatatatacatacacaccttcatcttcttacttctagttttcaaaaaaatccaaaacctttcttccatggctatgcctctgtttttcttcttcttcttcttcttcttcattggcgtttcacaccagcaaccgtttctcaactcgggtgagcaagaatcggtctaccaagttcttgactcaatcaactcggccattccatggcgaactctgttctcagacgacctctgtaactcacctccacacggcgtcgtttgtgactactttaccgagttcaacaccaccacaaacgattcttctacttccgaaacgtttcatatcactgagcttagtttcgggtacgtttcggattttactccgaacccaccttgctctgaaaactcaacactcagtcctcttctcttcacttccttcaagtatctccggaaactcttcttctacaaatgtttcaactcaactcccgtttcggtacccaacgtttcggccattgccgtttcgaacctcgaagagcttgtgttcatcgaaaacccgggttttatcggctccttaaacagcttggttactaatctttcgagcttgaagagagttgttctgattggtaatggagtttatggagaaatcccatctggggttggtgatttgattaatcttgaagaattaactctttcaagaaatcgattgagtgggaaaatgcctaatgagttgggaaagttgaagaatctaaaagttcttgatttgagtctaaactcatttgatggtgaaatcccaactacattgtctaatctctctgagcttatcaagcttgatttgagctctaatggcttcaacggtagaattccagagagttgcaaaggtttggagaagttggaatttttggacttgagttttaacagttttggtaattttggggttccttt

SEQ ID NO: 21614 - DNA, 2588 bp, Cannabis sativa
ttgtttcactagaacaaaatattttaaataacatagtgtaagcattagcaacttaactcctataatagtcaccaaagcaaaatgagagtcaaactaggctatttttgaccaaggaagattaaaaaaaaaaacattatatttaaaaaataaaaacaaaaacaaagtgttagaaacattcatatatactaattatacacttgagtagtatataagaattttgaggcaaataaaacccaaaaacagctcttttcactttagtgccaacggtttgatattgacttggcttcaccttctttaaattgttccctttgcatatatctcaaaacccacccacaacccattcttcctcaattattgacatgatgtattatacacacattacttatatatatgtatgtttcccattttggttcaatatatatatatatatatctttctgccatggattattaattattagacaatatatatagtcatatatatacatactcatcatcatgctcatgatcaaaaaagtcaggctgcagcaaagagattatatgtcatacattaaaatgtccttattgtttgttttgttgccactgataaaaactagtgataaaacccaagtgagtagtagtgatcaagatagagagagggacagtttggtcattttgaaaatcgaggtaagagaagcgacaaacttacgatttaaagtgaggaagacgtaatttttttaaaaataaaagcaaaagtaaactcaaatagtaagaaaatactctcggtgagatttgaactctaacctcaatctaacttaattattataccaaaattaacataaacatcatcttttattataaatatgtcgtaaccaactaaattgtataaggtaactgattcgcttctcgtttgtaagtgggtccgcctttatgtaagaggtaaaagattccatatgagagtcccacgggttagccacaaaggggcgatctgtcgattagaaacttataggtgtactctactggcccatgggtcagtacttactgtccactgcccagtactactctatctttttaccttttcattattctactttaccacaattcacacaacacattctccttcttcttcttcttcttctccaacttcttcttcttcacttcttttcaagtcttatctttattatccctttgtgtaataatattcaccacaattttttttcctcatttttttcaaaatcctctttcacttactctgcttcatccaaaaatttcctccaattccctctctgccaaggcactcaataatggccaaagctaggcctataatattactcttcatcttgttttttgctgcacaaggttatttatttgtataaatattatctcatctgtctcatccattttttctcttataaatataaatatccttatcttcttcatgtataatatttcccatatttactttacaaaaattgttgcaccaaaacacacacacacacataactatttattatatatatatataattatatatagtctcttcaatttcaaaagtgattagtgattaccattttggcatacgtatataaaatatttacaaaattgctgttaattaattaacttaaagaacactatataactagaattaataatacataattgtgtataaatatatatgtgtgtgagtaatccacgtttctagtcttataaccatgtattataaatataaattgtatatatgctgcagaatccagaagtgaagcaccaccttatcttgataagctggccaaattctctaccactgaaccacatgacaaacatcaggtatataaatatatatataattaaacaaattaattgttatagtataaattaatgaatgaattaatttctatatatatatataggaaaataattatagtggtgggagaagattaatgataggatcaacagcaccaagatgcacatacaatgagtgtagaggatgcagattcaaatgccgagcagagcaagtccccgtagaaggaaatgacccaattaatagtgcatatcactataaatgtatttgtcataggtaataataataataatattaatattaatagacaccttcattaattatattctgttgttattaattttgggacccaaattgtactagtcaaaaaaagtagaacaatatattttttttcggtttcttcttataataattaattaccaacatatatacaattgtgtacactcattctaaattaatagggtgtagtgtaccctttattattattattttgacttaactatatgtatatatgattggggtagttttagaatttttgatgtgatgtttaaacttttatatataataattcagttaattatatatgaccacgtaaaagaaagaaaatgaccacgtaaaagataatatgtagatgtatatatatatcattgtatcaaaaatttatatatttcataaaaaatattttaaatctcattccgttgaaacttatttcaattaatggtcaagaatattaatcacgtgatatagttgataaaaattattcttataaaaagatatatcaaaggatccatattattgtgcttacgtattaa

SEQ ID NO: 21615 - DNA, 4822 bp, Cannabis sativa
ccttccttggaaaattgaattgtcaagttcctctaatgctcttcacccaaaattgaacatgaaagaaaaaagaaatcattaaatacaaaaaagaagagtatgtatttgtgtaccaccataggtcactacattaataacaagaaataaatgcctatctaatttggttaataacaaaacatcgaacctagattcacagccttgatgagtttttcatgatggtgttcaattcaagttgatgcatttaaacacaatgaatcacaaaattgcagaaaaaggaagcaaaagtaaaattaaattaaagcactaataggtacctagttgcaaactccagatgtgaataattaacaaatgcaaaccctttaggacgcttggtatctttatcaataacaacatggacttctgagacagttccgaatttgctaaacaactcctccagctcttcttcactgattaaggaaattgtattggaaaaatagctcataaaaaaaattattactaagagcgcctacttcaggttagacaagacaataataagacgccatctgccaaaccggggcgtatttttttaaaaatgagagcactatttaaaaggaaaaaaaatgagtacgtacgttgcagtatatggcagattgcggatgaaaagacgactggtctcgattacttctttatcatcttgttcatgcatgtcagcatcaaaatcatcatgataagctttctcttcatcttcttttctagaaacctccgtctcaagtgaatttaatttttcattcggaactttttctttaacatcctgctctatggggctttcttttgatgaatcattatcatcctcattatcatcactatcactgctttctgactctgaccaattcttcttaactctgctcttaaagtactccatatctgaaatgacatcatcatgagcaggacttcctaaattattagaaacttgcttgtctggtgataatgtatattctgtattgtcatcttcatccgactcggtatgtattgtagctgatttctctatgctttccttatttgtatgagtttgcttctctctaactttacgatcattgttagttgtagaagttatcaatgtgtcatttgcccacaattttgatttaactcttggctgcataacttgcagaaattcttggacctgagtgcccatattattactgtcctctttcagattacttttctctcgttctgatcccataaggatagatttttttatagcagaaaccttattcccatctttagttgttttttcatcagtttttgaagaatgacgactccatgggcgagggatgttcggatcgccaactttatgagcaatctgaaagtgaataaattatctctgtcaaagttcatgttaaatatcttggatgttagcacccatgtttagattccttaattgaaactaatcaaatgaaataaaacaataacatataaacagccacttcctcactctgtgacaatgatattggctaataaacacattccacactaaaaaatctggtctacttaggctcatgttttgtccaaaaaattttgatagttgccaaatgtccataagaattggtgtcaacaagtgaaccaaactcacaatccaatgtgacaaaaaataataataaatcaatgattcagtaaatttattattttctactcccaaatgtaccagtgttgcatggcatgaagtccaaaacaaagatgagtaaaacataatattttctctataccaaaaaagaaacttcaatgcaaatgctagactacccatcacattgcaaacaatatgcattaatgtgaatacaaatacacatgatatactgtaagaatagatagcccagtgagactgtcaatccagaaattaaaaaaaacaaagtacaagaatggacaaatatatattgaatcaatatgtacttcaggttcataaaagacatagagggtaatgtagattagaaaagggttttgcctagtcattgtacttcaaagtataacatggcatggcatcctcaacttcagaccatggcatcactgatgctttaaaaaaatcactagacaattacccaatttattatgataatttctctgcttgttattatcaggtttagaatagccatatccataccttgaaagttaagaaacagattagaatcaaatatactcttagtttattctctatgcatagattatagcacattaacaatgaatttttttatacagaagtgtaataagcaaattgagaattaaaaatcaaaagtagggaaagaaaataaacctcacaggatatcctgcaagtatcaaaataggatttgttgaagtatctaatcgctgcttcggcctcatgctctgtcctgtacccaataaaagcgaattgtctgctcttgccatccctgaagaaacttgtaaattaggcaataattcataaccaataaaaaaaagaaaattatctgaaaaaataaagccaaatacttggtgcgcatgagctttgcatctgtaatttctcctttcttagaaaagaattcccggagacgatcctctgccgcatattttggcaaattcttcacacatattcttgacctatgaaatccccacccacacaaaaaaaaattagcaattattctatttttttctcattattttcagaaaaatatgaacaaagaccaaagtacacacttaaaagcacagcatatattacaaaaattgggctcaaagaccatacattcataatcaattttacaggatttttcataaacgtgttcaggattatctaatcacaacccgaaaacgagacaattgtggtactaatgtaacaaataaaaaatagaaattagatatactcacattcttccttcctttgagttatagagtagaagaaaatattgttcgaactgagaataaagaggataagtgtccgcctccggtccggtcctcagctatactgcacagcaactatgaaacggctcctacccaagaagaaaagacaggaaaattaaaaaagacatctcttacctattatataaaaggaattttacttaaatttctatttttttttaccttttctattttagggttaaaaaatattgtgtttttttttccaaaaataatatgtaagttttatcctgagtattgtattaagtttttacggttattccaaagttgttttttagttgtttcactgttgttttaattgttctgttttgttattttatagttgttttataaaaagatagtatttttataaaaaaattccgtttaacggtaaaattataaatttttgctcaaaagttaatatttttataaaaatctcttatataaatgtctaactattaaggtgcgttattatgaggaggttgccgaggaaaggagaaccgtgctcactgtataaaaaaaaattgttctcattaataataaaaatgtttcagaacaaacgtctctcctggtagagagggtttagtctctcacgtttgagagtgtgtattcttggtctaaaagtgtattttgtctgagagtgtgttttgtgtctgattcaatctttttgttggcttattcctgttctctattctctgctgctatggcatcttcaagcaatggggaacaacttacacaacaatgggctgatatttgtttggaagaagaagaggatcatgaggtattgtatgatgatgaatgtgtaggggaggaagaaactaattttgatgataagttgtgtcttgtaggccgattgctatcagggaaagtttcagacttccagatttttcaaaacattatggccgatctctggaagccaggcaaaggaattaccataaaaatccttgatcaaaacagatttttattttagttctaccatgagatagacattcaaagagtacttgagggtagcccgtggacatatgatcgtaaacagatgattatccaacgattaacaccgggtgaaaatctcaaaatggtggttctgaattctcttgatatgtgggtgcaaatccatggcttgatgacgggatttaagacggactgggctcttcgtgaagcagccaaatacattggtactcttgttgcatctgatccgaacaacttctcgagagtgtggcgagactacttgcgtatgcgtgttactatcaatgttgttgaaccatcaaaaagacgaatgaagtttcgtaaacgtaatggcgaagcattttatgcttatttcaagtacgaacgagtgccaacattctgtttcatatgtggggttacgggacatgccgaaagattctgcaataaggtttacgatatccctactgatcaaatcgtcaaaccatatagtttagacatgaaggcaccaacgagaaggcagaattttttaacagcatctccgtggctttgctccggaaaggaagaccaccgtgatgagcaccagggatcgccttcgacagctgctaacaactcccctgtgatgaatgcacgacctaactatcaggccaaatcaattgctaatcttcatcctgtgattgctcaatcccaaaattctgggaagcaatatttccctcataatgaccatgttatcttggtcaatgaaaatacagctgcatactctaatgaggaattaatagagatatctgatttaaaaaggaaaagaaaagaggcaaatctctccagtggggccgagttgttgacagaagagagaatggaaactgatgtggaaactgggcctaataattcagcaattgtgacaaattcaaaaaacttggacaaggtgggtcttggtctccaggcccaccagacattatgagtactatcagttggaattgccgtgggcttgggaacccacgggcccaac

SEQ ID NO: 21616 - DNA, 2287 bp, Cannabis sativa
cttatctgctcattcctcaatctatgagcccattcatcggatttccaaccctcgcgatcataaaaaatgatcttattttaagaaaattcaattatattattaatgaacttgtcatcttttatatattttcattgcttacatgaatagttaaatattctacccgtgttgggtttaagtattttttcaggacatttggatatctcgtttaatactttcccttagcgcgagccgttagtattcagctttatgccctaatcataacttttaattttcttttctcgtacgattggttataaatcaataattacaattgtttgatccttttctcgtcagaaaggtttgatcaaggcgttataacaattcgagccctctttcgtcaaaaaggtttagtcaaagagttataacagttcgacccctcttccgtcaaaaggtttggtcgaggcccttttaaaaagttttcagaaaattttagttttcagaaaattttattttttctaaacgatgggtttgcattgtactatgtatttccagattaatttcggttaatcatacatatatgcccctaacgtaatttaaaaggatttacgctttataattacttatttgaaagaaatgattattttattcacaactaaaattcaaaatatttcattagtaatgtgatttacaatcattaatctaaaaaaaaaaaaaaacttccccaattcaattgattattttatcaatcctctaagagcatctggttctgataaaacgggttttgatgttcagggtcaatccccaacatacttccacaattattttaatatccaggataaatccctgacatataccgcaattccaggcaaagtaatcctggttttagttgtttatcttcgacttctactggtggacgtccaactttccatgtgatagctttatatggcaaccacaatgggctgatatctactcacgttgcaattcttttacgaaattgctttaccagagtcactgccccttgtattctagtgacccgctccctctcgagataaccaaggtgtcctttcctcttacgaaggaaggttataatctcgggtcgcttgttattgggtagatcgagctgatcatagacatcttcctacccctttatatattgttgaaggtgtccttacgatatgagaccttctatctcatctttcaactgaagacactcttccgtggtatgaccaatatctccatgatattcacaccgtttagttggatcccttttacgcctcgcatgttttataggttttggctcgctaaaaataacttcctgtacatgtgcaaggtagatattttcttgagttttattgagctcggtatattcatcataaataaggatatacttgttgggtttcttatccttgggcagcattttggaatcattttttctctttgatcgtgaagcatccgaatcaagttatccaacagtatcgtgcctggttgtcttctggatttcgtgacttgatgccctctgaacttattctccaacttgtttattcacaaatggaatgaatccttttgctttgaacggagtcgttgacgaaggtcaggcttcttcaagttcagatgctcttgtagatccctcttgtcgtgacaacggtcgaaccttacccttcctctcaaggtttgattgacctttttctccttataagggtttgtgcgagtttctttcttatgagcctgaagagagggttggcaattttcttccgatgttccacgtatcgcaagctgtgtctcctgattttcctcagtttcctcaggttgcatctcttgagagttttgagtatatctctggattttcccctgtcccttggtttacgagccgcgaggtttgcctcgtgagtctgttctcccaaggtcaggttgattttgggtaccatcctcctttgctgcctttattgcagctatttcatgcttaaacttggcattacgcctgtttacttcctccaatcgacacctaagatggaaatttctaattcgacgattggtatgtatctagttgggtaataggcgccatcctcatcaacctggttaggaagtggccgattattgattatccaaggtccgccaagccaggggccccaatactaggtcttcctggggcttgcagtctgttcatgcaatgactcaatagatccctgaggacttaatggttctttttcgagacaatgattgattccttcttgaggattattatctttggtgcatccatcacttttatgttaagaggctttttctgagttttttcacagaggctctcaat

SEQ ID NO: 21617 - DNA, 4969 bp, Cannabis sativa
atgcttcatctcgtaaggtagggaataaaattgtatctctcatggatagcaatggaaccaaagttacttgaaatgatggaatgacaacaatcattatggactactttaccgatcttttctcaacttcaacaatagatcacgaggcgttggagctagttacaacaaccattcccaccataataacaataggaatcaatgaaactctcacccttccttttactgcagcaaaggttataacaacattaaagtttatgattcttgataaaagcccaggtagcgatggtatgtcagccatgttttatcaaaattattagcatattatgggttcttccattactgaagttgtcttaggtgttctaaatgatagccatcggatggattcaattaataaagcaatcattaccctgatcccaaagaccaactcgcctacttgtatggtagatttttgtccaatcagcttgtgtaatgttatctacaagctcgtatccaaaatgatagtgttacgtttcaaggaagtactccctcttgtaatctctaagacacaaagcgctttcctctccaatagactaataactgataacatcctagtttcctttgaactcgtacaccacatccaacacaagacgtacaagaggtacaaaagattatttggctctcaaataggacatgagtaaagcatttgatagagtaaagtgggcttcctttgggtagttatggagaaaatagggtttgaaatgaaatggattgaattgattcaaaattgtttgtcatcttcaagtttatcattctcactcaatgtggaagttacgggtcatgtgaaaccaacttgaggccttcgacaaggggatccactttcaccatatctatttttaatttgctcagaaggactttgaagactgttgcagaatgaagaagctattggtaatctttaaggactacgtcttattagaagggtaccttctatttcacaccttctttttgctgatgatagcctccttttttgtgagacaacgaatacatctgcctttgcgataaagagagcattgagcatatatcatcgagcttttggtcaaatgttgaacaatcaaaagtcagttatgtatttctttccaaatactccagttgcagcgtaaacctttttccatcagactctaaacacgcctatcagcgagtggctttcctactaggccgtgacaaaaaagagctatttagtcatatcaaagagtgtgtttagaagttgataaacgtttggaatgaaaaattattttccattggtggaaatgaagttctgcttaaagtagtggttcagtctatcctaacttacgctgtgagttatttcagcttaatgaaaatatttttccaacaattggaaagcatgatggctaatttttggtggggattgaataaagatggcttgataatacattgggaaagatagaaattattttgtaaatcaaaatttgaagctggtatgggattctgttcatttgttcattacaatcaagagttactagcgaaacaagcttggagaatatttgaaatgcctacttctttgttgagcaaacttttgaagtatagatacttctcttacaactcttttttggaagcaaggctaggccatttaccttcacttacatggcagagcatccattggggttgtgaacttcttctcaaaggccttagatacaaagtaggaaatggattccatattcgacctataacttaacaaaggacctgtctctatgcctgttgcacattttatcacggataacagggagtgaactctggaacttcttaataattttttgatcagctatattgaaagaattgtctcaattcctttgagtttttttttcttctattgatagactaatttggcatcacactacctctgggatatacacagtcaagttgggcttccatttagctgctaacttagatgaacaacaacagtcctcttcctcagatttgcatagtaagtggtggaaaatcttttggaatctgaatcttccatctaagattaaaaaattttcttggaaagtaatgcacaatgctcttccaactgtagcagctctacatcgtaagaaagttattgactctgctgcctattcgatgtgcacaaatgcatgggaatcaatggggcatgctcttttcaattgtccacacgccaaatcaatttggaaacacactagtttcactatggattctaagaatgtacaacacattcataacagtgattatctattccacctttccactttgtatccccaaactgactttgagcttatcatttgtatcatgtgggcgatatggtcaagtagaaacaaagctttacatggcagtacaaactcagaagggaagcgtacagttgcatttgctaaggactatttggaaaattttcatgcatccattaggtgccaatagcatggtactggtgtgattaacaccttgcttgctgctcatcataccagtagaaaaccaggcatccaagaaattccatggcagcctcctaatggtgcaggtctgaagcttaacattgatgcagccattaactctacatcaaaaactttgggtgtgggtgccattgttcgggatcatcaaggccatgttattgttgcccttttaaagccggtacaaggatgatttcgttaagacaaaatggaagcaaaagcacttttccatagccttaattgggcgttacaacaacaataaaaaatcaccaatattgaaacaaatgcacttagagtttctgatgcacgctttgaatgctacatctacagatttgtcttgtttctcagatttgatcttagatgtttgttgtcttttgtcattttctactgaagcaactgtttctcatattaggagaaagactaaccatgatgcacttggtttggcaaaatatgctttagagttggatcaagacgtttgttggttaggagaagtaccctatcctatttttactattgttgtaaatgattgctgatttataataatagtgaaactttctcaaaagaaaaaactaatatgttgagagatgtcaccttagtatattttaataggatttaacggacttgtagtgattaaagtaacataaatgtaactttaggtatttaatctatcagaagaaaaaaaaaatgtagtatataagtgcatgaaatctaaaactttatgttacaaatatcttatgtttgataggatttatcaaaaaagtactgacgaatgtaacgaaaatgtaacttaaaatatttaatttatcaaaaaaatatgtaatatttaagtgtataaaattaaaaatttatagtatttaagcaaatatttttaaagtaaagatttaagtggggaaactcaattttaaagtgggacattatctttgccttctctctggagtcttctagcaagcatgcggtccatctcttttccttatgtgaattcggtccctctaataggggaattcgtccaccctttgttgttaagtggtggtttgacttactcaaaccaatttggctattcatccctacctagttctctctcttctccaagcatttattgctctaggggttattattactttctttcccatctaattaatcctattcagagcattaattgcttgaaatctctgttctcgtcatctttctatcttcttcatcacctttttttgtcttctccccatttaatcatgatctcccaaatctcaactccagaaaacactcttgaagattgtaatatggaggcggacgactgggttcccaaagctcatcagctcttcttcatcattgtggcttcaatggacgtgactagggaagtgactagggtggctttgaagagagtactccgtggattatggtttttcctatatatatcgaaactcaggtattgttttcttcatcctcttgctttggtttttcctttcgtttctcttgtctctgaagtgttcttttctgaccctatggatgacctttttaaacactgttattagtgctttagctctccctcttgatgagtccactgttttcacttatgatgttcgttcgtctagttcttctcctgcccctattagccttattcttaagcttaacactatcacgccttacaatcgtccttctcttatgaaaaccctctctggtatctggtgatcacaatatcgatttcttgttgtatgcagatggtatgttcttggtcactttggttgtgagggggataagggtagagttttagaaggtcaaccctgccatttttctcagagcatcactatttttgctgctcctgatagttcttttcttcttatccctaataattttcactatgttcctttttgggttcatgtgtatggaattccttttatttttaaatctcatgatctagctagattcatagccatggaagtgggttaccttattgagattaataaggacatcattaaggaggggactggtccttatatgcatctccgcatcctgctggatgttaatttgcctataagaaggggaatgaatatcaaattcattcgtatggggagagagttcatcaaatggctagattttaaatatgagagacttccagacttttgttttttctgtggaaaattatatcacactaaaaagtattgtgtttcttttttacaaaagtgtgatgagcttttatctgaatcgttatgcccttataatatccttctcagaggcaaggagaaaatttttgacaaaactcatccttttcaatacccccatcctccggctattactatggtgaattatcagcctgtgaaccacaatttacccccaacacttctctggttattctatcactttcccatcttttatgaaccttaatgctaatttcactgggccattttctcctccaccatccactgctgtcatcatgatgcctacaccactaaatcccaatctttcgaatgttgccccaccctccactagacccacatttgacatttcattgaggccctctgctt

SEQ ID NO: 21618 - DNA, 3487 bp, Cannabis sativa
agttgatgaaatctccctaatatatgttgaaccacatgtaatgtatgtgtataatattagcaagacaaactaattggcacggcatgaaccatgctatggcttattgcttaaattattaaataaaaaacataaagattctttacttattaaagaaacaacgagtgaaaattaaactatatgtaaagtggtacgagctatttctttcaattgtgatccaaatcgttttaaattatggacagattcaaaaaaaaaattataatttaagtactattttatattctggtgaaggaaagcttccaatattgctggatatacagtatacacaggttgaccttatgtatgtgtgtatatatttatatatataggtttatatatggtattttcggtgtatagcaacagtgtttcccaatatatactaacaaatgtgtaatacactaaataatatgtaaaaattggacaaaattatagctcaagatggcttagttattattgaagatggatctgcatcaagttcataatttttactatttgacacaattgacacattttttttttttaaaaaaataaaataaatgtagtactccaaagcctatatatataataaatattcaaatatagtactccatatttatatatagcaaaaattataaaatgacagttaaatattaagattccattcattttatacacaagaggtaactaatcaatctaaatatatagctatctagattattaattaattataggtttcgttatatatgttagaacaagataaggtttggttcttaaatccgaggtagtttaatttacagtgtactatacgtacgtacactactaataatcaaaatataattatatatgacagttaattgtaaggattccatcctcacactattatagtattaatattacaaagttatttatattatatttaaatatatatatttatataactactggactactggttagatgtgatctacaaatttattatatatatatatatgaaatttatagtaaaatataataagtacaaagcgtgttatgtagttttcagggttgcatcattgatgatcaccactacagcttataatacagttttaaatattattgtaatttattagccaaaggtatattgttctttatctttatctttcatattttttttcttaacttttgttttgtataatagaaaaggttttgaaggtatgtatgattatccattaattgtttataagttcatgatcattaatgtgaagccatcaagattccatagatgcatgtcaaaagggaacctctatgtacttataatattattggagagccagttgttcttataagatattccctttatttgtttttagatatatatatatatatatttaattagaggtaattgacaaaaatattcattaataataaaaaaaaaaacaaaaatattcataattaataataaaagaattggataaagttttttttttccaaatatatatactgggtactgcctataaataagtactattataaaaatttaaatttttatgcttaattttattatttaataaaaaataaaaatctatcacttttacattttataagtggagattattccatcaattgagataaaataaaaaaaaaagtttgaattagatatttttgatacaatgtaaaaagatatttttgataaattttgtttaaattaagtaactaaataaacataaaaactcaaatttcccttgcattattggccatttgatcaaaataatagtttaatatttttaaaattaatatttttttttttttagtaaccatcaatgagtgatacttattgagaagtgtttcatatatatgattatagagcttaatcaatataagcttaccacggtatttatataagaaaaagtgtagcataaattctcaaaaagtttaagttgatgcaaatataagtccccaacacctcaaaaaattgtgataatatagtcttcaagttcgatttttttgtaagtaacattggtcctcattttaacatatatgttaattgctttcaaaaatgtcacgtgttgatattaaattgtggcataagtgtccaaaaattttagtttaacacagatagtccccaatctcgtaaaattatggtgatagtccccaagctaatccttatcacatttctttgtgtgtgtgtgtgcaggttaacagtagatctttggcgactaaagatggaccagcaaaatagatgtggcgacaggatcggaataaggtgcaacaatttagggttttttttttggcttaattagttttctggggtcgtaggatgaggaagaaagtggagatgaagggatgatatggtcactgacaagtctccatcaccgagaaggatgagtggcgaattaatcgtagaggttttatttatatataatttttaatataaaaaaaagaaaaaaaaatttattgaagttcttactaaatttttgattgtttaaataatttttataatgaccaacatgcttttgacatgtggcgatttaaaagtacattgagaattgttcaattggatacttgtagatcacatcactaacgataagaaactcaagcatgtggactattactgtaatttttcaaaattaccgaattatctgcattaaaataaattttgtggagacttatctgtaatttaattatcagcatgtgatatttttaagagtaactaacgagatctgttaaaataaggaccaaacagacatacaagaaccttgagtttggagattattattataatttttcaaaattagggacttatttgtaacaaaatgaattttttaaatagttatactgctattgcactttataaaaatgaaaagccaaaaaaaaaaaatactaacaatccaaattggatgtgaaataaatcaagttttcttctacaacaaatcaatcatccctagcccgtaatatttcaataaaaagggagaaataacatttctttattaattaattaagaataacataataaagagaaatcctaaaaaagtatactagtggtgcctattattatttaaatttaaagatactattagtataattaagtatattagttactaaattttatataatttaatttaataattactatagcgccacctatatatatagataatgttaaacacatactccataataaatcaaccatatagttgatcataatctcagatcgagaaaccataaaaacaaacaagaatcaataaaaatcaaaattgtccccaaatcatgtgcatgcaaattcaaaaagaaaaagaaaaagaaaaagaaaatatatgtaaaatattctttaattaaaaacattacttattttattttattttgtttttattttataaaaaggttctccatccacttgataattggaacacaacatctacctagctcaaaacaatataccatctttattattttaatcatttttatttttataattattataaaaaatagtatt

SEQ ID NO: 21619 - DNA, 5587 bp, Cannabis sativa
  modified_base (5041)..(5049): a, c, t, g, unknown or other
tttacactatttcattctaatgatacactaaattttacattaacaagagccactagtttattagtagatcttttaacatgataaataataatattattgaaagaagattataaaagtttgcactcttgtacaatcagaccaaagatagaaggcatatcctccgagctatgcaaagcttgtatagcaataagacaatgagtgtcaataacaatgttcgaaagattagaggtttttatccaacttaaagcctctttgatgctcatcatttcagccattggtgcactagaagagccacccgagtaagtcgaagaagccaaaatgacgaccccatttgaatcacgagcaatgaaacaagtcccatatgcattctcagcttcaaaagttgctccatccacattaatcttgatcattccttcaacaagtttagtccaaaaattcttactgccaccacagtcagagttaaagtgtatgtgtagcggttcacaacatgtttgagcatatttccattgaccaaaaacttgatgtgcaatacacacaacatcagcagccgaacaagtgcgattgttccaaaccaactcattgtgagctttccaaataaaccagttaaccattaaaatttcttcaataacatcacctttatatatcgagaccaagctgcaacaaaccagtcatggaaattagtagcaatcgatgaaggtagagccacgacaaatatgttccagcaagatttggagaaagggcactcaataagaaggtgagaaacaatttcaacagctccattacagaacaagcaatgagattcgaccgaaacatgcttgctttgtagttgaacacgggtcgccaaacaacccgatagagcaagccaagcaaagtgaaggacttttagggtgattttaacttccaaaagtgcttccacatattcgaagcttcatctacgaaccaactgcctttcgccaattgaatgtcctaacaagcaatttttatagagtaaaaaccagtaggttccttacaccagtacatgtatcaccacgaggaaactcactaagaggaatactcatgatgtgttgaacatcccttgagttgaaaatatcatggacaacataaatatctcattctctagtgttggtcttcattagctgataaactttgcgatgatgtaaactcgggtgagtagaagtgacataaggattgtcatcagatggcggagccaaggcgtatcgagagtatttgtatttaaacctgagccaatacgaatcctagctcctgccttgaccaggtcatgggactcgaatatactttttcatatgaaacttggattgcccccaagagatgtctatagaaaaccaccttaaggatagtatcgagccttataaacatggccaataggagattgctcatttaaaaggaggcgtcaaccttgtttaccaggaagcaacaaattatagtcatgaagactacagaaccccattccaccaacatctttatgtttagttaggtgcttccaactcatccagctaattccacgggtgttattagaagaagtgctccaccaatactttgacatcatgccctccaatttagaacatgtctccagaggaaaaagaaaaataaacattgcataagaagacagagcttgagcaacaatttttaataacacttcgcgacctgtttagataagagtcttccttcccaactctaaattcttttctgcattttttcgttaagaaagcccaagattttatttttatttcttcccatcgtaaaagggagatccaggtaagtacaattttcatcagcaatccccatattaagtaaagaatagattctattttttaccatgtttgttgtgttggcactaaaaaagataaaggacttgcgaaaattgacttgctgccccgaagccatctcaaacaattgaagaagtcttatcacattagacacctctctttcattaacacgacaatatatatggatatcatcagcaaatagcatatgtgaaacaacaggatctccattagccactttacaaccttttagatgaccgagtctctcaaactgcttcaacactgatgagaatcctttcgcacaaattaaaaataaatagggagacaatggatccccttgaagaatacctcgatgtggaataattgggccaagacttttaccaccatgaaccacattgtactccaccgttgtaactgtgaggggaaccaaatcaacaaaacgactcgcaaatcccatacgaagcatcatggcacgaataaagtcccattcaattcgatcataagcttcccttaagtcgagtttcaacgccatataaccatctttgcctttgggcttgcgtttgaggtaatgcataacctcaaaaagcaatcatgatattatcagaaataagattacctgggataaaagctgattgattttcagatataatgtgatgaagcaccacctttagcgtattttcaagcactttatagatcacattacaaagtgagattggacggagctcactcatcgtagtaggttgcttcttcttcggtattagtacaatgctggtacgatttaaaccaacaagaatagagcaattagcaaagaaattcttgaactagttattaacatcttgcccaataattgaccaatatttctggtggaatcctggtgtcataccgtccggtcccggagacttgtcgggatgcatttgaaataaatctttcttaacttttttttatcaataatcgggcaaaggagacattcattttcatcaatagtaatagaaggttcaactcccataacaacctcattacaactagtgttcaaagaagaaaacaaagtccaaaaataattcacaatgacagcagcaagacccaaatccaaattaacctaagtacctgagttaccttgaagacattgtatggtggtatgtttctttcgagaagtcgcctttgcatgaaaaatttgctattttggtcactctcccgaagccaaagttgtttagacctttgattccaaaagacttcacgttgattcaagatttcacttaacatcttctgagcctcacgaaacttttgtattgaatctaaatcacgacctgtcttccactttcttatttcttttttacatttggcaattcgttccttgaagttacccatgtaatcacaaccccaggttgtcaaatttttgccacaaatacgaaattctttccatgatattgcactcggcatggagctcccaactatctgtgaccacctggaagcataaaggctcacgtaaccatgcattttcgaacgtaaaattgatgaacagggacaaacaaattctggacagtgggctgaagtgataacgggtagtggtccgaggcagagatttcaaggttaattaactgtgaatatgtgaataatcagaccaacaatggctgaccaaggcacggtcaagacgtacttcgatcaagtttgatgtacctcagcctctctctcatgtaaacgaatagccaagaagatcaagatcaacaagattgcagtcaacaagcgtttgattaaagccatcgactaacgcttgaggatagttgttacctcatcgtttgtctacttgactagtgacgttattcaagtcccctatgtaagttttaactattattatcttatttattatattaacaaacattctaatatatatatatactaataaatatttacttcttttacagtttagggataagaagacatacgatgtaaaaattgagttgttaccgttacatcaacagtggatagaataattgcttgcgctgattcacgaagacttgcagtgattcacgaaagcttgatactgaattgtataagaattttccccctatttttctatgtttaattagataatttgtaaaaaaaatttcccttatttttctatgtttagttagataatagtttataaacacttggaataattttaaaatatttgtgcaatatatttatttagaataatgtatatatacatttagttatatggtcaattcaatttctaattatatgaagttaatatttaattttaataaattaataaaagtaaataaaaataaaatatgtaaaaaataaacaaaaatattttatttttcagttttagaaaataccttacgacgttggttatttgctaataaccggtgccataaaaggcgtcattatacagaataactccaaataatcccctatacagggtctccttacactgtcggttaatgcttcccccttacaacgttgcctagaatagcgtcgatatcgaattttgtcaaaatcgacactgaaagcccttaaaaactacatctaaatcctaattttatagtattgtatgtaaataatatataatgcaagattttttaagtaaaatatatttatttgatagaatatttagtgtgaatcattacagttgttgcactaaaaaataaaagattctacactaaattggtgtagatttcataccaaattaatttaactattgaagatagtcttagacactaatatctctaaaaccaccacaagataagtttcttcttaaataattggcattattcatatccattaagaactgctacctttaagtatcaaatatattattattggtacaatttaatataaaaccttaaatattctaattaaataaataatataaaaaatcactaaccgcttacaatttacacattagtgtatgacagaatataattctctaaattaaaatgtgtatgacatgattctccaaggtcccttcagtatttcttttagtaatttaataattttattttattaaataaaggctaattaggatttttgtcccctaaattttaacgtgttccaaatcataccccttgaactattttggccgttaaaaatttcccctaaactaaggacttttgtctaatttcatttaattttactattttagtgattgtttttacactaaaccatgctgctcatattttttaaaatctaccaaattacgctcctcgaactttgacatgtactaaattatgtcccctaaactttcatccatgttnnnnnnnnnttactaaaattggacaaaagtctttaaatccaacaatctcaatagttcaagaggcatttaaaacgactttaagagttcagggggcatgatttagtacatatcaaaatttaagaggcaaaaatcctaattagcaataaataatataaaatattactaattacatcaattaattacttcgtatgatgttagacatattaatgagcattgctattatatattagtgacacttagtatcacctagagatacggtcttaccttttttttaaggaataatgattattatcttaacttatgagatttgatgcttaattgtaccagtagcgatatgataccgaaaagaaacactagtggtgtcttttagcattttctaatttaaaatagtgaatgttaaaagacaccttaaagtatcaaatatcataagatgtgagatactattagtagtgtattttaatattaagtgctataaattttaattgagaaatgctaaagggcactagtggtgactagcaccttcctatgtatcaatatcgctattggt

SEQ ID NO: 21620 - DNA, 1134 bp, Cannabis sativa
tcactcaacaaatgatcatatatgtctaaacttattgcaattaatttcctatgtgctaaattaagcactcatttacttgaagttggaatctaagaaggacagttagtaactgtggagcccatctcattacattttttatattaataaagtaatgaataaacctgaaagaattgatttttttattagaaaatagaacccatactatagtagctcattgtccaatagatacttttagtcatttgagtttttttttttatcaaaatagagaaacgtaagaggcagtggtatttataatagttgctgtattgaattgaattgaattgtctcctccaagtaactaataagggccgagagagagaagtggggaatttgcagaacaagagacaaagaaaggtaagtagggcttttcctttgttaggtgggcccataagcagagggcaactgtcctgtatttcatcatgtttggtccccattattcattatggtatttccctcagcccatatgcccatatccatgaaatcatgcctgctgactcacctataggaccccacagcagtggcctcgtttcacaacacacattgcactagagaaatgctaaaggacacccatgtttcctagcattattgtaaagtgtaatattgctattgcactactcaatattgagttccacttactttatttaaataaatattataaaaaattgctaaccaattaatataagacgatacttcattgtagtactatgcattataagtgccttatagaaatgctcattgcaccatggcgaactacaacactacgacaaaatgttaaatatagggtagtttaacactaacttcaaaccaacctgattgcaaacactaactcaaatatgagtatgcagtaaatttggtgcgcactatgtctacgtatcctactaaattttgtggacactataaaacacaaaaatatttttttcaataatttttaataataaagtaatagttcaataactaaatattgttgaatatatatgtattaaattttgataaaattatataataataaagaatgtactatttagtgtaatttttggtattgtggttggaatatataaaaaaagaaaactaagtgttaaaattatgctcttgatg

SEQ ID NO: 21621 - DNA, 2877 bp, Cannabis sativa
aattaaaaattgaaaataaaaatatatttataaaacatgattttaaagaaaaatcacttttctaatttaaaaaaggaatgattgtgacataagtcctcaaaaagttcattttgatacaaataaatcattaaccttaaaaatagcagtaaaaatactcaagctcctaatttttgtaattctgttagtcatcgtttctaaaaaaaaaaccctccaccctgaaactaccatatccacatctatccttttttttttctctccaccacatacttgaaacgagcaccaccacgatcatatatctctctatttcaacgaaactagtaaaaaaaacttcatctggtacaagtttcgatgacgaagagggtcgagatggacgacgatgaaggaggacattgggcgtggagattgcactcttcttttgctacagatctaagttcttcacagatttcttgatggattatggagttttttgattggacaattgattcttgactaaatatttgagcgactattgatttttattgtgttttggaacagaaaacaagggctattagttgtttaagtgttcgatttgggtgcctcttaaatggcgtttggaatttagagcttaaaacttagatctgggatagaaaagaagagtttgatctcagatttgaggctttgtttatcgtagtggttgcgatggtcgtggtagtagtgtaattagatgaaagaatatctcacagataagaggaggagtaatgaagaaaaaatttgaagagaaaaatcaggaagaaaaatatcactaaaaatgaatttggtacggagaagataaaataaaaggaaaaaaggtaataaaaaaaagcaaaaaaaagaagataaaaagtattaattgatttttaagacaatttgtttagtttttcttatttaattttattttttttaattaaaattttgaattgaaccaataagatatcaatatgtggtattattaggatgatttaatggattagttgaattgaagattaacggaagtataaaaattaagagtttacgtactttttacgttattttttgtgattacaaaattatattaaattaaatcttttaatgacttatgcagtatttatctttttaaaaaaataaaaaataattaaaaaaatattaataaatatatatttatatatatatttatacatagtccattcaccttatcttttactacttttttctttataacaatcatcttttttaatggaaaatcatcttctaactttataaaaattaatattgttgtttttttccctttgcacgtgacattttgtagtaaaagaaatagcttggattttttaaggttaaatagaacatttttggggatttgcaaatgtaaggtttttaattgtagaagtcatttcatacataaataaatgtcaacattactgcctaatccttatgcaaaataggtttaatttatgccaaaaaaagaaaaaagaaaaacttatatataaaaatataaatgcccaccaactctaatttctcttcgtttcaatctcacattttgatcatcccaaagaaaagcttctaatttctaaatgcatgcaataatttataggaagaacaaagagaaaagagattaactattcttttgggcctagccgaaagaaacttgtattcaattgaattgatgatattagaccaaaaagaaaaacaaaagaggcaaaacttcactaaccatgataaataagataaactactaggataagaatttatatatttttaaaattaaattgtatatatttttgatgtattcatgtatcatatatttatgtttataatgtaaatattcttatattttgaattcaaaatcagaagataaaatattttgtgggttaatcttagctgctgaaataatttgattacgatcttaaccgttgcagtgtgttgtcacatcacattctatcttctgaatctaaaatcagaagataagaaatcttgtaggttaatcttcaccgctgaaataatttgatcatgatctcaaccgttgcagtgtgttgtcacatcacatcctatcttttaaatttaaagtcagaagataaaaaattgtatctcaactgttacagtgtcacatcacatcctatcttcaatttgttttactgaaattgaaatgattttttcttacaaatatgcttttggaatcttttcttttcaatagtatatcaaaaaaattgtatgaaaattaaagtcatatcttgttcttgttttattgaaaaatcttatcttcttttaattttccttccttatataatctcacactactcattcaatttgatcacgcgtcttcaacatatttttaaatagctacatttttgaaaaaaaaatgtcttccatttgcagtttttcttactcagtagaggaagatgtgcattgtgtcttgtatatatagacatttcttaagatccaatcaggtataatttgggcaatagttaatcagagtactacaaggatgaaaagtttagtgataaatctcaacaagtaagatctttgcaaactcaaatgtctactattaatagtgcaattgcaaaactaagagaatgtatcaaccaaattaaaaataaaaattcaagtaacacttcaccagaaaacattataagtatgttactataatttatttattgttactatcttattttcaatttttattgacgctattaattaatgcaccaaatagattccaacacgaatatcttattttcacttcatccaactcatcgtctcacaattgtgagtctctaacatcgtcatctacctgtatgagttcattttatttaaacatgaacaataaagaaatcaatgtttatccaacataaagaccatgtggtgtgaaaaaaaaaaaaaaaaaaa

SEQ ID NO: 21622 - DNA, 8761 bp, Cannabis sativa
attttttgttctcatttctaaaagcaattttttgaaaacaaaaaataaaaaacaatatcaaacatgctctaaattgttgatggaagttattgggaaatacaaattagaattgtttgagataatgttgtatatgtatgctttggtgtgatttgagcctaaattaacattctcatctacctatcgccttagccttacattataggcctataaaattctattgatctaaatattgtgtgtaattatattagtagagaatggtttgttaattaagcttatggagtgggttttcattaaaatacatatttattttgagataaaaattaattttcggcatgcctgaattgatttaagtgttagtaatatgatgagttgattgagtacacacacaaaaattaagtttaaaaagtaatcatcttgagttgaaattctaatgattgaagaatttaaatttttcttagaattagaagaagattacattttttgaaactatagaccaatttatttaagcatcattcattttatcttactcgaggacgagcaagagtcaagtgtgagggaatatgatcagtccatatttgttatataaaatgaccaatttattaatatttttaaattaattctttaaattattgattagtgtgactttaaattgttagaatattttgaagattaatcatgcatttagagtcatttgaagggtttttaacacattttggtgaaaaatagtggaagtgggggagctcggtttgactaaacaaaacgtaattacaaattttgacagctttaaaagtagaaatggacttggagctcaacatgaaagttatagatctcattctctactttttagaatatcttcattcttccaattttgacttgtattgaagatgtttggccgaaatattgatctgagcacgcgatataaattacccagccaattctaccctgacgccacttaaataccgatggggctgccgaaggttgtatgacgttcgtacggtttgcaaaaaattaagtttttagtcaaatttgaatgaatttttagggttacataaataagattttcagacatcattttagggggttgtattgcatttttaatagagaaacccgtagaaaatggggaagaggaagattacatcatcagttattcatcaatctagttcttttcttctcttatctctttcatttttaattacgatttggattatgataattattatggagtagtttctttttagttaaggattatttcaaaattctaaaatgtgaattcttgattagtgataatgaatgttgtttataatttctgtcatatcaaattatttctatttttctatttggatgtaatgtatattgtgaattcttgttaggtatacaactaattaagattttgcactcttctattatcatcttagaattacttctcacttaatagtttaggattctaattagagtgatgatttgaaattaatagtaatgtcaaaggtattattgattgtgatgaaaaatagagcgtacgttaaataaattatatgcttcattgatttgttacctagattaacttatatccatagaaattattgcttttcctaggttaaataattgcatgcttcatatggtaaagattacgtttcctgagtcataccatagtgacgttgaaatcaatgtttgacatgaggcaagaaagaaaatatctcagagttaagtagtccagagtcatagcagtgacttggcagggatccttagccctgtgcccaggttgactttgggaactccagaatgggtgtttggatcccttcaagttatttccaactcactatctttcaatatcatgtaccatgaagacatgaagcatccaagtccaaggctcgaaaccaaaaatacacgaaatagcaccacaaaaatcaacctgggcacctagggtttaacccagtgcccaagttgactgcccaactagggtttcagtttttgagactgtcttattgcaaatgggtccaaatttgtactgagaaatgaattagacatgtcacgaatatgtttgaggcatcagaatcaaattcgaagcacttttgtttttgagcacccaaagcacaaagtaccctagtgtaatgaccacatgttagattatggattagtaaaggcaattaacattaattattgacattttataattacatatgattttatattttttgtgggcctgatttttagaaatgggcattagagttacaatttctcaattctgaagattttattaaactctaagagtattatttatgctaaatatgaattatggaatttatataaatttttttgctcggcgacgatagaaaatacgatagatggccgttagagtcacataggtaagtttagaacctaattcttagcgggataaaaaatttgaggtatttacaacgccgagtttaggcggggttatggttttggactattttacctctaagcctatggttgcttgaagtgtaagtaagggtattttgggaatttttattagagtgaggtggcttgttttaagcttggcagctggccacttagttattcaatcttagtttattgaatatttggaaacactcaattaggaaaaatcaagagaatagaattctcatcactttctctctctatttttcaaaccaagaagaacaaaccaaggacatagggttcttcttctttgcactgaataactcttattgatttctgagtgttagtcaccagtttgtggaagaatttcatcaaggtaaatcctagagctctcactttcatgttgtttaagctttaaatttggtttgatattgccattttgagatttggtggctgtttagggtaggttttgctctagtatgatctctaaagttattttgaatagaatttggttgtttttagttggttttgttggtttgagaggagattgagcaagtttgagtttagggtgttggttgtgttagttcaaacttcactcattaatggtagacttggtttttgtgtttgtttgttgttgattctacttgaattctattgttggaagttagtataagttttttggaaggtttgatgaagtttgggaacaaattaggcaagttttggatttttttgggttatctggtgcaaaccagtttaccggatcataggcaggatccccaaaaaatttgttgtcaatttgtgttatttttagagccttaatttgttatttcttcgataattaggatattttcatgttaattatcgatagtgaaacttgtagtggtgagtttaggttcctggttcgggttttggcatgttatttacccatttacgtaaatgtgacataaaatccatcctgcatgtggttttttgtttaggtcagccatcacacttgaattcagaaacatggtaagactagcatagaacgtatttatatataaatatgtgtatgtgtgatatatacatgttatttgtgattcgtgcactaccatcactagtaggtagcagtactaagtgtattggtacaacatatagtgtttaaagagtacaatacagtgttaccaacactagtacagataggtaaagagtgtatgtggtacaacacataagggtactcaaggtacggagaaaaccctaccaacaatcgtatagtagcggtacgtaatgcatgtggtacagtgattgtaccttaataaagaacgttcatacttatctgataagtcttatggacaggtgtatgggcgcctagaaaaagttggtaaaataatgtatgttatgttcttttcttactgagtctgttgactcacagatattactttcgtgtgtaggtaaagaaaaggcgaaggcagaacaggagtacgttctgagcttgggggatgattgtacatgttgagacagtgtgacctagagtgttcggtctcgacacaacttgagcggtattttgttgtcgttgtgcgacatgtttgtaataaattattttgaaagtgattgtaaaagtttaaatatgggattctggttgtatatcaatatgtatataaaattttaagttttatcaaaaatttattttagcacgattttcaaggaaaacccttaattaggaaaggtggcacaataattagaaaatcactgtagcgcgcctaagtatcagggcattataattttcttatcaaagccgccaggtttgtctgttgaagatcgtcaagacatgtacaattatcattagagaaaagctcaattcacgattgagtaagcctttacttgtttagtaatttatgtgattaaaaaaagtatgttagggagcataatagtttataattatttaaatccattgccttaaaatccataaagtgcagtacatagagtatatgtgatcgttgtctgacctaccttacttataagttcgtaggctaagtcctattaaatggatgccccacaaaatacaaggagttagggtaacatggttgataacgaaggcggtcggggaggtcaaaatcccctaaatccacgtggacgcgacaaaggccatagaaggtttgagggtggtagacatgaaaatccacctaaagctcctccggattaggaacaaaagtttgcagaaattcaagcctgaatcttccaacaagacgaagaaatttagacgctgagacagcaagatcctcctacagtgcctccgcaacaagcgctgaccgctatggttccagcggtgccagcagaacaacctattgctagcaaccgtatggaaccactatatgagagattttgcaaacaagtagatccagcctttttgggaggcccagatgttacgaaagcagagcagtggctcactgttatagaaagaatcttaaatttcatgggagtcatcgaaaatgattgagtgacttgcaccactttccagttccaggaagatgcgctcgtgtggtgggagttagtgtccctcacccaagacgtcattaccatgacctaggaagagttttgggaattgttcaatgctaagtattataacgagacagtccgtagtgctaagcagaaagaattcactaatttggtttagggagaaggcatgtcagtaaaaaaatatacaatgaagtttgactgttcaaccaagttggctttgggtatagtacctacggacttcaataagaaagaaaagtatctagcgagtttaaatgcaaaaattaaacatgatctggtaattattacgaatgatacaatgacttatgataagatggtggaaaaagctctttgagctgagggagcagtgaaattccttttggagccctgaatgactccaagtgtaggtgggactaccacttttcctacttcttgttatggtagggatggtggtgattccactgctgattaaaaaagaaagactaccccaacatctagtggttcaggacaggacaaaagattctgagggaaccaaggcagaggtggacgccagggttattcttaccctgagtgcccatattgtaagaaacaccatctcagagattgcaattagaagatatgatttcagtgtggcatggttgggtattttaaaaaagaccgccctcaaacaaagaaagaagagtagaacatagaggcaaaacccacatctgctcgggtgtttgctatcactcaagttgatgttgtagccagcccttctgtggtgacaggtcaacttcttgtcaacaactcctattttactgtactatttgactctggggctacacactcatttgtggcgtcaagagtaactaatcaattgggtaggctttgtgatttcattgaaatagggtttagaagcctactgcctagcggggaattggttatctccaaaaggcgaattaggtctatgccagttagggtggaaaataaggagttgagtgttgacttagtagagctggaactaacagagttttatatcatacttgggatggattttctgtcgaagtattcagccagtattgactccaagcagaaaatggtaactttttaacctgagggtgaagatccatttatttatgtaggatttgtccaaggttctcaaatcccgattattccagttttaaaggccaaagatttattgcacagtggatgtgtaggacttttagcggttgtaattgattttagcaaacctgaaacatttgggcttgaggaggttagagttataaaagaatttcttaatgtatttcctaaagagttaccaggattgctaccacagcgggagatagattttgtaattgatctgaaacttggggtaaaacctatttcgaaggcaccatacagaatggctctaggagaacttaaagagccaaaaatacaactttaggggatgccagatttagggtttactcgacccagtgtatcgccctagggagctctaattttgtttgtgaaaaagaaggatatatccctccgaatatgcattgattaccaagaattaaacaaacttacaatcaagaacaagtatccattacccacaattgatgatttatttgattagctccagggcaagactgtaatctcaaagattgacttacattcttgttatcatcagctgagaattcgagaggaagatattccaaaaactgcattttggaccagatatggtcattatgagtttttggtgatatcattcaggttgaaaaatgctctagtgacctttatggatcttatgaacagagtgttcaaggacttcctcgataactatatcatagtgttcatcgacgacatccttgtgtactctcagacagaagaggatcatgaacaacatctctgaatggtttttcaacgacttagggatcacaagctatatgaaaagtttgaaaaatgtgaattctgattgtcagaagtgtcctttctagggaatattgtcataaaagatggaattatggtcgatctgggaaaaatcgagtcagttaaaagttagccgatgccaaaaacggttattgaagtacgaagttttctcaggttgacaaggtattattggcattttttcgaatttttttctaagattttaatgccattaacgaagttaactaagaaaaactaacggtttgtatggtccgacaagtgtgaaacaagtttttaagagttgaagtagcggctaatcacaacaccggtattagctttgccatcagaccaagaaaagtttatcgtctactatgatgcatacagatagggtctagaatgtgttctaatgcaagctgacatggttatagcatatgcttctcaacagttgaaggaatatgaacaacgttatccaacacatgatttagagcttgatgctgttgtatttgctcaaaagatatggcaacactacctgtatggagaggaatgtgagatctacacagaccacaatagccttaagtatttcttcactcagaaggatttaaatatgaggcagggatggtggttgaaaatagtcaaggattatgattatgagatcttgtaccatcccaggaaagctactgtagtggcagacgctttgagtagaaaatatcccaggtatgtctttaatactataatgttagttccccagttagcctcagaaatggttaaagctgaaattaaatttggttgggaagttacataacctgatacttcagtaagatttgttggaaatgatcagaaagacacaattgaaagacgctgtgctagttaaaatttgggatgatgtattggttggtcagcctaaggacttcttgatcttgaataatggaatgctagtttataaagctcaggtttgtgttccaagcagtgatgagctgaaaaaggagatacttgatgaggctcatactacaccttattcgttgcacctaggaaccaccaaaatgtatcaggacttgaaaccctattattggtggtgtggaatgaaaagagatgcagtggattacatgtctaaatgtctaacatgtcagcaaatcaaagctgaacaccagagataggtagggttactacaaccatagcacttctcgagtggaagggagaggatattacaatggacttcgtggttggtttgtccaaaaccacaagaatgtatgatttagtatgggtcatagtggaccgtttcatgaagtcagcacattttctgctgataaaaacaacttatacagtggatcagtatgcaaagctatatgtgaagaagatagttcgtctccatggagctccaaaatctattattttagatagggatccaaagtttacatcaaaattctgggtaagtctttagagagctatggggacgaggctgtaattcaatatagcttttcaccccttgactgatgggcaatcagagagaacaatatagatattagaagacttattacaagcatgtgtcatggactttgacggttcatggagtaaatacttacctttgatagaattttcctacaacaatagctatcaagtacaatagggatggcttcctatgaaatgggggaaataaagtatttgggtcttgagttagttcaaaggaccaatgaagcgatagacaagatcaaggctcggatgcttacttcgaaaagcaagcagaaaagttatgttgatccaaagtgcagagatgttgcatttcaagcaggagaacatgtttcttgagagtttctccaatgaggggtatcaggtgctttggaaagagggacaagctaagccctaggtttatagggccatttgaaatactcgagaaggttgggcaagtatcgtaatgactagccttaccaccagtgttatcagctgttcataatgtatttcatattttaatgttgaggaaatatatttcaaacccgactcatgtcttgagtta

SEQ ID NO: 21623 - DNA, 3499 bp, Cannabis sativa
  modified_base (1945)..(1948): a, c, t, g, unknown or other
  modified_base (1989)..(1989): a, c, t, g, unknown or other
  modified_base (3305)..(3316): a, c, t, g, unknown or other
catttcaaacataaacttcaataagtacaatttgctgactaaacgacaatgtaaaataaaaaaataaaatgacatatatttatatattaagaatatattagttatattcttaattttttatttttatttttaattttatttttttagatgttattcaataaataatatcttttttattaaaaaaaattaatttaaatgctatatatatatataaaaagaatataataatattcaaaatttattattaattataatttttgttgaacgtaatacttttaatttttttttaaaaaaaatatcattcattttttctatttctttaagagaataataatagaaagatattattttagtaactacaataggtaattacgacatcaaaataatttagggtctttcttgtaaataaaatgtcaatttatattttctatgtaataattccaaataataattctttaaaaaacgtacatatttttttttattttatgtttaaaaagaaaataataatcgaaagatattttttaagaataattagtaactttgcccctaaaactttcaacactgctgattttgcctcctaaaatatatggttttttttaaaaaaaaaaaatccctcctgaacttttttatatttacagaaatttagtcattttattaggtttcatctcattattccgtttgaatgttaacgtgtctttgtaaattaataacgttaccccctaaacattgactactatcaaattgtatcccctcaaaataaatatgagataaaagattcaatattttttttagtaaaacttaaaagattaatttaaatcttaaaaaaaaatcatttgaatggttaaaaaaattaaaattttaaaactaattaagcgatttaaaaaattaattatttttattaaaaatatcaatttagatacaaaaaaaagtattaaaaattaaatttttgtaaaaaaaaaataaattttacggaaacaagtttgagtctatttttttagtgtttgcagtgctggcagtgtagattttagttatttttttgaaccaaactggacatgcgattttgcaattgcttaaaccgcgagcacactacaagatctcaaaatcgccaaaacaacattgtaaaagtgtggtgtggtgtaagtggtttatgctttcattaaataaataaacaaataatatattaaaattttagcaacacaataaaaatacacgtattaaaatttctacaacacactaatttaaaatacaacaaaattcaaactaatatatacaatcttttaggacatgaattttttttttttttttttattaaacccgtcaaatataatttttttagggatttaaaaaaaaaacataaattttttagaacatacaaaaaaaataatgttcaaatcttactttataattatatacataaactcaaccgtaattatttatacaagacttaaatcaatatgttttgaaacttaaattaaaatttattttacaaacatataagttattgtataaatttatcaaaattcgtgcaatgtattttgaattacaataattaaatttaaaattgcaaactaaatcaatacgtacgatttagcaaaaatacaaaccacaaccatatcacgaagtgtttcttaacatattttttatgtggtgtgatgcgggtaatttatgaacaccaataattttttttactaaaaatttaaatttattaaagtaaacataactattttctaatttaatttctgactttttttcaaaataattttatatttttattaaatttgtaattattttacattatttttaagatgtgagtttacagatataaataggcttgattttttcttctaaaaattttaatttttttaaattatttatgggcaaatactattttggactctatattttgtaaaatttactaattgaactctctgttttgttaaatgannnnatagaccatgtattttccaaaattatacaaataggaccctnaactgattttttgtcaaaataaacttaataataatctgatctagagatgttatgacaaatatgattatattttctatatctgttagtgttaaaaaattatcttaaagtttgttatattaaaaaataaaattattgaaaattgagttgagtgtttcctttttgactattttggaaaacctagggtccattttgtcatttgacataacagagggtttaattggtaatttttacaaaacacaggatccaaaatagtatttaccgattatttattagatttttcagtaattttagtttgatatttaagacatgtgtttataaatagaataatgtttgaaaatatatattttttaaaataatttaaaaattttaagtaaacttaattttttttttaatattttaataattttatcatgtttttcaatagttttttttttattttttagaattaataaaatattataattttggaaattatttatttttaataaatgagccaaaattttatttagtcaaagttcacaaggtaaaaatattaattttaatagtaaaagaaatagaacctaacagaagaaacataattacataagttttatattttaggaggaatttttaataatctgtatattttaggaggcatgatcagatagtgtcgaaagtttagggagcaaaaatgctaattttttttttttttttaaaaatatgcggattaagtgtaaaaaaatgataatagaaatatattttttatatatgtgtaagagttaatacaattttagaccctctgttttataaaaattaccaattggacaatctattttataaaatgttaaattagaccctatattttttaaaattgtacaaaatattaccttgagccttatttttgacaatttttttaatataactaacttgaaaataatttctagtacgaacatatgtagaaaatatacctagttttgttataaaaattctagattatgtctttactaacttttattttaacaaaaaaaatcggttcaaggtactcttttgtactattttagaaaatataaggtctaatttatcatttaacgaaataaaaagtccaatcggtgacttttgtaaattacagagtttaaaatggtatttaccctgtgtgcaatgaaattaaatttgaattacaatttaaaaaaatatatattatgtcatataaccacatttaatataaaataaaaagaaaaatatgtataaatttgacttataattatttgaaaaaaaaaaaaaacaaccctttctttataaccacatttaatttaggattttttttcatttttacactnnnnnnnnnnnnttttttttttttttgaatatttacggaattatacacagaaatccctatagcaactaagggagcaacctaaatcgcaaacaaaattcgtatagcaagccacataaaaactaccagagaaaccaccagaacaactcaaatcataaatttaaaaataaaaagttaaaatatagtatatggagtaat

SEQ ID NO: 21624 - DNA, 6130 bp, Cannabis sativa
agttactcttttagttcacatctatggatagcaccccaaggaagatgtcaggcaaagtctgtgaaacttagtgaatagcaagtgaccaagagattttcctacatggtcgcttgagggtcacccataccatacaagccattgaacttgcacaaagaacttatgtagggaaatgataatgcttagaataagctaccaaacctacctctaagtcgtgcaggcatacttcggcctggaataataaatctggatccttagatgtgaaggccataataagatagcaaggacaaccatatgtctgtcatagattgctttaaggctaaaaaatagtagtgtttgacaatagagggcctataggacaaagcaagaacatgaaagccctaagaccgaatatgagatcggttctcatgcatgaggccaaggccctgcaagaatcatacaaccaaaaaagaacttgtaatgaccgcataggtacatcgtggcaattagtagatattaagcggtttattgattagtatgttattttgtgcctcttagtaagaaattagggctggttgttagaaataagtcttaggaaagtattttctcaattacggagatatatttgaatgctaggtgcattgtttatgttatatatggattttcatgaattgcatgttttatgttcggtagcaatggaatgcgatgtatgacctatagagtcatttttttatggattagtacttttggaataatggggcattatagatagacattgagaatatcgagattattcggggatataagttttacaaaaattcccttaggtgggaaggttacttttggtggagggaagggtgaatttgtaatttttctctttttgtctttagtggattactaggaaattagatttcttttgttttcttttagtggctagttattaggatttatctatgttagagatattagaaatttaaaaatcataaacaaggaaaagattagaaattttaaaccttcttctctctctcctactgggtcgatcacctagaacacaaagggaaaacaacaacattcttcttcaattcagaccattttttagaggaattcaacaactgtagcttaagtaatttgtgaagtaagattttccttctttttctctttgaattttaagcttgaaagttaggttttcatggaacatttttgagttaggttactgtaggtttaattcgagttttgttatgatcttagaagttattttgatgttatttaagctgaattaattaagttatagagctcgagaacttcagttacaccaattctatggaaagatataagttaagattcttgataaaaaggaaaagttatctgaagcagtacgataatattggttaagatatttaaagaaacaataaggtgaagtgaatcacctggagattagaatctgacttgtgggctcattgtccaaagtttttcaaatttaattttgaggatgaaatcctttaaactcgtggataattgtaataaatgcatagttaaatcatgggaattagcagatattaagatgtttattgattagtatgttattttgtgcctcttagtaagaaattagggcttgctgttagaaataagtcttaggaaagtattttcttatttatggagatatatttgaatgttaggtgcattgtttatgttatatatgaattttcatgaattgcatgttttatgctcggtagtagtggaatgtgacctatggcttatagcgtcattttattatggattatttttttaggaataacggggcattatagatagatattgtgaatgtcaagattattctgggttataagtttgaccaaaacacccttaggtggcaaggttacttttggtggatggaagcgcgaattggtaattttcccttttttgtctttaatggattaataggaaattagatttcctttgttttcttttagtggcaggttattaggatttatctatgttagaatattagaaatttaaaaatcataagcaaggaaaggattaggaatttccaaccttcttctctctcatattgggtctgtcacctagaacacttagggaaaacaacaatttcttctttaagtcagacaatttttagaggaattcaacagttgtatcttaagtaatttttgaggtaagcttttccctctttttctctttgaattttaagcttgaaagttaggtttttatggaagaatttggagttaggctactgtaggtttaattcgagtttggttatgattctagaagttattttgatgttattttagctaaattaagttttgtttgatacttatagcgttttttagagaaagtttgagcataagagctcaaactttgctcttccatggtgatttcattatttgaggttattgcttgggtttattgcattatttaagtttgttatggtatgtttagttaatttagagaattttttatgatttggggttgttttgagcatgtggtggagtttttaggattcttgcactaaactggtcgaccggttaagtattatcctattgaaccagtataccgcttcacccaggcagcacccttaggaaatggtttttcggttgggatccagtttaccggttgtagtaattttaggcaccctagattttcacatttcagctataattagggtacttccatgttatccatcaatagggaaacctttagttttgatatttcgtccccaaaaagtgatttagcataccacttgtcagttttgggattattgggacttaggggcctgtaaattgtcaagcagcagtttccactcagggttaccgacatacttgcattcagaaccaaggtaagattagtataatgatatgcatatgtgagtacatgtttagcatacatgtttatgattgcctactagattacattagaatagtggtatcagtatatttagaattgtattgcataccaatgaatgtatgtttggcataagtactgattgacgctatcacatcggtacaactagagtacgattagggtaccaagtataggctaatcttatggtcaatagtacagtcatatgaacgttcttgacttaggattgtgtaggatgcggggaagggttatggttgggggtatgggtgcctaatcgtaatcctatttgtatctatgttatgattatgattttttactgtgtctttgagataatgttggctcattttagtagtcgcatgatgacaacttttgaagtttaaatattttgtaacttttaaacgggatcccgtattgtataaattattatgtttatatattaaagtgaatttatttaataaagttttaattattcacgtttttattgaaccctttgattagcaaaggcgtgcataatatttagaaaacaccgtaacacgcctaatctagtagggtgttatagaaccggacagagctcctataggggctatgtaccgagctacggctaaggaagagttccatataggatccaagaaattttgagtcttaagttgaacattctactataatagactcaccattaagcttttcacaaagtttctaaggaaaccacctataaggctaaggttgtatatgcctacagagccaaattcttgccgaagtcacaagaggacaaaaaactagctacccacttggaaccaatgcccatgccagccaaggttctcaagccttgaaattgttgataggggtcccatgactcagccaagaactggccagggtcaccaaacccaggcatgattaggctagctttataggataaaaccctaaagctggccaactgccatgattaagccttcggactgaccaggtctcaagtaagacctcctaggccagccaaggtaagttttgaatcctaatgtgtgtttttctttcaaaactcaaatatgagcctcgtattctttatgactcaaagagccaagaatcatagaaaaggccaaaatcaaatttaatctatcaaaaagcaatatattacacattctaaaactgtcatgaaggatcaatataacaaggagattacaaactaacatgagaatcacatagtttctaaaagcttgaaacttattaatggcaggtacaaagaagatatacccaagaagagaagatgagacaaatataaagagagaagatcaaagatccaaaagcatgccatgcaaaaagccaacacctggcaagacaagggtgtaaaacatagactactacagacaagacatgagctaggaagtccctatcgaactagatgttcaaacagggacttgggggcaaatgttatcccaaattttgtccacctaatgtggcatgtccacgtaagccaaagagagagtacaagtggagtaaaaatctgccaatagcaaaataaggcctccatgaagatatagcaaaaatttcaagtagcaacaaaatggagtgaagtgagccctcaaggagctgtaccaacttccctggccaaccaagagaagtctacagtttggccagggtgagcttataggctagccagcaggatctatgcatcagatggtcgtcggccaagaagtgacttctagaccaatggagcttctattcgaccaagggaatgttacctctacaaggaaacagtgtgcaaaattgtcttcaacttgcaaaaggctagtctgcacatccaaaggctggcctcctcttggtagagctgtagtgagctactaggtcctgtaggccttgaccttccagatcctgcaagccttgaattgcaaaatcatgcagcccatgggaggcaagattaacctggcaggactttatgtaaagcccaatacgtagaaagcaagtcatgggctgcgaattgggccctaaaagcccagtagaatggctgaataatatctagattaaagggcactttagtcttttctaattatctaaaaccctatgcaaatatctagggatttaaactataatctatggtttaggcttcctatattgaagccttaaccctagcctagaaacctaagttcacttagcctccaaactctaagtctgaaaccctattctctctctctctctctctctctcactctctcttgtacacacccaataagacactctctctcttctcacttcatcactcacatgcttctaaggctattaatctcgctcattagagatcttcctacttgattcatgttgtgtatccttacaaagagctatattaggtccccccctatagtgatctgaatagtattatctcttagtattaatacaactacaaggggcgtatgtcattacctactatcagaagagggccaaacctctataacaagtcgctatgtttatttcttttcattcttatttgtgtaacacgtggcaatcattagatccatacgaccctgctatcggttgatcactttttgaggttaacagtttgatgcttttattgagagcgtggatatcgtgtgatcaaatgccatggttaacatgtgaataactcctgaagcaatatctacatctttgggtctccctcaagacccatagattttaggtctagatactcaggttccagtcacaactagaatcccgatgaacactatagatgtggtgaatcttgtcactataatagtcaccatgaatctcgccactacaactggccaaacttatacaggcatcccggtggatccaagtggcaggcccctacctccaaggaaggactctccacaagcacctccagctaaaggaataatccttgggggcaccctccaagaataacgaccgtgtcatccccgctactatacaggagagacgagactaggaattggcgagccccacgtggacatgtgatcgagaagatctccagttagctagacttagagaggtcgtcttgcatgttggcctaattaaatgaccacccactactgactgcgatgtattcgctcagcagagatgtgaatttctttaggaaccactcactgctagttgcgatgtgctcgttgagcagagacgcaaattcctaagatggctggatgactaagagtacatctatcgatctcaacaagaaataaacacaaggatttgttatagaggttcgacccccttgtgtatccttatagagagctatatcaaatcccacctatatctctttgtatcaatacaaccaaaaggg

SEQ ID NO: 21625 - DNA, 3424 bp, Cannabis sativa
aaaattccgtaaaactgtatttttataatttttgttgttgttgttgttgttgttgttgtgtatttgtgaaataatcccgaaagaaaagcccatttgtaagggcaaggcaagagtggaagtatgggcttttttatgtgtaggttaggtccataaagtgtgggctgggcacaaacagaaaagagagaattgttgctcaagccaaaaccatcagaccttccttacttcctttctctctcgtctcaattcaattccctcaaatcaaaatcaaaatcaaaatcaatttcaaaatcaaatcaagaatggatttgaaggttgatctggatgctccacactccatgggcaccaccatcattggtgttacttacaacggcggcgttgttctcggagctgattcaagaactagcactggtataaccctaaccctaatcccaatcccaatcctcattttttttcttcagtagaaggaattgatttcatttctctactgttctgttctgtgtataggagtttatgttgctaatcgcgcatcggacaagattactcagcttactgataatgtctacgtttgtcgctccggatcggtattaattcattcatttctttcactgtgtttgtttatcccttcaaaatccaactaatacagtctcaaattccagtttttctcatcaaaaacattttctttactcaatcaaaatctttcttcttgttgaaaatacatataataataacatttatggattattatgcaggctgctgattctcagattgtttcggactatgtgcgttactttcttcatcagcacacgtgagttaattatatatacatagacatatacacatgtatatatgtgcttatttgttcttaaataatgcattttttttcataaacaggatacagctaggccaacctgcaactgtcaaagttgctgccaatctcatcaggcttttgtcttacaataacaaggttggttggttaggattttagccttttcctttcttttgcttgagaaatattgaaattgccccttcattagctttgtaccctctgttctgtaaatattgcaggatatgttacaaactggtatgattgttggtggatgggacaagtatgaaggtggaaagatctacggagttcctcttggtggaaccatagtcgagcagcccttctcgattggtggtatgttattcttctcgtctaaatttccctctcaatttttaacctcttacttaactctactgctatattttcattcatacttggttgacacaccacacctctgttaatagttatttaaactagaaaacctctttgcataaattttgggtagcttctccaagccagtgataggcctccacttactattgtctatgctagaaaaaagaggactaggaaggctaaggatggggtggcagcagataattaaatttaaatctgctataaacttctgttatgtgggaatttattgggtagtactgaggtgtatgataagcctcatgagtattagcaataagtaatagtttgtttctatgtgaaaaggtgtctagcattttaattgaactctttgtgaatacctgggattcctatcaatacaattccaatttccatctcagcttgttttttcccttattttactgctgaatattaatttgtccaggatctggctccagttatttgtacggattctttgaccaagcgtggaaagaaggaatgaccaaagaggaggctgaggtatgtattattctaccagtatacaaaagctcgaagcaacaagtcctttttaatggatttcggtgttaatggtctcctggttttctaggaaccttgtccctttgctagaatttatgattgccattgctaattcctaaacggttgtcaatagaatagaaccgatttttaattttctaatatctattttattctctgtggttatagaaactagtggtgaaggcagtttcccttgccattgctcgtgacggtgcaagtggaggtgttgttcgtactgtcatcgtaagagtttcctgcaaaacacactgatttcaagtaaaaggagagaattaaatgtggcaacatagatagcttacaaatttttggttttgcagattaattccgagggagtgacaagaaacttctacccgggagaccaacttccactctggcacgaggagttagagtcccacaattcgttactagacatattgaactctgcgagtccagagccaatgagcatacaatgatgagtccagagccaatgagcatacaatgatgatgagctttctatcctttgttactgtttaattacctcttcgaactcttgtgcaaggctttgtgtactttaaagtttaaactaaactttagaacaaatatttcatctcacctctaaattaatttttataattgtgattttgattatgtctgttgcttcgttttaagctacactttcttcttctaaattcttacagttcttctgtatgggggtttgaatagacttttcttttaatacgaaaaagataaaaaataataacaaattctaactgaattaatttgcatggtgttatgttgagagcttatctaaagctttataaattctttcattgaaaagtcctgaagctcatagaaaagttcaaactataagaatgacataattggcatagttttaaaagaataccatttcctacaacatttttgtaaagaaaatggctgtgctggtggttgctctcgggaatggtggtggttggttctccggggttgctccggtagtggaaattttggcaaatgatggtggtggtggctggtagaaagagaggaggaaatgatgagaaggcgaagataatgaggggtatttttggtaaaagaggaaacagtagcatgtaaagagtgaaatttctaaatgtgtatataaatatacacatgttgtatatcacatgcttaatgcatatattatgaaaatagacatatctcaatatatgaaaacatatatattaataatatatgactattgtttaaagggattattccacaaatatacaaaaataaaaaaaaaagtttacaaaaatacggtttcacgaaattttaaatattttttacaatttttttttgattttatttacagaaaatagtctttttatgttttatttttgttcatttattgttaatattttgttatttgtatgttattttttgttgtttattgatgttatttagaagttattttcctgtaattttcttgttgtttttatgtaaaactgaaaaatgtaaaaaaaaaaaaaaaattttaaaacgtaaaataacgtaaaatataatttttttttacaaaaaatagtaccttatgtaattatcccttatttaaataggatcgtaaaagaccatattgcttgtggtctcatacttttgtcttgtttgtaggccttctctctctctctctct

SEQ ID NO: 21626 - DNA, 3934 bp, Cannabis sativa
aacagtactttggaggattttcccaccaaaatatgaggttggataattttttacaagtaaattgatagttggggggttttaccgcaaattactcattaaaaaaatactaacttgtttatattgttgaccggcaactggtacaattgctttagataatgcgtaattggttgtcgtcttctgttcttcatcatcattggagtaaggattattggaagaaaatgcagatgatgatggacacggtttcatcaaatacgtcttaatttctgatgaagaacgctcatatttgggctataatttcacatgtcatacgatatccatttatttcacaaaaattagttaaatttctaatataacactttttaatagatattactggtagtaaataaatttaacgataaatattaggaaaaattatggtataagtctccaaaaatttataattgatgcatataagttcctaacctcaaaaattaacagtaatagtctacaacgtcactgtttatgtatctccgttggtaccaaatttaacatcaccgttaaatagtaataaaatgccacatgtatgtttttttttagagagtgatataccacatgttacatgttgtttattggtacaaataataattttaattaaaaataatttaaaaaaaaactaaaaaaaatatattttaaaatcatataatttatcattttttttgttattttcctctttgtcttcttcaccaagctaccaccccgaccctcaccccacccacatccccagccacacccaacctccgagctcttcggagatccactacttcagtcgtcatctattgttgacgtcttcttcatccagccacaccttaactccaaccgcttaaaaatattaaattgcataaaaaaaataaccagaccaagaaaatgccataaatgagttttttaaaatcaaactcgtatcaatatatccaataaacccagatttcaatcattgatccaataaattttaattcgttaggtattttagattggtatggaaaattaaactctcatacccaacaaatccaatcatagatcttaaccaacacatcacaaacaaaattaaactatacttacccgaactgaaatcttcgttttcttcttctactccatccaattatcttcttagaagttttgaacacactaggagagaggctaaaaggaatttgggtttcaaatgtcgatctactcaccttcagggactgatgcgcaccgttggggaccgattggctcacttgaaatgggctcgggatgacggtgaggtcccaagatcaaagcgtggtatgggtatattttttaggcaagtgtggtctgtgatcaacgaagaagatgggtctgtgctccacgatgaagaaacaaatgggtggtggtggaaggcggagaaggaacagaaagcttgcgaaaaaaaaaggtggttgagcagatcgggataagatgttccacgaagaagaagaagaagaagaatggaaagaaaaacaataaaaacaaaaaacaaaataaaaataaaaagaatatattaaagtttttattatttattttttaataatttttatcatttaaattattttttaattgaaattatgatttggatcaataaattttcaacatgtggcattattgtaagcacttgatagatttgttaaattgggtaccaatggacatacataaataatgacattggggactattactatcaattttcgaggtttataatttatctgcatcaaacataagtttttagagacttattctataattttctctaaatattaattttaaaaatattaaatcattacatcttattttacttaattaaaagaatcagatcaaaaaatatatttttgtacattatattaaaaatattaaaaatatgtttatatacataatatttaagtcattttttatatattttttttttgttggaagacttttttttttcaatttttttagccaatagaataacttcaacccatataatgtaaaaataataattttttctagttagatagaaaattaatcataaaatgttcaaattttcttattattatctattcataaataatactcattaaaaatacatccatatatatatgtagatttatacacttacatttttgaaaaaaattaaatgatgtgaaagaattaaatgatgtatatatacacttacttttttggatctcgatgaaacacttgttgcctcagaatttatggaagtaacagtagtattatgctgcatattacagtaaaacaagttatacataagaatattaataaaaatggaatagttttattatctttgctaaacaaaaacaatagatagttggtactagctagttcaattcaaatgttgagtgtgtgaaaatttgtacgcgaaggttgaggaaacaatcaaatgcccactgtatcaaaattcaaatggaaaatatagttggtatatattgatgtcccaatagagaacccaggattatatatacaatatataaatgtaaatatgtatttttttatataggaagaagtgaaacttattttattctacatatataatttttattttaattttttgtatacaataagaaaagaaaaaaaaagagcataggatgagcctctcagcttatctttcattgggtctgtgcatatagccttttctaaattggtggacatcattactgtccgagtcattaaaaaaatggatgatttttgccaattaaattcaatagtgagaatagtttaggatgtatttttaaaaatgtaaaaaattgaattggggcacaatttctacctttttacctaatctaattaaaataaactaatcaataattaatgcatatattgtaccttgttacttagagcttccattctctttaaattaagcaaaacaatgggatccagaaactcctgatgaagatgctcaaaatggcgatcagcataacactgagagcaaacactaaaactagtactaccacttgtttcgtcatcaaagcatttcaaacaagtgaaatacaagcctttcacaaatttcttacactttccaccacaaaagggtctcccactatggattatgtaaaacaaagttattatatcgtctgcaaaaagcccatcgtttccactctgcttcagctcttcgtagaactcttctgagctcatattgcaacaacccatggtctccatgtaagccgagaactccttgaacttcacgtacccattgtcgtttgggtccatctcctcaaaaaactcatctacgacatgtcgtatgtcgtccgtcgcacccatatagtaagccaaagccgtttgacgcaaatcttccatctctcttattattttctttgaactattgtaatttgtacactatactactttctctagctaattatatttatacaatttagcaagtgatcgtgagcgtacacgtgtacttatgtagtgtgggtggagattaattttcccttttctttgtttcgtcaaagtcaattacttaaccttattatgtgaatatggtggaaggtggaatggaatatatattatttgcatgatattaattaattgatatattgctaacattgttgtgagtgtgtgagatggtttcggtgaagaatcgacgaaatttaactctatatgtcttcacgcgttactaatattaataaattatagttagaaagtgagtgagctgtcacgatacttgacttaatcagtcttctcttccaataaatatttcatcaaattaattgaaataatatatatgcaggcatgcacatccatttatgttaagtaatgttatacataagaacatacatgtgaaatgtatatatatagtgatgttaactaatcatcaaaactttacttaaagagacaacacaacacatcttcccagactcttcttcttctccctctcaacatgcacaatatgaacaggctttct

SEQ ID NO: 21627 - DNA, 4214 bp, Cannabis sativa
tgcaacttaccgattatccaacctcgatggtgcaacgatcaaaagagcttggaatggcgaaagcttaaagtattactatcaatagtagttgcatgtatttatacttagtcaatttatttcaataaatgtactaagtatagggggtataacctaatattatactattgattattataatgaaattcaatatttgaaattttcaaaagtttttttatcttttttgcaagtttttatattctaagttattacaccaagttgtaatgatattggtcaaaaatattgcaaatagaaacaacaaaggcaaaaacatcttatataatgcaagttcccgtgtactgctaaataagtgtgcgaaagtaaaatatcctcgaaaggatatagtgtttgataacaaaagaaatataatttgtttgaggaacaatgcgcgagtacccgtgtacctctaacaaaagaaattaaagttcaataatagcaaaaagaaacttagaaaaattaagaagctggagtactgggatcatctgcgaccttgcttatagcaccatcagtgactttctccgcatctgcaatctcaggatcctcaggaaaaaggtttccctcacatccttgggtttgagtaggcaacatagcatgaaatgcatcggccatttctgctgcttctgctccaaggatggggaagtcgaaatcaggtagcttggataaggtcgtgtaaatataatcagaacggcatgatcatactgtttcttccccttctcctttcactcttaagatcgcgagtgagttccttaactcgcgattccaaaagtttggccttgtcctccgcctgtttagccttttcctccgcttgctccttagccttcccgaggtcctcaatgtctttatccttcgaggtcacgtctagcttcagtttcttcacgccatcctgaagaagtgtattttgattcctaaggagatcgacctccttagtacctacgacaaaagccctcgataacataatcatgaattacaaggccaaatctgtagagcgcggcaacacgtcctcagcaggaaccccctcaaccttggatacgaactcatcactcacgaacttgtcctgaagggttatgatgttgcgagccctaacagcagggtcaatcataaccttcttccccttatcttgggtagttttgagctgtttctttaaggagtcagccactggagtcgggacgacctcattcttcctcttctgtgggatgacaggagaagttgtcgtagttctaaccttaggctttcgattgagaatgggatcctgcttcaagaatgtcatttctgtgagaaagccataagataagaatatttttattgtatgaaagaacatgtatatattcgatggattaccagatgttggtcttgatgtttgtttagataggcgcttctctattatttccttttgtttctcagaaggctccttgtacactggttctcactgaaggctggcatttatcgggtataagcttgtgttcttacaatttggcagtagcacaacaattcccaatcgcaatcttgaataggcaagctacctagaactttagcaatttccctgcgagcagaatcaattacaggttgagctggcctatctacgattaacaaaaaacagacattaacgactatacaaggtaataaaaatatatactaagtgttgagatacgcgacatactaggtcaacaattgaagttagtcctaacaactggtactttaaaggcgtaaaaccatttagatttccaatctcccatattagaaatcgtaccttctaccccattaatctcagagttggcccatttgctaaaaacagtaaaaatcattatcgtggccaacattctttatgtcgtagaaataactaaagtcctccatcgtttgttcacctcggacatactccatatacatcgcataaaaccccagaattatgcgatagctattcgaagttaattggaagggggagacatcgtaatgtctgaggacagcttttacaaacagatgaaaaggtagagttaccccacatcaaagaatgggtatcgagaccaccacatcttgcgtggggataatttcagggttggtaaatggaaggtgaggccgatgagatgttgaaagacgtaaagtccctattcgaaccaaattcaactttgtaaatgtatgcaggtcagatttagtgacttgcgagaccagattctcgcatgaaaatggttcgttcagttgagtgttgtcaactgaatccatctcacttcccttagcatctccgtcctcctcagactcgtgatcaggtacctcgaactcatctcccatttcttcaacttcgatgtcaggggcatgtctcgagtgaacgagatactcctaagcagacaccgtggattggctatcgcaaatttcaacagttactagttcagcgagttcctgaaccattctatctatctcgtcagtagatagcgagccctagcgagctctggcagcaggggcctcctccttagagatcgaggtgggtatgaagttgtccctcttctctagctcgtcagcgaaagccccacctccagagttgagcatttggctattcaataggtcgctcatttgaaaaatagaagatcttatcagtatggtgatagtgcgagaataacaaagtgcccccacccacataaaattcagaaaattgtaaaggattggccagacatctcaaaaaatgcatgggtgtatctcaataacataatgatcatgacgctacatgaaaattaaggtaatgagacacacccaccatttcaagaattcagtcagtcctctcaaaagagaagtcgaacatataaaactaagtgagaacctcaagaaatggctgggagtttcccagtatcgcaaacggcatgcactcctcgcatgaccattgagttaatgggacacccccaccatttcgagaaacctggttagtcccaacatgcgactataaagaaggaaaagtgaaagcttgccgcatgtctcaaatggttgggcgtatcacagtgacccaaggaacatgcgtaagtttgcatgaagattaagttactgtgacacgcccaccatttaacagtctcagacagttttcataacaaaagcacatatgacctgaaggctaaaaaatagaccctaagttctaacagggattaaaatggctaaggtacagatttactaagtcatttctgatattcataagtgtatgcgagtattcaagatgatcatcatgaaactcgcgagtattcgaaatactcaacgagaaatatgcaaacactcaaaaccaatgattatttgagtttcaagtatgtatttcctagagaaatgcatatttagtcaaaaggaaaataaagttttatacatatatcttatcgtctcatgcattttctacctctcgaaagacaaaatacagattaatttttgaaataaaaggaagcagttgcaaaaaaatttccactaaccttgaaaatgcagatcttctttgaacgattttgaaagaatcaagcacttctaacttctattctgaaaaagaaaagttaggaggagtgcaaaggaaattttttgaaaattcaaaaatcagagaggaacgaggagaaaactagaaatgagagggaacagaaatgaaagatcatttcatattagggagtttaaataccattatccctcattaattgggatggagacacgtggcaagggaatgcctaaggtctcacaatccaacggttatccataaccacgcttgcacagactcttaatagtttcgatgatgtggcaccctaaattggttaagaataatgatcacaaccatctttttaaaaccctcaattagacaaccaaaattcaacatctcctaacaatctttcgcctgcctcttgcttatagtttccatcgtgacatagctataaatcgcgaaactaggggcatgtgttatgatgagaatttttcatctagaaactcaagactaggctcccataaaagtgacacgtggactcactttcctcgaggagggctgagatgtcagtaggagacctcttgagtgtaaacctcgcttgaaccagactcaacgggatgatgtgatcttgatagagtctagtcgcatccgtatagcttgcacaaagcagaaccgaagatcgggtttaggatttgcatataccaagatatatgcgaggactataaaggtcttcatacgaagtagtagagatcgattctct

SEQ ID NO: 21628 - DNA, 3756 bp, Cannabis sativa
atgtccgagtggagcaatgctctggccaaaaagtcatacaccagttgcatgtaaggaaccatgtctttgagccaaagccccatcttctcgtatgttgtcttgaaaagaatatttggagaggctccattgtcaatcatagttcgagccaccattttattgataatgtgtacttccacaactagaggatcattgtgtgggtaaataacgtggtcggaatcttcttaaggatataattggttcttccttgcgctattgtttaggctttctttcttccacgactagtgctttatctttctgttcatgttgtagagtctgggtatacctctctctagccttgttcaggtctctagcagtgtgagggcctccaataatcacttgtaagtgcccacccacaggtggaggcatcaactgattctaattattttctggtcgggtggccctcttatcctggtcgatcttaacatacttctgaaagtgcaggttacttttcttgatgaggaatttgatttctcttttcaaattattgcactcattagtatcatgaccatagtccgtatggaagtaaaaatatttggtggtatccctcttattgatatcttccttcatgggaggagatctcttgtacgacactatagattgggttatcgtgaagatagtttctatatcttcagtaaggatagtaaaggtagtaaactgtgaagcattctctcgaggatgttgctcaaagttattgttgaacttgcctttctttccatcaccttgtttgtttccattatttgaaattttaccactttaactcgaaatgttgtggttttgagacctttgattttgctggacagatgtattggcagaaatggtgtgtgactggctctttttctgccgaactctcccattgaccttacggtgagtcttttaatgtctttcgacaattctcctagaggtgcaatacctcctaaaatggcgactaatttccccaatacctcctagaatggcggccaatttcccctcttcggttaaccctttcacttttgtggtctcagtcataaatctactgatgtaggatctaaatggttctcctagtacttgcttcacttcgaccatttctaataggtgagatgggagtttcctagaagaggagaattgtgcatgaaactccacaatgaaggaattctatgagttgaattttcttggagctaacttgaagtacctttgttgggcagcctctgccaaggtagctagaaagattctacaccgtacatcacattttactgcctgcaagttcatttgcatttcaaagtacttaatgtgggatagaagatcttccttgcctgtatacatttttcatatagatattttgaacttgggcggaagatcaagggtattaatttttggtgaaaagggtgatcccctagtccgttcaagttctaggtctatgagttttgggtcggtcaggctttgtaaggctcttaagttgatctatttgggcttgcatcactggatcaacttgacttgcatgttgactgcatgtgtcacttgtgggcctcttagaatattgtcaagcacatagttatatgcattaatcaaatgaacattgggagggatgttctatccatcttatccctttctttgatttagatcatttctcaagtcgtgtacggtgcccaatcggtgaaagactgattcacctggaggtctccttgtctagctattatcaataattttggtctatttggtatatccatctaaggacggatgttatactgaccattcccccaaggtaatgggttgacaaaacttgctcatctaccgtgtggcccacagtttgactctatgaccttggattggacgactcgtttccttgggtttgctgagtgttttcagtcagacgttcttctggcccatactgtggttcaatggggatatagacatctgtcattttgtttggatcccatataaccaaagtatctgctactgattatttgataggcttgcctaatcaacacagtggcctgccaagaacgattatcgattactgcctgggggctcttataatctccatttgttgatccatccactcctaaaattagagcttttgctgtttgaatgaaaaattaatagttggtcgggtatcttgttgatcatgatgaagagtgttggtatgctcttgcacctaccctagtgcagcttgtgaattttgcagttcggtgtcatcaccaatcatccttcgaggatttccaacagatggattttcagtaccaggggcagtctgctcagcttgggtactggtggttctagtttcttgcacgcttagagtgaacctggccagtggggttgtccctcctggtcctattgattgaggacgtatcaaaggctaaggaatagtagggtcgggatctgtccttactagatctcttagatttgcaagagtttgtacattaggatccgtaaccatcaaatcaattttctcgtagggattacccctccttgtagtcacagccatctttgcatgtcttaaaaagattcgaaacaacgattatgctctttttctctcaatgaagacaccaaaatattatcatttcttttagccaacaaaaatggttaatcagagcaattagaaacgattaataataatgattaaacaaatagaacacaaagattgctatagaagtttagccccgtgatggtggtgataacctactccattttttctcgtattgacttatgagaaaagaagcaagaagttcttgatcttccttgaaagctcttacaataggtttcagtagcttaagtgctatatggaatgaatgattttggatccctcaatagtgaaataaatggctcaactatttataggaaataactacatcaatttggtttcccaaaataaataagaaataagtaaggaaacttaattactctcctaaatcaaaagaataaaaacaaaaactaggtaggtttcctcttctctcatattggcatgaatctatcccacaaaatcagggatgtgatcgtgactcacatgcttgaacatttagggaaagtatttctaaagatgttccaaccacttgtactctagccagtgcatgcaagctgactgtaaagtagatgttggtcggacagtgtaacataccctgtccaaacgttccttcttcttcttcaaattagttttttataagtaataaatcactctgggtggtacaccatggagtatactgcccgtccaagttatgagatcttctccacacgtcactcgaatgaatgccatgtcactatgtgcaaaaattgggttaacaccattagtcaagcattaaatgacatatttgtaatcgaaaaaattggcatgattatattcctctcgagactcacaccgaagtaaatagccgccaatttaatgattttgcaccaagtgcctccttagcaaacatttgttccatgaaccactgaagttatgccactatcacctaagctcagaaaatggaaagttttcttccatccacgaaaagtatttagaaactgtacaggtttcacgtttagcctctacctgtccatccatactgtctgaagtaaacctccacaactcatagctttctagaagtttgggggtaaatgttatccgtatttttgagaagagacacgtagaatctaaataatgaatacaacccaaatatatattcaagacctaatagtggacccaaacaatgtcattgggctggatccataaaattattattccttctgggtaaataattgtcaact

SEQ ID NO: 21629 - DNA, 2333 bp, Cannabis sativa
cactgttgtaatgaaaaaaagttaatttttaacaccaaagtgtgcgttggagttggtcttagttacttgaacttgttctgctttgcttgtttggtttggggactctaaagatttcactgtcaaattttgacactcggcttttgggtattatttgtagtaatctattttttatttctttttatcaaagttatgcttgttgtttataatgatgcgcttaatacataacatcttttgcagttggcctagtcagcttttgggtattatttgtagtaatctatttttttatttctttttgtcaaagttatgcatgttgtttataaccttctaggtgaatgctccgagctataaaactaggccaactgcaaaagatgttatgtgttaagagcatcattatgttagaatttgttttaggttgaacgattatattttgggtctcctcttgtaagattagaacattaatggttattttcatgaatttagtttaccatttgcatcaagcgattcatgtttaagttctagtttgatttcaatattgctctgcatatatgaagaggaataccttgggacaaataagggttgtaattcgtttgtgtttgggggtcgtgacgtgttgaggcttaggtattacaaacaaatgtcgaattcatatctgacccatttattattcgtttcaaaaactaaaactaaaacgtaactcgtttataaatgggttgacatgatccgacccatttaatccatttatataaatagttaggtttagttttggttaacttatcaactcattaacatgtttacaatcttgttatgacacatttatgagtaatttaatatgtttatgtcctatttaactataaaatataatttacatgtaataaatataataattttaagcgtgtatactcatacataggtccttatcgtgtcatattcgggttaatgatccgtttaataaacgagttagctgtgttaacaagaaaataacctaaacccatttaaagcaaacccaaacttatttattttgtgcgggtttcgagttgtggtatcgtgtctgacccaaattgccatctctagggacaaataggtccaagtgaagaagtgctatagttaatgttagttgttatatgaacctgccttctccaaggctgtaagcttagtatttgtaaattaaatcttttaggatttttttggtacgccgtattagatcttgtatactgttatacgaaattatgtttcatatcatatttatgtataatattatgtgaaattttgatttatatcaaaatattgtttgtgtatatgtacatacaagtcaatatcaaatatagtagtatataaatatgatatgtagtataatttaatataatattatacaatacgatgtatacgttgtaccaaatggactataaagattcaaattatgttgttcgatagtatgaatgataatctatatatatatatactagttatatattagttgtagaattgtaattacttagtttctaatttcttcctagttacctatttagtctccctagttttgtacatatatacttgttattctattgaataaaatacactttttgatccaccatttacaacatggtatcagagcacaattcaaaattcaaaattaggggtttttcaaaaaattgagatttacaattagggtttgttcttcctcttccttaaagtttatttctcggaaaacatacttaaagagcacgtgaactctcaccacgggtacccatagactgcccagctgtcgatttgcatatccctgaagtttggtggtcggaatcctcccgcttgagaagctttattccgactccttttccatctttctgaccttgtgttgcattcatttcgaccattatttcttcttttgcgatcgttgaggtttgttcgtcatttattggtgtgattcttcgtttctttgttcttgctttgatgtgtgaggcataagtcagccattgtgacgaatatggtgccggtaatgtctaaacttactgaccataaactcaatggttcaaactatttggattggagcaagagtatttgcctctatctacggaatattgacaaagatgatcacttgactaatgatcatccaaagtcggattcaaaggagaaaactgatctgacatggcttagggaggatgctcgcttattcattaagattcgcaattctattgaaaatgagggaattggtaatcaatcattgaattttttaaagaactaatggattatttggaatttttgtaatccgaaaaagaaaatctctcccgcatgtatgatgcgtggcaaagcattttttcgtgtggaaaaacaagatc

SEQ ID NO: 21630 - DNA, 1198 bp, Cannabis sativa
agttattaatactcttattatattatagaggtatttagtgcgccataataatattcactcgtaaaggagtatattatttatttattattgatttaagtataataatatctctatacataaataaaacacaaatttaatacacctttacgtgacaaattaattttatatgagaacaattttaactaaaactaattgtttaatattatgtctcaagtttgtgaatgatttatgagtgcaatatttcattacactttcttcaatattattaacaaatctcaagaatataattggtggtaaaaatgatgatttcattactcaattggtacactacatactataatttgaaggtcaaaccagaaagatttgccaattaagacgtgtttccaggcaacgccacatgaataagagcatctctctatttaattaatcaattaataaattaataataataataataacaataaaacaaggaacaaataaactagattgcttcacctttcgataaaagaaaaaaaaaactagattgctattgagagaatgctctaaaacaggtgatacatttttaattttctaaccacttgaatttattattttttttttcattagaaaagcaaaatgttaaatctcacttatattttttagcacatgcatcatatcgttattaatataattaaatattacatacttacttactctacttcagtaattattaaattgtgatatagttcgtccaaataaaaaggtattcattagttatttttaaaaaatcgttcactcgcagaagtcagtcctaaaaggttctcttgtccttctgtaaagggtcttctagaaaagctaatctctttctggaatggagttccagttggctagttgttcctcctgaaaaggtaggttcagaagatagtcgactccagctggctctatcctgtctagaagctccttcagcgagtgtctttggtccgtgatcgcgaaatctcatatatgttctcgaaggcactcttacttatactgacttggagatatcacttaaaggagagttagttaagttagttatttcctaactaacttaacaaccataattcttgcagtcgtcgactttagaatcttaatcctaagtctataaataccaccttaacttgtcttttcagaacatgtgtcagattaaggttgagagtttgagagaggtacagagaaaaga

SEQ ID NO: 21631 - DNA, 2883 bp, Cannabis sativa
  modified_base (213)..(221): a, c, t, g, unknown or other
taattaattataaaaaagaatgtccacctattaggtaaaaaaaaatgtaaccatatcactttaaatttatctcacttaatcacaaaaaattattttttccacgtcaaaactattcaaatatcactttaaattttataggttcacataatattaactatttaaatattttaaaaaataattataaaatgtaaaaaaattacaaaattaaaaaannnnnnnnnaaacaaacaaacaaacaaagaataatgtaaaaaattacaaaatgtgatagaaaaaaatctcaatagttcttcctctcttttccttcttctttgccaatatcaccaccaccattatctttcgccactacactcactgcaccaaaacaaagaagatgtcagaccaaaattaaatacctcatgttatgaaatccaaacccaaaatcaaataaccaaccaaaatcaaaataaccacaaacatcatcaaatataatattccaaatctaaaaattgtaataatcaaacccagcacaagtataaattcaatctactactttcttaaattgtaaaaatttgtcacttctttttcttcatacaaatcgtagaaggtggtgtgagggcatcatagtagtagatcggaggtggtgagtttgatatcgcaacatatcgaagatggtgtcaatgaagatcgggatggggttacatgctagaccggagacccaaggtctgggtagtctacttctttttgccattagcgccagtagctgtacctatgcggaccctcaccaataagactaacagatctgaatcgatgacgaccccaatcgacgatgttatccacattttcggaaggatgaaaccttctctcctttggctatgcttaaatttattcacatttttttatctataactgccacttatcattatgagatatggcaaatggacatcaagactgcttttcttaatggcaatcttgacaaaactatttatatggaataacctgaaggggtatgtgcaagatgaggaagatcaaaaggtttgtaacttgcttaaatctatttattaaagtaaacctctaaatcttagaatatcatttaataaaactattaaagagtatggcttcgaacaaaataaagacgaagtctatgtatacaagtacattaaaagtaatgtaatggtattcatggttctttatgttgatgacattctacttatcgaaaatcatgtagaaaggttattagacgtaaagaagtggctagctaataaattccaaatgaaagatttaggagaagcaagctatgttctcgcattaaaatctataaagatagaaaaaagagaacattagcactttctcaagcaacttatatcgataatgtgctagaaagattctcaatggagaattatttaaaaggacagttaccgtccaaacatgaaatttctctatgaaggatcaatgcccaaagactcctcaagagatggaggacatgagaaagtaccattatgcatcagcagtttgtaagcaatgttgtgtacaagacctaacatatgttatgttgtaggaattgctagtcgttatcaatcgaatccaggtttggaacactggatagctgtaaagcacattctcaagcatcttaagagaacgagagatctcatccttgtgtattctaaaggagagttaaatcctactagatatactaattctgatttttaatcagataaatgatagtcgaaagtcgacatctaaatcagtattcactcttggtatggtctcaagaagcgttaagcaaactagtattacagattcaaccatggaagtcgaatatataacagcttgcgaagcaaataaggaagcagtttagttgaagaagttctacactgatctagaagtagtttcagaagttaaaaaatcacgggtgttctactatgacaatattggaacggtggccaactccaaggaaccaagaagccacaagaaaagcaagcacattgagagaaagtacaatatactaaagaatatagtagagagaggtgatgtgactgttgaccaaaagtcaatcactcacttattttggtgataaataaatatttgattattatatgttactaatctcttcttgatcattttgtaagcaaattcacaaagtatcaatatttgcttagtaaagtataataaaaaaagtgaattcaacaagtatatcaaccacttcatactttataagagcaaaactttcattaagagatcaagaattcaagacccaatccaaaagaggacttcaaaagctcaaaattaaagtttcttcttccatcttgctgtttctctacagcacttccttacctaatggaattgtctcattccatattactttcttttttttttcgagttcaaaacctggacaagatgtttttcccatataataaatctgtctaaagcttaacgtcgtcacagcttagaatatgggtcgagtctaatacatattttcttagcatggagatatgaaacacattatacactttgaacaatgcaagagtcaaggttagttgataggctacctaacctacttactccagtatcaaaaagtctaatgaatttagggtttaacttccctttctacgtatctcttcatagacaatactcggagaaacacacaatctcctatttggaactcgatattcctatgctttaaatctacatagctcttctgtgtactcaatgaagtgagcatacaactcaaattcactctatgattttataagtttcttgggtcttttcggtccatcgtgtcttttctcacctgtgttactccagtgaatatgtgtctaatatttctctaatattaaagtacctaaccaatggtacatttaattatcagttttagacaaacacttcgtcaggggaagagattat

SEQ ID NO: 21632 - DNA, 4403 bp, Cannabis sativa
tagtataagagcacaaacttaacatgttatcgagagagggaggacctactgtttcccgagtcatcttcgacgactggttcgagatttgggttgggtttcaccgttgtcaaattaaattgtccttagaaggttgatgttgttctggatctagcagcatcaagcacaaagacatgaaacagagatcgagtgacgaagaaaagaagagagaggagagagagagtcggggttctagggttttcagaaagagagagagcaccgttactttactttactttttttttaaaaaaaaaaaattagttgtgtcaagccagatgtacgcatgcgtaacatactcaaacatgttttgtatttatttattttttaataaagtgtacaaaatacggtgtccggcaaaattggacatgaaataacactaactattgttacgtcctcactcacttttcacgtctagtgttggacatgaaatttttttaatgttcattaatgctggacataaaatctcctaaaactttttcatatcccacattttttgtggacaaaaagaaaatttttgtagcagtatagagttagacgttgtgtttccataaattaaacattgatagttaattattgtacgtacatatgcatgcattaatatatgtatcaattacttattgttaattaattcaattaaaatataatttttatttagttccaaatgtatattcttagatagatagagattctattatatcataaatgggatgataataaagttctatattaatcaaatttgaatggaagatatcaaatatttatgattttaataaagggcatagctaggtaataaatattattaaaaatgcatggtaacaatcctgtttttttttaaaaaaaaaaagaaaaaaacacacacacattattaaataggtattttattaaaattttattgattattgattattgaatgttaatattaaaattttattaaaaaattaattcaatccaatcacaaataaattaaaatattatttatatatataataaaaaatattacaaaaacagttaaatatattttttttaggttatctttatttaccaatacatttaattaattggtcttcctgaaagataatttaatttccaccttaaactaaaggaatagtacgcttggcttattatgtttttccaaacaaatatataatcttaaatttttaggatattccttcattttcctttatttcaatatcaattagattttctataattttcatgtttttaagtttacataaataatctggtatgtaattggatatctaattataaaaccgatttaatttaattactaattgaattagattggattaaattttgcgtctaatatgacaattaaatttataaatccaattaataattagattagatcaaatgagtagaaaaataatagattagattggacatcgatccagccatagtatacaccctaaaaaaatcattaattaataataatagttatagtggatccaattaatacaagtgatctgcttaatataaatctcacaaggtaattcaaataattaagctcttcaaataaaaggtaaatgaagcctatatattaatattacacactgatagagcaagctatatatagagacacataattgtgagccagctgcagatcgataatcaatactaaatcaccgagccctatttgaagataccaaaacgtaaaatatatcttcagtcatgatctggaagggaaagatccccccaaaaaaaaagaaaaaaaagtaatgaccaaattaaggcatattcctgagaggacaagggtcaacattattgaagaaagaaaacgtacataaaagcgaaacataagcacataagctagttaatcaagtagaaataaaagcaaatatattgtataaataataaaaacagtaacaaaatttaaagatttccaaaagcgacattgacattagggcagcgactactatatatacggggcgccccgagatggctgcgaccccacccgaatcccacacactatatagagtccctaacacctgattcagagaagaccaaccaaccaaacactacatggtccatgcaccctagctagagaaaaaggggagcacctagctgcaagtactaaaggagagctataagccaagccaaggttacccaccaacttggaagcaattaaaggcctctccaccaaaccactactgcccattctccatattccatatttaactattacgcgcgcacatactagctaatatttgtaatatatatatatacaacctttttctgttacaattcggattatttgatgccctccttaaaagtaaataaataaaaaatgtgaatccatatatatgcattaatttatttcatcaaaattggttttcataactaatgcatatatatatagatataacaattggtttttttattttcgattcacacagatgtacacactatgtttcaatatagcacggagaaaagacattaaaagggtgtaattaataagtattaagtttcatgtataaatattttaatttaataataattataaaaactgctaattatttgaaatcacacagcaccagtaataatgtatgcaaatgctcacatggatagaattcaaataaatatatttatataaagtaattcgaattccaatcgctgagtactaatctcttcccaatgtgttttgcatcacacatatgtacagtttctcattttcattaattggtcatttgatgatatcttaaagaactaatagtgttttttaccactcaatgtgttatatatatattgttatatagatatatattgagttccatttatgtaataatctttataaaatatcgctaatctttgaacgccacctcaaaattaatgctctattttaagagtgaatgggaacctcttaaactccattattatagcctttggtggattgtatataaaagacgaaaatgtcatcaaattttcagatcagatgagtacaactgtataaacataaaatgaatatgtgtatataaatataaatatatatatagtgaatatagtttttgtccctcattggaaacgtaatcttgtccacttcgattatttggtcataataatgtcatatataaaaatatatatacatatatatggggaagaaagagttttgatctctacattatttcaaactagtatatatatacaatcaatcatatatacttttccttaccttagaaagaataaaaaaaatacttttcttacacccatggccaaaacaaatatgccaacctcacaatattctagtttgaaaacaaataccaaaaacactaccaaagatgatcataacaacaatcaccaatgttccattatcccactagacttcaaatcagtctcaaagttacccgaatcccacacttgggagctcacccatcccaacccgctttcaacctccgaatccgagtcaatacccataattaatctctccgacccgaaagccatttctctcatgcgacatgcctgtgagaactggggcatttttcatgtcacccatcatggagttccttccaacctactccgcgaagtcgagaatcagagccgtcgattgttttctctaccgtccgatcagaaactcctggccattcgatcactcgacagcctttccgggtacggcttgccccgaatgtcgaccttcttccctaagcgaatgtggtcagaagggttcaccatcattgagtcaccgctggaacatactcgcaaactctggccccacgatcatcatcaacgagatcacttctggtacgtccgaacaattaaataatttatttttattttctgctccttttttggcatacataataaaatatacattatttttttctttacaaaaaaaaggttttgagtggacagtgatatctttttttttaattattttttgtggaaaaacatttacggaaaatggaatttgagaggacggtaattaatgtgtccgagcatgcagctccatgcattgcgttttacgtagtaaattttaacggtttatctaaagtactatgtaatcatataattatatatatagttcatcatatttatctgtatactataatataaagtttcatgaggtgacgtcatttactaattatttatataggaaattcatgagtatactccttctgatagattcactacttgttttgtgataaaaaaaaatagtgtaattttttttcttgtatttatttacccatcaaatttgatataatttaccatatccaaaataaaatttaaacaattatttacctatacgaaaaaacaaaaatatgtaagatttattagtgttcgcggtgcggatggcgtagtttttgactattttttcaaatcaattggcacatacagttttttcaatttcccaaacc

SEQ ID NO: 21633 - DNA, 6900 bp, Cannabis sativa
  modified_base (3248)..(3256): a, c, t, g, unknown or other
  modified_base (3433)..(3434): a, c, t, g, unknown or other
gtgtccacctgggcgctgggcccagccctacgtgtaacctgagcactgggtcccagttgtggccctctaaaaaattctatttagtttccagaaataggaatcttaatattttttgaaaatgtagaagattcttgaaagaattcctaaaaatactccatttgaaatggcccaggttaacaaaacctaaacttgggcacaacgccggcctcaagtttcaacctaggcactggggcttattttttgtacccaagaagtattatttttcctccaaagggacctatttccccatttttgatgaagatgaaaaagatgaaaaagttggaactctgattggatactttgataggacctagattgacagattgtctacctgggtgttgggtgctcggggtcccgggtgcttaaaaattaacttgctctgattctaattatgatgcctcaaatatgtctgtggtatgtctagttgatgtcctaatgcatttattgacccttttccactaagatggtttcaaaaattgaaaccctagtttaatatgtaattttagctcccaaaccttggattaggttgctccatatcttcatggtgcaaaataataaaagatagtggattggattcaagttattgaagtccaatcttccatcctagagatcccaaagtcaatctggacggagggctagggtcccctcctaggtcgactgctatgactcgagtctactcaactctatggcatcatccttcatgtcacgtgtcaaacaattatgtccacatcaccagggaaagttttcaggttaacaattatcatcttagaattacttctcacctaatagtttaggattccaagttgaattataatatgcaatttatagtaatgtcaaatgtattataggttatgatgaaaaatataacctaggctacataaataatatgcttcattgatgtgttacctagattaacttatctgcataaaaattaatgctttttctaggttaaataaattgcatgtttcgtagatctattgtttagtgaaaagatttaattattgagtatttttccttgattaattgtagtaggaaagattgggaaaattgtctacttcaacattttctgcggggttaatagtttaattgataaatttgaataacttttattattattgatcttgaatgattggtaagggtggagattgactcttaattatttcttaatattgtattatctatctttatttactttctagtttatgttatttaatctttatattaaaatcccctttcttattcttagttttgattcttgaataataaattaagaatagtccttgtgggtttgacctgtacttaccgttatactgaaataactggtaatatggaaataaaaaaattagtaaatttgttgtggtaaacgatacgcatcaaatttttggcgctgttgttagggactattttattcatttttttcctttttactaatttgttcttctagttgtggtttcaatttcagatcttgtgctgaaacatggtgatgtattatcaacagtataatgatccataatatatctcgccacaagtctatcaatgtgatccctactatgatagttacacatcacaatgggggatcattctaatacattatatggcaaaattaatcaatatgttaagccaaattactacaatcctctttcacaaccacataatcaaggtccatctactgaagatttgatagaggctccggcgagtaacaccattcaattttagctggaagctcacacatacactcaaaactatgtgtcttattttcaacagatactcctattctgccatatagtgaaaaatcaactattgttgagctgattgaaaagatagcagctaataacttgtagattcaacaaaataccttacagtttccgtaaagctttcatgaaactatgcaagctttcaacaatctctacaaaagatagagaatcttacggagccaatagaaatatctaggagtgggtacaaaattcaaagttcaaatactttagtagcacaaatagagagtaacccaatggataatttaaaggccataacacttcaaaggggtacacaacttgaattaccaccacaacaagaagtaaataagttgattccaactaaaggagtcaacaatttatctcttcaaggatcatctccaccaaaggttgaatctcctactttagttggtccaccatcatttaaaatccatacaaactaattgtatcaacttatgtcactcctccaccttttccaagtagattgaaaaaaatccaataaagaggatcccatcaaggagatccctaaaactcttcccaaaattgagataaaaattccatgtcttgaggtaatcaaagaagagcctcattgttctaaaattcttaaggagttgtttccaaatgagaaaactttgaatgatggtgagaaaagaagtgtggggagaatatatttgttattctccaaagaatattgtgctggttttatggtactaaattaggtacgcaacaaaagagtttcgtatcatctgattatcattgtaccatacccataggatctacagatttgtataaaataaatcaaaacaataaaaataataagtttagattatacatcttgaagcctattagggtatccttaaaacttttcgtattttgtattccttaatccagttgatgagatgaggaatatgtaatttagactcacaccagtgtcttctaaatcgatccaccacacacaaggaataatgtgggttattaggataaagtgtataatattgttcttgttgagttctcaacacatgagcaagaacaactgagaaaaaaaaaattagtttccttcttctctctatagattttaaaatttactgtgtaaaagtgatgttatgatttctcaaaacagacttctatttatagtagttaaatctctttaattaaatcattatttaattgttttaataaataaatatttataactgaattctattactgatatttatgaggaaatctctcaaatacttgagagaatatctcaacaaccttgaaatatctataaccacttattaattaacccaaaaagacaaactccatagagataggacaaaccataggcccctaccattgactttaggacaaggttggtgtcttttgtcctgacaaatcttgtcttgataaattttgtcttaacaatttttgtctttttttcctatttaattaatttaaaaaaattatttatttatnnnnnnnnnaaataattactatttttccaattcaaaatagatttttcttttcgaacatctttatacaactctttatccctacccttggaagtgtttcaaggtggcgattcggggaccatggacctataattctaagctctaataaactagattatttattaagtctcatcaaccaaataattcttnntttattaattacatgattactccactatatacatagaatcgcactcttagtaattatataattatatttactgagtttaattacagtgtacattcatataataaattcaagttattagccctccatgtgttggttcataaatagttttggtcaaaatacccttttacatttctaattacttctttatcctttaattccattaattcactagtggaagtataattcaagatcccatctgaatttgtgcacaatattcctgaattaacacttaaagggaaccaatattcgatcctttaggaaagtcaagatttcataattgtacatcattttcccaatccatattattagactcccaaaatagaagttgtaagaatcatcttctcttagagactttagaaagtgaatcaaagaaactaatgacatgaacagaagttcacgataactcaggatttaggccgatctactattgatcatcattatgatatgaattaggtcattatgataaacgacatgttaataaagacagctttattcatataagtccttgtcatatataatctctattatatacaatgcattcaccttgatgtctcactacatccgtaattcgaaccaagattacttgcaccaaagaacaaacatcagtgaattgtactagcaactattgattaaagattccataactttaatatgttgcaaactgttttattcatagctaagtgctcttagttctctatacagctacaacccacaacctcatatatgaataagaaattttttgatatttaataataattattaacaatttaacattcacatatatatatatattaaatgctcaactctttatttaaacaatcagaaatatctttacaggcgttttagggcataaaccctaacatgttgttgcctaagacaagtacattttatgagcaattattaatatgatgtcttaatctaattttgcttctttaaatcttagtttattaaaagaaactcaagtttttattcaattgactaatcagactaatgcttatccttaaggatagttgaagttgtttttgtgcagactaatggacttatcactccaagtgattcatacacaattaagatagaagatgatggtgatcctaatcctaaatcaactctatttgggagacccttcttacttactatgagtaagaagtttgatatgaaagtatggatatttataatagaatttgatagttaagaactcaaattcaatgtgttagatttcattgaaaaatatataaggaatgagtttttattagaagatccaacgtgaagaccatatgagcgcaacatgcagtcaagctaacgatattaaacaaagcaaacttaccgtagtttttccttacatttttctttttattttgcattgatgttatttgattgaaccttgatgacaatacttatattaagtgtgggagagaaaaattatcgtgtctatccaatctatttttcttaagatgtttagttatttattttattactgttttctagtttatattagtttaaaaaataaacaaaaaatgaatgagcatggttttagtaaaattttgtggacaatgactgctcatgtttgataagtgtctttactttgatgtcttatgcatggtcttttaaaaaataattgtgttaatgataaaattcttgattatgtgataattatgattctagaaaaaagatagactctacatcatttgtgtccataacgcaagactagttactgctttggcttgatttttaaattttttttgcacgaaagttgaattatcatatttgctaatgtttagggtatgaatgcatgtgtgactattaatatttgatctcaactactctagaacttatttgataacttttttaggagaaattgataaattcacataattttgagatatgatataggtaatttctttggatcgattgaacctttcaagtctaccatatttgtgaatttcctagttactttattttagcctaaatattgaaatcttatcattttcttttcttttctttttaaccttatacatgagcgttttaagccccaaaaatagttatgattttcatcctttttcacaccagactattaaaaaagtgtgaaagtttttgtttagggaaaaatattgatggttatgtatgagttatgataaaaaaaaaaaaaaaggctcctattcctttagaataaatctttgtaagttgcaagtatttttgaaagtaaaaataagaagaagaagaagaaatatatgaaaaatataggaatatttgcaacaatctaagtgtgggggaataataagacttatgaaaataaataagaaaagatacaagattgaattattgacggaattgattggagaatacaaatgagaattatttgagataatattgtatatgtatgctatgatgtgattaaagtctaaatttaccttctcatctacatttcactctagtcttacattacaagcctataaagtcctattgattttgagattgtgtttgattatattagtggagaatggtttgataatcaagcttatggagtggatttttattaaaatacacatttattttgagatgaatatttattgttggcatgcatgaaatgatttaaatgttagtaatatgatgagttaattgaccacacatacacaagaattgagtttaaaaagtaattatcttgagttgaagttttaatgattgaagaattagaatttttcttggaactataagtggatgtacaatttttgaaactaaagttatttttataaagaccaatatgtttaagcatcattcattttattattaagcaagagtcaagtgtggaagaatttgataagttgatattttgtcttataaatgtggtcaatttatgtataaatattcttaaattgattctttaaattattgatttgtgtgattttaactttttaggctattttgaagactaatcatgcaattgtagtcatttggggagattttagcatattttagtgaaaaatagtagaagtcggcggtttgacaaaattgaacgttgttattcttgacgactttaaaggtaaaacaagactttaagctcatacatgaaagttgtaggtctcgttctcatctttcaaaaatatcttgaattgtccaattttaaattgtatcaaagaagtcatggccaaaatactgttctaagtgtgcaacaaaaactttccaacaaccgccgccccggcggcacttaagcactgctagggcgaccaaaggcataaatacatccatacagtttgcaaaaaataaatttttaagctaaattttggtagacttttagggttcatttttaggacttttagaattcatttttgagagagaaactcataaaaagtggagaagagagggagattactgttggaaattattttaccaggatcttagatctactcgcaagtatgttgattaacaccct

SEQ ID NO: 21634 - DNA, 2555 bp, Cannabis sativa
gctgccgccgctgcattggctccttactcatcgagtatggcatctgtggccgttactccaatggcacagaacagacataaaaaggttcttccacactgtctcaatatttctaagcccaacaatgctgtttcaaaatttatttaggcctatctcctatatataaatgcaactactagtactaactaattgacccaacacctgtctcttttgcagcagaatccgcaaccaaacggtgtgtattatggtggagcatctgagggtttaacaaatgttaaaatcttaagcaaatcgatagatgctcgtgacctgaatgtcgctgagaataggcccagtcagctcttgaatggatcaactatgagcgctactcaaagcataggatcgagcaatggcagatccagctcaaacactggacttaagcagcatcagcagcagcagcaggggaggtgtggctttagttaaattttcattcaaaactttttcggttatttctttcctaataatttcgttcgtgattgtctgacaggccaactggttctgcatttccctccagaagatgaaggagaaggtagccaatggagttttgcatcaataatgccatcattttcccttctcattgttttactaacagattagatattcttctgcatataactgttactaggtgttgaccggaggagaaaggtgttgtaaaccgaaagcggggagaaaatcttggaccagattggtgattgaatgaagcaatagtggacgatcacaaaaatttcattgcaactcatacaattgtctgattgaaattgtgatgatttttttttttttttttaaatatgttatttatcttttgaggaaaggcttagtttcttgtgcgaatggtctaaatgatatgaatctgcaactctattcttatctgcgctgaaagcaatgttcatggctcaactgcttgtttgcgttagatatataacttttggtgaattattttaacattttcaattctcatcacatttcatcttctagttctgtttttttgtattattatggtttggaaaatgtctaggaaaaaatattctagtccaactcctaactcaagtaaaagaaaaaatgggtcacctattgtaattttaatttgtcgactacttattattgcatgtcaatctattagggaacaagacacttaactaacattgagaacttttcatattgatggagtatttaccagaggtactaattacttatccctcgatgaattgtctttccagggattgtggaagatgttctactagaaattttcttcttattgcttcgaatcatattccctaaaaagtaaatctcactctaatgctatgaataatacatgcattaacatacaaagattttttatttcacaacaacaaaatcactttctatatgttaaggggttccacatggaacagaaaatgttccacattaatggattcagatttataactacgggtttcaatgtacgagacctacaaagcaaataattagactaatggcgtattgtgctacatagttggttctcacttcatttaaaattgtggtgtaatgtgtatctcccatgtttttgtcatgaaattgatgaacaaaatcaaagaagaatttttgaccaagaataaaattttattgaaactatccccgtccaaacgagtattttacaaagaattgtcaaggagttccgttaatgacagaccgctttgatactttggaacaactcgataaattaatcaacgaccaggaaatggtagaagaatgtgagctattatggggcaaacaaagactctttgaaattgttaagttgcaaatatttagtttcattaaattatattaaagtactttgtaaaattgtcaagttgtaaatatttagttaccaaaatctgattatgaatttttaaaaggtagtaaaacttcgcaattaaagaagatgttcataaagggcctaacgaattcttaatgagaattagtgattcaactttaattgattcttttatcgcattagaatattgtacattcttaaatggacaaaaaaaaaacgctaaaaaattcatcgctggtcatacaaatcaataaataatgttagacaagccaacgacctaattgaaaaaatgttagaaaaaactcctcaaatcggtcaagaaaatgtaaatgtgtggattttcattaaaaaaatatatattccaataatattatggttaaactttgcgaggaaattacattatatacccactttatttaacttgttttaactttcacctttattttcatattttttttagatatacccacttttatagatgatgtcctcattagaccccttaagttatgtaaattatatgctagacttaagagggtatattagattatccactcaaaaaagtgggtatattttaataaaaaaataatataagggtatttttgattaatagatacaaaaaaagtatttttcaacttatcccgaactttgcgtaggatttcgtattgttgttagggataaacttgttatttttcggtatttttttaaaaaaactattatagaagtgaca

SEQ ID NO: 21635 - DNA, 2119 bp, Cannabis sativa
aaatatactaataaaaaataacacataaataataacttgacacttataacagtcagatttctaaaattataatttaattattattaacgtcaaaaattaaatttaattaaattaaactagttaagttataataaattactcatacatatatatttgatcaggttgccctagctagtggcgggaggtgtacgttattagctctatgattgtttgttactttgttagttacacatacaaattataattgtagcttctcataatggttatggtagactactactactactactacattagtagtgttttgcatgtgaattttcatttgcctataaaacgtgtatgtatcttataagcaatatatagcaagtaagtaagatcccaaaaaacgacacttgaaatataaatataaatattatatattttgaaacgacaaaaagtgatgatattgtccctacctttgttgtttgtattcgtatgactataacactcaattcgtggcctacaattaattctcaaccaataaaaaataaaaattatatcaaaaattaaaagtcacggatcactttgatgagcttcttaaagagctagctcatttttgtggttgggttactacttactactcatctcccttcctcttcaggacaaggatcatcatcttattaattattattacactttttcttttctttttttactcaattgcattacttcttctcttttttgtctactaatataattaacatttgttcttcatgcacatagacattatatacttttatttttatcggtaggaacattttcattttgagcatatagagaaattatatgtcactcaattttattttataatagtgtatattatagttataaatattttacttgagtaatttatggtgtgtaaaataaaatatatacttatttatttatttttatatataaatataattaaatattttgtattatattttaatactataaattatgtaaaaaaaatacaaaatgaatatataattaatataccatattatataaaaaattaaataatatgtatatatattttgttgatccaatcatgacaaagtatggcagttattattatcattgttatgtaataaataaattgcatgttgttatttcaaacatatatttgaaaagtaaatagaaaagaattatgccaatgttgttttttattatgtcaagacaatgtatatatatatatatgtttttgtagtattgtattaggtggcagccactcgtgacttcttgccaatatatgcacttctccattgcatgtgcatgtgtttttttcctataataagttagatatatatatcataaatatcaagagcaaaaatgttatatatactgtttataattatatattgtggacaatgtcccacatggaataaatggtaaagaattgagccatatataagaacatggctactccactcattgccaattggttttgagatggaaccccataattctcaacagggtttatggcacgaatagacatcaaattagttttatataagaagctaaaaccataaacataaacatataattatatatttgttgtattctgtgtccagaaatgtttttatatctatttttattgttaaaattattatggatttataagaatgccagctgagtttagagccagggtgtcaagagaaataggagtgttatttgaatttgttgtgtacaaattttatgaggacatgaaaatgaaaaacacatatatacatacaaaaaggttatctgtattggagtgttggcatccacattttgagaatttttcagttgtcttcttattcttttctatccatttttatctaaaacaaaaccccatttggaagggcacaatgcacaacctcaacaaaaattattattattattcattataatgccttatcatcttcctattctattctatctggattgaattttgttgagtaacaaagaaactataacaaagataaaataatatatataaagaaaatatatattcctagcttaatttgtcatttttctcaatcttttttttttattccatgcacttaatttctttacattaaaataattatatatgtattatttttgttcaaaatcc

SEQ ID NO: 21636 - DNA, 7426 bp, Cannabis sativa
  modified_base (4683)..(4686): a, c, t, g, unknown or other
  modified_base (4830)..(4831): a, c, t, g, unknown or other
  modified_base (6105)..(6107): a, c, t, g, unknown or other
  modified_base (6326)..(6327): a, c, t, g, unknown or other
  modified_base (6650)..(6653): a, c, t, g, unknown or other
  modified_base (7142)..(7146): a, c, t, g, unknown or other
acggtctttttatgttgtactcttgttaatttgttgttgattttctgttatgtatatgttattttttgttgttgtcttgatgttatttagatgttattttcatgttatttttatgtaattttttattatttttgcgttgtttttagaaaatcgtaaaaatgtgaaaaaaaaaatctgtaaatttgaaaattattaattttcttttaaaaaaaaaatagtatgttatgtaattattgcttataatattatgtcatgatgttgtatctaagttcacattttttttcgtaattgtgttgtacctctcaatctcgtaccgtagggcatcaacaaactcgacctgaaaatatggaccatggtttattaaacaacttcaaatattattaatttatttattttataagtaaatattattaatttattggttggtattaagtattattaatttattggttggtagaagattctgactctgagtctgagtccatgaataatacttttttccacggttttgaaagttgcattacggataagttggctgaagccaaagatacaagccggcttggtggtagaggggctcccctccctatattagtgacctgataattggacgacagctattagtgggactcatataacatgggtgatagacaaacggaaacgtggcattcagttattggttggattcatgatgtcagcagaatgcgcaatccaacgatgggcccatccactacttggtttccttaaaacgacgatcaaattaggtcgtatgagaaaattggatagtgaggtgtatgttgtcttctggagcacgagtcaacgttgaaatcgtcaaaatatgcacttaagcaagtagatcagtcttccaacctttacaaaataaaaatcaactttgggaacttttatggtgcacaaatagttttaatattttaacgataatgtacaatatatttatttaaattttaaaatactttatttttaattaaattgtcaaaaataaaggattaataacatctttatttattcgaaagagtctaacaaaatattgtcatttacactataatgtcaatatttcaagaggtaagaagtacatgttttatttttattatttccaaaaaaaaaaaaacgatttagttattaatataatgattaattattattttataattttttttaaaaaatttattaattaaattatattatattgtaccataactaattaacttttaaaataacaaaaaaaatatctataaaaagaataataacaaaaagacttataaaataattagtatataaaaatagtagtttgttatattacttaacaactcattagtttcgaaaataatttttaaagttacctaaatgtattttaaattacaatatagcataatataacttaaaaataactaattaattactaagacttatacaaataagtttcagaggtaacaaaaatgtatctcaaattatatgaataaataatatttatatatataaaaaagtaattaattagtttcttatcaacactattattaaccaaaaagttatttttaaaaacgcaaaaaaaattataataaaaaaatgaaaaacgttagatttggctgatgtggcacgtcactaataatagtaacgatataattgtaaattagatgtaaaaaatatatattattgtaaacttcctttaaataatctgcagcacatatatatcttttattttatatgggtatgaaacaaatagtttaaccatattttctatattgtaaattatttatttttctcaaaatcttacaagatgtcttaaataactataatatattgttatcagcgttttatgcaagacatgacacgtgacatttgatcaatttaatatgtaaatatctaagggttttattgtaaattaggattttaggcttcttatataaagcccttaactctaacctagaaaatctaagtcactaagcctaatccttaacctcaaaattacactaagtcagaagccctagcctctctttctctctctctctctactacacgcccccaaaggctctctctctcttcctctctcacacgcctctaaggctattcatctctctcattagagatctacctacttgattcatgttttgtatcataatagagagctatatcagatccctctaatagtgatctgaatagtattatctttaggtatcaatacaaccaaaaagagagtaggtcattacccgctatcacaggggactgaatctctataacaaatatgtgtgttttatactttttcattctgtttgtgtaacacgtggcaagcatcagatctatacgaccccgttgttagttgatcacttttgaggtcaacaggtatatttggagttgaacatgtgacggttcttgaagctccttaattaaatccaaagattcttgaagtagagcgcggtttcgagtagggtcgtaggtgtctctcctatgtataggcatagcatattcaactgggattattgctttgcatccatatgtcatggagtacggagtgtggcatgttaaagttcttttagtagtcttgtaggcccaaagaactcttagaaattctttcagccagtgtgctttgcaagactgtaatctttacagcaattattccctcaaaatatgggatttgattacaaattacgctaagtaaatgcggtgtttatttagattcacacagctgtgagtatctcgcttttattgggctgagatgaacgcatattaaagatatacagtaagccttatctcatgaggatgcctcgctaggaatggagtcgagttaactttgatggcaaacttgtgctcgtcatatgacttctcgagattaatattgctttaattttgataactacattttctggtatcgagatgatctttcccgcatgcataccatcttactgcgagatagacgcctcgttgtctgtcatcttgattcaccaaactgtttatacttagtttgtataccatgtcatatacgctaagtatcgttatcgtatctcctccacgcgacgaggttagtgcctcgtcatgcaaagttgcacttacatggtttctcgtcgatacacaagttaaaagttcatacatttctgtctcgcataagactgttgagccagccgaattataaatatactctacaaattgtgatttaatgagttactccatgccaagtgtacttacgattacgcgtttaagttcttcgatcttcccagctcgacacgtgtctttctctgatgtgctcaccgaattttgggtataataattgccccttaaaaagttcttttttatatataaaaagagctttttaatgattaaaaagggtatttttgtcatgttcctctttttgaaaagacgcatgtcctctgattttggcggttgtgcagtttcgaggtacatcagaattaaataaaccatcttttccacttccgctttgaatcatgtccgtaggatcaaatctttctctgatctaacgaagccactatcatgggtataaagtgagaaaaaaggaaccacctttgcattatttcttccattttaggaagtttgaaaaaactcttaagctgcttcgtcaaggatcaccgttgagtttgtccgaggacttgcatgccatctttgtccttgacctttttcttgcgagtttctttcgacttcatcctctcaaagcgatccttgcttcgttcgaagatttgtagacgaagtaaccagtcattgccccaagccctaacttcaaacagtaagttgctttcttctttctcatgtttgtttcattgtgtggattagttacttagtttgcttgtatcgttgtcatctcatctggttttggtagtttttagggttaaactgtatttaggtccatcctagggttcaggcaatatgtaggttgttttaagatctccaactcattacctttgggtttgataaaattctccttcagggattgggactgcgttttgcgtgcagtaatgtcccactctagttcaggaatttatcgtccaaaagttttagaatttgagttccctacagaatcagcaatcccgtacaaacccaacccttcaaaacccacctccaaattagagttgaacaatgctagggttagggaacacgtagtgggaacccaacaggaagatactgctagtcgttataggcgtttcttgtaagaaatctccgaaggcaagcgccaattcttgcgagaagcagctggccggaaccctccagcgtgtcctttattcttgttaaaaagtatttgtttttacccaacgtcacgattgcttttgaatcaggtgacttggattttgaaattatgcctcccaagccacatacatcaaagattccccaggaccctaatgtcacctttgaggtcgagtttatagaatcaaaggtgcggtctatctcaagctacacgggcgagatgctgaagacctgcgggattgaacttgggcaatcatgccaagttagatcagtacgggagggtgagttcttttgttaccccctgtgcgttttgcaagcagtaactcaaggaccactggtgagactaatactagtggttcgactggtatgggtgcctggagccttgaacatatcagtgcagggtccacgcttcctcttcgagactacttcaaggactacaaaaatcacattagagtttccccattccagttgactcccatctcnnnnaggattctcgctagtttgaaagtcttatacaaaattctgaactgggggtgttccacaccagtagagattgagtatcattactcaattaaggtcgttccgtcaaggaagaacgtcgtagggggctttttctatctcggtactcannctagcgagcctaaaattattgtagacttgacaaataaagtatccttcaagaacaacttcttctggacgtttggtctttcccccatcggcacaaccacatttcgcaaacttcgtaagttattgttctcttattgctcatttacatcaatctttgtttttcaagtttatgaccaatgttttgtttgttttgatagccctcttgacgaggcctactcctacccccgagatggttagtaagcataggcgcctgataactcttccctacggtctccggtcatgcaatttccttttgagcaaggccaacctgcgatcggcaggccttctcgctgataaggaatatacttgtgattacaagttcccaagtattcttcttggcagcagattactgttccaaccgaggactgggcttgggatcgcttagctcaagcacaataccttcaaaacactgcccctcgggaatccagtgaaggagcatcccgaggtaatcaatgtggttggtctcctactgtacttaggactgaacgtaatacattagtcaccttccaagactcctgccttaattttatattcgaaattcccttcttgtggaccgcattgcttataagtttgacagctggtatcctagattccacgtccaagttaactatcacgagtcatattatggtatagatcaatacggtactatggaagataggacaggtcacatagatgcaagctgagatttagaaccaattgagccttttgatatattcaacagtacaagctgtagggattttagtggatattatggtccagctctatcccttcatctagtgatagctttccttctagtgattttggtaaatcccttaggtggaaaattatatttctccctttttcatcggcctttttaatcattgtaacgctttgtcttattttgtagacatgggttatgaagatatgatggaccggaaagggaagaaaagggcaaccaaccctggggtccctacagctgctgaagtggctcctcccaagaggcaaacgaaaaccaccgcccataagaagaaatcattggtcgagcccatcgatctcgaggtctctgacaacgagatccaagaacaagttcctcctctagtcattttttacgccaatgctcctcgtccctaggcaacccccactactgcttcttcgagcaaggccattgagactttgtcggccgcagcagaggaggccgggtttggatttgcccaagcatatggagttgcctgctagcgcaaacttcaaactcttcttccnnntgattgggattttctcaatcttagtagtccaaaagagatgctttcaatgagcttggattataacttcatggtacgttggctttgttattataattatattattctttttttacctgtttcatattcatctgtttgcaattctttaggcttcttttgcttcttttgtttccaatcgactactctctgagcggctcgaatacttagagggcgaggtccacnnattactatcccaatgcaaggttgtgagtaagcatcgggacgatgcccaacaggaaaatatccgccataataaagaagtggacaaatcgaaggaggaagccaagaaggcaaaagaggaagtcgagaaggcaaaagaggaagccgagaaggcaaaagaggaggccaagaagaccgtcaaagcccaagccgatgagtttgagaagaagctcgttgaaaaagaagtcaaggccgttgaatgatgcgacaaggttggttttcgcaccgtgtatcgggcttggatggcgaaccccagtatagacaccagcttcttggaggagcaggaannnnaaactttagctctttgcgagaagactaggatggaggaagaaaatggtgagggcgaggaagaagaagaagaagatctgtccaagtccccccagcatgtagacttggttatttatttatgtcccttttctcttttagaaaatggccccttggccaagacaatggtttgcccctggtggcacttttttttttggcaaagacagacttgcaaggttggatggccaactttgctttttaatgcctcatacttttaactttaaactttattgtgcagatctttgcttgcgtttcattcaaaatttaaacaatcacatgcataaagttaattaggggtttccattgctcgtattttcctctggtgctaagtagttaatttcctactttacgcgcgaacaatttatcttcccgaccctcaacctgcgagccatcattgattccaccttgggatcatcagaaatgatcttattttaagcaaactcaaatatatttttnnnnnacttgtcatcttgtatatattttcattgcttacatgagtaattagatcttctacccacgtgttcggtttaagtatttttttttgaagacactttgatgtctcgtttaatacttagcgcgagctgttagtattcagctttatgcgctaatcgtaacttttgattttcctctctagtcagataggttttaaacaaaaaattacagttgtttgatccctttctcgtcagaaaggtttgatcaaggtgttataacgatttaacccctcttccgtcaaaaaggtt

SEQ ID NO: 21637 - DNA, 1770 bp, Cannabis sativa
taaataatagcagtaaataatagcagtaataatagcataaagaatagaaatattagctgaggtggcagttttatgcatgtgctatcaaaataattagttaatggttttgatagtgttgtctataaatattagtgaggattgtaattggacggaaggaaaaagagtcacgttgtaacaaagtcttgaactcagggagaccccaggcttctcgaattgcctggcaccattgttgcttgttgaaattcaataaaacttcaattgtttctactccattcttttacctgtcctagtgtgtatcacatacccctttttatttgctatactccactctttaatcctagggtctaacgtaggctaggctctttgaaaactataagaattcttgtattgcgacagtcgacctcctacacttttatttagttttgcactgtccctaaatgtgttgaaactaccgttttgcttccaatatatatagatagattatatgtatatatttcaatagaaagttagctatttaattttacattgtttgcttactgaattatgttttgatattagtttttcataaattagataatttgacagttaattataatggtcattttggttctcatcctacttatcagttgagctactctggtaataaataatttatcaggaggcaatatgatagtttctataagttagggaaagaagcaaaaagagaagcatttgaaagcagtaacatatattgtcccttttagttattgttgcatcttcaagagctaaattcctggtatttatgcagataggactgaagatgagctctattgctccatctgatttttattatgatatggaatactgcgttgactattcaacttttcgctccattgagatcggtaagttatttcatgcacatgatgtatatatatgtatgtatataacttaagtttgaggaacattctattgtttcaatgatatctttttattattattattatgaaataaaacctggaatatatacggaaaagatatgacgacatgatgtcattaaatctccttcataccagcaaaataatcccttagaataataaacatacacgttcaaaataggagagtgagagatatcagggtatatcaaaactgttttcagagcagagtaaaacatatgaataaaataatatctattccctttaaatcaagaatcatatgaaaactcccccttaagtttgggatagatgttaattattccaaatgttgaatatacaattaattgtaatatcctaactagaaattaaataagcaagaaatttgtcagctttatcatacggtgatcctatgatttcttagctgtcaatactccccctcaagcttgactatagatattgatgggtccaagcttggttttaaggagatcaaatactttttcaatttttataaaccctccatcgattttttccttaataaagtgatagtctacttccacgttctttgttctgtcatgatgaactgttgtgagcaatactaatagtagattggtggtcacaataaagttcgactagagcttcatacttagttttcaattcttccaatagtcttttaatccatattgctttgcacactccaggggccatggctctgtattcagcttctacactgcttctcgcaacaacagtttgtttctaatttcgctaaattaccaagttgccccattgtaaagtacaatatcctaatttagatattttgtctgatttggcctagtctgcatcaatgaatacttcaactttc

SEQ ID NO: 21638 - DNA, 3788 bp, Cannabis sativa
cttgtgtctctattgctagcatagtcagcatcaacaaatccctctaatttcatctttgaaccaattttgttgaattttaaaccatatcttgcagtgccttttaggtatcttaatagccattttaatcctttccagtgctcttccccaggattagacataaatctacttaaaacacttacagcataggctatatctggcctagtgcttatcatagtgtacatagcactgccaatagcttcagcatagggaacttcttgcatttccttctgttctttatcagttttaggggactgatctgtggttaatatgaaatgaccagctagaggcacattaacctctttagaatctgacattttaaacttctgtattactttctcaatatagggactttgagatagtgtcaatctcttgttcttcttgtctcttatgatgtcaatgccaagtattctccctgctggtcccaaatctttcatatcaaactctccatgaagtacttcctttagttttgcaatttgactcgaatctttgcccattatgagcatatcatcaacatagatgagtaagaaggttgcttcttctatttcagatcctttgaagtagagacatgtgtcatactttgatcttgtgtatccaacttttgtaacaacggaattgaatctcttataccattgtctaggagattgctttaatccatagagtgattttttcagtaagcaaatcagttcacccttctcagattccacctcgaatccttgaggctgagtcatgtatattgtttcttcaagctgtccatttaaaatgtgtctttacatccatttgctcgatttccaagtcattctgaactgcaagagcaagcatcattatgatggtcttcatctttactacaggtgagaaaatttctgaataatctactccttcaacttgtgtgaaccctttggctacaagtctagccttgtataatattatttcttctttccctggaatgccaggtttctgtctgtaaacccatttgcaaaatattaccttctgcctttcaggtcttatgattattatccaagttttgtttctccttagggacaccatctcttcagacattgctttgttccatttcttagcatctttccctgatacagcttctttataggtctttggaataggttctcttgattcagtaacaacagccaatgcatatgcaaaaatgtcagcttctgcaaatctaactggaggttttatttctcttctggttccgtcccttgcaagttggtagtcttccaagttttcatcttgagattcactttctgcttcagaattcatctcagtttctgtttgagtttgcacaggttccaccttgatttgcacactggtttttgatttagtttcatttcctgcaacatcagaacaaccacctttctcatttcttttagaaggaaaatcgagttcattgaaaataacatccctacttataataactttgttatcttcagtttacaatagtctatacccttttatgccatttggatatcctaggaaaacacatttgacagatctctttcctaatttatcttcaactttatgtgcatatgctgcacaactgaaaatccttaattgagttagagaagggggtttatctttccatagttcttcaggagtcttggcatcaagttttctgcttggacttctgttaatgagataacaagcaatgtgtaatgcttctccccagtatttcttgcccataccagcctctagtaacagacatctgaccttgtttagcaaggtcctattcatcctttcagcaatgccgttttgttgaggagtctttaccacagttctgtgcctttctattccatacttcaaacaaagctcataaaattcatcattaataaattcaagaccgttatcagttcttagtactttaatctttgaattcatttgagtttctacaagtgttttccaatttttaaaggcttccaagcaatcatttttgtgtttcaagagaaaaatccaaacctttctgctataatcatcaacaatggacatgaagtattgattacctcctgttgttttgaccctacttgctccccaaaggtctgagtgtatgtattcaagcacacttttggctctgtagttgctattcgaaaacttgattctgtattgctttccctgcacacaaatttcacaaaatggtaagtttgcatgagtgtagttatttatcaacccttgctttgataattccaccagtccttgttcacaaatgtgtcccattcgagcatgccaaagttgcgtttctgacacatgtttgtttacagttgcagcataggcaggcatgattgtttggccatttagaaagtacaatccatgccttttggtgccctttaataacaacatagatcttcttgtaattctcatgactccattgctttttttatattcacatccctcatcatcaagagttccaagggatattagatttctcttcaaatctggtatttgtctgactttggtaagagtcttcacagtgccatcaaaacttctaatagcaatggatccaattccagttacttggcacttatgatcatttcccatgactacacttcctccattaatttcctcatagtcaataaaccaatctttgttaggactcatatggtatgtacacccactgtccaagatccattcatcatagttcttttgttgcagattgttgcaggcatctccaactttctgactagtacaacaatcatttattacagcaaagaggtcactatctgagctatatgcatcatccactactgcattttgagtcatttgacttctcttcttcatccctgtgtttctttttcttgttcttgatttcccagcagtttttgatcagatgaccaactttgccacagtgatgacattttctggtctccttaggccttgattttgatcttgagtggcctctgaactttgagttatgtcttcttagatttcttcctctggtaaatagactctcatcctgtcttgattcttgtctagcagccttttgccaattcagtttagcatctttggacttgagagtgctcatgacatcttccaaggttagagtgtcacgactatacattatcacactcctcatctctttaaattgatcaggaaggccatttaacaaaatcacagcttgatcctcctccttaattgtttcacccatattagtaagagacaaaacaattttattcaattcatcaagattttgttctaaagaattaacaggattcattttaaaaccatagaacttcccttttaagaagattttagttgcagtcgacttggccatgtagagatgatttagcttagtccagattccaagagctgtcttctccccaatgacttgccttaaaacattatcaactaagttcatgataagtgctgatcttgcttgcttcatcacaatttcagaatcttctttcttggatccatctgctcccttttctggtttctctgatttatcatttttctcagttcgatcttcaagagctgaatctagtttctggtagattaatatggccatcatcttctccttccacaaactgaaatctccagtcccatcgaatctctccaggtcaaatcttgttgatgatgaagccattgcaaccagctccttgagttcttgaattcttgatgttcttcagatgtcaaatctttgagatcttcttctccttcctacaaaaccaaagctctgataccactgttgtaaatcaacaacacttcaattcgacataaatatcacaggttaggatcagcaaaca

SEQ ID NO: 21639 - DNA, 1607 bp, Cannabis sativa
gatctttagtatcaaaagagtttacatggttggtagtgtcttttactcgttatttcttatttagataataggtatgttttttccctaattcttttagaagaatatgtgtgaattgtcattggtgagtttgatctatcattagctcatttgaaaagtgactctagttggctttgcacttgttggattcttaattgcttgtactttctttatcttttagttgaggttgcatttagggttgtctttatcttttcattgttaacaactctagttacctatatttgttaattttgtatccttaatctatgtttgatttaactattaatgaaatttttcattatctttcgaaaaaagaaaagaaaaagaaacatttatatttggttataaataacacatttttacataggaggtgatgatcatgacttgtcataatagtgtacaataataatagtgaaggtataaagtgattaatagacctaacattatccaaacaagcatagtcacatgttttggatcgaatcacttgtttcccatgtatatagccacatcctacattagatatacttccaattattgttcatctctaatttattcaaatatatctattaaaaatgctttattttttttaataattgaaaattattttttttaggaaattacattgacatcaaaaagaagctataacaaagttcaaaacaaaaattataacacatgtggtagacaattatatattaactatattaatatttgagagacgttcaaaaacacctcctttttatatattaactaaatttatttttaaataaaatttaattcaaatatacttttttttatgagtattgtattgtactcaaattattttcacatgctctcatataactaagacataatttcaaacataatagattgtgttctttggagagggatgtgtaaaattgtgagaaagtaagggtaaaattttgattagagaagaataaagactatcggaaagtgatacgggtaaaattagttttatgattaaaaaagaggtcaatataatagattttgaaagagagtaaaaattaaaggcaataattcaatagaggtatgtaatataattttctcaagataaaacttaacaaagtcgtatatttcaggattgtgaataattcaagagaatggacaaaaacatttagatggcataatttaatagtggtaatagtttagggggtaaaatttttaaataattttaacttaatattttaatatgtaaaacaaataaaaattctttttgatgaatttaatcattccaaacacaaaatttaccaattaccttaaaaaacataaagaaaaaaaattgcaaaaacagtttttagctgaattggaattggtagagctttcaactttttaggtaagtaataaaaaaaatcataatttttcacaataaaaaatcataatcataatggaaaatcaaaatttgtagaatgaaaaagaaaacaaagagaaaaaggagaacaaaacaaaaaatctttaagaaaaaatatttccttttatatttattattatttttagaatctcatgatacctatacagatactttgaacttccttttttaaaaaataaaataaaat

SEQ ID NO: 21640 - DNA, 2128 bp, Cannabis sativa
acacttaatatatatattattcacataataatatatattagaggctttttcatttttacacttcaaaacagttttttttttcgcatttttacggaattctacataaaaatacctatttcaattagcgctagaacttaaattacaacaaaaaatcgtatagaaacccttatttatagacaaccgtaaatttagaaaaaaaaaagttaaaaaacaatatttaaagtaatttccctatatattaccacattttaatctacatattatattaataaattaaataatttaacacaatttccatacgagttaagatatatataattgtaataataaatatatatgttagatatattgtatatggattgctagtatataattaatattgtataatgtgtagaggggagggaccaaactaccatataggtcctttaaagcactgaatataataacagatacggaccacaatctgatagcagtgagatttgcatccaagaaaaacttggcggagactacaaattaactaacatacttcacatcaaaaaaagaaactaacatacatttatattatatatataattacacactcatatatatttgatacaattagtgtaattatgtgtctattattaagcatatatatatatatagcttaataatatcactttcaagtcccctttctattgattaaatagtgatctatttatagcgcgtaaaacaaggaaacaaagaatacccaaaaagtactaattattacattatgatttgaatacaaatgatggagagatgtggtgcagctttcaccctgctaattcccaacaatggtaagaatactcaaaatgtttccattatggaaaggaagagaaacccaaacatataagatcactgcatataataactaaaactagagtgccatagcagtgtatctttacactctccaatccatgacagtactaaacaaaaagatgaaaagaaagccctatatgttcacatgtacatatttactcgttttgggaaaaggataaagattactatcactacgtactgattttcatctctttatatattggttatgttgagattaataactacaaattaatgcagttagtcatttggacaaatttcccaacttgctttctcattaaaatcatgacctgaaagaaaattaatcaatttaattatattatatgtatatgcatgggaaaactctgccactgtgcttaattaattaagcggccatttgatctgtctgtttgacagattatatattaatattatatatatatgttttgcttcggaggttatagatcgattgtcagtatagaaataatatgaatttatatataggaatctgatattgtagcaaaataatggagaaaaaggtcaattaatagactgttgttgcagttgaaacggtcaaaagctgatgagctctatacacttattgaatccttaattttcttttgaaacaacaaatgataattgcgtccattacaccaaccaattttaattgcacataaacctaattttaatcactttccgcaattattttttctacgtatataatgtaattaaattttatgaaaaataatattacattataactaattagagacgaagttatattatattggtggcaaaaaaataccctgtttttgaaacaaatttaattaaagtatgtgagtgatattaatccagtactttcgtcatttaatttgtatgtattattcatggttacattgcatgtgtaggaatgtggtttagggttttctacctatgaacttactaacacataaaactacaacaattaatttaaagacgtaatgtatacacagaaagagaaagtgatcgatcacaacgacctcaaaatacaagaagaagaagtcacacgtgaagctaacgacaaattttcatgctggcatgcctgacctgtaaaaactacaaagctacatacgaagccctaattaaatgagggtgaaaacagacctttctgaattcccttgagctctacaagaaaagagagtatgagaaaaataaattatttatattcaattattgaaaagatcatatatatgtatatattttgacttaaagcgtatatatattcaaaagtctttttattaaaaagaaataa

SEQ ID NO: 21641 - DNA, 2494 bp, Cannabis sativa
tgaaacatacttgttagtaaatcctgatcctggtaaaataatttccaacaatctgaacctctagtcagggagattgttcaaggtatctctgctacttcttttggtcttaagaagaagaagaagattaggaaggggagtatacctattgaagttgttccccttgcccaagacagtgggaaggagaaatctaaagctattagtgctgatgaggatctcccattgatattcctccagatgagactgagaatggtgttctgaacacaagttcagacctagtggagaaattgcgtgtgcagtgctcttgtattcttgccaatggtgatgccttgattggatccaacgctaagaacattctgctgtagaagttggttagctctaaacttccgtatgtcatcacccaaagatgcttcaccaatatctttgaggtaagtttttttcttgtctcctcttgaataaactttcttttgcttatccccacctgactttgtcttcttgctttcagacttgtgtcggttactcttacaccatgggtaatgaacacaagaaggtggttgaacttgctgaaaagctcaagatcaggttgttggcttgagagaaagcattgactctctagagaaatgtatggctagtctctgagaagtgggtgatggtgacaaggcttgagagatcaatttgaaaaagagcctgactgctgcttggaagaaaactttagatattgaagattcttctcatctagcacttgacgcgcaagccttagctgcttctcagcttgaagataaagtcaaagttttgagggagcaagtgactacactagaggagcaggttgttgttgatgtcaccttttatgatggcttacgctttgatgccatctaccatgcttggtcttccaatggaggagcacagccgtttaatatgtcgaccttccataccacaatagtctccttaattatttataaggcgatgtgagcaacattttaatgaagatgacccagtagtcgaagaagctgcaagggtcaaaggctacgaccctgagcatccctacattcctcctcttgcatttgatgcgccatttgtagggaatgaggaacaagatgaagcttttgttgacataggaagcttctaggacgttgtcttagtccattcttcttttatatttttagcttttagcattagtgtgttcattcgtcggtctgagcagtctttcgatgtggacaatcctcggtaaaatgttctaagaattatttgagttaaattagaaattattccgacgtaataaaagctttattctgatattttcttttttattttattttatttgttaccgcttgaccgtttaacacttgcatagtacaccatgtattaagaaactcgatcaccgggagtaacctcactgtttcttgaagttatctttacatgagagtagttacatagatgtgcaaaaaaatttgaatgcttctgcgacatatggttctcgtataccataacttaacctatgtgctcgccaagtgatcaaagaagtgcctttatgggtcactagccataccaaatccccctaggcgtcttgatcatgaatcttaggtcggtgttacactttttagaattctccacttatttgaagatttgtggagtgaaagtgttgaactcactaaagaaacaactgaaatcatctcaagaccaactcacaagctttgctgagggcttgaaagtgtcgtcaggtttgtgagctgtagttgactaattttaatgaagtaccaaaacaactttgttcaacgttctagcatattcatcaaattaaatataattacattattgttagctacgttggaagaagaagtagtagttgcaaatttcgtttttactcctgtaaaagacaaaaaaaaaaattgtaggagtgttcttaattttttgtaagacaaaaaaagagtgttaacaaaatatgagaaatatgataaaagtaaaagaatcatatttaagtaaagttttttaaaaaataattaagatcttctttataaaatttgattaattaaaaaaatagtttgaaatagttagagtgagaatattaaacggaaaagagagaaaaagaaataggataaatgtttgtattttatttttgaaagaaaataataaaataaaatttatgagagagtgtaaaaatgttaagaaaatagaatataaaaatgtgtacttattatagatatttttatgtatgtatacaaagataaaaaaaaaaattatttgaggaaaaaaaaaagagagagacaattaaaaaaatgaaaaagataaataaggagagaacagaaagaaagaaattcacttaaaagaaaaagaaaaaaaaaaaaagaaatcaaacagactaaaacaaattagggaaaaaaatagaaaaatacaaaaaaggaaaaaaaattagaacaatactatgggccgcccattaaacatttatacagtccacatacaaatatttacaaaaatacaacatgcactaagccttcagctg

SEQ ID NO: 21642 - DNA, 6772 bp, Cannabis sativa
ttttttttttttttttgtctttgcagtcaaaattggctggctaggagaggcttggggctgacgggttgctcgcatgataggagtcgcttagtggtgagagctgacggaggtggggaactgtgcatgagtgatagctggaggtttcaagacaaggacccactcgaaaggtggctagcaagtgagtctggcgcgtcagttgcatttgtatggggtgtggctcacacacgcatgggagtcgcacgatcatatgatagaagacccaaatggaaaggagactttgaccgagagtggggctcccataagggctaatctaattttctttttataattatgcttttgacccatttcctcaagttttcttcattttattccacaaacacacctaaaaatagataaaattaattaaaaaactaaaatagatttataaataaataatacataacatattacaataaaataattaaaaaaacacataaaaccttataaacttaaaataaatctaataaatacaaaaataattaaaaacttaataactaaacaaactttaacttataaaatgtggtaaaataattctaacttttagacttatcatagagctcataattttggggtttcgggacggagacgatgagacttagagagagagagatcgtgagagaagacgacaatgggggcttgtgactggggttctgcgtctgggtttgacagtgggggttctaggtcgggttcaataccgtagagtgagagagtgagaaagttagagagaagcttttttgaaatgtaaaggtatttttttcgaggaaaagttattaaaagtataaataccgtatttcaaagaatcaatatcttcagttaaaaaaggtgacctatagtgtattaaactaatctaattgtgacagatcaattaatttaagcatttgaaggaaaaaaaatgtgtagatcgttaatggagtctaaaaagataggtttttaataatataatgggtgaattgcggaaaaaccccaaaaaatttcatttttctttcacttaacccccaaaacccaaatttatgcggcatgacctccaaaatcgttgtactgttagcaaaaacatacctccttcccctaaccttgttatttgcctacgtggctcactctatccaatgccaggtagactcatgcttcccatgtcattaattatttaatgatgtggaaattaaaaaaaaaaaaaaaggtattgagttttttgttgtaactaatggctaattaaaatggaaaataaaagaaaaaaaacacacattaaaattaagagaaacattaaaacctccaaacctagatctatagttattcagtcacgaagatctgggcttgcaaaggaggaaaaattctctgacatattttcatccaccaatcgaagtcgaagagaagagaatgaaaggttaaattattatgtacctatatttgtccttcattgtcgaagctgaagatcacaaacctgttaaaaaatgtttgcagagcctcactattgcgaatgttgtcccccttgagttgcacagatgataacatcttggacaaatatgaatcctggatgaaggttcattagatgcccattccatgatctgagttttttttgccctaatttttatttccttttctcttatttttttttccttctgttcatattattcctagttgtggcatgaagtagaagggtgtggcttttggatatggtacaacccacccatttgtcaatgatcgaaggatgtgattcctggctattaaggaggattcaaaatttaaagagataagttttcatgctatctgaaggtgttgagaactttgttaccaacaaagtgtaatttgaagttgttgataagtcaatgacctacaaagacaaatgtaaagttggtagccttcctagcttttttccttttcttttcttatccttctctgagtgtttccttgtttggattttggattggtggcttgcctcctttattctttgggccctaaacaaaaacaatgattgttagtttattgacataagtatccaaaggacatatgtataacaaattgtagctaaaaatgtgttacctgagttggagcaggtgctgcatcattcttgaaagtcctcttactgtgtctaggttgcttgcatttgctacaatgcataattgcaccagttctccttgtctttgggaaatttggagggggtggctcatcatcatcccttctacactttttctttggtctgcctagcaaaatgttttcacctggaggaaagattggattttaacctattttaggccacttgtcaaggcttggcacaggggtaaactgtatgttcataaaatttcttgaaagcctctattttttaccaagggtgcacataagtatgagattcatggttgcaaaaccagattgcagctaagacatgtctacatgggatgcctgtcaactcgaatctcctagatatgcatgttttcccctctaaatcgatagtgaaaccacctcctggattcacctgaatttggaacatagttgcattttcccctgatacgacacatcatttagcaacctctgttagcttcgtagcgattttaacaatgttgttgtgtatagggcctttctattttgatatactcccctttttttgtaaaaacgacacataagccaatacttgaaaagtaacaacccaaagttaaaataagtattttttttcatcaatgagcactgtagttgaagttaacataataagtaattacctcatggactccaatagagtaatcattggtttgtcccttgcatcaagaattgcattgttgaaactttcacaaatactgttcagcagcatatcacattccacccccctatgaaatgtgattttgtccattctaatggttgctttgctatcatctagttgtatgccttcacattgaccttctttatctcttccattctcctatcaaaatctgcttcaatggtggatctggctacattccataatagttgcttcggcagtagtccagggaactcattcttgaaatttccatgtatatgtctcacataaaacctgctatcaaggttgttgaaaatgttttccactgcattttgaagccccttctgcctgtcactcataaaaatgaatgagtttggctcaatgtgactcaagtcatctcttaataactctaaaaaccaactccagttgctggttgtctctttctcagtgatatcataggctattggaaatatagaattcactgcatcaattgcaatagcagccagcagtactcttttgcaaaaccccttcaaaaggcacccatcaagccctataaatggcctacaaccatttttaaacctttccttgcaagcatgtagacagaatagcacctttggaatattcttttgtcaccttccatctcacacttaattttggcagtgctacctagattggtctccaaaggttgtttgaagtaatcctccaaaattgcatactactcaatgattgagccttctaattctgcctttgctatgttctttgccctataaaactttgtggtagttacctttgaatattttgtgtctttgactatctccatgaaggatttgtactcaattgatggatgtaatctaaatgtgtctttgaattgttctgctagccattgtgtagtaatatgtctattatccaaaacaatgccacaactctcatgcttaggttcacatttgcttaccctgaatgctttcccatcttgcttcacttatgcatagagcatccatttacatccttcagtgctacatttcaccctaaacttcttagagtcattagccagtagaatgtactccttattttaatgaatgaaatatgctttaattgtcttcctcagaacttctatgctagcaaaatccatgtatggtttccactccaagtcatccagctttgtctctggattgtatggaaatttatatgctcctccaccttcattgtcttcatcattatgaacactgcccatttcatcttctttagcaatgtcaccttcatcttcacagatgttatcaggaaccaattcagtgttccttccccatcaggaacaattgtcgaggtgtgtgtatccatgcctctctacttctagctcaccacagtattcctcctcgtgtaaaacaaaatcagcttttggttggatttctcgttcagggggaggttctaattagctttgagtttctagttcagggtggagttctagttgggtttgagggtcaagttggaatgactgtgagggaaactcaaacttaggttgggttataatatatggttcagattagggctgtgatataggttctgctttaggtttgggctatgatataggttctggttcagtgttgggggattcgtaattcagggtggggtttttggttgagtgtggggttccttaaacttcctcctctgcctatgtcttttggctcttggagatttttcaagttcaggatgggttttagattggctatgagtttttggttcatggtggggttatggttctgtttgggtttgagtttgtggttgtggttgtggttcagattggtgttgtgattcaggttgggtttggggtgttgagagaatggtttctagttcagtgtggggtcatgttggagttgtgattcaggttgggtttgaggtgtttggagaatggtttctggttggggttctggttcaatgtggggttctggttcaatgtggagtctggtttagcgtggggttgtgattgggcactaaatcacagcatcctcctctaccttagtcttttggctcttcgagattcttcagcctctcaataaccaatgatctctacttttggggaacctgttgaaccatgatgattctgtaaaacaagaaatcaaagtcaaaatctaacaaaaaacataactttaaatagcaggaaatatcactgaatcaaatctcgagaataacacaactttaaacaacaaacaaatttaaaattagaaacatgaaccatattactttcttgggctgctggtgctacatctggcagaggggggccttgtggggggattcgctgcaatgtgttatacccaaaattcgacgagcacatcagaagaagatacatattaagctgaaaagaatgaagaactcaaacacgcaattgtaagtacacttgatgtggaataactcattaaaagcataattaacagagtatgtttataactcgactaactggacagtcttatgcgagataaaaatgtactaactgttgacttgtgtctcgacgagaaaccatggaaatgcaagtgtgcatggtgaggcattaacctcgttgcgtggaggaggtataataacaatataaatacttagcgtatatgacacggtatacaaactaagtataaaaagaggggtggatcaaggtgacagatagcgaggcgtctatctcgccgtaagatggcatgcacgcaagaaagatcatctcaacaccagaaactgtagttgtgataattaaagtaaaagcaatattaacctcaggaagatatatgacgagcttcagcttgccatcaaagttaactcaactccattcccagcgaggcacccccatgagataaggcttaacgtatatctttaatatgcgttcattttggcctaataaaagtaggatattcacagccgtgttaattctaaataaaaaccgcatttacctagcgtgatttgtaatcaaatcccttgattctaggggataatcattgtaaaaagattgcagtcaactttataatgaacttcccactatgtaattataaatagtggtaagcaagataaaaagagggacgaaaaaactcatacaagagaggccctaaaaaataatcagaaatctgaataagattgactcgtggactatacagaattttaactgcaaaaccacgtaaaaaatcttgtgtgttcgtactttttattttatctgtgcaagattatcacggttaggctcaaatttagttaacaaaaatctacgttaacagtttggtgctttcattgagagcctctgtgaaaaatctcagatagagcctcttgacataaaagtaatggatgatgccgaagaaaataatcctcatgaaggaatcagtcattgccctggaaaagagccattgagtcctcaggtatctattgagtcatcacatgaacatactgcaagccctgggaaaacccagtgttggggtccctggcttgacggaacttggataaacaacaaccaatcacttcctaaccaggttgataaggatggcacctacgacccaacaaggtacctaccaatcatggtgttagaaaatcgccatcttaggtgtcgactagaggaagcaaactggcgtaatgctaaattaaagtgtgaaatagccgcagtaagggcagcgcaggagaatagttcttgaaatcaacctgaccttggaagatgagattcacgaggaaaacctcacaactcgcaaactaagggacatgagacatcccagagatattcgcagaactgttaagagaggcaacctgagaaaaatttggggacgcagcccgagatatgtagaacatcagacggaaatcgacaaccttctctccaagttcataagagaggaaatccctatagggagaacgaggtgaatcaaatcttaagatgaagagcagatcaaaaagaggcgatgggtaccgcgaggtgtacgttatctcgtaatcgatccacgcgaggaggagagaacactcattgcagcgataataaaaaaggtataatgcagcatataggaagagtgaggc

SEQ ID NO: 21643 - DNA, 2784 bp, Cannabis sativa
aaaaatgtgtagtagtaaaattttacctcaacaacaaaatgagcgtacgagtcacctgagtgattttccatcacacctttcaagatagtcaaatctaatcgcttgataagttgagtgatctccagaaaaaggccgtggtcatcacatggaacctgcaattgaaataagttaataaattttaatggaagctgtttcgttgaaaaaccaaaatgaagaaaattctagctgtcaaaacctcaataagcatttgcccttgcttttccagatctttcacgactatgggacaagctcggagctcgtttcctaattcaaaaccccagcttgtgccattttgggtgctctcagttttattgtataatttactgttattgtctctggtcacctgtaaaataagtattcgatttagctgagaaaaataatcgaaataataggattcaactaccttatcaattgattaatttatatcccaacaaagcaacaagcactgtcatcgaattttataatatttaagattttaacaatactagtttttatgtacgcgcaaagaatggcacccataagaaaattacttctaattctacatgtaaaacttattattttattttaacctccgtaaatgtaatcttcttttaataatatctcatcagtattattttctattttgctttcagtctaattttacttttgcatttgtcccaattacaaataattctgtctgttcgatcattgtaatttgtatccaaaagagatttgaacctaaggccgcaaacgacatgtctagatattcatttagagcatcttttaaggcctgactttttttttattataacagaagacattaactcgacaaatctaaaacccaggtcgagtcgatagagaactattattagatcttgttagaagcttctgatgttacatgtttagggactcaaaacgttttggttgatactagacctgacttctttataaaattttatacaactctgaagtttttattgttgctatacctcttgttgtggaaagctctttaatttctctgcttggtcggccacatttcttagatgcagcatatgctttacggtacgatctaaaaggccatcaatgctacactgaactcgccataaaataccaaatatagttgtgtcagtgaagagaaaggaatggaactacattttaaagcatagcaactagcaagaacattgctattggacaccaatgttgcccaacaccttccataagtgtcaccctacgattagttaatgatattcttaaaaattattttgttaagttatatgagatccgctacttaattaaaccaatagcggtatgacagcaaggaaggtgctaggcaccagtaataccttttagcaattctcgcatagcaactactgaagcaaaaaagaaaccccaccttagcaccatttgggacgagttcccgcagttccttgactcgatcctggatcagctgtctgtcccttggcctttgcttttggatgttgccacttctaccacgggtactttttaaattagacagctttcttcccttaccagattgaacacgaacttgatctttctgaccttcatcggtcaatgagctggtcatgccatcgagagaagttgaactatcgaccttggcaagaaacacaggtgtggtaagattctgttgcacagaaagattgctcatccgagaatctacttttgatcttacttgtggctgaagaaaaggagaggactgtcttgttgtgcatgagcgtacactgtcagatgcactagataaagcatcatctgagaaggtacataggttggttaccacagcttctgacatttgcccggtaaaccatgatggttcaacgatgtccatgagatctttattgtagagcaaacttgagttattgatgaatggatcctcactaaattcagatgagttccaaaattgctcatgagttcttttacgactagttgacggaagtgaactatttagtccatagtcttcagaaaatctgaagaaactgttcatttcttcgcaagtgccattataaatatgattgtctccaaataattgtgctgccatggctccatcatagactgaattaagttcgctcaaggattttccgaagagctccacattgtcaccactagataaagaataagctagtagttcttcttctatacaggacgatccaaacatcttagtgtctatgatatccaaattgtttggattgatagtttgactaggaaaagttgactcatagggaaaatggattccatcttcacttgtagtttcaataaaatccgccacaccatttcccataataggcagatgctgaacagtatgcagggggccatactcatttgaagcagacaaactgtattttttcattctcatatcatcgaaattgtccactttctcagttttcagttggctaatgataagacctgtactctctcttatgttctccatttggccagagaattgtgataatgatgaatggccctgagtattctgtgtcaacgtgaaaggccaactctcatccatcatggtatgaaaagcatcatatctgtctctgattaaaccaactgctgccatctcttcagcaacctgaaatgttgaagaaaatggatgccagacgtaagtagaatgaaatgtcaagaaccaatggatgccaccatcatgactgccaaaatgcgtacttgtcaactgtttaacttttatgagatgcacaaagacaacaaaacaaaccaccaccacggtggtatcactctaagttacaacaaaacacacac

SEQ ID NO: 21644 - DNA, 2687 bp, Cannabis sativa
ttttttctttctttggtatcaaatttatacttatgtgactacatagaatctgtggaatcatatgtgccttaatatatctctttctgttcctttattttcttaggggcaaacattcttatatactcatctcccgtacttctcatagccactttgagctgtttatatcttcatataagaaagaaaatggctcataataacacagaaaggtatttattttatgctttgcctcttgtaaatatccctatttcacacaaagaaacagagtaatttttcaaaatgacttgagtggttggttttgtttttgtttttgttttcttgttatagtatcatggaaaatgtatattggatgtcatggatgagacctgtgctagtgaaagggccactgggaatagtttcttggatggagttgtacttcttagccatgttcattggtctacttgtctggtccatgtactcttacttacatggaatgtttatcaatgtcaaccaacaggcagcacagatgaatgagtctctgtaagtaaatatttcttcttggaattccatttgatataataagacatatcttatgtgtttcaaaatcaaaatcattacaaattttcaggtgggaagcaaagttagaaagcacagctctaatgttaggtctagttgggaacatttgtctagcttttctctttttccctgtgacaagaggatcttcaattttgcagctcattggaattacatcagagtcaagcattaaatatcacatatggctggggcatatggccatgacccttttcacagctcatggtttatgttatattctcttttgggccaagacaaaccatgtttcagaagtaagaaactaccattttatgtaaaaagattataacatctttataataattgtgctgaaattacagatgatgaagtgggctaatgttggcatatcaaatgtggctggagaagtagctttggtggctggactagtgatgtggggaacaagttttcctaccataaggcgaaagattttcgagctcttcttctacactcatcatctctatgttgtctttgttgtattctttgttctacatgtggggttctcctatgcttgcataatgctccctggattttacctcttcttgattgataggtacttgaggttcctacaatcccagcaaaagattcgagttctttcagcccgaatcttaccttgccaagctgttgaattgaatttctccaagtgcccaggtgaacaattcagaaataaatctaatctcatcaatgactgctataaaatttaaaacacattttcataacttgattataggtttgagctattctccaagaagcatgattttcctaaatgtacccacaatttctaagctccaatggcatccatttactgttacttctagcagcaacttggaacctcataaactgagtgttgttatcaaaagtgaaggaaaatggtctcataacttgtaccaaagtctctcatcgccttcacaaatggatcgtatacaagtctccattgaaggaccttatggaccatcttcattacaatgtacaaggtaaaaatttcttatcgagggacttttagctaagtaaggtttctaactatttcaggcaaaaaatagtgcaggcatgaaacagttgtgatgataagtggaggaagtggaatcacgccattcatctccattatccgcgagctcctcttcatagccaacaaagacaacagcaacactccaagcatattactcatttgcgccgttaagaactacggggatctcaccatgttagaccttatcatcccatcatcaggcactagttacaacatttctcgcttaaaacttcaaattgaagctttcgtcacaagacagaaacatcccccaactgagattactcacaagctcccacaaacaatagtttggtttaaaccagagtcgtttgatttgcctgtttatgaaattttgggacagaacagttggttgtggcttgcattgattgtttcagcttctttcctcacttaccttacgctcatgggaatccttacacgatattatatatacccgattgaccataactctgatatgatgtactctttcacttcaaaatcttttctcaacatgttattcttgtccatctccatagtcataattgcatccttgggctttctttggaacaagaagcaagggaataacgcaaggccaagcactttgagcgacaatgctggtgatgagagggagttggaaagcctcccttaccaatctttggtcgaagccacaacagtgcaccatggaaccagacctaatctcaaaagtatatatatatatatagacaaccatttttaatactgattatttactaaccacagttgattaatagagatctttaacgtgtatctatttttcttatttattattcaggaattttgagagagctgaaaagctcaagtgttggggttctggtgagtgggccaaggacgatgaggcaggaagtggctgcaatatgttcttcgggttcggccaataatctacatttccagtcttcaagtttcagctggtgaagactagttattattattataatacttggttgatcaatgtattaattatatagatgcaaataattttaaagaagaggatttcattttactctctagttctagttaacattatagatgaagtgaccatgagcaaatc

SEQ ID NO: 21645 - DNA, 2853 bp, Cannabis sativa
gtttgttttacaggtttatcaatacgtaatttttcaaatagaaggataaaattaagacgagcctaatatgttgaactacctattacagggatcttctcaaagtttttatcttttgtgttggctttggagtcatctactgtatacaagattgagaggggttttttttggtctaaatttttgaaacatttctttcttatattaattgaaatgttattgttgcagctcaagaaagtgatttattcaactgaacttgtatgtagctgatcagcaaaactgaatgtcttctcaacagcaactgcactaagggatccttatctactcaattggctcattatttgacttcttataattaatatatattcatagatttgaagcaaacaaataaagttattggaacttataagatcagtcccataaattgtggtggtgtatatatacgtatctctcgtaacccgtaagtaatcactatatatagaccagttgaacccaacacgcattaatgaactagctaggatatgggatatatatacatatccccttatttatataaccacgattatggattaagtaatcaaatatatatataaaaaattcaatgattatattaaatattaaatagttattgaatattgttaaacggttgtaattaattttaaaaattaataaaaataagtaattaattatctgtaatctatactaatttgattttatatatttatttctttataaataaaaaataaaatatttataaactccatatattattttatttttttttaatttacagtttgagttaaactaatcgtttttatgtatgttgttatatggattttgattgcgatttaagttgctaaatgagttttgaggtgaaattctgcaaaattaatataaaaaaaactattttgaagtgtaaaaattaaaaaaaaaaattatcttaaatattttaattaaaaaaataatttatcttaattatataattaattataattatattttgagtctaaaaataaaattttaaatattaataatctgttatagcaagttattaaaaaatgtaatattgtaaatattatataatatcatgcaccaaccaattacgtaaaaggctcaaagcatttgaaaatttggccaatccaagtgatatgaccatatttggagtggataccacatgggatgaccttcctaattcatatctctgaaactgaagtggtactcttaattctcttctctattatattaatgaaataattatatatatgtatggggaagaagagtgtctgctcaacaaagacaggtagtacaagtcaattattattatatatataattataattatatattccacacccaccactaattaataccaccacaaacgaatgaagtaagtaaagtgttaattgatgcataattcatacttcaataggagttttattttttaatttttaataaaaaataaattattttctctgttgaaaattatatcttgcattgcattatagtatatcataaatgaaaatggtattggtataataacttatatgtttcacaaaagttgtactaatcatatacatagtatatatatttatatatatattcatatatatagtgtattcatatatatagtgcataattaattccaagttaggtaagtgttcaaatcttcaaactttatatatggcactaaattttagaatttcatcatatttttattattattatttatcgtgattttcagaaacaagaaaaattataagttaaagaaataattaaaataaataaatatatatatatatatttttacatattttaggcattaacaaattttagtttacgaattattatattgggtgatgatataacaatagttcttacactatcgtgcagagcttttgttctataatttgaagatcgcgaaccttttgcatggaggggatgaaatcctacttataggacattatgtaatacaggtcaggttaatttggagccattaactgtttacagtgtttagcctactgatggggtgattacattattatttattgaactagttttgagcctaaagcccaagatccaagtagtattgtaaattcgtgtgtattgtgtcgtgctgacccgaccaatattataccgtctttttttaaatgagagtcatgccataaaaaatataggtcgtgtcctaaggtaggcacgacacggctcgtaaacccaatatttctgtatcgtacttggattcgtaccattttttgctaagaaaaacgggccagcccattttcatactcgaactcaaattcctgttttatttttccatatttatttttacaattaatgagccaattattaaaataaatgtatttttaacaacttcaattatatttatataattttcagtaatattttacaaataatcatataaacaaaatattatataattattatattttgaatatttacttataaatacttaatttttatatcatactttataaataaattaatatataattttagttttataatttttttttcaatagtgttaattatagaatcatactataagtattatatttaaattttattattattttaacttatttataattgataaatatatatctatttattattattaatattaaattattgaaacttttaatatgtcgtgtcgtattttttagcttgccgcatgtcgtgcttttcaggctagtctattcatgcttacattcgtgcttgtcgtgttgtgtcatgtttaagcccatattttttatgtcatgttgtgccaatgtgtaccattgtatcgtatcatgctgaagcccatgaagtactaatgaggacacctgattggagcactgtaag

SEQ ID NO: 21646 - DNA, 3544 bp, Cannabis sativa
  modified_base (36)..(68): a, c, t, g, unknown or other
atgcaacataaaatacgatttctgatctttattaannnnnnnnnnnnnnnnnnnnnnnnnnnnnnnnntttagagcacaaaacccaacacagacttctttggcaccgaatcttcctcttaaaataagatgccatggcaaccaagaaactcatattatctacaaagaaggaaagataagttgttagtacaatacaagaaaagcaagacaacaaggtataaccacaaaacgtggagcatcaatgacctactgattccccatctttttccaaaacaatttaagtagaagtaacttcaccatcgtcccgatctaagaacacaaagattttccctaaatattcagggtcattatcaaccgagttctcatatcccgacactatcttagacaagatgacaactgcactctaaccatcatcttcatcttgttcgattggcattgtccaagaatcattagagaagtgagtatcaacataaacttactaagaagatatgattaggtcggcattgcagaggttctcagtagtaaacaaagtcctcccatctcttttccatgcaacagtttctattagcatggcatctattctcctattcatgttaattaatggagcaggtcttttgaaagggtcaaaccttttttaaggaaatatttcttgatagaagaattaaggtatagaagtattcttggtagtaaaggtcacaattacttttggttatgttttctatatatggattgaattggcaaaaatgatagaacccctcctcatttcgagttgggcttctttttaaatcacaaaggatgttgatttcagggggagttaggacatgccaatttctcaagcggtggaagatgaataatgtagacaggattctgtagccatttaagtttatttggtagggacaaactccaaaaaaatttgctattgatataaaccacgggtgcaagggcaagtaagcacccacattcataaggaacctcgacgaggcactacaataaggattttgggagccaaattatctctgattaattgtacttggtgttcaatcatggtactaaatacaagaggtcttaacttgaaagcttggtctattgggtcatcaatctagatggcagctttaagaagcttagttgtcattacctttccacctcgcgccttgtctaagttgttagacttgagcacaatcaacttagctctaatgaactgagccacatagggataacattcataagatattcttctacttctcttcatccaaggcacaatgataacaaagattggttacttacaactcaagagagatctttttggctttggaaaggtgaatccaaggtaattacaagggaatttcaaagatattgttttacaattttgaaggtcttaaataaagaattcgtggactttttgggagttgtagaaccctttaagcaatctcaacaaggagaaaaaatttcaaaaaaaaaaaaaaaaacaacggtgccgaaaaaaaaaaaaagaaatttttttctaccttgatggatgaagagcacctgacgaactaataaagataaaaatctaaggctttcagtaaaggattgtgcgtgggaagtgaaatttttttattgaaagctctcttatttatatgtgagcctaacaccttaatcctaatgcaatttggagtcttttaaatttaaagcttaaaaggaaaagaaaattgataagaaaaagatcaaaaccttttctcttctagtttaggcttagtaattttgaaattcctatgagaatagagagtttaaaaagaaaaatacaaatgataagaaaaatatcaaagatattttctcttcttcttttttctctaatttttgaatggcatgtacaaaaagtattaggatttcaattcaactaattctaaggacataagaaatttatgaaaattttaagttttcaaagaaaaagataaaacataagtgaaaaatgataagtttttcctctttttcttggctaaataattttcaaaaattctcaaatacaagagtaagagaattcaaagtcctaattatgttatgaatgcttgaagaactacaaaaaatttgtctaagattatcaaaattgatgcgtagtttcaagagaaacgggctctgttcacgtaatcaagtcagcttcacacaattgtaaagtggacttggggaaaaatgttaactcaaaaaactttccttggtgtcttcaacatcaatgtttgacacgtagaaagaaagataacatctcggagttgagtagtcccgaatcatagcagaggacctaggaggggtccctagccctacgcccaaattgactttgggaactctagaatggaagtttgaatttctttaagtcattccaaacttaatttcttttagtattctctaccatgaagacatggagaaaataattccaggtcctaagcgctaaaaatacacgaattagcacctccaaagccaatttgggcacctagggttttacctagtgcccagggtaataacctcaacagggtttcaactctaagaccgtcttagggaaaataggtccaactttgcattggaattttaactagagataccatgttctgaggcatcaaatttagattcacaaaatgttcattttttagccctcgaacacttaaccattaggcaccccaacatctaggttgacaatttgtcaatcaaggccacttcacaacatctgattaaaaaacatacttgtgcatcttctttgtctctattaaaaacaaggaaacacgttcttttgggaaaggaacaacccatcatgggtgctaaaacaaggacccagcgcctaggttgacattttgtcaacctatgcaatgttcgagaagtctttcgggcatattctctattttcatcacagtaatattcaactatattcaaaggccaaatagaacttctaggtgacctgaaacaggacccattccctaggttgacacctagcatagggcctagcgcctaggtttacatattgtcaacctggaccattttcaatcagtttgccaaagagtattttggacattttttcgtagaaataacaaagatgcaagaaaacttgtggagaataccacaatcccaaggttgacctaatgttgggcccaatgcccaagttgacaatcaagctggtgcactggttttgataatccaaatgcaaattcttctttgagaattgtcgccaaaatgctcaaaaacagggtaggatacccaatgctaaagttttaaaacctcagaattatcaaatgacatcccagaagctccgaaatgagcacccaacgccctggttgacaaatagcccaatgtgttaggtttttcttatccaattctaattctatcccaaccattcatctagttttttattataactacgatccatgaagtcagaataatgaaattaaaaacttcatattttcacatttccaacaaggtgatttactcaaaaattgggtagtttcgagagtcatgttttagcaaaataataacatcttcgagaacttgtgaccagctttttcaaaacacaaaaatggactaactaat

SEQ ID NO: 21647 - DNA, 3783 bp, Cannabis sativa
  modified_base (3152)..(3155): a, c, t, g, unknown or other
agattaggttaaaaaatatataggataaaccgtccaaaccgaccgatgtacaaccctatggctaataatatttttttttgataaatgagaaagttgtattgttcaaaaaagtgttacaaattagttgagagctctcaacaaacaaaccaatttgagttttctttattagttttttcttttttaaaatgagaaaaccatgaaaaaatttaatcttaactctatttattacaattattaaaactttatacatctatttgcctttcaaattaagaacaatatttaatattccttcttcccaaatcttatttcaagctagcctcaaacaattcatggctaataatattaggacaacaaaattttaatcgtgtttaatccaacaaccactcaaagcaaaaaataataactagtttaattttaattaagactcatattaatttgatcacactaatataatattataacatggtgttgaatactatatataattatataatatgacatgtatttattaataaatatattgtcctagaatcttcgatatctctctttttttttttttcattactagtactatatattttctatcgtactttcacgaaaattaaagaaaaaatattgtacttcttgattttgttggtggcaattaatttgcttttgattttttttttattattaatattttgttatacattgtgatagtaaaatataaatatcaataaaatatactcaagtacatattatatagtgacactacaagaaatgacacttttaccagcatagttcttactgcgctggtaaaagtaacgtttactatcgcattttgtaaactgtgctggcaaagaggtcaaaattttactagcgtacatttacaatggctaaaatctaatttttaccatcgcacttacgcgttagaaaaagttatttttgccagcgagcgcttttcattttatgctggtaaaagttctaataataccaacattaatttgccaactcccttttcccaacatatcacaattagtaaattctattttaccaatacaataccaaggaattaagaggctaccgtcacaaaaaaaaaggtcactaggttaaatgtataaaaattaagagtgttctctaatactaaaacacattctataaaattattttcactttaatgaagatcaaaattttgaaaataaataaagttgcattcaaaaaaattttaaacagatttattctaattataatctatttgtatatttttcgtcaatatattagaccacgacctcgacctcgatccctgaacgtggaccgtgccccgacccccgactccaaaccccagacctgaactccaaccccgaacccgaaccacgggccctgaccccagacccaaacttgataatcctatccgcggctctagacccaaacccggactccgatcctgaacccgaactcaaacatagcctcggccccggccctggacccagacctgaaccttaaattggacttgcacccgaaccccatccccagcttcggacccaaacccggaccctgtcctcagccacgctctgaacccagacccagaccctactcctagactgggactcaacctgaaacccaactcagaattgtacccagcctcaccctgaatccagaccaagactcggacctcagccccgacctcaaacctcgactctaattaaccccgaaccctaccccagactcggaccaggactcaagccccctccccacaccccgacttgcatcagtacctggccccaaactcgaatcctaatcacccagacttggacctcggaccttgactccgacaccgaccgaacccgaccccaaacctcgatccctagacccagacctagacctcgtattccaaaccctacttaaataaaaacaaaatagatgaaaaataaaatttacaaaacacatttaatttttcatttttaaaattaaaaaaataaataattacaaaacatatatttatttttctaaaacaaaattcaaaaaaaaatgtggtttcatttttgtgaataatttttttttaaaaaaaaaaatattaccaaacaatacttaaaaaaacattaagtttttgctcattctatcgtacgtacgaaataaaagaagatgaaaaatattgtacttgccgattttattggtgggcacttaataatttgctcatgtcattttttgtaattttgttatataatatatatgtttgggatgtatatataattgtagttaatgatagtctttattactttgttttataattaaaaaaccctaatttctgcatgcatgcatgcatgcttagtacgtgggatttctaatctattataagatgaggtttttcattataatataatgtcttattttttaatgaacattatatttttacaaatttttgtttttctattgaataatatcaattgtactcgtaaacagaaaaacaaaatattctccttgagccatggattattctatctgttcatttgttttttttttcaaaaaaaaaataataataatttgcttatatacaagtacagttgtacatagcacgatagtctatatatataactaacttaaactagtccaaatctaattttattggtactataaattaattaactcttaaaatttattaaactgctatttatataatgcatatatttttttgtcttaactcttaaacatgctgtgccaaattagaattggtatacttataagttatactatattatattagtaaattacaaaaaaaaatataattctatatataaatgcatgtgctactctactctttatcaattaattttgagatgacggagccccatacgtcactacaaaaataatatttttagagataatttttagtacaacatttagtcacaatgcatgtgctactctactctttatcaattaattctatatatttttagttttagtcacaatgcttgttgtgactaaatacacatttagtcacaataaattgtgttttttatgactaacacctttagtcacggatttctttgttacatcataggaattattcactacaaaaaaaactgttacttttaatgataattttttagtcataacataattttttggtgactaaatgtgacttttagttacaacaaaaaattacttgtgactannnnatagtatttagatacaagttgttactaatttagttttagtcacaataaattataatttttgtgactaattaataactttagccacggatcttttaatcacaacataagaatgataactaattataattcatcacaacttttttacctttaatcataagttttattatgactaaaagtaaaaaaaaattgttatgattatttataattagttacaactaattttttatttttagtcataaattttcttgtaattaaaaaaaaaaaaaattgtagtgcatattactttatcatactttttcaaccacacttcattcttaacaatatatacatttacaaaattattataatttgggagatttgaaaaaaaaaaaaaaaccctctaaatttgggaaaaaaaaatatctcattttattctaataatatcataggctattatatgcagtttcaagtttcaaccaatctttaaatgtggatacatctcccacatggtgtgttctagatcaatatccatagatagtcattattttcaaaaatgacaaaaatcacatactgaaaaattaataattgaaaactaaataggaaagtagggccttactcttaattatttgtggaccacacttatcacctt

SEQ ID NO: 21648 - DNA, 4528 bp, Cannabis sativa
gactaaactacccctaagtatttcattctgtaacaataggaaaaatagattaaaaaaagtattgctgaaaatatctaaattgtatattgaaagtgaatcaattatgtttgtaaggaactaatttgtaaggaagtaatgacactagctcctaattaactttttacacataatcaatctttaactacctaactctaatacaagctaactacaaacaaggacaaatccaaacactctatacaaaataacattaaatacttcctttaacacagttaatattcaaaattgcaactaataaaaagtagatcgttttttttgtaaaaaaaaaaaaagaaaaaaaaagtagaggatttcttcctgtaattcagtcatctaaatccatgcaccctattatacaatgctttgagtcacatataatccttttttcaatttaattcaaacacaagaaaatattattataagaaggcctatctaatggcacatttactacccagtattcagaattaaaataaattaatgaaaaaatataacgaaataaataaaaaaataatcaaaatcaatatttgtaatatgttgtttactaaaactgtttggaaatggtttgatagtgatttatcttgtttactatatcaggaaatgtaatcgaaatgcttaaattgattaaattacccttttgagttaaactataatattaggtagttattttgtaagacatattttaaaagaaaaaattatcattataaatttaatattaaaaaataaaataaaaataaataaaagccattacccttaatggaactccttgaaaaattgatagaagaagtcttccctttcttttttcccttatttaatcaagttttccatttcctaaatttaataaattaaataaataaatgtaactttcgcccaggggtatagaattggagtttatttagtactttgataatcttttttcttctgattcccttacgttgagtgatatgcagagagtcttggaccttgtaccttctaaggtctcactggatatggctaacttacttcttgttccttttttttccaattttgatgttaagtttgctttgtttcaaatgaatccctataaaagtccaagaatcaacggtatgggagttggtttctactagaagttttgggctacggttggcccaaatatttgtaaaatggctcttgagttccttaatggtaatggtcagtggcttgtatcaatgatacttctatttgtttgattctaaaattgaaggagacgtgcagaactactgattttcctcccataagcctttgtaatatgatttacaaaataattatgaagatgatgactaaccaacttcgtgatgtttagggtgatctatttttttaggagcaaagtgctttcattctagataggcttatcactaataattccatggttggttttgaatgcttgaatctcattaaaagacacaaaaggggcaaaaaaggattcgtggctctcaaagctgatatggctaaggcttatgacaaagttgagtggggtttcattgaaggaacgataaaccggctgggttttcttgagttatgggttaatctagtacatatatctcttcagtacgatagtccattaatgttaatgggaatttggggggaaacattatcccttctggggatctttgccaaggtgttctactttctccttttttgtttcttattagtattgaaggactttcagctattataaaaaatgattgtcatttgggtaggcttcataggttgccttgtgggagatggggcccgatggtttctcacttgttatttgctgatgatagtttcttcttcctcaaagcttctaaggagaggtgtgctagattcagagaaattatgggttgttatgaacgtgcttcaggtcagttgctcaatctttccaagtcttctgtttacttttcttcgggtgtctctcgaggtatgaaagataatttggcagctttgctaggggttcaatgtcttccttgtcatgaaaagcatttgggacttccttgtttcgtaggtcacagtaagtctaatttattccaatcaataagttctttggttggaagtctaagtatttatttgctagttgaagaaagtgctcctcaagctgttatccaaaccatcccccacttattccatgaatctttttcatcttcctgtaaaattggtttaggaacttcaccgactttgtgctcgtttctagtggggtggggatgatgataatcagaagatgcattgatgtacttgtgagagattatgttgggacaagtctaatagtggaatgggattctgcgatttatttgtgtttaataaagctcttttggctaagtaggcatggaggctttattctgttctaaattccttggcggcaagagtcatgaaagggattcattttcctaattgtgattttctcaatgcagctgaaacttcaaaggcttcatacgtttagaaaagtatcatttggggtcatgaactttaagaagatggaactcattggctcacaggtgatggtagaaatgttaacataaaatctcacgtatggattcctaaaaggtctgctgctcttacttattcttttggtggccatcatgtgataaccatggttagtgattccattcatgagaatggggagtggaagggttagttgattgatgacttgctctctgatgatggagctaggcagattttatgcattcctcaaagtcacaattctcaagatcatcgcatttggcactataactagtatactgtgaaaagtggctactggaattcgattaggcttctgagaagggtcattttgactcttcttcagagccttgttcttagtggaattacatttggagtctcactatccctctgaggattaaagcgtttctatagaaggcttgtttagattggttccctacaaatgtaatctggctacacataaggttcctactaatttatggtgtcatgtgtgtcatttagaggaggagtcttcattccacaccttttgggactactcgggtctccatgatattactaatagagttcattttgcgagttatccctcctctttaccctccaccaatctttatgcttttctctgtgaacttgaggtgattttaactagagttgagatggaatttttattagtcctactttggagaaattggtttcatagaaatcaatgagttcataacaacagattgctcaacactgaaggagttttgggatgggcttccgagtacacaaagaattttcaggcagctaatgcgaagaagtctcgatctgttgcgtgtcctgttccacctattccgtgctcgattgttcctccatgggtgccacgtgatagtagtcagttgaaacagaatgctgatgcgggagtttaatgtgttgatcgacacatggggtatggggctgtggtgcaagatcagtggagtaattgtttggcttctgcaattgttatagctttgggatccctttccccgctagtggcagaagctatggaagtccttcatggcctacttctctgttttcgccttgttttcaacaatgtggaggttgaatcggattgtcaatgtgttatccatattttgcagaagaaggactttgttttggctgagtttggcctaatttttaaaaacatttatgatatttgtaatcatgtcaatgtttctaagtttctcttttgtaatcgttatgcgaactgtttagatcacaatcttgctaaatttaccttatccttggatatgataaaagtgtggtggccggatttatcgaatgttctttgagtctttgcaacttactttggctttgtgccttttaataagaaatttattctattcaaaaataaataaataaataaataaataaatgtaaggaaatgactcatttaccattgtttctcgttgtttaataataaatatgccattagaaggactttttcagtgtactcgaattttgatctcgagatgatgaatctacaacaacaaaagctaggattaaaaatatgttaaaatatatgtaatacctcaaaccgttaaacaactatatcattctaacgccatcttcaatgagacactaaaaacttaaatttagtgttgtttcttagtgatacactatagacaacattgaatttgttctttttatttttaaataattaaattttttaatatatatgtattatttatatttgtatataaaaataataaaagaaatatatatttttatttaatttatagtgttgtgattaaaattaaaataaataaatactaaaataatacttctttttttttttgaataaaaatcattagatttattaattaataaattcgttcaaaacaataacgcacttcagagaaacagttcagctgaagcacaccacatgtagagaaacaagagtctcttaccaagcaatgaatacttatttgcatatcgttttagaaaacacaaatcaacaaaagataaagccaaaagcaaattttgaacatcttgaacaataagaccaaactttgaaggcataaaaata

SEQ ID NO: 21649 - DNA, 2878 bp, Cannabis sativa
atgtcgaagttggtatagttttaagctcgacaagtttctatgccgagcaaggtggtcaggtaatatagtcctgtttttattttatttcatattggtactacactaattaagtatgataattttttttcctgttattaattgtttataagaaaaagaagcagcaaagtaattattagaaggaaacaaggaaagttccaaacaacagaggtacaaatccacctacaaagaaaaaacagacaattgggaaaggcaaatagcatattttataagctatacatgcagatccaaaactactactacgaagaattcaaaactattcatgtagaatgatcaaatgctatcacttttcaatgatattaaatgggcttttagcaattcagattattagctattgtgtatttgtagtcaccaaagatggttatttttagctaaatgaagggaaagttgtctgagtgtactcatgcatatgtatgcgctcatagtattatattttgctacatcaaaaaaactagaaaggcagagtcgctagaagttggaatatgtaacttgaatatgagtattgtaagcaatcttcgtttttgtatgctgcatcttactttgctgttctgttgtagatttttgatactggagtacttgaaggttcctttgggtcatttcaagttgttaatgttcaaatatttggaggattcatccttcatattggttattgctctggaaagaatggcagattgtctgtaggggacgaatcaatttgcaaggtaattctgtttttgtgatgtgtatctagtagctattatcgctagtaaatcactgtctgtgatacaatgagttgtattttgatacaattatgggtgtgctaattattttctattctctgttacaggttgactatgaaagacgtaagttaattgctccaaatcatacctgcacacacatgctgaactttgcattgagggtaatactgaagtatttttcattgctacaaagagttgattttcttttagaagtgttctcaaattattatgtaatgtgactgcaggaagtacttgggaatcatgttgaccagaagggttctattgttcttcccgaaaagcttaggtttgatttttctcatggtaagattggccttctctattgctattgatagaacttctattttcaggttcctcagcatttgttatgtcttattcttgcttttcgttaaaaatcaaacaatcttcaagaatgctatttagattcatgtgtatatcttaggttatctgatgcctacttcttaaacactctgcttgaacttttcagggaagccagtagatcctaatgatttgagaaaaattgagaatattgtgaatgaacaaattgaagcaaaattagatgtcttttcaaaggaggtaaatctggcagatgctaagcgcatcaatagtttgcgagcagtttttggagaagtaagttgattatgtcgacactttttttttccttttcttttgacgtgttctgtgcagtcttgctaaaaatagtatatttgtaggtctacccagatccagttagagtggttgcaattgggaagaaagttgatgaccttctggctgacccagaaaatgatgaatggtcctcaatttctgcagaactttgtggaggttaatatctggctttttattttatatatgagtgtgtgtatgtatattatattagtttttctgcagcgatataatcctccatggagttatcggtgttaaggtttactcgtttggttatgtctagggacccatatatcaaatacaaaagaagccaaggcttttgcacttctatctgaggagggaattgctaaagggatcagaagaataactgctgttacaactgatatggcttctgaagcaagagacttagccaactcacttgagaaggaagtagatgatgcatccagggaagaaggcagctcgctggaaaaggtactattttccctatccgattatgtactataattttatatagggatacttatgtcatgaaaaatgatatataggccaagaagtgtcaaaatagcctgttttaaccgctccaattcaaactttcctctcagtgtgtttcgaaacttcagaaataaaacccacaccataattagttaaggagtttgctttgaaccatcattggaaaacataagcaatgttttttctttcttccagtcttgtacttggggaaaaaggtatcttcaaatctcaattgaaatattttgagttttcgactgtcttatctgagattgttcaagttttaagacaagactcttcttcaataatgactatattactttacatcataaaacacttttctgtgttggtaatgtctataagtatattgacatcaaaatgaaggtatgattcatcagatcttgcaatatctagtcgtgaatttatgcatttattttatatttgcaggtagtggcatctttgaaaaatcgtgtggattctgcaccgattccagctgctaagaaagctgatattaggaccaagattgccctgcttcaggtatttccaactaggcttatcattgtcttccctttttgtctatttatttataatctttcttcattgttcttgtttaaataaatttgttctgttgctgtagagtcaagtgagaaaagcacagaagaagatcgctgaacaaaatttacagaaagctatcgaggttacgattatgtttgctgagaatgcattgtcagagggaaagacatactgtatatgcaatgtcgatgttggcttggatgtaactgcagttcgtgaagcagtctcaaaagttatgaaggacaaggttattggcaaaattttcacttttattttctgtggattattcttaacttaggtagacaacttaaaaacttgacgag

SEQ ID NO: 21650 - DNA, 4669 bp, Cannabis sativa
aaaaaaatatacataaaaattttgcctaaaataaaataaaaaagttgagtatattaaataaacataaagaggtatttacttaaataaataactttttaggtatcgggagagaaaatatggaataaagaatgagaaacaaacaaatacatcaagtcaggagaatagattacaaattaatacttgtacgtagtgttgtcgtaagaagaaaatgtactatagtggtagtaaaatagtcattaattatatgtaaaatgtagagagagtactggtagtactgctacactttacaagacagcaaccaaagtccaaagaatcacgagtgaaattagttgtgggcaaataggaactctcataattaaatatagaaagaagtatatatataagcgtgtaacaaattgttttaaagaaaaaaagaactgatgaaatcaccacaaaaaatacttattattattattataagtattactggcaggtatatagcccagtcacggatgcattaattaattagtcactgcctactctatctttacttatttcttcattttcacatgcaccctgttatcacatactgttttcaattaattactttacaaaataattatttcttcattttgtctcgtgatatactttcacggaatatattttgtggtatattagatgagtctcagagtatattaaatgagtgttattattttttaaccctaattacccctagatcaatttcagccctcagatcaaataactccctcatctaacggctgccatatatcacgaaatacatttcatgaaagtacaatcacataacaaaatcatctccctacaaaatatatcactctgtttgtcttattgcatatttaatttttctaaaccctttttctcccttttcactttatccccatcttttttctttcccatcaataaataaatatataaataaaaataagaaagaaaaacatgtgaccccatgtagcataccctacgtgtacgatcgagtaattactccaatcatatcatgttttcgttgccgagtaatcacatgcattaattaagccaataagatcaatcttacacaacactttattggaatgttattattatttttttttttttgaatacttatatttattgtgtattagtaccggattaattatcaattaaaactacgtatctttcttttttttttagttgcttggacaaagcagcaatcaacaggccagaactaaccccaaacaagataaacaagtggaaccttgcaacactaaccgatgtagaggaagtaaaattgttgattcgaatgctgccaatttgggccaccaccataatgttttggacagtgtacgcccaaatgtcaactttctcagtatcccaagcaaccaccatggactgccacattaccaagtccttcaaaatccctcctgcctcaatgacagccttctttgttggcagcattctcttaactgtcccagtctatgaccgagtcgtagtcccaattgccaggaagtttctaaaaaaccctcaaggcctcaccccgttgcaacgcatcggggcgggattattcctgtcagtcctagccatgttggttgcagctttgatcgaggtcaagcgcatccacgtggccagactgcatggtcttaccaacaatcccaaggctgagattcccataagtgtattctggttggtcccacaattcttctttgtgggttctggtgaagccttaatttacatcggtcaacttgacttttttcttagggagtgtcctaaagggatgaagactatgagcactggactgtttttgagtacattggcattagggtgtttctttagctctctattagtgtctatagttcatgtggtgactgggaagaagaatccatggttggctgataatctcaaccaaggaaagctctatgatttttattggttgttggctattttgagtgctttgaatatgatcattttcttggtgtgtactcagtggtacgtgtacaaggaaaagaggcttgccgatgcgggtatgggattggatgacgttgaagatgtcgtttgtcattagtaaaaaataatattaattaatccaaagtgaaaaaaagaaattgaagatcaaaattagatcatgatcacattctattggtgattatataattgaagaaagaagaagaagatgatgatgatgtcatattcatcagtactgttaattataatgtttttcttcttttgaaatatcaagtttgtaatataagcctgcttacttgtatgtataacaaaaaatgttgcaaaaggtaataaaagtttcaaatttttggcatgtagtctttgctttgtccacttttttcaacatgcatatctaggcaataatttctaagggatatttgagtttcaataactattgttccctctaattttttatttctttatttaatttaaaatcgagggggaaaaggttgtcagtactattaacattgtccacattataaataaaactgtacatatgtaaatatccaagttgtatattcaaataattaaacagctcaaataaaataattaagcaagggaatttttttaagaaaattattctaagaatatcatagttaatttagtgttgcaaattttaatatgaaatcatgtgcaattttataactaataacaaaacatgtaaatagaagtaaaattcacttagcttcttggcatttaacaaaacatgtaaatagaagtaaaattcacttagcttcttggcattttgtttgtcttcttataaagtttggtagtttgggttttaaagatgattccaagtagaaccaagtcattcttgctaaatttgtttggacaatcatgaaaaaacatgatgtgttataggtgaagtgggtaaatatgatttacttaaaagaggtgatcttctgggagtaccaactcctgcaagataccatctggtattggaggaagatttgtcttaagacaagtcttcaacaagcagaatgtgcaggctactggacaaagaggaaagctcaaggctactttatcatataacagtctactgcatcttgatcatgagatcttctcccgagctgtttgtgttagttttatggtactaaatcaggtacacaatgaaagttgttgacctcaaaaaataattaactaatagctgagtcgtatagatctgatgcttgccacgtgttacacaagcagaatgaaaatgcaataaacacaaagatttgttatagaggtttgacccccttgtgatagcgggtaatgacctacttcccttttagttgtattgataccaagagataatactattcagattactataggtagaatctgatatagctctctataaagatacaaatcatgaatcagtaggtagatctctaatgagagaaagagattgtcttaaaggcgtattggagagataaagagaagagaggagagcccttgggggcgtgtaacagagagagaggacgagagactagggttttgacttagaataattttgaagcttattgacctagagtcaacttaggttttcaactataggttaaggcttttatataggaagccttaaaccataggtttacaatttaaattccttgaaaatagcatagttagttagatatttacaaaagaccgaaatgcccttgattatagatattattcagccatttcgttgggcttttagggcccaattcccagcccacctttgatgtccacgtgtagaattattcatggagtcttgccaggtcaaccctagctgcctatagacctataaggatgtctgaccgaccatggtcgtgccaggtcaatcctggctggccatggtcttgccaggacatggcaggtcaatatagctccaccaagaggaggccaacctttgattgtggaagctagccttttgcaagttgaggacagctttatacattatttccttgaagaggttagattcccttggtcgcgaacggagtctcctcaggtctgaaagtcacttcttggtcggccagcttgtgcacagaccttggctggcctataggctcaccctggtcagcctatatgcttctctttgctggccaaggatgttgatacaactctttgagggctcacttcacaccattcggttgctgcttgacagtttcgctatatcttgcatggaggctctgttctgctattggcggggctgtattccacctgtactctatctttggcttacgtggacatgccacgtcaggtggacaaaatttgggataacatttgcccccaagtccatgttcgaacgtctagtcagatagggactttctagccatcgtcttgtctatagtagtctctgttaagcagccttatctggctaagtgttggctttttacctgacatgcttttggatctttaatcttctctctctatatacgtctcatcttctcttcttgggtatctcttcttcgtacattccattaacaagttttaagctttttaagcatttggaaactttttgactcatgttagtttgtatctctttggtatattgatcctcataatagttttggaatgtgtaatatgtgactttttaatagaaaagattcaatcttggccttcactatgattcttgactctttgagtcataaagaatatgaggcacatattcgagttttgaaagaaaaatacacattgggattcaaaacttacc

SEQ ID NO: 21651 - DNA, 5029 bp, Cannabis sativa
  modified_base (2860)..(2866): a, c, t, g, unknown or other
  modified_base (4381)..(4386): a, c, t, g, unknown or other
accatgcaacataaaagtgatttcagatcttttattgaaatgggttttatttagggcacaaaacccaacatttaccacatacaaagcatgtgactttggaaatatctgcatgctctaaaattgtttgaattggagatatcagtattcaaatgaatgtcgcctgtcatttgacattgaagaatgtaaggcatgttttagaattgcgccttaatctaatctctgtaaatgccttagatgagcaagggtaccacaggtatttcggtaaaaagaattggaaactttgtaaagggtcaatgatccttgcgagatgagagttatgttgttcattgtacaagagttatgggaaggcttgcagcaatagtattaatgtagcaaatgacacttcaccaaatttatggcacaaacgacttgtactaaggtactatatcgaatccttgtgagcattacttattcagaaagcagcatagagtttcatttaagagttcctatgctatcaaaaaggaggtaatcaagcgagtttagtctgattttgtggtcccatagaagttgaatccttcgcaggagctaagcattttgtaactttcatagataatgatgcatgaagaatgatgtgggtctaaatgataaagaagaaagaccaggtgtttggatttttccaagaatttcatgctatggtagaaagagaaagtggaatgtatttaaagtgtctcaaaatggagaatggaggtgaatatacttctcatgagtttagaaactattgctctaaacatgggattcgacatgaaaagacagtacctggaactcctcaacataatggtgtagaagaatgaatgaatcacaccattatagaaagggttagatgcatgatgagatcatccaaactaccaaagccaacttggggagcagtgaactactacaaaaattgtttctcttgacatttttaaacattcgtttaaagtattgccatcggtttctataaccggttcctatacgattgtcgcaaaacgggtagaataggtaatggttcaaaaccgttggtaatgtgaaattcctaacagtttaaaaccgtcacctatagcaaggtataggaaacggtttaaaattgtgccttatactataggcaacagttttaaattgtcgcctatactctcttataggcgacggttttaaaccgtgccttatagtactgacactactacaaaagttagaattcgcggcggtcgtaaaaatattttttttaggggaccgttgctaaaaaattaagtaactgtttaaaatcgtcgagaaaaattagtattttcgacggtttataatagtcattaaaggaataggcaaaaattttaattggaattcgtaaatttattgggcccttatacttgacgttttaaaaccgtcgcctatactataggcaacagttttaaaccgttgggtataagggtccaataaaaaattgttacctacttctcgccacattttccacgtgcccacatacttgttttctatttcccacatgcccacctatttcttctccatttcccacaccctaaaacgaaaaatcttaactctccaaaaccccacccacacctccgcaccatcgccctcctctctcgccgtcttcctccctctctcgatctccttttcttctcgtctctcgctccatcattgatcaccacccactcctcctcccgtcgggctccccctcctctctgtcgcatatgtcggacctctcatcagtctccctctcacctctctctcatacgtcggaccacgaccacctcccgtccatctccctctctctttttctctctctccaagcttggtataaatactattatacccaaaatttggctagcacatcagaggagaacacgtgtcaaactgggaagaatacgagtcaacgcatgtaataataattatatttgaaatggaatgcctcgttaaaagcgaaattgattgagtatatttacaactcagttgactgaatagtcttacgcgagataaagacacacaaactattgcctcatgcattaacgagaaaccatacaacttcagatgtacaaggcaaggcatcaatctcgctacgcattagaatacaagatataatgactgataagacacttagcgtatgatacacggtatacaaactaagtgtaatagtcgggtaaacccatacaattaataactgggcgtccatctcgctataggaaggcacgctggtatcttcactaatcagctctagacatcttttagtgagattcacaactctgtcaagtcagttctctcgaatagaagctgacattcaaatgatgttggctgctgaagttcaccttgtccccaagaactgcaattgttagatagatagttatgtcttcaatagcataaatgatgaggttcacattatcaacctcggaaagatgtggcaaaagcaatagcttgctaccaaggttgttgttgctatattcccagcgagttgacccaaaatgatacgatttgcaacgttcttaatacatgtttatattgacccagtaaaagcggaccaatcacaattgtgtgatttttcatatattaaccgcacttattttatgtggaatgtgattaaatcccatgattttaggggatacttgttgtaaaatatcagtcaacaatgtaattaactacccacatatgtaattataaatagaggcaagttagaatgaaaaaggggcgaaaaaattcataagagaaaaaggccctagaattgtatcaaaaatctaacaagattgactcgtggactatgcaaaattttaactacaaaacaacaaaaaaaaccttcgtgtgtttgacttttttcatactgtttctattttctgtgcaagtttannnnnnnttaggctcaaatatagttaacgaaaatctgggatgacagtttggtgctttcattgagagccttcgtgaaaaaagctcagaaaaaccctccttacataaaaaaaataatcctcttcatggctgacaacaaagaaaacgttcacacacctcacgaagaaaccacttatcgtcctaaaaaagagctaatgtgttcccgaaggcatttcaactcaccatttgaatggaccacgagttcagggagaacccaaaatctgggaatcagtcatgaagggcctagaatgaaaaatggcaggcctttacataatccagttggtgagaatggcgcatgtgatccaacaaagtacataccaattgtcgaattagaaaactgccatctcaagcgccgcttggaggaggcaaactagcgtaatgctgagttggagcgtgaggcaactgcgaccagggcagaacaagggaataatacgcaaaatcaacctgaccctagagagagaggaccacgaggcagacctcgagactcacgaaccagtgggtaggagacaactcaaggaaaccccaagaatgctcagttaagacaacatggggaaactgggaatcccttgaagacaagcagccaaattatcaaccaggaaccaaggaacaggaaattcctcatagaaataagcaaaatcctaggacacaacgtggagcacgcgggtcattagtgaggaatttccaacgttcttcccaaactcataaggaaggagctcacacaaatcccggtgggggggaacgagacgaaccacacctaagggaaaagaacgtggtgtgaacaggcgagtgttacctcaaggcacacaataacccatagtcgatcaatgcgaggaggagaaatactcgtcgcaacaatgatcaagaaggcataggtacaagcaaggatgcaagtcacttgagggtgaggtccatgagcaggatacggtctacgagtggaacgagatctgccagcaatcatagccaactggacctacgagaacacttgaacttaaaaaacctgatcttcaccaacaacttggtccaaagcaaggggatctgatccaattgcgaatgcactgttaggtgaaccattacgttgaaaaaagaaggtgggaaaaattattccaaataacacaaagcttctataatttctaacttgagattttgtaactttgccacatcaacaactttactgctaagagattttaagaacaaacacaactttgtaattgcatttcgaacttttatatgcaacatggaacagaaactcactggtagaatgtgttgaatcaatatatgatgatcatgagatttcagaccactcaaaattattttgttcatatctaccttatcaaagacatttgaggagtacccttcaggtactttaacctgggagatagaactgttggagattattttacaatgatatagatttactacaatgtatatgttgtttaacatcctaaatatgaattcctaaaacaatggaatttaaacacatataaannnnnngaaaccttacattggttgcagcagtattaaatgactcattccactcagatatctaacccttgtatcctttctatagcagagtatcaccaagatctgagcacgattctccttcagttgatttgattcttcacagtcttacgcactatgattgagtacatacttcctatgtgtgcgcatgtactctatcactataagggacgaaatattgaagagaaagacagagagagagaaggattcgaaatatagagagaaagagaaggctcaaatttgactgaaggctagtgaaagctaaagctttatcaaatgttatcatcttttaatttgagtctatcactatttatttataggaatccttctaggtttatgtttgaattatttggcattaaaaaattcataaataaatggtaaaagagaccttaagtggccagccataggatgtgggcccacaccttgcaattttgttattttttcaactatttatcctattctgtcacaaatgtcatatttttcaattcaaccacttaaatggaaaaactatttatttagtaatcaaaataattatcaaataaattttccttttaatttatttattaattagactttataaagtctcttaataaacaaataaactcttaaacctctt

SEQ ID NO: 21652 - DNA, 4258 bp, Cannabis sativa
tcacagttattacgtgtatgtgtaggtaagagctataactgaactaggatgagtctagagttggatgaagattgtacatattaagatagttagacctggagtgttcaaggtctttgggacagtttaggctcacttttgatagtcgttaaacaattacttttttgtaatacaagtgtgtaacaccctatcccacagggacgccacatgtgtattttcttttaaaattactcttttactagttatataactatactaaaagtgtgactaattaaaaatttatagtgaaaacaaacacaacttttataaaaggtaactgtaaatatttacggggacccctactactaaaatatttacattcagaaccaaagatgttttttttttcacaaaaatgagtttatactccaaattacactcaaaatgagatatcctgtccactgggccgtggcaccgcgcctaatatgtacactgctgtagagacctcaggctcatggttgctcaaccttgcccttccctttacctgcaccataagcacccgtgacaagaaaagtgattaatttcataagcagtgtaaaatccatttaatcacaccataacaaaagtactcaataacaacacatcatatattaacatgcttaatcaatttcacatcattataatcacacaatctcgatacttcataaagtatccttaccactcgttaaccacgagctacgtatgtcactattgttccccaatacagagaacgataagtaagaaacctattcgcgaatttaagagtaattactcataacggtaatgaccgtttccaactctcggtcataactgaggcataacaaacacgtaaacaagatcttgatcataatcaagactataacaatcataattgttaattaatcatttaaccataaatgatgcatatcacttttcttacctcagtctagaaatcaggcgtgcgggccgacctgagtggaaatggagctggacgatctcgatcctatgtcacgataaccagaactcaataaatgccttaaaccaaaactccaggaacaaaccctcattctgaaactggacaaaacctagcctcaaccaaccctagaataagccataccacttaaaaataacctaaatcaaatactaggtaccaccccgagccaaaatagaattcgaaggaaaccccgggaattccccctgcagaacaaatggttgaccggttctgttgcactagaaccaactggtcgtccagttctggcagaccagaattccttgggttttcttccctaaactccctccaaacctgtccaacagctccagtacaatgtaatactataaatacaacatactcaaagcatcaaaacaccataatttattaaatctcacaaaattctaagttagaaccaaaaacaagtttctaacctaaaattgttaactctaactctagcaaccactttaattgcataatctaagctcaagcttaacttaaaacaatcttatatacacaatctaaactcatcttaactctacagccctaaaatacctaaaactctaaccaaaattattcaacatttatagaaaaaatcaaagagaatgcaccaagaacttacctcaacttggctaacacttctaccttgtcaatttaccccaaaattgaaagattggctggaaaaaatttcttgattgctgttgatgttcttggtcacaaaagagatagagaaaaaaataagcttaagtgatgtttcttctacctcgacaagcttggcaaatatctcattctaggcatcgatagcagaagcccgaaagctagtgagcaacctaacttcatgctctaggttgtgaatttttagaattttttattcaatctctttattcaacctggttgccttgagaatagcactgctggctttgttctcagcttcttaaagtttcaactttgaggcttcccacactgagcctgggctttttgatagttagctttgtaatcatctccacacttttgtagcctttagatttcatctttataactagctataactttgtttgtggctgactccagccttgctttaacttgttgctccaccagctccttagcttgagtttgagctttctagagatcagccaaagcctcctctctctttcagcctaaggcatctcgctctgccctgagagtctctaacccaagagacatctttgccacaacttcagagtacctctttgccaaaaagttcccctggaagaaatggaatacaattaaatacaatcacaagtattgttaaaaaattcattatcaaatataagtaagaatacttaccccaaccaactggtgtcggagagagtcagtagggaaggttggatcttcactagccgttgtatctcatctctctgctcctagtcgatagtaggtgtcactaattttctcaagaagatctaccacaaatggagccaaatcacttccaaatctagtctgaagcctctctgagactactaaacgatcaaagactagattagatacaccaaatcccattgacaagtcagttagcttagcattacattagatggtaatcacgttggtccattggtggacttcagttgccttagcctcaaaattcttctggcaaaattgacctgacttcttgagttgatcacgcttctcttctggtagctctagcatacggatgggtaaagttatattggttagcaaaagcaaggaaagatttagccttcaggattaattttaaagatgtacgatggaattaggtctagcatctcgagacttagggtctggaacctccttgccagtacggaatcttctccttggctctaatatcttcttcttcttttttagcttatttctgctctatttccttctacgcaacatcatctttctcctacctccgacaagatgtcgattactggatgcgctctgccttaatccatttgccctcatcaatattggaccctgacttcccgttgaagacaaatttgtcatcatcttcttcttttttatcatcaacaatgatggcctattgggtagcaagtggaacctactgcaaaggttccacttagagggcagaagtcacagcagcttcctaaacttgggcccctaccacaacttcttgagcttgagatccaggagtagcttcttggataggtgcttccaccacaattgttggggtatgagatccaaaaataacttccaagataggaacttgaggaacaacctcttgcaccttagttggaggtgttgattccttaattctagtatgggaaaatgtttcagacttgcttttccctttggctggcttcgtagcctccttggcctgcttggatcagacaataatgttttccaagaagttatttagaagccctatctagacggtctggggcttctctatgaaaaataacaacaaaggttagaaataaatggaagcaacaaaaataatatcagcaaaataaaaagctcaagtttaggtccaattgttaacaatgctatattttggaaccccgtaagcaaataatgaaatgtttttcctacctaaaaagctacctattgaaagaatcttggatacttcattaggacgaacaaatctaccttaatacactaggtgggcagaagaaaatgagtcaagctttcaattatttcatctaccttatcataaaattcgatcatggggtatctatagtgatctaattctaagaagtatgggtcaaagcctccctgatcaactcaatctaagtcttccaggtgtgtaacatagaataagcgaaaggggaattacctcttccagatgtgcttacccttggagcgcctccattcgggataactacttttaaacaaacttcaaactctgtttccttgctcatgggctccgaatgcagttgggcccaatcttccaaccatcttttgtctttcttgatggctttcttttcctcattaacgactatctccgcaatgaattctttaacttatagagagttgctatggacatctttaacgtgatagtcatctatgctctagtgaggagcaatcagagcaacttgcctaaagttggctgtggtgataagcttatccactttcaagtcctcttgaggaaatcctctatacaaggcctccctttcaagcaagaaaggggtagtagctggacttaaaaatgaagaaaagaattccacatcagatagtgaactaaatgatgggaagaaaattggaacagaaaagatagtatcatttacttgccacattgaaatccaaggaaagggttggaac

SEQ ID NO: 21653 - DNA, 2494 bp, Cannabis sativa
ataaacataataaatacatattattacatatataattaaataaaatcttcataattgagtaataatatcatatttatctattttctaataataggtctttatttttaaatgctcatattattccatatttttttagaatattaattaatttctagttttccatgtcaatttatgcggtcactaaacctgataatcaagtcaaactacagtatactaaaccatgtattttccttgggtatatttttttttccataaagtttacaaatacatcacaaaagagggtagggtttttatatctaaggatgctcgatgatgttatttttccttatgctactatagctactaacacctctatctcatctacatcttatatctctcatccattttctcagccgcccatcactcttctctgtcatgttgctccccttccttccaccccttctcctgcactacctagagtcgattttgtcccagtggcaccctccactgcatatatttcttcctcttctcgtttgtgccatctactactttacctactataacatccactattactttacgtcctagtaatattcctctaccatcatctataaatacaacatctcaaaaacttattttcttttctgtctttgttactgctcttaccatttcttctactattatgattgaatcatttgtgtctaatgttattgttccatttgttaccactattcctactaatgtttcatttgtaggccctaatactcattctatgaagacaagagcaaaattaggtatctagaaacaaaagattgtcatggcttctcttgacccaactttagtccaagctgcaatgaaagatcaaaagtggtctggtgctatggacaataagttcactacccttatctgcaacaaaatatggagtcttgttcacttaaatggtaacaaaatccccatttgcagcaaatgaattaatatagtgaaatataatgatgatggcattgtcaaactacaaatcttggcttgttgccaaagcctttcatcaataggcatggtttgattacattgaggccttatcaagcctgtcactattcggattgttctcacaattaatgtcacaaatggttcaaagattaggaagcttgaagtgaacaatgcttttcttaatggtgaccttcaagaagatatttatatgacttaaacccatagttttgttgatttcgactctccttccaagggttgcaagcttcgtaaggctttatatggcctcaaacaggctcctcgagcctggtttggcaaactctcttttgtcttcacaattttagttttaactcagccaaaataaatacttttcatcaaggttgagatactacttcttgtatctacattctagtgtatgcatatgataatattcttgtcattaggaccatgatcaataagtatcttctctaatttccaatctcagcaaccataggcattgttaactattttttaggtattcaagtcttcaagactaatgatggtattctgttttctcaataaaagtaccttcaagatctcatctgtaaagctcaacttaaagggactaaaactcagagtagtcccataaatagtggtcttaaattgcctacctattgtagttatcttgtcatggatgcttctcactatagattcattgttaaaactttgtaatatgtaacaatcacaaaacccgacatcagctttagtattaacaaagtgtaccaattcaagcacaatcctctttagactcactgaattgttgtcaaaagcatcctaagatatgcaaatgggacccttgactatggtctacaaattagaagagctggtcattttatttgcaaacttactgtgatgcgaattaggttgttgaacctgatgacaggtgctccatgacaggattttgtgttttcttaagtcctaatctcatttccttgcaatctaagaaacaaataactatcttgagaagctccactaaagctgagttcagaagcataacctttgctgtagctgaactcacctgaatccagtcattactcaaagagttggatgttccttcctctgcaattacagctatttggtgtgacaacaacaacactattatgctagcaatcgattcagttcttgatgctcacatgaagcatattgaaattgatttttactttgttcaggataaggtaataaagaaggagctccaaagtgcaatccaacttgttgactgccttgctaaatccatctttagctctcaattttttactcttagagataaactgagtgttgtctctctgtcactctcagtgtgagggaggctattagggatagttagttgaactatcctttgatagttagtaaatagttaaaaggttgtttggagttaattagttgtagtagctcttttcaatttgttagttagctactgaattgtcttaacaacttgggtatataaggcttgtattttgaattcattttactagagaaattcactttgcctttcttt

SEQ ID NO: 21654 - DNA, 2021 bp, Cannabis sativa
  modified_base (1978)..(1984): a, c, t, g, unknown or other
aataaaactaacactacgtggcttgacacgtaacaatcacctagtatatatatatgcatgaccacgggcggcctacaatatattacattccatcttaaaataataatccttcttttccttttgcatgttcaatttaaatcccaactaacaaagtttcccacaatacaaaaaatattatttttattagtaataataaaatttgtatttaaaattaaaaaaatattgtgattaattataaattaatatttttatgttatgattatatttatttttattcaaaatatttgttatggctaaaagtaaattatatagtgacaacttatatttaaatattatgtttttaatttaaataattttttattatgattaaaattcatatttaataaaaaaaattatattataacaaaacaattgttactaaagtatctgttttttattcatataattaattaatcatacttcataatatacacataagtatatatggtacgtaattttgttcttatatatgtatcatatttatagtacgtacttgtacaattacaaatttaatatatccatgtgtccaatttgttttacaaatatggtacgttcatgccagctttttttagacaaaggtcaataattaatttgttgtgatccttgttattgacatgaagaactaaccgctggcaatcagagaaggcagtaacggacgtataccctaactgtaggcaacgagaaagcccttgaagtaaagctttagctttagcaacatgaggctcaaaagatctcacgcacggagctgcactagaaaagaagacatgaccattaggattgtaagccaaagtccccatccctatcttccgatcttcataacgaatcccaacatccataaataagttgacctcgccaagagccaaatctacctcagtagaagactcttcattgtccacattacaagaagactgacccatagatgatgacctaccaatattaacatcttggtacctccaaagatagttaatagccaaggactaaccaccatattgttggggaggagcttatgatcatgaacaaaagtattttgcctatgtcaaatgcgccagctaagggtaatgaactcctcaagttcctgtctactcaaaatatccacacatcccgacaattcataatagaaggaggcatccttcaaagattcaagacctcgcagaatccaatccaaacggatagacttaagagaaggacaaaaccaaagagcatgaatagtagtctattattctaaaaacaaactagacaaatcgtagctgctttcataccatggcgagttaaattggcatatgacaaaatgaaattcagacttgccttccaaacaaaatttttgatctttagcggaagattaagttgccaaagcagcttcaactaacgagaagtcctttaggatcctaaaacttgtccccaccccaaaatcgacactgtgctccaataaccactcttcaccgaataagattcgttatttgaaaagtaccaaataagcctatcctaacgatcaaacaaggaacgcgggatagacaaaatggcactagcttaaacctcatcaaacaactcctcaactaaagaggagttccatcttccaagatcaagcttgagatcactaattatttgaagattcaacccacccgagaaggaataagaccgacccacatgatccttggggatccatgcatcttctcaaattttagtgaaatctcttgagcccacgagctaacaacatcctttcttctaaagatcctaatttcataaaatactttgctaaagaaacggcacgcgcttagtcacttcaacactcagcaaagaaccattgctatagtaaaatcctttcataatcttagcagccaaagaatcaggagaattagacaactgtgttgcttgcttggcaagtagagattgattaaataaaaatatgtctcggaagcaaaatagagagagagagagagannnnnnnagagagagagagagagaggggcgggtgtggctgatat

SEQ ID NO: 21655 - DNA, 5218 bp, Cannabis sativa
  modified_base (47)..(51): a, c, t, g, unknown or other
  modified_base (1217)..(1231): a, c, t, g, unknown or other
acaagtaacttttgttgtgactaagttacatttagtcacaaaaaatnnnnnttgtgactaaaaaattgtcactacaagtagcagtttttttgtagtgtgtcgtcttcttaaatattgatgttggtaataacgttgtgaataagtatgcatgattgacatttgattgaatatgttggacaccaatagagccattttcttgaagatcatgtagtaagaaaaacttgatgaaaatgcctttagttctatctcctttattatagtgttagttgatcaatacatttcacgttgtcttcatagagaactgctaatgttgatactgtttttatagtgtaatctatttgtttcccaaatatgttatgtcaatgatctcactcctacatattttctaattgcttcataaagtacaagtatgctagcatgatttaaatttgcctcgttaaaaccttgttaggaaaactcagtgggacaaaacctaaataagctaagggaaaaaagagtgcaatatatattcataattatttgaaagttgcgtcgttaaaaaccttgttaggaaaatccagaggataaaacctgaggtaaggaaaaaagagtgcaacctgaatatatctctctctcatgcacatgtgattcataattattttggtgataatatatcttataagattattgttatcacttttaaaatatcacagtatattatctatgacaatatatttactataactcttctagagtatgtgtggacttctaaattatagatggaaggttcttggaacatcaatatttatccaacttattgaatcattcatgcgtgtgtacatataatgttgttcataccaaagtttgaaattttatgtaatatgaacataacacattaatgataatataaatttttatttgtgataatgatggtacttcaagaccatatattttgttcaattcttattgtatgatcttgatttccatatcaaatgatcatatatctataattcttgatgcatatgaagtactttaggacttctttactaatacttatgaacacactatatacattaaatattttttaatgtacaaaaagaaataaaagttttctctccaatcattcataatataatcaaaaaactcttcaagagtctatcataacgtgttatttatgaatttatattgcataaacaatcatatatattttttgaataataatttacttacatgtcttnnnnnnnnnnnnnnntctttgtcatatagtgcacacgaccttgatttatatcacttaagacacatattaaattcttctaggatttttagataagacatatttgaaatttttaatatattaggagcttcaactacataacttcttattgtaacatttaagtgatgcttattgttatccgtctttttaagcatacgacatgtgctttattatggaagagattacatcttcatcctatactaattaaaatctcccattaaaaacctatagcaaaaaagcctcacagatgcgggaacaagtcaaggttgagaggatacacaaaagtccactctaccttatcctagtttttcggacgcggaaggtataatgtctctcctagacctagagtggtccaaacatggacagttgtccagctgatacctggatgggtactcaaagggcctattgcaaatatcaaccacctaagagtgtcgcagatgtctaccgttggagcaatccagatcgcctagtgatgattatatatgtgttttctgacacgggatcaaatcttgtcccatgtgtctaggcatggtagtacgcgcacctcatccaccttcttctaagatggttatctagacttctacttttaaaggtgaaagctttgggtgccacaggccctccagttttaaaggttaagcctttgggcaacacgtgtcggcaacatacaatggttcccaattgtcaagttgcaacaggcacgagcataattgatttcaagggacctaatagtcagctttcttttgcatgtaatttatcccataagtggtcttttagcaaaaatcctaggtgggtcatgggcatgtctatacgcacgcttagcttgtaaatacccttctatttccatacgaaggggatgaccaccaaaatagccaaagctttgccaatattgctctaagtcttcttcttcaagagagaaactaagagtacaaagttaaggtttcttgcaaaatactataaactcatcaaataagcccttaaaggctaatagactaactcgtagactgaggttaattaacacctgaaccatgtaaaaatctccatcttatgtattttttcatttaattatttctttagcttctatatatttagtttttgaaaacttcgataaatattttagtgcttttcattgagagctgaaggaagacctaaaacttctaattttgctgcaatcatggtgtttacaagaaaaattgttattaaagaataaccctcctactggaaccaatgttgttatggaggatgtaagccctttgtctctaagcctcacccaagtaatgcgggaaaaagggatacatttaacccagacaatcgagagacccaccttgacaaacaacatgatggtgttcatgaatatcaatatgttaaagacgaggaggatgatgacgatggagaataagttaaagatgagtacaataaagataactaccactatgagcgggaccccaaagtgattcaagtatccaaggagttgttcgagactcagtaaaaactagcccatcaagaaaagttttctcggaaaacggaaagaatgatggcttacctttgaagtaagttaaaatacctagacaagggagattcaaataaagaaccctcattggaatgtgtcataggaaacattaaagaaaaccctattaatattagaacctctactcctgctacggacaaggggaaggcaaaagtaggtgacccccagaaacttgcagctcccgtacctcctcagaaaagtatgaatccagccaacaggccttctcaagcatagaagaccaccgacgcctttgggcttgggcattcttttgccccgaaaggccttattgcgccaaaaaaggctggtacgaaagtactacaacccaagggatagaaaaactgccctagtgattctgttaaccaggacggtgggaccaggggacaatattttgatgatagttggttcacagcagatctcagaaggtatttggacgccaagtatgaaaaagaaaaaaatgagaaggcgaggccacattgtaatgacctcaggaatcacctaaacaacagggtctgtgagagagacctcccagagagtgacaccaaaagattagaagagaaaattgtttcttcaaacagattggtctggaaataaagcagggccctcatcaaatctgaggatgaggacccagtgccatgcatcagaaggattacagaagctctgctcccagagaacttcaagattccccagatcaagctgtatgatgggtgcacaaatccaaagattcatctagtcaaatataataagatgatgagatgccaagtgtttgtgcttctccatgactcttaccaagtatgatgaagattggttgaagagattggctccaagatcaatccactcatagaaggatttgcaatctgccttctgaaaatagtttatagctccccgcgattatgacatggagatgggatccatcaccaacatcaaaaaataggtgggagaaagcctaaagagtttcattcagcgaatgatggaggtggcagctaagactaaggtgactaatgacatgaaacttttggccctccaatctggacttgtagttggctctccttatggggagagatgcaaagaagaagagtcgtgtaatgtaaaacctgcacttaaaaactacttgttttagactttaaccatatataaacatatacatatatgtatatataattttacaagccgggatcccgagttaaaaaaatttttggaaaatagtatatttaacatatatatttttttacaggtcacatagtgacagcaaaagttaacgcaaaatacaataagacggaaccctccaagttgcactgtcgtgatatgtacaatcaatgtcgagccctcaactcactgttcctccgctttagcctttactttacctatacaaggttacaaactgatgagtcgacagactcagtaagatatgcataaaatatatatacaatgcaataccgacttgtacttaggccctcctgagcctatgtacaaggctcaccaaatggtcaagaacgttcttaacgaaagtatgacctttgtaccacatgcactaaagtaccacctctgtactagtgttggtagggccaaattgtacttcccggtgctactgagtgttgtaccacatgcactccgtacccacttgtacccgtgttggtaacaccgtaacatacccttaaacatcatacattgtactaacacgctcagtaagacaactattctaatgttagtagtgtgaacaatataagcatgcattcatagagatacattattatgctaatcttaccttgtttccaaatttaggtgtgccggtcaacctgagtggaacagcagctcgacgcttttcaggcccctaaattacaatattcataattctaatgagagacacgctaaaatactttctggggacttaaaatcaaaatcgaaaatttctctatcgatggataacatggcaataccctaaatatcgcaaagttggaaaaaactagggttcctaaaagagccccaatcggcagacaaccgaaagactggttctgtggggtttcttggggaccatctagaattctagttcctacaggtcccactaaaccggtagaccacaatgaagaggagttgtcattggcgggtatgttgtaaaaatccttgcttccataccagatgtattaactttgtcttttgtagaagaagaaaatatactgctaggaacaaccgtgctcatgactcgaggagaattagggtcaacaatctctttattaaaggaagcattgttgagtatgggtggaaaaagtcaattgagatctagccacttgaaacatataagatgtaattgtagaagtagcaacattatcactggtcaaagtacttggaaaattaaactgattttgtaacaccctaactagcataggcgtgttagcgtgattttaaacgtactgtgttgctcgttgctaaccaacgaggctattaaa

SEQ ID NO: 21656 - DNA, 3286 bp, Cannabis sativa
attcaatttaaattaagtaccttacacttttatcattgttgatctcattttaattaattgctttacttattaatttagttaattattttttacttttccaacatatgagaagttcattgtactccaaatttaaattttttggaccattttctctattaaaacttcacattcaacaactaatagtctctttgcacaaatgaaaatacccaaatatatgaaagggagagagctttgactaaaaccagagacttcaaccacctttttcacctcattttgcatccatattcatacaataaatggttgtcttctctttgctcagttgtaatctagctgaggtttgagaaaataattccagaccttgaagtataatgtatatggatttaaaattcccatgacaaaatagcaatacatcacatctatcatggtatttgaaatcctcttttaacccaattctcatcattatttgagaaaaatattccgttccaagcacgaataataatggagatattagatccccttggtgtaatcttcttttggcctcaaagtaccaatggagtgatccattaaatacatcaggttaaattttggtgttctcacacataatataatcaacaatgaattttcctgaatatttgaacgcatacaatgcttcttttataaaatttcactcagttgtgtcataagcctttcttaagtctagctttatcatacattgaggctttattttccccctttcataatgtctaactaaaactttactttctgagctaagaaatgttttgttttttttttttttgttagacaattgctcattagtttgctagagcttgtcttttgtatcttggttgtgagttcaatttaaaggatcccaacttaattgttaacgtgtgtgctagcaaaagttgatggtaaataaactaatgttgattttctatttaatatatataataatcaaaatatttacatctacaatattcaaataaaattctgaggataaacattttcggacaacacaaatattgggataatttattacaaaaaaaaaagtaaaaagttggaatactacctaatcaaatttggacggtgaaactaggtagcacacagatttttacagctcatttcacaaatgataataattatgtatcttgttttggaagaaaattgtgtaattacagatgagttaataatttgaatattagtagtagatgacatctcaaataattcaatatcgtactatacttaatttcagctggctcatgtacattaattaccatgtaaattttcttaatcatgttgatgatcgatcgagttaatttgttatatatactattatattaatatataaatattcttttaaggaaaatgtagctgtttatgcaggcatgtcaattcaaaacatagtaatatgaagaggcaaacatatgtcattgtgacaaccttccaaatttgacttaattaattagtcgaaaattaaaataataataataatgcaagcttccaggaaaaaagatgttacttgtctcttatacaatgtgcactccttccccacatgcttccgattaatataaaatatatatatatatataagaaggaaaatagaaaaagaagaaagaattatcgatacaaattaacaaattaaaatatttaaataagctatcgcctaccttcataattaatacatgattaattttttttattctgtattatacttaatgaataaattaattttaggctactgttttcttacgtactgagggccccctatcacgtgaatatgtgaaattttttaatggctgtatacatataaatattatctgtatcttcttaagttattgtacatatatttcctcaaaaaaaatatatattgtacatatatataaacttttatgccaagagctcaaatatattctttaattagtatttgatttataatgtagcatattgtatatatatttatgtatagtactatatagcaccttctttcttctttcttcttttgaattaatttctgagagagtttagctactcattctgaaaggattaatatataaaaactgatgatgagaaacttttgtgtattatataatttataaatatattaaagtacaagatgggtacattgtgtgctaagataatcacgttcatggctaatcaacttatattaatgaatcgacgctgttgatttcaggtataagatgctgaaaagtaaaacaatatatttatatatatatatataaaaagagatgatcgagtacgcactgcagctgtcaccaattaatataagaatcattttaattaccaaaaagtcttatcattacaattattatatatatatgaccttatacatgtgaacttgtcctataccatatatatatatataaaagggtttacatataaccataaaggatggccagttgatctgggatttttttctatattcagaaacaactgatgatgatcaatattcaatacggacagttataatattaattttagcaagattaaacacaaattaattactacatacatatattttggtcataccaacaatgtataacgtttataacaagaaactgaagccttttagcggttgtctttttactccgccacctcccacatgcaagggtttgacccatgaatccagatttatgtgtaaatgtaataactttttatttcttcttattattattaacatatatatatataataagttaggaggatgatgactaattatctccctatatagcttagctataataaaataataacaataatattgatctaatttactttcattaattaaaagacgagagagagagagagagatatcatcatattattataactaataataatattcaagtccaaagagattctctttggagagttgggtcttgcattacattaatattgccagaagaagagaaagtgagatactgtggaagattattggtagagaagttagtagtagtaatagtactattattattattattaatattggacaaaataaggggtttctgatcatgatgatcatgatcatgatcttgatgatgatgatgatgattatcaataatctgctgggttggtaaggtggactcttgttgcatctggatgcagagaatctcagcctgagccacagctagttgcatttgtaattgggaaacttgggtttgaaggtaagatattgcaccaacacatccataaactgggtcccgaactcttgcatttgcttcataaaccaaactgcttacagcatctgctctttgatgaagtggaagctcct

SEQ ID NO: 21657 - DNA, 2908 bp, Cannabis sativa
aacaacatgcatgttgaaccattttctcttaatgagttcgttggttgatcactaagatgacttattagaacaatacgatcaatgtttctagtaattacattttgtacaataagagttaaactacaatattaattttagatacaaattaaactgtggaatataaagaattgaaattatggtacaatattccacgaatgaagaactaaatatcctaaagagtaatgaagtctatatttagtaaagttgcctaatgaggtggagaacattaacgaagcataggtttttcaccaataaatattcattaggcaacatggagaaacataaaaatataaaataatattcattgctaagcaaattattttgaattaagaatcaataacaaatgagatttacattctcacttgtttttataaaatgttctattatagtaacattgacatttagttctgtgtaaagaatgtgccatacttgcagagaagatgactgcaagaattagaacatggagtactaggcatttgtcatttgcagggagagttgtcttgatcaattctgtttagttatccattcatgcctattggagtcaagtcatgatcctacccaagaaagttattaaagacattgaatcaatttttagggctttcttatgaaaatggcaacactttcaaggtgctggtgccattgcttgggacattgtttgctaagcgaaaatagtagggaattaggtttaaaagagtcaaagaatggaataaaggtgcaatgatcaaatatgtgtgggccatagcaaagaaagaagaaaatctgtgggtcaagtagattcacagtatatacatcaaagaagataattggtggagctactctattccatgccaagggagctggtattggagacgattagtagctctgaaaaaccaggtatgctctattacagattctcagcaactcatagtggggaaataccagatatctatagggtacaaactgttgtgccttactcaagataaaaaattatggagtgagcaggtttgggtaaggttcaacactcctaaacacaactttataatatggatggcagtagaagggagattgagatcggagagactacacagatatggcattattgacaatcctaactgtgtgatgtgcaacaaccatgaggaaacaaatgatcacttattttttggttgcaacacgtctatgaaatttttgacggaagttgcaacttggctgaactagagagctacagataaaacattgactcgaatcaccaaatggttacacagaactatagctaaaagatttcagaaaataaagtaatagctgctggtttagctagccttgtgtatcaactcttgaaagctaggaatgatcggatatggcaagggaaggagcaaaacatggcacatttagtttgaagaatcaaagagactgtgaagcaaagaattgtattagtttggcctaaaaaagttagtcataaaaatgaggaatggtttaatactttgtaaatttatgtatagaaaagattaggccatagctaacttgttatggtgcttataaattgtacaaattacagtttaagagcaataaaattcacctaattgataaaaaaaatattgacatttgttgctcgtttcaattcattaattaattccaaacagtgaactagaggagaatgtatacaaactactataaaatttttcctctaatagtggtgaacatatgcaatcttaaagagtttacctatagattaaaataaatttctcacaattagtatttcatcttgtcatttttttctttagttttaaaaagagttatgaattagttatataccagaagattagtagaagtaatatttattttatatatagagaatatattacttgcaaatgatgatagaagtttttatataaggtgaaatgattcatatctcaaattattattttgagataaagaatataaataacatatataattttaattagttagagagtaaccacaacatctttgattaaataaaattatgtattattcacctcattttacttttatctttaagtgtgataaattcaactcaagcctacatctgaactggaatgagaataaattaagaacattcatttatttatatttttagaagcctaatatatacataagagtctcaataagattttgcattgcatatgtttcaggatcgttaagtagtatcagattaactgaagttaagaccattttctttttcatacaagtgatgaagtatgtttaagatactaaagatatacatactttattaagatgaactgattatttaaaaatttaaccacttaagttatgacttcactggttatattgatttacgtaaatgatcaacatttgattacgttcttcagattaccaataaattgtatcgtggaaagctttcctaaaaattacaagctagtagagattaaatttgcggtatatttgtgacgaaatatatagtaatgtgtaggggtgttcatccaatccaattcgcactattttactcatagttcatccgatccgcactaagtgcagattttttgttttttggatctaattcaatccgcacaataactcaaatccaatgcaatccgcaaaagtgtggattggattgtttattatggattgattacttttttaatattaaattatttaatatttatgaaaaaatattctttttttacataactagcaacaaattaaaacaaataattgttattttatgtcttcatcaataaattaaaataaataaaataacaagtaacaaattcaaaggaagaaaaaaaatttttttgtacaaaaaatgtttaattttattaaagaaaaattatatataagaatgaaatatacatttaatctataaaattttgaaatataattgtattatatatat

SEQ ID NO: 21658 - DNA, 4945 bp, Cannabis sativa
agtaaaaagaatactgatttttaaagaactctagttataaaaaattatataagaactctattttctatattctcatctttctgtttcattgattgccagtaaaagttcaaggaagggattcggtcaaggaaaaaacctctcctccttgctctgaaagtttagcattttggtttaactctttaataacctttcctgttgttctaatggtagaaaagggaagagagaatcaaaattttaaaacataaacatttttataaatgattagttttaaataatttattttataattataaatatttttgaaataactaaataaatataattggatatataataatttaaatatttaaaataggattattttgggaatattgaaatattaaatgcacttaaggtactaaaatggtactttttgaaaacataaggtaccaatggatcattattcataactgagggtaccaaatgtgtgtttggacaaaacacacgataccaaatgagcatttaccgttcaaacaatattaaagattacgaaaaattgtaaatgacactcaaaatttatagaggtttggctccttttaacaataacagcttactcccctattggtgtattgctttaatgaaagtatatcaagatcacaaggtctggcaagcttagtttttcaatgtctctcgaaaaaggttacaaatatttgtcgagtgttctctttgttctcagtgcataaaacccgaagtccctagatagtgaattggcctcactatctatagggaagaaggaatagataagtttccccaaaaaaaaaaataagagacaaattaggaagggtttgaatgtaaatcccacacttttctccattcgttaaataaaatctcatgaaaatagggatactaattgacccattattgtggaatcagttaaagaatgtatttggacatatattcaacgaatgcctctggtcagccattcgacatcatctagtctggtcagtacaaactgatgtcatattccgaccaaagtgaacctccttgccacatgtcagcttgccaggtgcctcatcattagattaaattttgagataacatttgtctccaagtcctcgtgagaaattctagtcatacaaggactatctagaccttgcacgttgtacggccaggcgacacgcgtttgtacccacgtgcctgcataaatatgagattagcgttgcctgaaacaagtgaatccttccctatcctttcaaatctttgcattaatttctttttcttggaaaccacatcttggggatcgtgcattgacgattacacaacctctgtaatgattacctttttgctttttttttttgtgggggggggatggaatattttgaaatttaccccttggtaatcctataaatgggatcaaaaatatccatttgtaatttttagccacttaaaaatatccaaagcaagaggagagatattctttgagaaatttgccattttcaaccctgattggaccattctcagtgaaaaacttcaaccaaacaatcaagtagtgagtaagttacttttattttgaactattacaatttacttcatgttctctgtgaagcatgttgacactaaaaagtggccaacattagctcgttagattggcgagatggataatgagtttacgtaaataatttagagagaaacacaagatctatagtagttcactccccatgtcgcgttggtaatagagctacgtcgacttcaagtttttatttctcacgagaattacaagaaaattggctaagtttgaaagctttaatttctagagagagattctttgacattagaggtatttttctgaatgtaaaaaatgagctagagaggttctccttttataggataagaggttctattaaaataataataaagtattgcaaaaaatatgaaaaaatatatttaggctacattttactgttgatgatgatctaatagtgaaattgactctagaggtcggttgtcaatttttgaaacttgagtcgcgtctatgggacccactttgtgtaagttgtagcttaaattcgtaactttcttgaggacgaaatttgtagttgataactttacaattgccattggagtgtgagacacaaattaatagagcattaaattggctttcaaaatacaagttgaatcacatcaatcaaatcaatattgagtgagttatggtcgttttactaaacgttgttctactcccagtgcccaaacataagacgtcaacctggacgatggatgagtgggaaaatgtgttagggatgtactttttgatgcgtaagtgatattttgacatcacttagctagtttttgttttctgatgaatttggccaccaattcttggagttgttattgttttgcgaaaaacgggagacttgaaactacttgatttctgaataagccactttgccaaaaaagttaaaatatgaagttgtgaattttactcttctgacttcatagctcttagtcactataaaaaagtagacgaatagtcaagacgaaataaaaattggataagtagagcccagtgcaccaggccatatgtcaacctaggcgttgagtgctctttttggagcttctaggttgggttttgatacttctaaagctcttaaaatcaaggacgaggtctcctaccctattttcaccattttagagagaattatcagagcagaatctgcaattgagtgatcaaaaccagcgcaccatgtcattttttaacttgggcgctgggcccaacactaggtcaacctcagcattagctcaattttgatgcacttggaattttcatttcatccccgagtttacttgtatctttgttatttatgatgacaaaaaatattcccgtaacactttttcaaaaaactaattggaaatagcccattgaaaatatgtcaacctgggcgctagacctagtgccatgtgtcagcttgggcgctgggtccagttttaggtctttcaaaatttctatttgttccccgaaaacacttgaatcttattctttaacgaaaatggagaatatgcttggaagaatttttggaaaaagtcctcagaattggcctaagttgatagaatgtcaatctgggcagtggcctaacactagatgtcaacccgagcattggtctttcattttggcctcttggttagtctgtttcttcctcaaaagcacttgtttccttatttttgatgaagacataaaaatacccatgacatattttcagtttgatgcttgaaagtggcccatgttgacaatatgtcaacttctgcgctaggtgcctggggcacttagtgttgtgggtgctaaaaaatgaaagttctctgaatttaattttgattcctcaaatatgtttgtgagatgtctaattcatgtcctagtacaaattttgacccatttgtactaagacaatccaagaaactaaaaccctagttgggttgtcaacctgggtgctaggtgaaacactaggcgcccaggttgatttatgtggtgttgtttcatctattttcaactcttgggccttggacttggatgcttcatgtccttatggtgtagaatactaaaatagtgagttggaaacaacttggaggaatccaaacacccattttggaatcccaaagttaacctgggcgcagggctagggactcctcctaggttgacttgctccgggatgttttctttcttgcaatgtgtcaaacattgatgtccacatcattatacttttggtgtaaatattttccccgagtcaactttacacttgtgcgaggttgacttaatgacgtgaactaagcttgtttctctcgaaactactaggtgggcctcaatttttcaaatcttggacaattgtttttcttcttcaagcattcctactgagagtcggattttgaattcctattcccacttgaatagtagatttcaaaattctaagtgtaaaaggagaagagaaaagatgatcatcttttcttatcatttatcttttccttttcatcttaaaatttaaatgactccttgagtgctttcctttgatttgagatatcatgaaatcatgttaataccgtattctcgatgtcagctttgatctttggctattttcttagcattagttctcttgtcacactgctagtttaagtaatatagatgtagtctttgttccctcgtaggttgcatccttggaggtgtttatcattctctaggttgtactttcagcaaaggtagtcttaatattctcctcaccttcactacagaggaggcctttgtcaactccttagctttacagcagaggaagcctttatcatctcctcggctttatagcggagtaggccatcaacatctcctctgctttataacgaaggaggtcttcaacatttcctcgactttatagcaaacgaggccttcatcatctgctaaactttacagtggaagaggtcttcttgacgactgtcaataaagtgttgtagcattcgttatctattcttcgatcaagataggggtgaaatcttccccgtctctagtgcaccttagagcgattgtaggtgcggtatccattttgtcttggtcttaaccatagaggtcttcatcgtcccttttactgtattcacaacggaagaggccttcattgtctcctcaaatgccttgacagtggaggaggtcttttacatcccctaagttgttagcatagtaggggaggtcttcttcataccctcagttgttagcacagcggaggaggtcttcctcatctcctaagctgttagcacaatagaggaagtctttgtggcgaatgtaaatgatgtgttataacattttcatgcaactctatggatgccaaggagacagtagataccagatggtgtcgagaacttgacagacaggtggtagataggtgagatggcttggaggtcgtagggtcttgacctaccatggagacttggtgtcatatac

SEQ ID NO: 21659 - DNA, 4157 bp, Cannabis sativa
taattagagcattttttccatctcttactaatgtcccaataaagcttgaaagtatgttttcatttttgttatggggctgtcctaaatcattacatgtgatttttatcttcccaccatcacggtttccccagatttcacgcatttgtgtaggacctcgagttttcttctcactattgtcattcgttaatatatctgtaaatgactcactacaatcttgtgttgccaatctatatcgcatgtatggatccataactgttcagattttgaatgaaaaattaactatttagtaacttatataatttgcttcattctaaaatcatatttagaggacatgatatttttggcatagaaaatagtaactcatagccacacatatataagaagagcaactaagaaacaaactatataatcaaaaaaacaccacaactcgaacctttctctcactctgtctctctatatacaaattttgacaaatagaaaagtcattcacaccttaaattaaaacttaaagaaattataaaacttgggttctccacaataatagttctcctatatgcttctcttctacaactcttcttaagcaaatataataaatgataaattgaaaggagatgatatgaaaataattttttctctcccctgccctcacctttttgtgtgaaaaggtgaaaaaataggagagactatgatcttgtgtgtctatgaaaaggatgattgagtgtttttgtatatgtctaaaaacaatcaaaatatttctgtgatcaataatacatacctatttaaatatttaaatgagattttatttgtgaagatggaaaatattttgaacaaagctatttgtgaatggtttgtacatctctgattctaactgacatagaaatgtagctaatgtaacttgatttgaattgatttcagcctacaagttgtagtgctgaaatggtatatataggaagctagaagaaagctatgattaattcagcatgtcatctctcatatcaaattaaaaaagacaagaaagtattcttatgattctatgtagttgatcatatataaattaactcctaaatagaagaaataatattaaaataaaattttataagacacacctgttagcgtatgttcatcaaccattttctctgtaatagaatgaaaaagtaagtgggcagtgaaagtatagatggaaaagggtatatctatggtaagtggtaaccaccatttttcattacgcgctcttttcagaaaaaaaaaagtgaaaaatccgcgctcttttatatatataagtgaaatgtgatttttttttggttaaaaaacataatagtaataagattttttctaaaaaaactttatcaattattatttaaataaaattattatgtaaagaattaaaactatatttatataatatttaaatacataaaattgttaatcgtatttttcggataatagaacgatctttttttaaaaaaattattgtttacatatatatattcataatatcaattgcaacaaattagcttctaactactcaacagaattagataaaaaaaataagtgagaagggaaaagtataaagaaaaagagactcacctatttatcagtacaaccagagatcttgagtgtgaaggaaagctcccccaatgcagtgtatactcaaaaaagaactttaaaagaaaatcaaattgttagaattgagatatagagaatatacgattgaaagtatagaaggttaccactcgatttatgtgacttgaaagctccattgatgatataaattgatcctttgatagtgcagcaacagagcttctctgtgaggtgagctccatattaatgataaaaatggtttgtaatcttctgtctcttacttcaaatgtgtgtttgtattgccttgtttttttgagttttggtttgttctctaaagttttctttctagatctgaaacaaattaatttggggcttttcatctctccaacaaatatttagggtttttatcagcttaggaaaaaggtataaagtattcatatatattatttagtattaatatattcttttcaattaatattgagttaatgtgtggtgtttccttagccatacacgttgcattttgaaaaaatctttggaataaattttaagactttttttttttttatagaaaattttaagacttttatttaggtaaaaaaagtataaggctttcgttttttttttgaaaaacatgactttcacatattattattagcataactatatattgaattatttcttttgattcttttcaattaatatttaattaatgtggtgttcctgcaaccacacacgttgcacttataaaagtgtatactcttttttttttttttttttaaacacaataaaagtgtagggtaattctataatgtacccctaaaagggatgtactgatacactctctacttgtccaaacagtagaaaattttaagaaattcgaaataatttacaatatagaaagcaatgttcaaacagtcttattttacatgcgtacgtataaaataaaatatcacgcgtgcaacacactacttcaatgcaactttcggtgtatacttaagccactattttttaatttgcttttatattttggtactttataaattaatcatgatatataatttgttctaaactttttttaaaatatgtactttgcttttttcttaataaagaatgtattttacttgattaattgatcaatttagtccaaatttaatatatattaatttgtgtatagagtaggatttatatcaattagtttgttcatagttgagtcacattatttctgcataacaattttttttgataagtgtttaataaaaataatattttcttctaatgtattaatttgatatatatttttttaaacacagttttatggataagagttggatgtatcattctagattaagtgattcatatcaagaaggagttaatttttttcttgattttgcatttaaaaatgcaagtcacgaaaacaaaattgtatgtccttgtgtaaagtgtggcctaatttcacctgtcaatcgtgcaattgcttatgaacatctcatatgtaatggatttgtggagggttatactaaatgggtattacatggagaaacttctttgcatgctacacaaaatactgagagtactcctatggatactcatgagtcaaattataacattgatattgatggagttatacatgatgcatttacacataatattggtgaagattttcatagtcaaagtgatgagccaaatacaaaagcaaaagaattttacaatttgattaaagatggagagacagaactttacccaggttgtacgagttttacaaagctctcatttgttattcaattatttcatattaagtgcataagtggatggagtgacaaatcatttgaaaatgtacttgagttatttaaaagagcattaccaaaaggtgaaacattacccaattctttttatgagacaaaaaagataatcaacgagctaggacttgattatgaaaaaattgatgcatgtcgtaatgattgcatgttgtatagaaagggacatgcaaatgacacagaatgtgaagtttgctctacaccaaggtacgccattcaatatatactatatttatatatataatattcttttaattcacatgtagattagaataacaccattttatttatctaaataggagtgaagctaaagtgttgcgccattttcctttaataccaagattacaacgattatttatgtcatcaaaaacatctgattttatgacttggcatcataaaaaagatcatagaaatgacgattgtatgagacaccctagagattctccagcatggatgacttttgatctcaaacataaagattttgctgcagatcctcgaaatgttagacttgggctagcttctgatggaatgaatccttttaagacattaagtgtaagtcatagtacatggccagttattttgataccatataatcttcctccatggatgtgcatgaaacaaccaaattttattatgtctttgctcatacctggtccagaagcacctggaaataatattgatgtatatttggagccattgattgaagagttaaaggatctttgggaaattggagttgacacttttgatgcatctacaaagaaa

SEQ ID NO: 21660 - DNA, 6426 bp, Cannabis sativa
  modified_base (3874)..(3877): a, c, t, g, unknown or other
  modified_base (5015)..(5032): a, c, t, g, unknown or other
ttgtttaaatcccaaaattgactcttggtgttaaaccccaatatatatcccaaaaatcaagtctttaataaatagagaggatccccacatgtttaattgatagggacaacaacccattaattttctagtgttgaacaattaatggtgactttgaattaacttgttaatgattcaatgaaagaatcaaacaagatcagacatgaattgaacaagtatcagcatactgatgtgtgtcacaacaaagttcaagacatcattaaagctagcagctttcactaattaacaatctaatctcacaaccccaattaagacttttcttaaaagaacaaagaaaagcattaaagataaacaacaccattattgaaaaagaaaaacccctttttaaaaatggaaaaagaaatacagagtttggttatttttcacagacctgaaattgagaaactggccaaatgcaataaggggccaaaagtagagaggtggaggccatgaaagggttgagactgagaagagagagatgaactggattagcttgatgaaatgagagaccaaagccatcacttttgatgggtctcgagctttcccacacaagtctacccatgtttgtggataactccataaccaatagtagaatgggaatggtaggattactccaatacatgccgctatccccattttctctactgttttccttttcactttctcgggaaagttctgattttttttttctttttctcttaaacacatttgactgttggagtcgggagttagcaatagcaagcatggatatgggcctatcatatgggccactagtcaacaatcgccccgggcccaatttgatttaggctattctttatggataagtgagaattacactaattaaatatacctgtaaaataattttaattggtaaatacttttatttataattaaaatatcaaatataattttatataatttattaaaattagagttcctaatgtatataacaagaattaaaataggagtatacagtataattttctctttatttaaagtaaaaataacttttatgaaaaataaaaaaaaaattaaaaattaaaaatatggaaaaacaatacaagttaactagttaccataaattattttttttcttcatgtttttcaaacttatttttattttttacataagaaaataaatcatattttttttataaacttttgccaaaaaaccataaaattgaaaatgcccattttcaaatgaagaatcatagtgccactcaatttataagtaaacatctataccacttttcatttttattttctagcaaaaaaaaaacttttgaaacaaagtgatataaatcaattcaaatacagtgaaagccataagtgtacattgaattgaaaaatgacaacaaatataactaataaaagcaaattaggtttgactagtgtagaatgtgttgtacaatctacaataattatttcattatatttttataaaattataatataattaaatttagtttacattacatattgactagtgtctagatctagtactaaaaaaatttgtacaagtatttctaaaaagaaaaagtctatactaacaaatgataaaaatcaataaaaaactaagaaaatgtacaaattggggtttaaaatctccaattttcagttaaaaagctcaagttgtggtgggcaatagagctctcaaatcaaatctaaacatctctaaattattaaattaaacaaaaataaaaataaagatatgttaattaatgaaaacttgaagatcattaaatattattattttatagctcttaattatcgaaatagaaaaatctcatctcaacttctttataatagaaaattcttcaaaatttaaccttgattaaattatcacaattaataaaatgttgaatacctaaattggtggttaactaaatatggttcgaatcttattgtaagagtagtagtagtacaagtactatatagtctatagtgagatatataagataagaacatatatgtattaaaaaagaaacaaatattcatatttttatgtataatttagtatagattacatacatatatagataggtacagataatttatgtcaattctgatgatgagtctgacaatattgaaagacatgtataaaatgtgtagttatcgaatggccacttcagagatggaactagattcatttattcatccattcatattgatttgattataaacaataacaccttacacatttcaattcacacaattattgttatgtgtttatgggtccccccaataatatatagatatatgaagggaattaataaataaattataatttatatagtttctaattagctttttttttttcctaaatccttagttgtggatcttttatagatttaggtgtgacttgatcagtatctttgattttattattgcgattaggtttttattaccacgattagtgattttgtctctctttaatatagtttttgagtgttttttgtttatgttagtatgattagtcttgtctctatgacataattttgttttgtttatttattagttcgttattattgttcttcaatggctcaccatcaaatcgtgtgttgttagtagttggcagggccgatcttaaaattttagagctataggaaaaaaaatatctttaggctctttatttagactaaatgtagtatttttttaaaatcaataaaaaaatatgtaattttaaaatgggaaatttttttttaggctcctggactaggtggaccttagacacaagtactctagctcgcctatactcagggccagacgtggttagaaataacaagttctctgcgattgaataggttgttagtgatgtaattacataccttgcacaaaagttgagtgctcaaattaagtgtcaaattgtaataatttatattgttatgtcttataagtgtgggagaaactgaatatatgtgtttttaaagtaaattttgatgttacattattttttatataattttattttagttccttctatcaaatgatttgggatcatgtagtcgattgattgattcgttttttcaattctaattctaatcgtgtttttagaatgagagatgtattaattgaattacaaactattttaattgattgctatcaatataaaattgcatgattaattttttaaaaaaattaatattataaattattattgttatattgtattagtcatgttatgttataactttaattatcatattcactcattataattataatttaattatttttgtcaagacccattatgattttaattattattagttaaatgtatggtccctagctagctagctaggtcgataagaaaatttcatacacatatataataattttagttgtaattatattaatatgtcaatttatgcagcgatctatttttttaatcttttatttagtaaaatggtcttaattgttacccatttaattattcctttttagaaatctaaataacaaatatttatttatttatttatttatttttattgtgtccaaatagctggttttataactttattctatgtaaataaagtgaattactattattaatatattagaccagatttgtaatgaaaaacatattgcctttttttcactgacaattaattaatattataacataaataaatattgatattgtccttttttagagcacattagtatgtataatatatagtacattgttcataattaattaagtactaattaatatctgggtgcataataaagtagtataatatattgttatatatgtagtacattgctatcatatttagtagtgtctagtattttttataagtaacatcctactattagttagcgatattttttaaannnnattttttttaagttatataagacttgatacttaattacactaataacgatataacaccagatgtattaataatactttttcgcatttctcttttatatagcatgccatgcataatttaaaatttttatttataaattgccgacaagtcaataactaatagaaggtttttttttatttttacacttcaaaataattttttttaatatatatttttacagaatctacatagcaagccacataacaaccatctgaataacctaaattgcaatcaaaatttatatagcaacctactggagtaactaccagagcaatccaaaccgtaaatttaaaacaatgtatataaagtaattctcctaactagtatataatttatttttcctagtatatatatgtagttaattataagtattacaaaaaataactatctttagtgacaatcttttagtaacaacataatttttttcaaattaattgtgagttttagtcgcaacaaaaagttatttgtgactaaaacatattatttagatataaattgttactaacttaggttattgtgactaaaaatatatttagctacaacaagttgtgatttttgtggctaatatttttaagcacagaccttttagttacaatgttaaaatgatgatttataattaattataatattttttaattttattaataaattttattgtgattaaaagtaaaagaaaaaaaatttatagtgacgtgctatttataaatataataataattaatttttctttgttgaaagtaggtatatattatattatgcaattaataatattagagggaccacacatttttgaggcaatggaccactttaccccatgtgatgccagatgccaagaattaaagactatataaatacccttttaagatgattatcattatatatatttttaattatacgtataaatatatatcaaagacttatcataataaattattattattattattattattattattggtgctataaattaaataaaagaaaggcatatgtacgagtacatgcatgtctatctctattatggaatgttgcttatgtatagtttcctatatttatcaaattaagtttaatttaatatgatcttattattattattattannnnnnnnnnnnnnnnnnttattattattattattatgtgttttgtggatattatatggatatatataaattattatatataattattagtagtatagtttcctatatatatgtacaaagtttaattatttccttttttggcataattttacagtatcttatattaattaaggatattaatatataatgtcgttccctaacataatagtccaagctttataaatatatatatatatatatatttaaattatatattgagagagatagaatatatatctaagtcctttgaattaattcgatatatttataatctaagaattaaaattatatatatattatttcttatgtagtcttacgagttagaaatgagataattaatagctttttgaaataaagatggattcgaactaaaaatatgttattgaatatataaagctatataggcttacgatcgaaagatcagaatttgaatcgattcctacttcataatttatatatacataattaacataaatatatatattctctctccatatatatatatatattatacgtacgtacacattaattaattaatgtcactatatatatgttcatacatatagtcctcaccctatataaattcattaataagttatgtatataaattattcaaagaaataaatggagaatatatagtcaagataagacttcgttatagttaaaatatataataatgaattaatatctctccaaaaagtgtgttaacgtaatctcaatatcgtaagctaagtaatattatgaataaattaatttataaaaatattataataattgtgatttttatgatttgatttgatgaaatcaataattatttttcctttcttaactacaaaataataataataataataataataataaattatttcttcttttctagattatatgctaattagatagatataatattatgtagatccatagctcgagacagctcttattaattaaacagagtaaacgttaataaagtaaattaactactttgatcatgaaccaaataatttggaattattattattattatttaagaagaagaaaaaaaaggtgacaatagagaaacaaaaaaaaaataatgataaaaatcgacaagaactctaatatgttcaaaaatttatgagtgaagtatataaatatattggatatgatcgaatcatatttttccaatatcaaaaagttgtttttcaatttaaaccacaataattgtgctatatgctcaacaaaagaatatactttgttcaattaatgttcacatatatagctctctctatctctttaatataaaagttatatatatatatatatatatgtaattatataagtatgtatatactaattttttttttttcctttttcttcttttcctctttttt

SEQ ID NO: 21661 - DNA, 6026 bp, Cannabis sativa
gagtaaagatccagctagaatttactttatgaactaagccacataagtttatgtttccactgttccctttatttcttagcatgctgattcccgtaactagggcttcttcgttactttagtgtgcaatgtccgtgagagtttcagaaaatgtagaccacagagaattgcagtagttttttttttttttttttgaaggttattgagagccgtgatgagggtattcgtattttggaagtacaaatgagttctattgtagttcatacgcatcttttttttttcaataaaattccaactgtatagtctattattcgctgtgcacaaattctatcctatattgagtaacacttacttctgttcttctttaaattgtttgtgcagacggtaaaatgtggagattattttcaggcggaagatggtcctagagaattcggtaacatctgtattaatactaagtggataagtaccactaactcctcgttagtgctccgccatcttgaggtgaactacaaggaggtaggtagttccattttttgttatttttttaaataatattttgctgttccagtcatgtctctttatgatctctggctgtttctcataagtatttagattttagccagtaggagggaaaaaaaacacttccgattgttttcattttttctagtttgggttcaaacaaaaacttgagaaatcttttttattattaagatatttagaacaattataaatgtgttaataaaaaagagaacattctaagaagtttcttgtaaaattttaagaaaatatcgttctccatatttccttcactcttttctctcacaattctttttataaaatccaagatcttaacaaagccagtctgaaaagaacaaaaccagagtttttgttttccctttcagttttgtaggattgaaattcctcctcaaccatgcgatatttcaataaaccttagttttacagaacaggaccataataataataataaactagctatatcggtatttcttctccatgaacattaggaattcaacacttcctcgtgttgtctaaattcgatgtggggtatccagatgtatacggtcattctagatgagtttgaagagggcgcgctggttcaaccagcaaaaacataaatgaaaagcaactcaaatatataattcattttaaatgtggtgtaattttattgtactaacctttttcaaaccttatacgtgtattgcctaaaccatttcaattctttttgataatagattaacaattctttccatatttttttttcaagaaccaaggttcttaatctgggtctatgttgtagaaattcgtaactcttatctgtttttcatgtcatctagttattgcttcaacactcttattatactttgttgttataaaacaaaacttttcgtttttgttgttcccaagaaaatgcgccggtactttttcagacccatacaaaatatgagaaatgtctattcagaacattattattatggtgttggatcaactagactgattttgttctctacagtctgaagagctgcctaagtctgttctgcatattcaatatcccgaatggccagatcacggtgttcctgaagatacaacagctgttcgcgaaatgttcaaaagagtacatcaaataccaccaagtattggcccaattgtggttcactgcaggtttatctcttatttgcgacttatggctctaaatttcggtaatcacactacattttcagctgacacaaatacccctcacacagtgcaggtataggaagaactggagcatactgcgcaatccataatacagtccaaagaattcttactggagacatgtctgcgttagatctcgccaaaacagtaaccacatttaggtctcagcgtattgggaatggttcaaacactggtaatttaatttctactttggaatcgaaatcttaatcaatgctatggttcaaacactggtgaataatacattaatactgtcttgcattaacttttaggagcaattccatttctgttacttagccattgttgatgagttggaagatctcatttctggggttagcggcgaaggaagttcaaagagtggtactacttccaacacttttgattgaatttcttatgtttttgatatttgatcagttgaaaaagtgaatctatatattatttgtttggcattcaggtaaatgagagcaaatactaaatgaagtttacaactccatctactttgttttggccaaattaaccattttctgattattggcataaaatcaatttgggatgtataaacagtttacctacgtccccaacatttttcaaaaaaatcgagatgggcatcgttccggggaccttggaatgtaaatttccttatagctgcattgatagagaattatgcctttcatgagaatggtatttgttcctccttgtaatgcttctaatcacttttgatgtctttttttggtggactcctttttctcacttttatttttggtatttttgctctgtttccacaccaaagtctatgagtttgtttgatacataatttgggtttctccactttgatttattttaagttaggccaccaaaaaagaagaaaagaaggaaaaaaaatcatgtgatatatatcttcttgaagttctaaacacaactcaaataagacacaacacgaaaaatatgggtccccctaaaacctaaaagcatgaaaggccaaatggattcactacctgtccttgttgcaccagtcaatatatgttactttgggaatgaatgatgaatttgaagttgtgaatgtgataaactacttgtttctattgttcattttgttctatgacaaccaaaaatattatatttaatgagactcaagttccaaatatgagtgagtggtgttatatgagttgtaattgggttaaggagatatttggtgtgaattgtgagcaactaattggtgtgtttataagaaaaatgctagaaggcatgtatagtgcataacacatttttttaatgttatatcgatattggttcaattaagtattggattctatatatcttaggtaataactttaaggtggggatatcttgcagcgtccccgaatgagtgctgttatcaaaaaaaaactttaaggtggggatatttataaaatatacaatctaattcaatttgcacaatttgcaaagtgtggatacacacttgtgcgtattggattcaattggattggaaaatttaaaatttgtacttatacagattgaatattttttttttttgaaagaaagcgtactttaataaatagaatagttagatttcacggtcattacataatatgttaattggaatggtagatatcggaataatacaaaactttttgtgggtaaacgcccatttagccacattatgagtggcaaaattacatgtcctgctaatattcgagaaaatataactagtaaacaaataagagtaactattacaaaaagagacatagtttccaataacccaatgagtcaccttcccattaagagcattgataactatcctcgagtcgctctccacaataacaaacttggcatctatatccaaatcagcagaaatggccaaacaacaggccaccgcttccccgcacagggcatcaataattaactcaagtcgtttgaacccaaaccaccttaccaagatggttcctggctacaacccctgtacacatgctatcaagccccactttaacatcgcaattcaatttgatccaatcctgaggggaaggagaccagctctctttcaggcaagggataagggaaggaaaaatagtagcatgtaaatctgcaaaagaaaatcgaatagagtcaatacacttcttcacgtctactataaggttattatgtaccttgtcgttccaggtgcgccagatggtatcaacaaccagagatgcatacaggaaaacttcctccgctacaatctccttgtgtttaaggttccaaatgaatttgacccaatcttacatacagataccggtgtcacaaattggataaatatctcaaggagaaaatcgccaggcatgcagattgaatattgatttataaataaaagtaaccgatgtaatctaattcacactatttaaatatatatatatatatattttagaaaaattatatgtacgattcatattttaatgtaaaaaataaacttaatagatcaaatgtatattccattcttatttataagaaaatatactttaaaataaaaattaaactttttttatgcatacaatattcttcctttgaattattttttattttattgatggagacataaaaaataataatttattttattttgttgttagttatatgaaaatatgtatatatttaattaataataaataatttaatattaaaaagtaataaatctaaaataaccaatttaatctgtatttttacggattggattagatttgagttattatgctcattgacttagatccaaaatatgaaatccacacttagtgcgggtcaaatgcactatgaacaaaatagtgcagattgaattagatgaacactctcacttttatgaaatattgctaataattatagcatcacctctaagtgatgataagcacaactgatgtccattagcaatactcatttagtaactagtgaactagattcacaaaagtactaacacaaaaagaggagtccaatttgagaatgttttgtacaaactacaaattacttttatgaaaatttttattagtaaaataattttataaaaaatttcattagcaaaataatctcttatggtcgcaaaattgaccataagttatactgtgcgactataaatgaccattatggtcgtaaaacaactatgaatttatactttgtgactatcatggtcgcataaagtaaattaagtgaagttattttataaattttaatattttaaatacttagttgagcaaattttctccaatttgatggataaaattgctaaggtgcaatgaagttagctattgctcaaaatgatgagaaactctagtactaccctttccatcatgacaaaaaaaaaaaaaaaaaacacacacacacacattgaaggctctttcaaacatctcatatattaattatgataattttcaaacatttcatatattgattgtactgatgtttttattctttcatgtaggtccaagatttcaattgaccttatttatatgtaggttttatgtttttcatctttgattttagtttattaactgtttgattgattgtgttcttgaattttaactttgttatcttatgttttgaaaaacattaggtgtcattttcttaactatcaactcttttggatatgagggtgatacttcaaaagacagaaatcttatttatatatttcgataaaatattttatacaccaccaaagatttccaacttgttaattgttatacagttgttgtcttaaaataatgaatgaatgtataataaaattaaatatatttgtaaattataaacatatcctatttgtaaattttttatatgtataataaaattattaaaagggtgagacttagaaaataattaaataaatatatttcattaataaacaaatggatataaagaataattaaaagcgttatattatataagtcttaacaattttaagaaaattataaataatttataatgtcgaaaatataatttacatttgtggtacgtgtgcctgttggagcaaacaactattaattttatttttcatatcataaactattcgaaattcccacaaaacaaataaaaatatatgttatatcatcaacatacaaattacaataatgtatataaaaaaattgaaagacattttttctaattgcaaaaaataaaaattttgttttcaattagcaaaactcatgcgaatattaagtaggagtatcacttttgcttctattataagggtattaatctgattttgatacttaaataaattatatttttttttatatgacaacacacattattatatcgagttcccatcgaacactattaaaatt

SEQ ID NO: 21662 - DNA, 1573 bp, Cannabis sativa
tctccacgggaagtcccacatcttgagcccaacgcaaacctactagtaaagcaactgcttctgcctggaaaactgaaaaagaacctgtaaatgagatagttaaatcaataagtacttttaattttaaaactcaaaaattttcgaatataactgtaatagagtgaaaacccgaagggaaacccctttggtttgactctttacctaacttcttagcatgataacataatagtataaatttaaataatcccccacgctaaagcataccatatatctattttgaaaaaacataactactaaaattctttaaagtttatccaaataaaatccacttagaattatttggttaaaactatttaagttgcagccacacttgttattattacatccttttataccttcataagtagatttgaagcataggacgataatcaactattaaagatgggaattaactttcaaaattaaagaaataactaccttgttaagatcatcaggaataaggcaaggagagaataacagaagaaaaatcataaccaataccattccaaattgcttttcattcttatctgtgtaaacacatggcaagcattagatctatacgatcccgctgtcggttgttcactttttgaggtcaacaatactcaaaaagaatagaatccaactctttcctatttaatatcttaaggcagtgtttaagtctattgagcttacccataatatagaacaatcccttgccattaattcttttgcaccagttcttcaaaacagtagacaaaaagggaggatgttcagaccagtagttaaaatagcagaaatgtttagaacctaaaagaccaactgaaagctacttaacaaggcggtagcaatgattcgaacatgtctcccattgcataatcgcctccatatcaggaaacacattcaactaatcttcatttttgaagactctatcaagttcagagaagacatgaatacctgatttgtgatgctcaattttggttttctagtggtcaggttgatgctttacgatgttctcttataatttaaatttatataatactatttattataattatttatgacataatgtaagtttttttttttaaaaaaaaataatatttaaaaatattgaaataatgaatgttcaaataatctattatactcttttctaaaaaaatatatttatatttcacacgtataaaatttttttttacaacaaactatttaaattttatttttgataacttattaattgagaatttacttcaattttatcaatattctaaataagagatatgaatatgtaaaaaaaattaagaatatatcatgtgaacaaatactttgtcttgtatggttaatatggtcaatttttgtcttctatggccaatatgaatattttcttcttttgttttggtctatactataagtaagatcaactttggttttataagtctattatggtctaagaaatatgtctgaggatacttattaaattttatatacttatcaaatatttgatactaaacatttttttttatttgaaaaattgaaattttacaaatgtcaattatatata

SEQ ID NO: 21663 - DNA, 4385 bp, Cannabis sativa
  modified_base (4131)..(4133): a, c, t, g, unknown or other
gtttatgtgttatttgattattgtatgtgatttacaaaatttttttatgaaaatattttatttggattcattgtgaaaaattaagcaatttttatttttacggaactcaattttaataaaaaacaaagaagttatgtggttttgaaattcgggtgcagatggttcaatcgcaagcacaagagcactcagacaaggtgctcatgcgcgcgcgtgaaggggacatgtgctatctgaagccagcacgcctactcagttcaggcacgatcctcacccagggatgctgcactcgcgccttaggaatcctacaatagccgaggtttctcggcaggggaggctatagtttccccattctacgcgcgtgttggcctgccagtagcctcttctcagctgcatgggtgtttacacctaaaaaactaaatttttggtgattttttcactaattttgtattttctaatttcaaaccataaaaatcaatttaaaatattatttttagtatttaaaaaaaaatatcaatattttaaattaataatatttaattatttaatatattattattaatttcaaatattttgaggtttaaattctaaaattgattattttattttagtttatggttagattttaaaagtttattaatttctttaatacttatatattatttaattataagataaaatattttaatattggacatattttaaattaactgattgtcctatcttttaatttgaaatattatattaaaatgatcttatatgataaattatataattgtaaatttaaaattaacctaaatattttatagatattctaactgttaacgctgattttcgttagccaaaatttgagcttgaatgacaaatttccacagaaaaataaagacggtaaagaaaaggaaaatatgaacacacaagattttttatgtggttttgcagtttaaattctgcatagtccacgagtcaatcttattagatttctgatggtttttcagggccccttatgttatgattttttcgtcccatttttaatcgaacttgcctttatttataatcacatagtagttagttaattacagagttcactgtaatctttacaacatttatcccctaaaatcttggggtttgattacatatgatgtagtataaatgcggataatatttgaaaataacacagctgtgattaatccacttttactgggtcaaaatgatcgtgtatttaaacacgtcataaatcatagcgttatgagatggctcgacaggaatttggtaccaatgaccttgatagcgagttggagcttttcccctatctctctgaggttgatgatgttggcctcgttgattccttatttgaagacataacacttcattttgacaatcacagttctttatgacaaaaagggtgcttcagcagccatcatttgaatgtcagcttctgacttgtcaagactataagtctcactgaaaaatgtcttaaagttgattggtgaaagtaactggaacacgtcttcctatagcaagatatccgcctcacttattaggtcttgagtccacccagctattatactgagtttgtatattatacgctaattgttttcacagtcaatatgcatcggtttcgtcttcccaggtgtaacgaagttgatgtctcgctttatgcatccaatgccgtatggtttctcattaatacatgaggcaacaatttgtatatctttacctcgcataagacctcatagtcagcgagttgtaagtatactctgtcacttccgcatttaatgagttattccattaaaagtaattactgctacacgcatagatccatattccccttaatttggacacgtgtcctcccttgaaatggtagctgaattttgggtataacaattgccccttaaaaagtactttttaatgattgcaaagggcattttcgtcattatccctttttggaaaaatgtgtcctttgatttttgcggtacagttttgagggtcattattagtataaatgaaccatcctttcatctcctccctcactcgcaaccgttagatttcccagcctttggcctttctgtttactaggttccgagtataaaatggtggcttaggcttgccatattccataaactcccggtttttggtatgtttcatccagaaattggattgtcattctcttgctaagatgtccgatccaagttcggaaacttattactcaaaatttgaaacaccagaatataccaaccacttttccactccatatgttcctaaaaactttgacccacagtttaaattggaaacgaaggatttcaagactgagtatcttctgaccaatcaaaactaaggagatgcagttagttgttacgagcgaacctcacaagagatttttgagggtaagttcagaggtcctgctcaggctgacaaggaatccaagaagaaggtaatcccagttggcgtgatcatggattctactaaagaacccaacttgcccaagacccaagcttgcataagaagacctttggaccagccaatctctggtgttgaaaaataacctgaggtgaggaatggggtcttagctgtaggaaatgggatcttttggtgcgaagaatgaggtctatgcagcggtcgaaaccttttacgtgtagacggtctttctcaggctacatgtagacattctttcttgagctatgtgtagacgatcgttctcgagctatgaggtctttctcggctatgtgtagatggtctttctcgggttcatcaacctcccatgaataaacttgtattctttgtttacgaaaatggcttaatggtttgcccctagcggcatttttgtaaagacaagtttgtaagccaacttgggttttctcttatcttaaatgccttgtacaatgtaattaactatattttaatcaaatgtaaagtacttttggatttttctattgctcgtacttttcctgtttaagtagttagttatctaccaaacttttgattttcgagcagttgccaattgtgcctcgcaatgacagttataatctgccttaagcaaacttgaaatactttttatgattttatcactttgtatatttttgattgcttgtatgaatagttatattatctatccatttactaagtttaagtacttttatcaagatgtcgcgatgtctcgtttagtactcttctatctcgcaggaatcgttaatattcagctttgtacgtaagttataactttttaattttcctttctcgtcaaagaggtttaaaccaaaaagttatggtggtttgacccctcagaaaggtttgatcagtggtttgagccccttctcctaaaaaaggtttgatcaatggtttgatccccttctcgtcagaaaggtttgatcaaaaacttaaaaaaaaaatttaaagttatgggtctgcattatactatgtattttcagatgaattccggttaatcatacacaaatgccccttatgtaattttaaagagtgaagctttgtaattacttaaataatagaaatgattctctttattcataactaaagttagaatattacatcagcaatgtgagttacagcgtttatttattggtaatagggtcgcaaatgttccaccttcaagtaattctttattagcgagctattgagtcgagccaatttgtaaactccaattccaactattgcttcgattacatatggacctcccagttcaggttgaacactcctatagatgcatctttcgtgtttgcaaatactcgccttagcaccaagtgacaaacattcaatagtcttttcttgactcttttgttgaattatcttgtaactcggtgttgatacgctgcattagtgatttgcaacttaggtcatttttcatcaagcaaatccaaggaaaattttagaagttcttggttttcttcttgattataaaactctcgtgtaggagtcgatatgttcacttcaacaggtagcattacttccgagccaaatgctagcgagaagggagtgtgtccaattatcatcttctcaataattctctgaacccagagtacatgaggtagttcgtcgacccacttgcctttggcagcgtctaacttttttttgatagtatccttaaaggttttattaacagcttctacttgtccatttgcnnnggcctggatactgacgagaagctcttaattattttgttcctctggtagaactcagtgaacaagtctccatcaaattgggttccgttatcggatactatcttcgtgggatttaaaaacctatagacaattttcttgatgacaaagtcgagcactttcttgcaggttatggaaataagaggcttggccttagtccatttaatgaagaagtcaactgctactaccgcgtcttggctcctcctcgcccagtgggta

SEQ ID NO: 21664 - DNA, 3233 bp, Cannabis sativa
caatttgcaatgtgtgaagtgatttcaataatgttaggaattgattaatgtttctttgcttagtgcagccagggcctcgtgaatctccacatcaatgcctcataagacggaacaagaagacttctaccttttacctgtatctagctcttacaccatgtgagttaaaaaaaggattaacataataatcgtgggaggaacaacatcctttttttcttttctgggttgacctctctctacttatatttcctcataagctatgattactggtcttaaagatagttttttaatcagattactaagctattttgacttggtcaaaatctgactaactcggattttttattgtcacaagagaattttctttatctactcttttttctttggtgttagacatttttgtattgtattcctttttgtgacttagtatgtatggaattttttagtcaattgtagacttttggaacagacacccctgcacacacacatgtcttatttataacatgtcagttgatatacagatatacatgctttcacacacacacacatatatatatatgtcggtaaagtttgatttggtcatagtatccttcttacctatatgctttaaagtgtaaatataatctatattttctttagtaactttaatcatttttacttggtcacttttggaaagctatatatatattaccgttatcattgaaaattaaccatttacaataatttatgcatatatgcttgcatttatatcaataggatcaatgaaatatttggtaacttaccattattatagaaaattaaccatttacagtaattcacgcatagatacttacatttatatcaattaggatcaacgaaatcctttcacatttatacatatgtagtaactcaagacagcttaatttattgattttccttaattaaacttgttttttcagaaactttgtttgattagaagtttttactttgtctttttcttttggttggtccctattatcttgcagtgttgttgaatttcttgcttactaaagtttcttttgtttccccttcctttatacagcattcacagataagggaaagtttctctttgcagcgcggagatatagaaacggtgctcataccgaatatataatatcacttgatgcagatgacctttcacaaggcagtaatgcctatgttggaaagttgaggtatgccattactatctaaagaaaatatagtgaaatcttaatggggttctttctttttatttggctctactcttgcatttgcgcttaagatggtttttaatatctcaaatgcttgtagttattgtcttaactgttagttattactattttaccatggatccattgtgtatatttgttattaatcttcgaatgagcaaggtttgaagtagctttaatttcacagttaatgttattttggagctcattttggttcaaaatgttcacagatatttggttttattggagctgtttttggttcaaaatgttcctcaatatgtggggctgattggtgcgtatagaaatttgtcgatggaataatatcatcttatgatagttactgaaaatcttctttaatttcacagttatataataactcccttgatcctaaaacatgttacatatatagcattaatcattgttcatattttcccatgaatttgccaactgaaatttgccttgaggaaccatctacctttttttttgtactttgataaaactttttgttggtgtaatatgaattttcccaggacagaaatttggatacattattgtatttgtttggcttagtaatgatacaattacatgtcttttttctttttatcttttgcagctcgaattttcttggcaccaattttacaatctacgatggtgagcaacctcacaacggtgcaaagccatcaagtagtaaatccagtcgtcgtgttgcaaccaaacaaataagccctcaaatttcagcaggcaatttcgaagttgggtatgtttcttacaagttcaacctcttgaagtcaagaggtccaagaaggatgatatgctcattgaattgcccttggtctggtgattcttctatcgacaaatttctagacgagtctaatacaaagaagcagctcgaattcgctgctgcttctggatccacagttttgaaaaacaaagccccgaggtggcacgagaatctacaatgctggtgtctgaatttccatggacgtgtaactgtagcatcggtgaaaaactttcaattggttgcaactatggaccaaagccaaccgggaggaaagggagacgaagaactagtcttgctccagtttggtaaagtcggggatgatacgtttacgatggattatcgacagcccttatcagcgttccaggctttcgccatttgcctcaccagctttggcactaaattggcttgtgagtaaataaataaatatataaatatatatatgctttttttgttgtatgtttatttaaaaaagacatgaaactgaggactttgtccataattttctctatatagtgttgattggaagagcttatacatgtatgtatatatgtatatatgtatgtacatgttgtttgttgtaacttgtatgattatgacatgtcttataatattgaaattatttgtagaaagggtttttgttttttttttttctcttgtaaatttgaaaataataaccaagacatcttatctcaaatgttgatttgatgcatcatttattaaactaattgcttatttttctattttcttaagcaatttcttttgtattagtctttactttgactgcattcttaaataataaatatataaataaataaataaataaaatctttggtgaagatgagaatattatacaactcaaaagtgtgattacattctaaatagatatttgttgtgaaaatactttaaattattatgtttatagcactaagttgttgtttttttttttggcaaaattacttaaataattatttgtaattttaactatttaatatatttttgacgttgcaaaaaataatgataataatttgagtatttctttaaggaaaaaaataattatttttattactaaaaaaaaatatatgcataatctaaacataatatgattttgaaaaattgctccatatactattttttttaactttttttttaaatttacggtttgagtttctaaagtggttgcaacgctagttgcaatagagtttttttacggttttttgttgcaatttagg

SEQ ID NO: 21665 - DNA, 6271 bp, Cannabis sativa
tagaaccctagtcggccctatctatgcttgggaatcctggctggccaaggcctagttccaagcaggtgacttagtttttgttctcttttgagctcaatagaggttttgtgaaggccttgtaggcatataaatttgtaatctcatatgtggttcccttggaaactctatataagacttaatggtgagtttattatagtcgagtgtacagcttaaaatttgccatttgtttaatttgatgtacttgagacggtacttcactgatacctagccttgtacaatacaatttatatagcaagtaccctttggtatgattggccaaaatttagtctgtaccttgtagctttgtcaagttgctcacctcctcttgtcttttctatgtaggtgatttcaagtattggtctggggaggtgacaactgtgttatcataggttcagtcagtcttacctttgtggactagcatctagtccgctctaatgactttctgagtgaactctgggttgatattgatacattatggccaaaactaagtagtcttaccgtagagcaccaacttttgaccctcagattccaggctggtaacaatgggtagggtcagtatagtggaggagtccacgcaacctctagacggtagagatccagaggttggctaggtagaggtgcctgtagtcgaccatggtgtggagaccccaaatagaaagtttgaggtggaggaggttgtacctgctaggaggagacaatacatgacctattcttttttctccaacaaccccctaactcgtatcatggtgacaaagaacccttgaataggcttggctagccttcgatgattggtgtagaacatgttctaatataggctggtgagcctcaagttctcgagtgagaccattgggtctctccttcatctgttatcagtgccgagactcttaataagataagagagagtggactagtgagaggtgtccagtgtgaggtaccgtcaaggaaccaacaagcacaccagttggccctcaacttgatggcgtagtctgagcaccacattcaaccggggaagtactacctttgcacccatactttagagacattacatcatactttaaaatgtgcccaacacaaatcaccccaaaaggtatcaagtacctttcagcgatgtttgttctttatgcagagctaggttggcctcagcctactccttatgagattagatgctattttaacttgaaatctcctaatcaaacggggtacttctactttatccaaattggccatcagtggttgggtgataccaaaagtatgtctttatcgaaggtggggggacatgcctgaaactatttcatttcctaagatatccaataggtccgacactacttctttcagagagtgcccacttacaaatgctccattcctacccttgtgatgagggaaataatctccttaacaccaaatctccaattgaaaactttcggtctttgacttttgaattgacatgtttggccacttttcttttggtacgttgtcatgcgtatttaggattcttctcagagttcttctacgagatccagtgcttcctataatagggcttggtttgtggctagatcataagagcatctacaatggtgacattctttaaaagtgtcaaaaacttccacatcacttaaaaatatattgttttattttatctctcttccacattatttttggcacttgttgttctaaaataatccaatggtaagcatttcctttatgatcaaattataaaaaaaaaataagaaagagaagatataaaagatgctatggtagggcattcttttgtggcattctttttcattccaatggtaagcatcaattgaaaaaatgctaaaaatgtatacatgtcatcaagcatcgttcatagcatctccattggagatgatctaagtagttcttcaatgggaaaggattatattctccacaaggaacatagcttcgcatctgtacaccattgaaaatggagaatgtccagtggttgtttgggtagtggtcctatacgcccatagtacgcgtggtagctcatccagccaattattttggcaagccaagagctttttcttgagggtgacctttagtattttgttcacgacttctacttggccattcgcctacagtcttgcaactatggagaaacttttgataactcaatatttcttgcagaattccttgaatgcattgcagtcaaaatacttgccattgtccaagatgatcttatggggcagtccgtaccaatagacaatgttttttattacaaaatccaagacatttttttccgttatagatttcatcaactctacttctatccacttcatgaaataatccacagtaactattgcatatttaactctacattttctcgttgggagagatcctataaggtcaatgccccataccgcaaagggccaagggcttgtcatcaatgtgatttaatttggtggggcccttgggatatttgtgaacctttgacatgggtcacaatttaggatgtagtctatgcaatctttcttcatagtgggccagaagtagccttgtcttaaaacccttcttagagaggcttggatccctagtgtgatctccacaaaatcatttgtgaatctcttgtatgatttgtttagctttggagtttgagacacacctcaggtatggcatgctcggcctctccagtaaaggatactatctatcgtgagataatggggggattgatattgtatccttctggaagctgtccgatcttgaggcaattctccctttgtaaaatagtcgatgatcaagtccatccaacttgatacttattcattctttacaatctcaaccttggacacaatacttggggctacaagatacttgatagggggtactcccagtttttccatttcctgatctaatgctaacttagctaagcagtctgcatgagcattcttttcttggggaatttattcaattctgtagttcttgaattcttggagcaactcaatcgtagctaagacacatgcagaaatcttttctccttgggtttgatattctcccaacacttagttaataaccagtggagagtcactaaagacttttatcttgtgggctcccatggctttgaccagtctcaaccttacgaataaggctttatactcgtcttcattattagaaactagaaatttaaaccttcaagctatttggagccttaacccctctagagatatcaatggtattcctgccacagatccgttctcgtttgatgcaccatcaacgtatacccttcaagtgggaataacagggtctggtaagtcatccatcacttctgtttcattgtattcaaacataaaggctgtgagggcttgtccttcaatcacattgtggagaatatattatatatcaaactgaataagatccatcactcatttgaggagcctctcagaggcttctgatttctgaaagacttgccatagcggatggtttgtgaatactttaattgtatgtgcctaaaattacgactacaacttccctgatgcaatcaaaaggcaaatatctaacttttcaattaaagggtatcggattttagcctttattacctgcttattgatgtaatttaccgggtgctgaacttctccatcctcttagactagggctacactgactacattctcagagatggctaggtataagtacagatcttcctcgtgaactggtttggacaagactggcgattgcacatatgttctttcaatttcttgaatacttctttgcattctttggtccacttaaacttttgactcttctttaggatgttaaaaaatgggatacatttattggtaaattgagagatgaatcagctcaaagtagctatctttcttgttgagctttgcacatacttttgtttcttaggtggaggcatgtctagcaagacttgtattttcactgagtttgtttctatcccttgttggcttactatgaatccaagaaattttctaaacttgacaccaaaagtgtatttcttgggattgagctttatctcgtacttcctcactacttcaaaacactttttgagatcatctaattgacctttactagttttagatttggctagtgtgtcatctacatatacctccatatttttttctaagaaattcttgaacattcggttcaccatgtgttgatatgtggctagagtttttagtccaaagggcatgaatagatagtaatatacccctttatcggtttggaaattggtacattcctgatctgctacatgtattttgatctagttatacctagtgtatgcatccatgaaggaaaataactccaaattggaggtggcgtccatcatttaatcaattttgggtaacgacaagcaatctttcaggcaggccttgttcagatctgtgaagtcaatgcatattcacaattttttgttcagtttgggtactagaactaggtagccaaccattttggatagtacacatctctgatgaaggtgttcgatatcatcttacccacgttttttctaaggcttttaactttaccaaatctagaggatgcctttttttagtataggaggcatgtctttgttaacgtttcaaacatgagtgatcacatgcgggctcactttgataatatctccatgacaccatacaaatacatccactgactctttgatggtgcttaaaatttcattcatatcatcaggaccccaagcctttccctaagcaaatgactttggttcggtcttgatcacgaattcctacttcctcgatcttttccataggccctgaaatggtcttagagccaatgcagggatccaactcatctttcccttttaacaagattgtatttccagtcccctaagccatgaaaatggcttgatgggtagccacattataacactttttcatctccctttgatttctacgaagagttccaaccctcactatttgagtgggaaatttgaggcacaggtgcctgatcgcagtaatggctctaaaatccaccatggccggatgtcccaaaatcacattgtaagttgtagggcagtctactacaacaaaagtgcaataatagaacatgctttgggaggtatttggacacaaggtgactgggagtcttacctttcccatgggtacaagggtagtcccattgaaccctatgagctgtgaaccactcagggagagatcttagtcattgagtctaatggcaacaaaatcgtctttaaatagaaggtttactgaacaaccattgtttatcataattttggtggcaattttattggaaatgggagtttcaattaccaatgggtcataatgagggaaacgcactttcttggcatcttcttctataaaggtgatagtttggtccatgagcgaagcctttgtgccaggagctggttgacttcccatacttctccatcatgatcaaagtccttaattagcataacgattcagcttatttcatgtagttcctccattatgtggccctcctaaaatcattgctacccttccatttagtctaggaggatgtcttggcacaagatggtgttagggaaggaatctcaatggaactttcttttttggaacttaagctctaggagcactggtgctctaacttgtcctccattcatgtacaacaatttgtcatttatccatttgtacaagtgacctagccttattaggctctcaatctcatctttcaagtttttgcattcattggtagtatgaccaatatcgttgtgatatttgcatcttttgttgggatccctttccgtgaactatccaggtacagaggaggcagtcttcggtagtgggtgttttcccttgtggccaagtatacactttcttgggtgtccactaaatcggtataatgggtatattgggagatgtagcctttcttttgcctcttgttctaagtcagcgtgcttcctttcaacgacctcttactttagaaggtttaaagagcttccgctgcacttgctacagatggtgctgattgagcgagatattgcgagctcactctgagagccaggttacccctagcactctaacactagactaagtcggggtaagagcaaggttgtgggtatatcctggtgttgttaaaaactatatgatgggcattccacttgcctgtgacgtgacaggtggggtaattcctagaaactgcatttcaggaacataccatgggcaaccggtagggtaatatcctccaaaagcagctatttgtgcttccactaaattgttagatttttgggccctcttct

SEQ ID NO: 21666 - DNA, 4055 bp, Cannabis sativa
gcttatcatgcttcacaagtgtccaaatattaagctgcatgttccttagatggattaattaattaagttctgtcatatgtgttgctagacacttaaaaacagtgaaaactaaaaacaaagatttatttttggatgtgttttttactcactagataactaatgtgattctttgcttgcttctgcagtttagcagcactctgctgttgttgccttttggaggcttgcttttgaagaaagtacttgggcctcactataatttagacatggtgattcactccttgattgatgtcctttgtcaaattattcctctcagaactatattcttctctaattagcatcttaatgaagacttttatttatggctaagtgtagtttgatcttcttatactaataagaagattgttacatacattctacttttatatgaagaaacatgtcttctttaactgaataactttattcccatatttaaatatcttttattttccttattttggatcatgtacttgtataccttgttaataattgaataaatttgaatcttttattgatctggttgttcagaaaagctcaacattgggtgtgagtaagtataaagcaaagtttggagctgttgcagatggtaaatcatatcttaccattgagtaaaaatctaactaaggcatattcatgactacgtggccccttgtgcttagttagtggtgggttctagtaagtttaagaagatattttttagttttgggttctctttgtttcgagatattccatcttatggtgcaagccagctatttctcatatacatttactcgaggattgtcactttcccagaggcaatgttctgttgatgtcattgagagttgtatttggccaaaataatgatcataataatgctttggaatattcgtgaagataaaacaaatagtgcataaaattataagaagattattaggtctctctctctttataaaatgatgaagcaaagtcgtaagattagagggtgacatagtaattttggatagtgttgtattcgtacgtttcattttgtaaacctctgacatctgacgacaaccataacattctagcatattttactctcaactcatgattacctatagttttttagtttaatatttcttttagatgattgtgtgtcctaattattattaggataaaaataaatttttaaaatattttgaatggtttataatgttgaaattttttagaatatttccaatagtttataactttaaaaataaagtttaaatgttctattgtacaccctattaatttttttatacttgtggtaagtaattgtttaaattttataacattattataaactatttaaaaaaatttaaataacatacactattactaaaaaaaaaaattagatcaaaaaacttatttttttgattccaaaacatataggaaggtctatcataccaacccttgaagtactacatattttcatattactttgaaaggacattcaaagtttttttaagttaaggctataccaggtttatgcatgtgaaagaattatgaaaaattattctgtaaaaatagtgcggtactagtagtttacactatcactattatcaaataaataatattttttttttttaaaatctaataaagtttaaacaatcttattaaaattttaacattataacaatatattttaattaaattattgtattagtatatactactttgaactagatattttgcaaaagttattaaatatagtttttgttaaataataatgtagactttatgtttttcaaatagtataaaatagactaactcaaatttcaatacttcttttaaaataactaacttgaagctttttttctaaacaaaaaaaaactaacttgaagctaatttttagcacgaatatatacggaaaaatataatcagtcttgtcgaaatacctccaggtcacattattatcaagtttaaatctaatcaaaattaagcaaggatctatttacaggagaattgtcatttaacaaaacagatagttcagtcataacttttattgaacacatgattcaaaatagtatttatcttaaaaaattaataaactactaactaacagctatagttccatatgctttgacttaagaggttctgtctattgacatggtgtgagagttttgttctgttctggtttttttctgtggaagagtgtgctttgcttcgtgtttgatcgattatggctagttcaagtggggtaggtggtggaggcagggaggatgtattcagttttcagattgaagaggaagagctatcagagttaacagtcgggcatgagggagaggaagaggggattgatgacagatggtgcctagttggtagatttttgtctaattgtatgatagatttcgataaaatgcagaacattttagcctcgttgtggcaaccgggaatgggaatgtttgtaaaaaaacttgaggaaaaccggttcttatttcaattctaccatgaagtggatattcaaagagtcattaatggtagtccatggatgttcgatcggatgcagttaatcattcaacgtttgccggtgggaggggatccaagtttaattcagttaaatcatcttgatatatgggttcaaattcatgatgtgaaaccaggttgtatgaaagaagtgactgtaaggggggttggaaatacacttggaaaatttattgagaatgatcataagaatttcgtaggtgtttggagggattacgtttgggtgcgggttaccttggacattaggaagccgttgagaagaaggctaaagttaacacacgaaaatggtagctggttctgggttcatttcaagtacgaaagagtgcctatattttgtttcatttgtggtgtaatcgggcattccgacaagttttacagtagattgtttcagcagcctttagatcaaattgcaaaaccttatggtgagtttatgattgctcagccacaaagatcgtacaagaatcttggagcaaggtggctgaggaacaaaggttggaagccggagggaagctccgatcacaatgtacctggacaaacttcatgccagccgaatatggaaacaaattttctagttggtgtggccactaattatggtcatggaaatttgctgaataatgatgaggattatgatatgcttaattgtaggatggagggtgatcaggaggaggcaatttcgagaagtaaagagggagaagtcaatatatctatatggcaagaataaggataaggatatattgaatgaaagtaattctgaggtggttatttatgataataaaaaaagaaaggttggtggagaggagacagtgggtcacgtgggacaggcccaaggtggtagtggacttccaaaaaactctttagtggtgggccttggttcaggggcttgccagacattatgaaaattctaagctggaactgtcgtgggctggggccaccacgtaacattcagtttcttaaagagctggttgaccagaaaagtgttatttttatgtgaaactttaagtaataaggagaaagttgatgtgttgagtaggaagttggggtttgaagggtgttttgttgttgaggcccaaggtagaagtggtggtttggctttattgtggaaaaatgaggaagaagtggttattgattccttttcagtgaaccatgtggactgttttgtacactttgaaggccaagctaaatttcgttttactggtttttatggggagccgaactgtaggcttaggcaaaattcttgggagttgttgcgtactctccatgcaaggtttcaagaagcttggtgtattatgggggattttaacaacatcctacataattaagaaaagatagggggaaaaacttatccgagttggctattggaggggtttcaagagacggttcgtcattgtggtttgtgtgaccttgacttgcttggtcacaagtttacttgggaaaaaagtaaagacacttctgcgtggatggaggctaggcttgatcggactatggttaacttgttggaattattttaccaggatcttagtgttggaaattatttt

SEQ ID NO: 21667 - DNA, 1420 bp, Cannabis sativa
gccccgacaattccacgataggcacttcatggagcttgggggggcttgataagggccgcctcctcgcccgtcagaaaattttgagagctttcaacatgaacttctatcaaattaagagtatcaagaagatttttcgggttatcatcaagaacatttggaaccgaagcatcttcattaacaggttcattatctcgagaactttcttcccttgtcacaaccttctttaaacgagaccctttccttctgcgtttgtcatttttcaaggaagaagatgatgccccagaccccattttgaaaggggaattgggcgctggagagaatttgggaagatcaggcacttctgtggtaaattcaatcgtattctcttcagtgtgttggacatatggtatcaaggttaggctggccttccttttccgaggttgagggcagtgatggactaagtccgaaacatccactgggtcatgaaagagggtgggaatgggctcaaacttatcaactggggctgggcccattaactcttcagccaagcctatttcttcagcatatatgggccaaggaaaatgggtgggttctgggtgtttatggggctgtctagattggcaaagttcagcatgggccttgtccaccatttggtcataagtaggcccgatattagccatgatagtggtaagaataccattatcagcaggatttggtgggggcctagaagaaaatttttttaaaatgtcatcatcagtaaaggtacgattgttaccttgataatgtctttgtagaggtctaggagagactgagcgtgttttccttcccattccaaaatgccttgtacctcgagcatcagaaaccatgagtcctttgcctttgtccaccggtttctcactagttttttccaccactttcaaatttttgcctaaaacagctcctgaaccattatcaatgaccctgatcaccttcctcattggtttcgtttgagctgtgacaggcaggacctgctttccaccactatcgataatgggtcgttttccaaacgctttggacttcgggtcaatacccagagggtctctcaccggagaaacactgggatggttgcccatgggattcgactgtctaacagtcgctgggggagctctcgccggagttacagtccggcccacgtcctctctgtagaagtctagctgatcccgagtgttaaaacaactgtagatagcggattcagccttcatccaaggtccataggctgggaccgcatcaccttgaggcggaaaggcaaaggctgtggaacgaaaacaagccttcttgtcatgaccaagatagccacaattataacacaacttggggagtttgaagtaccgaaattgtatccattcctttctgcctcttcgaatgtcaaggtagaagcctgagtacagttgatgggccgttg

SEQ ID NO: 21668 - DNA, 1560 bp, Cannabis sativa
aatgttaccccataataccaacattagatgactaagctcatagaatacaattttgagattcaatacaagccaggggagggacacaaagttgctaatgcattatcatgggttaaccaactagttaactttacaaatcttcttgttttcaaggtattaactgggtagcggtgcaacaaaatttatttttggcaagaatggttactgatttgcaacaggggaagtcaagggcagcctagattttctttggagcatggaaaattaatgtacaaagggtgtttgatgttgtccaaagatagctcacttattcctactattttttgagaataccacaactctcatttgggtggacattacaggtgagaataaaacttttcgtaggaatgcttctgattttattgggtgggcatgaaaaaaatggtggctgattaggtttaagaatgtgaagtgtgccagaaatataagactatgaatacttctcctacgggtttattgcaacttatagcattaccctcgctggtttaggatgaattgactatagattttatagaaggattgccctattccctcgaaatggacattgtaatggtagtggtgtatagattgagtacatatgctcatttcatattgttaaagtatccttttactgctcatagtgctgctgaagtgtttttaaaagaggtggtcgacttcacacaaggttttgataagtcatttttggcaagagctctttaaggtgcaaggtatcaagctctgacatagcacggcatatcatccccaaactaatgggcaaatagaagttgtgaacggttgtttaaagacttactttcgttgttatgtgccagatcagccacaagtttggatgcgtttgctagcttgtactaagtattggtataatatttcgtttcacccacagctagtgtgtataacaattttggcaacctttaggcttaaaagaaccaaaattttgattgtcttatatgtgatggttggtccaatatataggccaccaagaaatagaccagattaatgggaacccatgcagagttaatctccaattaagctcaccaatggagtgggattacatgactaaacgagactgacttccccatatgttggtccaatgggttagtcctttcttcatggtgatgttgacaagagccagcaacctaagagtacaaccgtttggaaaaaaggtgcacacgttaagtatcaaagtagtaagtgcacgaatcccatatttatactccgggcttactaagatctttagaggctgttttttcatcccatttcatgaaaaattgtcctttgaatcgaaattcataactgaagtactgagatattatagatcttttagataaacatttgttaccgttgctccaggatcaaccagtcaatattcaaaagataaattattattagattctgcaacaatttcctatgatatttttttggtcaattttgaattgatatatgaatatgacagtatacttgactggtgattgctcatgcatacatgttattgttagctccaatcggttgatacatataaatatttatata

SEQ ID NO: 21669 - DNA, 1790 bp, Cannabis sativa
ttttgtgtatttgtgaaataatccccaataataataagcttaacgaaaatgatatttataaatgggatgcaaaatgactctaaatttaaaaattaagttagtaaatattattttttaaaaaaattaaaaaaatcgctaaatataataaattaactaataaaaattataaaaatacatttattatatattattttttaaacaaatatataataattaaattaaattaaattattttttagaaaaatcagttaagttttgttttccttcaaacttttcattacatcctatcagcactagaaaatgcttattaaactatcatttacaacctctcaatccacaaaacatcttcttgctttgttttccttggcattgttactaacactctattcttgatacttgttttaatctttttcacaattgtatttacactttgcactctttgattcaaaaagagtcattcctacaccaccaaatgctatatactcttacagccaatgtcaaggctagcacgctcttcttgattttactcacactactacaaattgcactattcacatcggtcaacgctactattcatagcgttgaccaacgtgaatagtgcctaaataattgttcaagctccttatcaattctgttaagtttgtaatatttgttgaccagcttgaccattttttaactgctaccaaacaatgtgcactaagatggcactcaaaaaataaatgattagaagtttcaacattagagccacacaccaagcaatctgaatccgatgaaatattaaaaatctgaagagtctatctttgatttgcaagcgctctagaacagccagccaaagaatgaaacgatattatggtaaacttaatcgtccccaaacaacatcattcctgtggactctatccttttccatagacaacaatttatggacatgtttaatgttgtaactacttaccatctcctgttgaaagttgttgattcccttgatttgattcttcatttcccctatttgcctccaataccaactacaattagtagttacattatagtcccaccaattagttcctcccaaacatacaatgtggacccatttaacccatagattatcttgcttggttaatagcccatagtttttccaatcaatgctctattcaagacgataacattccagattcgaagacctcctacttacttgggttgacatacatcttcgtaagacacagaacctggcccatcatgcatggcagtccccttccaaagaaaggctctacatatagtattaactttttgtaaaactttcttgggaagaattataatttggctccaataagcatgtatggtaattagaataaaatttatcaaagtaactggctctgcaaaagacaagtttctagaactccaaactcgtattctaccaaccattttctcaatgagaattttgctctccactgtagaaagcttctttgcacatataggcacccccaaatatctaaaaggcagcaaggagtgtgaaaaacatgatgcttctttgaccctttgtatctctcggtgatccataccactggtatagaaaacaaatttgctctcatttggaagaaggctagaagtttaggaaaataatttgagcccttgtagcatgagatataaagacttgaaattcccgtgacaaaataataccacaccatctgcgaaacaaagatgattcaattgtattttagcacaccttttatgaaatttgtaatctctatgcttgccaatctttttttaatttttgacaagtattccatgccaagcac

SEQ ID NO: 21670 - DNA, 3335 bp, Cannabis sativa
tttagcatttctctaatatatattatacacatcaaaactagtccatctacaaatttgtcttggtcttcttgggtaacctatcagtcatgtctgcatccattaatatgaaatgctttctcactaaattgttctgctcataataaatcttgctaccatagtcactgccattaacactttgcctacctacttctcctcccttatcaactacaatctcctcaccattagcttcatttaaatttataataccaccaaaatttcttacttctattgggttatcatggttggattccttgctgccctgatactcagctgcgtgcttgtaagcttctagcgcatttcgcaactcggcctaagatatggaaagccaatgtcattagttgtttacatatgtgtgtgtgcaatgttgatgagtgtaacgaaatgaacttacaatttcaaggtcttttcgttgagattcttcattggcttcctttaatttgtcctttgcttcgaggattgtttccatgaccacttcatggagaccaccaaccatttgtagtagcattgtcgctatttctgcacttacctgcataatgtttacgaaatgaagaatcaaacaacagtagacaaacacaacaacgattgcagttactaacagttactgtactcacatgtttgacatcatctggaaggggaaggccttcaacctcattgacacaggggattttaatgacttgtgtccccttgtctatttttggcattgtcaatgtccatggcggcaaagtaataccatggacaacatcacaagttcttcgttgaacactaccacctgttgtttcgtcccttctatccacaacattttcttgtaaggaagacgcaacgtgactcttttgttgaacgccactcatgcttccttcccttccatccccaatattatcctgtaagaaagatacatcacaagtcggttgaccatcactacctgtacttccttcccttccgttatcatgtaagaaagacatgtcacaaactggttgaacatcactcgtgcttccttcccttccaatatcttgtaagaaagagatatcacaagctggtcgaacaccgctcgtgcatccttccctttcattcataacattgttttgtaagaacaatacatcacaagttggttgaacactactcgcgctcccttctcttccatcctcaacatttccctgtaagaaagacagcaatatcatgttttatgcaaacaaaaaaaggagaatgcaacagagtataatctattcatttataccattgtctttgtttgcactaagtcttccatattgcagtttggtttaagagatggtaactctttagctgctgccaactggtgtgtgtgagttggtacaaattcctttataatccaactgcctttcttgcggtcataattaacacgaaatgcagcacaacaccctactcttgtcaaagcctttggttttcgctttcgatcaaccctttccagatgcttttgacgcctctggccttccttagaacaaacccatctccttagataaactaaaccgcgtttatcacgttttacatcatcttttcttacattaaacccgataacacttgaatacatgtagtagaatgcttctgccttttcaagggtgtgaaattccaaaccaaccatagtttctgttgtcagttcttcaaaacacttatcaatatccaagcaaaaaaagtgtgattgttcacatctttctaagcaactttgagcttgaactgagacacccgttgtgtcaccacattctagctcaaattcattgctccttccaccacaagatccttcattacaattattattaagacagcatcctcgattgctaccaacttcttctctcaaagagcttatctgctcattacttcctgtgtttcctttcccctcaccctcagctgcatcctgcaacgaagaaaatcatactaaattaaaccgcaaaaatcaaaatgttaacatactacatttctagtgccttcaccttctcttttacaaaatcagtagattcaacattctgatttggtggagtaactaacatatcaattggttcccatgggtgtgtgtggtttgacacaaattccctaacaacccacttgcctgtctttctattgcaacgcacagataatgaagcagaacaacctactctagtcacagcccttgatcgtttcttcctatcaatcctttctaggtgcttttgacgcctttgcccttctttagaacaaacccatttcctaaacacaatagagccatctttgtctcgtttcatatcatgtctacgtacactaaatccaacaacattggagtatatgtagtaaaacgcctccgccttttcaagtgtttcgaactcagcgccaaccacatcttctttgaccaactcattcatacgcttatcgatacctaagtgaaagcttgattcttcccattctctgaagacatatgttccaacttgagttggccaacgagaatcctgccaaggaccgttaattcttgaaactccgtgtgtgtgatttggcacaaattccttagcaatccatatgcctttatgtttactataactcacacgaaacgcagcacaacaccctattcttgtcatagcccttgttcgttgcctccgatcagcttgttcaatgtgtttttgacgtctttgcccttccttagaacaaacccatctcctcaaaacaactgaaccacgtttatcacgtctcacatcatctttccgtacactaaacccaagaacattagaatacacatagtagaatgcctctgccttttcaagggaatcaaataccacaccaaccacatcatccgtccccaactcttccatacgcttatctacacccaagaaaaaacgtgcttgttcacatttttctaattcactttcaacttgaattggtgcatcctgcactggaaactccacagtagatgcagccgtgttctctgctctaaagtcactatgacaacatctaacgagagcacatttcgtaacacactcatctgtacttttgttgaaagaactttcattaaaatcgtcatttgcagagcacactttagtactaccatcttctctcaaagaatccattgcctgcaatacgaaatatggttatatcatcttctctgagataactgatcacatgactagcacaaaccaaggttgtagattgaagggaaaagataaaagaaatcaacttatacaattgctttgcttcaaaataagaataattgttttcaacatatagcagtaactaaccctgttacactcactccctgttttcaaaaacaaatggtacaaacacctacttttcagtaataaataattcta

SEQ ID NO: 21671 - DNA, 1721 bp, Cannabis sativa
gaggaaaatgaacagatttgacaaaatcaaacttaagaactatattgacacaattgatttccatattcaagtgacaacatttatgtttttggttttagaacacagtaagctgtcatcatttgctttactaataaccacaattttcttttaaaggacaaattctcgtgggactttgattcactgagttgaactgttcactatatttctacctacattttaagcaaaagaaaacaaaatccagattaatttgtctgataaaaacgaatttaaatcaaaatcagactccaaaactacttacatccatctcagagtattcatctgcacagttttcctcctctgaataattttcctctgtccagctaagcaactgaaacataattaacatggttagcagattcatatgacaaatatataaacagaagctgaatttttataaattgaaggacactacataattggatttggctcacattcacaattgtatcaatgcactccttcatttcttcaaaattcttatcatattcatcgcttgttgaggcgcgaataaagggtatccagctcaaattaaaatctctatcttcgtcatactgcagttaaagataaagcataagtgaatcacaatgtcaaaattagatgcaaaccaaaagaagttggcttagagagaaatgaaattcttaacaagcaacttgttcattaactttttaacatgaacaagagatcattggtaccttaatggtgagctcacaatcaatgccttcaaagaaaaggtttctacacaagggaaaagctctacaaaggcattgaagaaattggcctgttgtgaaattgggaacatgctattcgtgattttcaaatgcttcaactcataaaacggatcaggaagcatatcataatttctcagttcttctggaaatccctaaaacacagaaaaaagattatactggattgtaacaataagacaaaagcaagctatcacaatcaatatattacctctaagtgaacagccatagacaatacttcacagtcacggaaaatttctagaaagtttctcagcctaatgaaccaaaaccattcggtgccatcaaaagaacctgtatacaactcgagcttcgcattgagtaacccggaacagtatttaaatttaaagagtttaagaatgccaccagaatatttgaagtatcgaaggttgggcgtgttgcattcaaccttacacaaccgaaagcatccactcaccaccaaactcttgagattggaatgagagatttgaacagtaacaccctcattaatctgacaactctttagttttaaattctcaagaaagggaatttgagaaaggtactcatcaaatgcattccctgtactgattttggtacgctcaatctgcaaagtttttaacaatttacaattcgaaaatctaagaagtccttgagcattaaaggccttggtgtaagtgaacgattgaagatttacagaatcaataaagacattttggggtatatcatcatcacaaatagacagttccattgatttgagtttgggagatgaaacacgtagctctgtgaaatcaaagcaaaacccaactacaaattcttctaacaatgggagacaagataacagatacctaaggctactgttatctatgccaacaacactcaactcaagcttcttcacagaagagaatactggtaatgtaatcgcaagcgataattgaaacgatttca

SEQ ID NO: 21672 - DNA, 4531 bp, Cannabis sativa
  modified_base (4189)..(4192): a, c, t, g, unknown or other
  modified_base (4252)..(4258): a, c, t, g, unknown or other
  modified_base (4357)..(4357): a, c, t, g, unknown or other
  modified_base (4456)..(4456): a, c, t, g, unknown or other
tagttaaagttaatcatgtctggtaagttttcaatatgaaccagttagtttgtttaagcttcaatctcgacagttaagttagttggggacattactatctctccaacactcttagacgttaccttataaatatcaacctttactacagtcaaaaaaattagtttaagatctttctcctcctcttctaaattctctctgtacaaaaataaagctatagaactcaattttttgtgagtttatagttgttggcgattatcaccattgtaacactaagtgtgaatcaataaaaattgaagccaaagactcttcaatccggggagtagacagttgccactgctaagcaactaatcgaacctcgttatattggtgtgatttgatttttgtcttatatttatatttttaattctcttaacatgttgattcatgttaatacactaaatgatttagtctgttcttgattgtttttgagctgatctatacaccacaaggggtacgtatcagagcatcggatttcaattatcaagattgtgtgtgtgattatcaagaatcgatcaagatgagtccaactaagtttgacatttataagttcactggtgagaatgattttagtctgtggaagctcaaaatatgtgttctgttggtgcaccagggcatataaaaagccattgaaccagaatgtcttgaagacatcaaggaagatgtcttgaagacatcaaggaagacaagaagaaagttaaggaaattcagaagaaggctcacagtaccatcctcttgagtcttggagaggaagttctctgagaggtttctagtgagaccactgcaattggattgtggaacaaattttcctcaatctatttgaaaggactttggctaacaagttgtatctcaagaaaatgtcgtacaccttaagaatggatgaatctagagaactctggaaacatcttgatgagttcgacaaggtcatccttgaactcaataatattggtgtcaagattaaagaaaaggatcaaggaattgtcttattgagttcactgccaaggtcttatgaacattttattgacaccatgctgcatatggaaaggaaactttgacattgttcaaggtcaaagttgtactaaattccaaggaaactcaaaagaagtctgatgacaagaaaggatcaaatggtgaaggtctaatggctcggggtaactcagataaaaccacagggcataaaggcaatggttcaggtggaaattaacaaaagaatcacaacaccaagagaaatggatgtagtcattcaaaacccaaattcaaggctggaaagttttgtaattactgcaagaaagaaggtcatctcaaggatgaatgttatactctgaggaacaagaataatagagacaatagtaaagacaagaatgataaaggcaaaaagagtgaggttgttctgagtattgatagttataattctacagatgttcttgttgctacaaaaatagagtcaagaaaagattggaccttggactctagatgtaccatatattcatatgtgtccagacaaaactttattcaattctcttgaagaaaagatttatggaaatatacttcttggagacaacaaagcttgtttggtaaagggtgttagtactgtcatcatcaaaatgcatgaaaatgttcaacgaagattaactaaagtgtacagctaatgtacactagagtattggtaaattagagcctagagcactaaaatgtgtattgttgggatacccattaggaacaaaaagatacagactttgggtaagagaaaaaggttttaaactatcaatagcacggatgtaatatttaatgagaatatttttccatttattgttactaacccaaatttttatgctctagcccaagtactaaccatgcaggtaactctatcaactttgatctaaggcctactgctccaagtgatgaagagaatatataatagctagaatctattgaactagaccagggtagaggtcaggtggaacaaagagagaatactgttcagatatatcaacaagaagagaataattttcagattgaataaggagagaacactattaaggtagaataaggagagaaaactattcagttggaacaacaaggaaacctgagggaaaatcagacagagttttcggaggactatcaattggctagagacaaagttaaaagagcacctagacagaattccaagtacagcttcaacatttggaatgaggacattgcctatgcactgttaagcactctaaaaggatagaagatagaaccaaaaacttatgaagaagctataaagtgcaatgatgcaaagaagtgtaataatgcaatggatgaggagacatactctttgaagaagaataagacttgggtctgtgctccaagacccaagggaaagagtattgtaaaatgtatgtggccttttaaacagaaagaaaaatgccttaggacaaagaaggagaaagaggagatgagctagatccccccactctaataaggtttgtttgatgatgtatcttatgatgagtactgcatatactgtaagtgtttttagcaagtatatggttatgactggcaagatacattggttggatatcaaattaatttttaggtacttaaaggggacaacaaatgttggacttctatttagacagtcacaaaaccaaattttggtggaagggttttgtgactcagactatgtaggggatagagacaaggtgacacagggagatgtcacagtggaaaaggttcccactgaacataaccctacagatatggggaccaaggtggtaaccctagctacgtttaaacattgtatgaacttgctagggatagaaaatggaagctgaccctagtgatcattcaagctaaaacctcagagtatcatcaactatcattgggtacataagggaatctagttggaatttattaatacagtttcccttatataacttaagtatcaaattactaatcattgggaataaaatgacatttttacccacaacagattacaacttacaaccagatttaaatacaagaaatgtaatacaaaaatacagtttcaacaacaaaaacattctccagcaagatcaaacagttacagccctagatcagttcacagatcctacatctatttaaggatacatttttccatcattttgtaacacttaaagctagtgagagagcaattgagagagcttttttgtagagagccttctcaaaggagagagcacattgtttatccccagtgtgtatttgcaaaagagagaaaaagaaagagttagtaactttgtaaaaggagacaaaaacagtgagaacataaagagagacaaagttgtaacctttacgtgatatgttgatgaatgaagatcaggactactctgaggagagcttgacgaagaagtagccattgttggatgaagtccgagaatatttttgggtattgtctttgcactgtttgttgtctcataacactaacattttgatttctttgatattgtgattgaatattattgttcttggttttcaatttttgagttttttggccgagtttgtttgagaattttttctaggttcgggtcttggtgtttgtagttgtgggttagtaatttcttggtttttcgggtttgagtatcaagctgaaaatttgttcttttctaggttatccttgttttgggtagaacaagagagaagaaaagattttttgaaaaaatattgcaaagttgtcagtttataaaaatactattttctattgtagacgcataatagaaagtgtaaaattaaaaaaataccatttttatactattgtattaatttcgtatttttgaagttgtatttgaataaaaaagtttctaaacacatcgcacactaactttctagtattttgtggcttgattcttgagatgatggcgcttaggggtgtgagtttgtgttgctattcttagtcggagacattgaacttggtcagatacatttaacggatgtacaaccttccaggaaaagataattttgagatgatggctgaattcaaagtttaccaagctgatgttcacgcatcctgtaatgatatcgtattatttttttgatatatcagtatcaattttaattttttatttattgttgattatattggtattaatggtgattatgttgagttttgtgctctaaataaaactcatttcannnnaatcagatttattaattaatataagatcagaaattacttttatattgcatggttcacatnnnnnnnttcatgattatgtttaatgtataaattctattaattctaatacatatatatttgttcatgattatagtatcgttagcacagtagaatataatcatgatnatatgttcaaaagtttaattcccatgatttgtcagttcattaaatttagactaacatgataatcgactataagtcatacttacaccttggataagtgtnatgtcctttccagggcattggtaaagtttaccagtatcagatgtatggagtgtacattggaagggaccgatattg

SEQ ID NO: 21673 - DNA, 1845 bp, Cannabis sativa
  modified_base (1801)..(1820): a, c, t, g, unknown or other
ttgtgagttggtaaactgtctagttattatcttttggtttattggcatttgcttttgtgttttggttttttgtgtctctcttcttgaatattatgcttggtcgttgatcataatttgtcaagggagagatcgtaagtttatgttttctgtatggaaaattatatggctttttactagctttgtatattattttctggttgctatcttggtcttttgaactattcatctaagtttgtcttagttgcatctgcttagtctattctcttttattgtttgccatgtcagctttttagcttttttgttttttatttagcttagtcaatgccaactggcttgagctgttgagttagttagctgagccagtttttctagagtttgatatatagtgaactgatattactttttcctaactaactctcattttcaatagaatcctccagtgattcttgctctgctagggaaaaatatttttctatttttcttttattgtaacttgcagattgtaattcattggatcttcagagtttgaagaaggagtatgaatctataatgtctgaagagagttcagactattctgctggaggaatttcagctttgtggaagcaaggtcagcttgtcttcttggatctaagtgtgcttatatcagttgtcttgattgtatccaagagttaggtaaatattgtgtaaagtcatttctaattatattgtttgatttgtaaaatcagaactggtaaatgtaattgaaataattttatagtggatgttactttatccggttcttaaggacccaaacattactcgattggaatgtgttagatgaaacttgtaaatttggtgttcattgatttatttttctagtcttaattcatcaagatatccacttaattcaattacttagctttcaaaattattaggactttcaaagaaaaagttaacctattcctctaatattgttacacataaatttaaagaatcaattcccttttaatgtatgtataaataatcaaatttttgtttcttcatttcatcatgatcttcttcttataacaaacataaattttacttattgtcatttcatcatgatgttgttattataacaaatataaattttacttattaaaaaaaaagatattctttggaactattttctaggcaatattgatactaaaaactttttttttccaataaattttctcaacaagttttattataacacattctttgatttaattccaaacaacgatccataatagataataccatgtcaatgtatgtgtgataaatgatagacaggatcaaccagtaactaataatagccatgtatatgattatcattacacagcctaaatttgtatcaaccttactggtttccaccgacacaatttactagttcagagatcaacatctactaatattaaaaaattatagtgtatatatatattaagaaaaaaaaaggcacccttctataaaacttacttatgagaatattagaaataagctttaggaaaaaggaatagaaacaataaaaaagaagaaaaagttacatattgcacaagaaagaaagagtggtatgaagttattctaggcttgagagtctgggcccgctggttttgagttgagaagcggttgtagggccttcacaacaattgtcatattgggcctgaaatcagcctcgtattgaacacacagtgctgctactgctgctagctgagcccatgcacaacatcacaaacacttcaacttattattttgaatagcttttaaactagaaaactagaatttgtcataataataataatannnnnnnnnnnnnnnnnnnnaataataataataaataactaaaaa

SEQ ID NO: 21674 - DNA, 3652 bp, Cannabis sativa
  modified_base (83)..(86): a, c, t, g, unknown or other
tagcagttccatattaaagatttcgaaaactttaatacactaccgacttattttattcatattgtataatcttaattctcttnnnnttcttacaagattataccttctccatatgaataggaatttttagatatttaataattctactcttataattatatatcatttatcttgtaattgtatttcatatattctccaatatattatccattaattacttgcttttagggcataaatcccaacactgatatcctcacccagttggatagatggtcattctgaactaacccttcaattccatcattcaagtagtcacattcatttgtggtatgcccaatatcatcgtgatattcacacattttatttgggtcccttttttgttttccacctttgtacataggtggaggtcttttttaatgaaccatattacaagtatctttataaacattctcctaagtatccactaagctagtataatcagaatatcttggttcttgagttcttcctttctttgcagattcactttagcttggagctttagaacttttttgtttcgagaatgacttacatttaattctggaacttacgttttttggtttgcttattcgagaatagcactctatccaatttacgcatctccatatctagaaaaacttgtttgtacagttgattgttcagaagtaccaggtccataaatggtgggtgttgtgagcattgatgttggaggcaggatagttggagcactcatctgctaagtttgtgctatgaaagtgtttactgatggtgctggaagtactccataagcttgagcataagcatcttccaagtttatgaatccttgggctctagataaaaatttagataaagaatctgcccttttcctttgaagttctccccatagcaagtatccaatggttattcctaatgttaaagccaccatcttcatatcatcaataaccttttttgtagcagtatccatcatatgctggatatatttcttgaggctttctcctggttatttcttgatgttagttaaagaattaacttcccggtcaaaattctttactgctatgaattgttacttgaacattgcctgtaactccttccagtttgaaccaatcctggagataactttttccaccagtcctctgcagactttgatagagttaatgaaaagtagaggaattgtgcaatgtcactagcttttgctttgcagtatctggctatatttggataaatggtccttggggtccattcttccttcatacaattccatttttaaggtattccgaagtgctccagtagttgttcatctatgattcttttcacacatgattatatgtcctcttcttctgagttagacacagttccattttacttctgggatatcttttctgtgagatttgttaactattcattcttacgctctaaatgttgagttttaacatctaagagttctcttccctaaacatggtcatcattgtgaggactgactttcttagttatggccttttcttttttggtatttagtttcctttaaagatcattcgtggaaagacttctacttatgttgtctgatggcgaacacacctcttcaacatcatcacttcgactaataaaattgtcgcagtaatttgcattcttccaagcagtaggctttttggcttttgcattaaatctatctttttgtgtagctctgcctctacaatcagtttggtccccttgacctagggcatcattttctttctttttcttttgaggttggctgacaggtttggatttcttttactgttcagtctgggtagcctttcttgaagtttcacctacctttcctttccttttgtccttatgaagatcataagttttgggattttcaggattagccttcccagtggtgttattttttagagctgcatgagtagttttgcctacagtggatagtgccttggttacggcctccattctcgctattttcttgtgcatcaacaaagaaaactgctcttgcaacgataatttatcttcagatatttttaactttctagccataatgaccataagatctatctcgtctagatattcttcccttttagcatcaccatcagcgggcatgccttggtgatcatcctcaggcatatcttcgtgatcatcctttggtacatcttggtgatcatcctttggcacgtcttggtgatcatctccaacatcataagaatcattctcccctgattcatcatctttagccatatgatcttaagggataggtttcttgctaatatggtccttcttgtggcgattagtcacctcatttggatcttctgcatcacccgttttagcattgggatcgacatcaccctttttgggatcattgaaatgaaaaatagactttgtttgggcgaacaccataattactaaacataatctgggatggtatcactgctttcttcagctctcgatgaaagcaccaaaatatttaccgagaggattcaatgtgtatttatagagtaatagaggtcatacttagttaccctttcccactaatggggtgtttatagataatacattactttgggcttatcaaatgaagcccagcccatgaggcaatgactgtatgctgacttggaatgttgatcacagtcacaactattgttaccatgtcctttattatgaataattaattatatactaattacttaatcttcaattatgtagtttcatattttagcttgatattattctttgtcagagatataaggagagtagcttccttattttgcacaaaataataaatgggaaactataggtggcttctaggtacacactgaaggtttctttcggctacacggagctaaaaatccttctagatatggactagccttggcagagacttgtctgagcaagaagtgtaattatatttttggaaggccaagtttgtgttgggcttggcccagttcatgttgttttgggcccactaatagaccttgacttctatttggaatttatgtgtcccttaacagaaatacagataacagctaggaatactttcctgcataatggaacttcactttgaggaacatcctggatatctaatttttatgggttgtagagcaaaggcttcacttgaatgcaccgacttatgagtgttgggggcattgcctaatataccctacaggaatttgacaagcttctcaaagaacacatgctggtagctatttgcatgactctatttccttcctccacacagatttacttattaactctctcatagaagtttatgtgccaaccaattcccttttccacatactcccccataatttgcttccaggacgtactccaacggctatggcaaacttggattcatcttcaaacatcttccccactttggtgacttcgatattgaagcattagatgtagctttgtaacctttcttattcccattgcttcacattggtgataattgttacaagcataacgtaatcacttattgcttggtgctattgaaggaatttctccaaaaacttcttccaagatgtaattgttcctagtccaagccttttgaaccacttatatgcagctccctaaagtgtgaccacaaagcatttgcaccttgtattgcatgacacatttttcatttttattagctcattaaaagatc

SEQ ID NO: 21675 - DNA, 3754 bp, Cannabis sativa
tttattttatggtagtaattaaattcaccctcacacatattatatctctatatatattatacattaataagaataatgtgcactcctgctttttaactgcttaataaggaaattaattaaaaaaaaggtatgtcaaagttcctgtattatcaacaagtttgaaaagtcaaaataacattatagtttaattaaagttattttgtcctatatttgtcaaaaaataataacatgcaaagttatattgtcccacttaccagcttcttaatttatttttgttttaaaaaaattcaatagctatgtggcaaccctaaatcatatctcccatatgcatcacctcaacttcacaaattatatttgatcaactttcaataatgctctgcataaaaaaactttcaagaatacttttatcttacaattttgttattataaataattgattgtcaagagagtaagagtgatagtaaaatatagagaaaattacacagattacagatattttaaaattttgtttgaaaaatatggcacaatttagttggcccactttttatgggctttatattgtgattttataagtgatcctcttatgtttttgggtattttaatttgtaacatcaaaaccaattttaagtaaacacttttagtattttattcagctaagtcagccctacaagtttatacaagagctgaaagtggatggtaattttgatagaaattttggcttttgaagagatatgtgaaatttgaaagtccctcttaaactcaataatatattatgaagagcgatgtctaattatcttacaacaagattttaacttggtttgaagcatgcatgatgttccttcctcttgtccaagtttcacattgtctggccttaacatgcttggcgtttgtactttgtcaacatattcagatattgacaaattatctttttgaacatgtgagaattggcctttgagttgcaataggcgcgcacgagactagcttaagaatttctgctcaagagctctccaaactatagagaaagtgtgatgatttaccacagaggcaagaactccttcagtcatggaggatttgagccacgagaaaaggaattgatctccttttttccattgaaggtagacatggttgacagcacatgtaaccaaggtttgtgtgggaggaatgccaggaaacaagattttgtcgaggtcatgcccaatgatagtacgaacaacttgagacttccacgacagaaagttggtacgatcaagcttgatcatgagggaagaagataacgaactagagaacggattctagattgagggtgctgaaataaaagattgagacgagttttcttaagcaatttctttgcctattgacactgtaggaccaaaggaattggatgactccattagaagtaactgataccatgtagaagtttaactatcttaaaaaaaaaaaaggtaaaaaccagaaggtgcaaccaacaaagaaaaactaagcaaaacaaaggaaaaccaaggaagaaaacaagaaaagcttaaaggttgtttggcttcataaaattgaaaacagtttttaaaaactaatagggttcatttgtcaaatttttaaaaatagtttttctaaaaactgagttttaaaaaattaaaaaacaaaaaacatcaaaatgttgttttcaattttcaaaaatatttttttttgtctaatatattatattttatatttttgctcatatactcagattctagaaccggaaccaataaataggttcatgtcatggtatagtgttaaaatattcatttttttttagtaagaaaaaatttaaaaatagttttaaaaaacttgtgtcaaacattattaaaattttaaaatgacaaaaaactattttctattctcacttttaaaaacacaattttaaaaagtaaaaactatcttagctttcaatagtaaactttgaagtttatttatagagagaaccttacaaagaattatttacaaaacctacacaatcagttagttaagctaactgttataactaatcagcaacaattataacaactagacaaaaaattggaaaattggaaaattctgattgtagatgtccaaaaagtaagtgacgttggctaaaagtgacatgacaaggtcattttgaccttttaaagttaattatttgtcagttaattgactgtgtgaacacattcgtatcttttgcttttgttacatttagttttgtgattatatttcagcacattttaataaaaatgatatcagaaaatttctccactaagtagagcccaagagtccaattataccagagcccaaggatatttgagcccagacccaatactaaagaggcccatggtgatggagatagtgcgagcgagagaaagaaagaagaaagtccttcaactccatcgacggaacgaaggaaagctgagaagccagttctaggttggacttggagagtgtagagcaaagatgaacacagacatcacagcctccgcgaaaccagagtacccggttgtagatcggaatcctccttttaccaaagtcgttggaaacttcagcactcttgattattttcgtttcgtcaccatcaccggcgtctccgtcaccgtcggctacctttcaggtctttctctttataatcttgttcgatttttctcacgaagttgtgtattctcttgaattcctgtaattgtagataatggactatttatttagttattaatttttctgtgtaggaataaagccagggataaagggaccatctatggtaactggaggtttaattgggcttatgggtggattcatgtacgcgtatcagaactctgctggcagactcatgggttttttccccaacgaccatgaggtagctcgttaccacaaatgagaaaatctaatttcacatgttttagggttttcttatttttagtttctttgcttgatattatttgtggtcaataaccagaatgttgttctcgaattaaagcttttgcttttttgtttgctgaacaacggatcattcttgtactttctgaggttaaattgtggtttttggattccaaagtcaatgctgaatggcttttgtgctttcataatgttttcctccaatttttagagaacttcatctgtgatttcatgagcacccaatttggaaataagtaaagaatctggaagtgaatatttgttctatatataattaattgtgatgacattgcagaaaatttgggcttttttgctgacttaactttctgtttttctttatgaactcttttgaggttcattaagggcattgcattatgctgtgcatctctctaatggcgaaatggtactatgatagtaatagttctgacttataacatttaagaaagtcttgctgtctaatgaagatttcaacttttgcaacgttgccttttagcttaaacatgtactttggaaataaataaagcaccgtttgtatgcactttccattgattagatatttcatttacaatttcacatgttaaaatgttttgaagcacacaggttttcctttaatcgaacactctagagtcccatctgcccttgtttcttatttctttcatgtaatcatttgttgtgattgagggtaaaaatgggaatggactaggataccttctctatgatctacttataataaaccaaaaaatagattcatatttacctctactatacaataggaattgaaaacttttgggtttgttttaaaataataatcaactaatgggtttcaaaattagtgtttgttgat

SEQ ID NO: 21676 - DNA, 2542 bp, Cannabis sativa
atttggacaacttttgacaccatcaagttgtagtcgagtaagtaaatcagtgatatacttactttgggagaggtacataccacttgcatctcggaaaatttcaattcccaaaaagtaatgtatcggacccaagtcttttaaagcaaatgaattattgagaccagtcaccgattttgaaatgagggcagaattaggtctagtgcctagtatgtcatcaacatacactagtaagatgatcaagttagagcccgtgccatagacaaaaagggaagtgtcagatctagaagcttgaaatccccactgtagtagagtgttcctcaacttttcattccaagctctaggagcttgctttaagccatagatagctttatggagatgacacacatgatttggtcttgtgggatcctcaaaaccctttggctgtctcatgtagaccgtctcatgtaaatcaccatttaagaatgcattactaacatctaattgtttgacaggccaatttgaagtgacagctagagataaaactgtcctaaccgtgactggtttgaccacaggactaaaagtctcttcataatcaatcccaggtgtttggagataccctttggctactaatcgggacttgtaggtgtttaaagacccatctgcattaagcttaattcgatatacccacttgttgtcaataacatgcatatccggatgatatggaacaagagtccatgtattagacctgatcaatgctgtattttctcgctgcatagatttgaaccagtttggatctttgattgcttgctgaactgaccttggttcagttggaaagagagattctttgagtggatgtctagtagccaagtatgccttcggtttgtaaatcccactttgagaccttattttcatatgatggactcgagagataatgctagaagtaggaggttgaggctgttgcataccagaattttcacctgcatttgtagcaactgaagtcggatcagtggtgacatatgttgcagacacagatgcaacagcaggttgctgcaaattggaggcagtgggtagggatatactggagctgttggtatgtgtttgaggtgaagaaatatctgtgataggtgaatctggtatgggaagttgatggttattttctggtatggatgcctgaggggcagatatatgtggctgaggcctaaagggtggagtcacaggtactcgggtagagatttgtggttggtgttggttgtatattgtgggattggttgagaaagtaggacaaccaaaattagaattagcaccagcagtattattagaaaaaaaaagaatgaggaaatgaagccgagggagagtgttgtacctgattgatgaaggctggaaaatagctctcattaaagactacatttctggcgatgtatatccttccatttgaattttcacaaagatatcctttgtgatgagaggaataaccaagaaatatgcattgatccgatctatattccaatttgtgattgttgtatggcctcaagtgtgggaaacaggcacaaccaaaaggcttaagtattttgtaatcgggtagacgtccaaagagacattcatagggacttttaaaaccaagaacaacacttggaagtcgattgatggtaaacactacagtttgaaaagcataccaccaatatgataaagataatccagattgagcaagaagcaccaaaccagtctcagttatgtgcctatgcttcctttcagctcttccattttgttcgtgatcatgtggacaaggatgctgaaaatgaatcccttgggcacttaagaatttagcaaaagatctatactcccctccccaatcagattggacacatttaattggaaaattaaattgtttttctgccatatttttaaatttaagaaagacatcaaaggcttgagacttaagtgtcaaaggatagatccatgtatacctagtatggtcatctataaaatgaatgtagtattgaaaaccctctttaaaagaaacatgggaaggaccccataaatcagtatgtattaattcgagaggttgggaagcatgactagtagacaatgaataaggttgtttatgactctttcctttttggcaagcaacacaaaagtgtagatcttttaaggtgccagaatgaggaattgattgtaaaattctgcttaaaattgcagcagatggatggcctaatttttggtgccaaacattcacatcttgctgtaatgtagtagacaaagcagtagaaaaacaatttgagggagaaggaaattaaggaaattcattgtctttattatcattgagcatagtacaaggagctactataggaccagtagaattattacattcagtagtaatactaggaatactaggactatattgaaatcgagacacagtagccaaattgcattgtaatgcagtagctgaatggttggtatcaccaagcacatagaggccatctttaactggtcccttgagaagaacagctcctgtgagtttgtccttgacaaaacaacaatttttgtgaaactcaagatagacatc

SEQ ID NO: 21677 - DNA, 3713 bp, Cannabis sativa
ggatgaaatagtacacatttatgaattgtattttttttttttaatatatattttaattttgtctatcttttgctagtacaataagcaagaatcgcatgtaaccacatcatgaatgacgcatttcatgaattatatccatatccattaaatatatatgtgagaataagatggaatgttaatcttggcagccacgttttggctactctcagctagctcttgccaagaaacaccatttggatattttgtgtcttttttaaattaaaaatgaataaaatatcgccaatggtaaaagtagaatccatgggtttcatactacaaaccgcttttctccgccaactgattacactctttattttttttcctatatataagtttgacacatgaaaactccaaaaacgttatcttcctacacttacttaatcccatacttattacaattgaatcatgatgagttgttcgagcagaggaagcttgagaaccagcgtagccacaatggaagctggtcatacgactacggatacaaattactacgactcaaagtcaaagtggctttcgggtaacataattaatccatctattcataaaatcagattgatacagtgcttatcaggcattaatggttatcattcgaatgatgtattaaatgctggggctgtttctgctgcaacaaataagagtacgagaaaagctgaggagtctcttcaaactgttatgtacttgaattgttgggcactaagttaagaccctctacacacttgtcaatgtaatgtaaataacctttatcaaaacaattcgcatatattgtattattttgttgctggatttttatgatatttgttcttttttttcgttttcattttgggcttatatgaaacatcacccaaaaagagctttgactaataaattaaatatctaatttaatcccatccaatccaatccataaaacatagatattagaatttgtgtagattagattgtaaaatttaaaattcacttacttattagatgttaattgacatgtagaagtaatcgatttaatctaatccttacatatctatatatgtctagatattacctataaataggtaatattagaaaattttgaatttttatatttaatttttatatttaattagaaaaatctcttaatgtttacatgatatagacggaatttattttattggttaaaaaaataataataaaataaaatttttggcaaaaataataaaaaagtgagtttgacttaaatattttttatataaatatatttttatatagtgtaaaaagatgtattttttgattttttttttaatttaagtagctaaattaaacataaaaattataatttttcttttattatttgctatcggatcaaaatttaatagtttaatatttctaaaattaatgtttatagttaaatttatttagtactcataaatatccattgaaaagtgtttacctatatatatttttaaaaaaaattatatacacaattaatattttaattaatttaaaagatagaaatttaaaaatttacaaaagagaaaattatttcaaaatttagtacatcattttattcttaatataaggaaattataatctaaaacaaaattcaacatttctatatactttttttttttcctttttcctttaaatttgttattttttattttatttatttcaacatgttttccttcttcctttaatttgttattttttgcgagttgaatttattatgtagaatagattagatacaaaatataaaatctacacctagtgcggatcgaatgcactaggagtaaaatagtgtagatttgattggataaccactagatataacataatggattattgttgtacctaaatttttgtatgtttattaataagtataaattcaataacttttttttaacattataagtatctaataatagtaaaattttagttttcattcaatttgtcaatagaaactccaatttgaatttattaatctaccaacacaatagtccaattcatactacataatttttttctagatctatttatttagtttgtagtatacgatgctgtcctttaccataatacgtggttcaaaaactccaatttccatcacaatgagtaatggcctctttagaacatgaaaaacaagattaatgaggcctttttgagttattggaaaactattgttggtgcttcagtgcagtctcttagtgatggccttggaatttaatcgaatcattggggacttcctagacccgacataattagagtgaatgtggattatgcaaataacgatgggaagtgttcagtgggggtcgtggctagtggaggtgtgcttgcgctgttcatctataagttcaatgcctcttttgtcattaagggggaacttgaagccaattctacggacttgaatgtgatccaaaggttggagcttcgtgacgtcgacctgatctcagattgtaaatctcttgtcttggcaattaattaagaagctccaaactctttggtggaatcactgtttttttttttttgtcatgttttaagtttgattgctgatttagatgtttctatattgtggatgtctagaaactgtaattattcggctgatgttttggccaaataaaatctcaatcaatcatgtaatgattttcttgaattttggaaggtgagttcttttatactcaccaatattattgaagatctttcaagtcttaacaaaaaataaataaccatcttgaagaagaattacacttttattaatattaaatacttattatatcattaaaaaatatttaaaattataacgctcataaaatcaaaattttagagttatttactttagtataatcatcatagcattagattattataatgtgttggtagattaagctgtggcctgtcgacgggtgcgttgtcctttctcaaacaatttgtttgtgtaaaggctgaactcatataaaaagacaaaattaatggtaaacgacattatttgcaagaaatgacaaaatatgaaaacaacatattctgcaaaatgtcatttacaacaagaaaaaaacaaaaagaattgaaaatgtcaggggaaacgacatgaacatagaaaaactaaatcggataaacgacatacaattgaaaaaacaagatcaagctgaaaaacgacatcaatacgacatgatttgcaaaagccacacagccacaatattcacgaataatgaaccttcaacgaagcccatagcgttgtcttccagcccaacattatgttcacgagagaaatactaatactaataacattttataatgagtttttatactatttaagtaaaaatatcaatataattttttttatgaaattaaaatattacggtaaaattagtaatatatgataatttattatttaggtaactggttaccttaaattatttaatttttttaattttccgacaaaataatttttaaaaatttatattttagtaaacttttcataaacaaaaaaaaaaaaaacttaaaactaaaaattcttcactaataaattaatgaataacatgtatatttcactaaatttctttttgctgtgataaattgaatattggctggaataggaaaatgatgaagaggaaacaattaatttttattttactcttattagaagtaggtttatggtttaattttgaattattatgtatgtatgtatgatccacttagattgtaatattccc

SEQ ID NO: 21678 - DNA, 3489 bp, Cannabis sativa
tggaacctatcttttttagctttcaaaattttattgtgtccttatcgatgttattgtgaagttcaaattttggtatccttttacatttttttttcttttagatttgatgatgttattaacggttaaaaatggaaaatgctacaatttctatgtgatcccaaatgttacaatacagaaccctggcccgtaacaatgctgaaaacagtttgcttttgaatttttcgggtattaacaccccatagtatatctctgttggttggtcattcttagcacaattgtagcattaatttgatggcttaaagttggcaatcttatcataaaatggtttgtggcgatgcccatatgtatctggtggctggttagtggtgtaggatattagatatagcgtggagttgcagcttatttgggtttacattttttatttagtttagtttaggttaatgaatcatgcgaagttctggttcttttaacaaaaatcaataatgcatatcgactgacatagtatttgtaagatacattatgtatttgggttgtgtagctgctcatatatttgtttgcagtatacatatactgtttgattttgccttgggtttagtacagtggctattgcatgagtacttatattccttaatactcttggattttacacctgtgctgtgttggtttgtaaattttatcttaatgcatagatgtcacactaacctaccctgaagaatgaatgattagtttctccctctgctttgcatagtagatactaactcaggccagctactgagaaagggcttcttctttgtaaccatcatattatagaatgtataggttctggtagatttaaagcatctgtgtggaaaatagatgatattattgtcagtggcatatactttataagttctgatagatttaaatcattgttatggtggatgatattgcgttcagtgtataagagagcaaaatatataagtatgacagaattggtctgcgagataaacattcgtatctcatttctatgaaagagggtttgagtttgatgcatcatgcatgttgctgaacaaaattagcatgctaataacatggctggatttagttttcaaagtaaaagaagagttgctacaggtgatttagaagcatcggacgtgtgtgtagtaatttagattgaatcctctgagtatttaataataattgtttgctcaaataattaaataaattatgccacttttgaggctagttcaagtggttagttgtgagtatgtgtctggctcgtcctcaattcaagtccatgtaatctatttaattaaatagataaaagaaagtgcattatcattataaattaacatttaaacccagattaggttttccattggtttcatatggtcttttgtttctgatttatattgtgctgtagttgatgaatgtgtgttatcggtagatgattgccttgttttccatttaattgatatgcagcttcaaaaaatttctcctatctgtgcaaatagtttaactaattctaatttatattatatattattatgtgtatattttcttttttgttttcttttttttttttgctatgcaatcggttcatctaattctgaaaaagaaaatctgggtggaccgttatggttggcttgtgaatgaaactcaattttttatattataagaagggaagaaggaacaaatattatacaaaaaagtacttttggtcaatgttgacaagtaggtaattggttttgacttgaaatgtatcttattaatataactaataactatgacttgtgctgcatgagtattatcattgtttgggtgttcacatgtgtatatgtattttgggatgagttgctgcaaagatgacgtttctaattagttgtgtgtctatttgtctgtgtttattttgagtttgagttacaactaagattgacctttcatattattcatgtgatgtgaaaaagaaaatggatttggcttctgatacactctagaggtatgacaaacttaatgatttttattgataacaagagcacattaccttcagggttcccaagccttcgagactatctattcctctcgaaggcttgtctttgctaggttcatttaaactaaactattagttgtctgggattaacagaaaagatatagcctgccaataggattgggagaagtagtggcttacttggaattattatttaactagctccagatcagcagccatattactaaactagttagtggcttttgtccctagaatatgttatatgtaccaatggtccaacagtttcccaatgggatagggtgctttttttatcgactctttggactacggtggcaaaggatgtagtggtttgcacctttttgctactgttattagttgaaggtttcagtgtccaattagattttctttataatcctttattttaaacctctgggaattatgtttctggattttgcattatctaaatatttttattatttttaaaaaacatgtttattcattattcatgtggaagttgttaagcttctatgagctcgactgagaaggtggttttaaagtgtgtgccttgctatcttagaatataataaatacccgcgtatatgttctttcaatttttcttttgtttgctcctatctgctctttattttatgcttttttttttttgacaaaacatcgaatattgcagctggatgcgtcggggaaggatttgaagcttgggtttgtcatcttcagtgccctttttctggtttggtcttttagtaataagctacttattcacaaagcatttgaaaaacttgaagtttgtgaatttaataacatagagatttattatgttgttgcgattgttatcctgcttcttcttttgactggtcaagttatctcatctgtaaagaatcattgctgttaatttcttgggttccagatccttttattcgttttgagtgttgttttggtgaaacgtgtagatagatggttttaaagttcctttgggttaagtatttcatttgtggttcctctggttcttggtgcacaggaacttaataagagggaaataatcatcgttgggaagcatgattgctatgcagaatttataaagggatctgaatgaagtcagttcccattgacgcctagagaacaaattccacactccaaattggtcactcttattactaagcatcattatttcaatgcctcaattatcaggacatgaattccagaagcattgttaattcagtgatttttttttttggacataataaaggcttcaaatctttcattcatatctcactttgtgaataataatcaaaattatatcacttctcatcccctctataactgaaaatagacaaaaaagtaatagttgttccagctttctaatatatatctgagggaataataatcaatgaagccatctttatcaaaatatatttgtatctctatattaagcatggataatggtccacacactcttccttttcacctgctttcaaaaaaaaaaaaaa

SEQ ID NO: 21679 - DNA, 3380 bp, Cannabis sativa
aaggatagagggtctgtgtagagtctgttaatattgaaattggattaattaggttggagaattacccaaaaagtttagatggaatgtacatcggtgtatgagagggtataaacctgtaaaagttaggacaggaaacttgatagatcaatactcatttaatttacacatctatgaatgtatgtagctagattttaatttgggatttttgagagatacagatagcttgggcgttttacatggattcatcacaggcagcaggaactggtgcaaatagcggcaatggaatgatggttcccctagccaatgatacttccattgcagcagcagcaacagcagcagtaacaacaacagcaggagaggaagcgaagcagaacctgaatgcggtgattaactctacccagaaaactctgggccttcttcaccagctcaatctcacggtcacttccttcaatgccgcatctcagcttccacttctccatcgcatgtatatttgtgatcccttagctctttttttttattattatttttattttgtctgaaatgtttaatccttggttatcattcataaaaactattgcaggaattctattgtttccgagcttgacaacatggctaagctagcagagaaatgtaatattcaagttccaatggaagttcttaagtaagtttatttttgtgatatctctgatccttttataaccctttgtaacatgttttctaatttagtctttaattgtgtcattatagtctgatcgacgatggtaaaaatcccgatgaatttacaaaggatgtaataaacagttgcatcgccaaaaaccagggcaccaaaggaaaaactgatgccttcaaggtgactcttttattttgattctgtgtgtaaaagcaattttatttcccttcgacgattaatgaaattttctctttgtcctgttcagggtctacggaagcatcttctcgaggaaattgaaacgatatttcccgaagatgttgagtcttacagggagatacgagctgcgtctgctgctgtaatttctctcaattatgcacttatgtgcccattttctctgttgtgatttatgcattcatattatgttcctcactcaattatagcccatttaaccattgaaatgcaggaaatgaaacggcaggcacaagcacaagcacaagctcaggcccaagctcaagctcaaagcatgataccaaatggagatgtaaaggttaaaaatgagctttgatggattaaaaatgatgtacatttttgttgcatgctatttctccattcacaatcttaacaacacaacacctagatctaggcttgttagggtggttgttgtttcatataatctcatataaataataaatatatcatttttaaacacacttccctaattttagttaataatatagggtttttctgcattgttcttccgtgtttttaacatctgaagttcaaacaatttttttcacacgtgtataacagactatttgaacacgctaaattattttgattttttcaaaaatttatcggacgtgttagataactacaacgaacacactcaattttagggggttgtaccataaattttttcaataaatgtcatcttattaaattttgtcatttgaattgtcctcattagattgactcattcatatatatataagcgaaatattatctttattaatcaaaagagatcacaaatgagtagtagtagtacccaagtagtgagtgatgatgcattttggtcttatacatagaaattcccacttccaaaaactcacaaatgcacactcacctatcatcatctcacgttctacttaagaaagaaaagaaaggcaacaactttagtgaaattaattagcttaaatagtcattaacaagtaagtaattaagctaagtgagcaaaaactccaagtagaggagcattggtgactgtagtgggctcagcatgttggtaattagaacgtgagtctgaataggcatcattttcatcagtgctcacaactgcaccatccaacacatttgggtttggtgcatttttattgaaccaatcatcgaaaccaccttggcagctcactggccttttatctttcttgattgatactattgatgctgctctgtggtgaatctgttgtggatactttgatccaaatccaaccatgtaactcatctttaatgggtttgaacccaataaataatccacctaaaaacatatataaatgtataaattaagaaaaaatgtgaataagtcatatgagcacatataagagaaccaaattgtaataaagtagttaactgagagagaaaacaagaaaagaagtcatttttatcagcacaacttaatcatatttggaaagaaagaaaaaaatgtgaatatatttttttttatataattataatattatagataacaatgacacatataaattaaaattaatgagccataaaaataaaatatttttcgatctttattttaaatcagtaaaaaaaacatattttttcaaaagataataattttttgggattttttcatttttaaactctaaaataattttttttttgtactttaccaaattctacataaaaacacctattgcaaccactttagaaacctaaaccttaaatttgaaaaaaaaaaaaatagtatatggagtaattcccttaatttttgttagatttctgggctaggtaagccttaagcacagacttagtccactttgtggagagtcgggccttgacataatagtaattttgtagtaaatttaatgtaactctaccaatgatacactaaggtattcaattacctgtgatttaacaaaggcagtaagatcggaaggagtgagtgaagcagcagagcattgaagggtagctttgttagcattaagatagttagagtaaagggcagtgacaaatgtagcagtggctacatactgaacattattccaaggcaaaaaccaaagcaaaccgccttgagttttcttgaagttgttgcttcctttgccgacgcaagagcatatgaactcctccccttgttgcttgaaccgcgctagtcgggtggcggccgagcccgctttgccgtccattataaggtttgcaaccaagacttgtgcgccaacgtatttgtcgtcccatgagaaagcagttctgagtccaccactgtctgatgagcttgaaatgtaatcaaggtattgttgcttcgatgtagccttgtatagccatgctgctgcccataacatctcatcctaataatcaaaattaattaaacaatttgccttgaaaattactcaaacaatttcaattaatggaaacttacaaaaatactgaaattttggttaacttttacaaaaatactgtcacacgaaatttttttcaaaaatactgt

SEQ ID NO: 21680 - DNA, 1202 bp, Cannabis sativa
ctctctctctctctctctcgcttaacttgtctctcgcttcctcgctgctcatggctcaacgccggtgagccatcactaggcatggctcgactcatctctctcttgctcgctactcacggcgcaacacaaatcatctctttgtcatattttttgggtttttttttgtgtttatttttccttagattctgatttaggccattattcttgtatggttgattcctttggacattttcttggtttgattatgtatggtttgtctattttatttttgtgatggtcttttttgttatagaaaagatttgtgtaatgtaaataaatagtattatttttgagctcattgtgttatgtacttacaaccatggttttgagtctcatgcaaagtttacgggtgcacaaagctgccactcatggtggagctttggcgagatctaaattttttttattgtggtctcatttctaaattgagtgatatagtgcaaaaataaatttcacacctgcgagtgtcaatttaaaaccgacaccaatgcaatatactttttttcactgtaaataggtttcagttctattaattgacaataaaagtataagtgtaagtttaaaattgagaccaaaagtacaatttgtagtagtgatcctagaaatctcaaaagtgttcattttccatgcgtaaatttttgtaatggatcaaaaaaaaatatcacgatcattacagatcatgtgtttttaagatttttcaatagaagttatacagtatggtattggcatagctaacatttaactgatgatccatatccattagggaagcaggagatagagaatattgagggtaatgatttggatgatcatccaatagacttgcttgatgaagatgaagaggaatttcttgatgatcctaaaaaaattaataattttctaagtgatgcaaataaacccttgttcggtggttgtaaaaaataaacaatcgtaaagttttacaacataaatatagaaaatagagtgagcaataaatgttttactcaactattagctatttttatttgacaattacttctcaaaatctacatatgaagtgaagagaactttaaattctataggattgaagtatgaaaagattcatacatgtctaaacgattacattttatattggaaggaatatacagacatggacaatttctgaacttattgtttaacccccccccccc

SEQ ID NO: 21681 - DNA, 3767 bp, Cannabis sativa
ggacagaaagaggagcagtgagtgagcttgatgattcgtcgaagctagtcatagtggaaagtagagactcatccatttatataataatttgatattaattgatatccaaaataacttgtatgatatataatttatacattattatatacttaatagtatcatacagaatttatacaaattagtttctagtttctaatcatttagattaattacaagttggtatcctaatgattttattaaccacataccaatagaagaatgtgttcctcttgtgtatgagggttttttctccaggcctctgtgaaataaactagggcatgtcctttgatatccctttccgtcccaactaagcttccaccatcaatacttaccttcaccacctgttgacttttttcccaccctacttgattgttcctctgcccctagatccaccatatcagagcatttaattaacctccactctctccttcagtggtttacgacattatgtttttttttctttctcttcatttattgcttctcccccaggcaacgctcaaatttcccccacatttattgaagctccaagtttttgcatggccaccccacactctacctccccattttcccattccttaatcgtcatccatggctcccctagggggaaaatcatgattactcctactcagctcctctgcaacctaaagagaagaagacgaaggcggaaacgatcaacatcttcctattttccaagtaaacctttcagttccaggtatcaactattcttcccctcactcaactactatttattattgttttgtttccacccatgatcatcaccttgtctccacatttttggtatcctatccttagaaaacccatttatggtatatctacaccctgccgaaaatggctaccttaaacaatgattccctaaacctcctcactcttagtcttttacagaagaagaaagccttattcacgacttcaatcatatctccataaggtctagctctaactctgaaaactgctgtcttattgtcaagagattttcttcaaatgctctgaaacccaactggattgagaaagcaatgaaggaagcctggaccctccgtttcctagtaaacttcactaattaccactttggcctcttccttgccaactttggctgtgaatgagattactaaagggttctcgaagaacaaccgttgcactttgatcataacttaatggtctttgccaaccctaagggacttgactctctcttacttgaccaactttgctatgtccccttctgggttcaagcgcataatataccttttggccaaaaatctacccaactggcttaatttgtagccactaacgttagggatcttattgaagtctataacttatccctgtgtgagagtttcgacccttatctctggcttaaaatcttacttgatatcactaagcccctacgaagaggaatgactatccacttctaaaaaatccccaccaccaaatggttgtgtttcaagtacgagggattgcaaaatttttgctaccattgtggcagacttgatcacacacataccaagtgtggaaagtacctccagaattgtgatgaaaacatctctccacctctcttaggatacaaggaagccttcgagtcccaaccacatcaaaattcaagaaaaaccctttcaaaatctccaactcagtgcccttagaggaaatttggactcacggaagctccagtaatcaagggctacaagaggctgtcaaccgattcttcccttcaagcaccacccatatgaccaatatgtttgatcaggttactttaggaactgccatggaaagtagggagacaattatttcttccactgccaccgaatgcactcagactcaaacctctttgattagagcccaaaatgcagttgctcaaatctcctctagtcgagtcatggtaacttctgttatctctcactacaacaaaggcaaaggcattgccactttggactgcccaagtgtcagacccccagtgatccccaggcctcctactagaggcatccacattagagacccaaaccccactcctgttgctccaactgtgggagtcaaaagaccctttgtcaggcaaaacgtctaagttaaaggctccatgaggaacatgctgaagtgtgctcgtgttgttccaaatgaagacattgtggttctcgttctttcaccacctattgatcaggcgagtgtttctcaacaaccctgctaggaaaaatgagtcttataagcttgaatgcccgagggttggggagtcctcgtgtattcagaaatctctcctttttggtgaagcagcacaaaccaccgttcctttttgtgatggagccgaagcttcagtttaatcctggtagtggccttaggaataggctttcttttgataatatttttgaggtcccttacataggtttaggagggggcttgattctcttttggatgaatgtaattaatgttagtatcatttctttttctaagaaccatatcgactattatatcactttcagtgataatataagttggcatgtttcttgttactatggctctcccttttgtgtctaaatccaatttttggaaacttcttaatttcctttatgatgtggcacctcttgcaccttggatgattataggagattttaacgactatccctctatgcatgataggaatagccccactaacccccctcatatgccatgaccaacttccaaacttttttacttaagtataatctgcccaccatgcaacatgttggcaatcgcttcacttggaagcatagaaaatcccttgaacatcttgactagtgtgtttagaaatggcgtgattatttcctctggcctctttgttgcacttgacatattatggctctgaccatagagccttaaaggtcaccctcaaggacaacactggccaacccaaccaaaaaaattgtttcttttttgagaatcactggttgtctgacccttctttctttgaggttgttagcacctcctggactatcatgaatcctggcaatagccatgacaataacaatggcactttagacaaccttaacatcttcttatagatgtagaactcctatatccagggcattacaaactggactaaaagccactcaaacttgaaccttaagatcaaggctacccaaaaagacttggaacaggctcttgcccatcccatccctaatgatgagactatctagcaggttaaaacccttcaagctaccatggactctctcttgtacaagcaggaagtgttttggaaacaacgctctagagaaaattggctcaaaataggtgacaagaatactaagttcttctatcataaaaccactgctagaaaatgcaataatctcattagaactctcactcttgatgatggttctactgtcactgaccaaacttccattatgagaaatttcatggaattctattccaatctcttcacttctcaaggtgtagattggatttctggggtgtcaaccaagctctctgaaaatcaaattgccctcattgaggccccttttgaccctgcggaagtgaaggatgccttgtttcatttgtttggagaaaaagctctaggttatgattgtttaaacgcccatttttaccaaaagaattagcaagtattgtgctctaatttatgtaaagctattcttgctgtcctcaatggtgaaaccgagatcactctcattaaagaaactgttattgttctcattcctgaaaagaagaatgttatgaaggtttaagactttaga

SEQ ID NO: 21682 - DNA, 2079 bp, Cannabis sativa
tgatcctattaatctatttcagcacaaattttaaatgtgttataagtggataaataattgtaatttattaattacggatatttatatagcatgcatgaatataatatgaattatttgtggcataaaagtatttttaggtttgacgaccttggagattcgatcgagagccaaaaatgtcataacaaatttaattaataaatttgatgggaatattatgataagttgatagtgtaagtattgggttaatgaaagtatttggaatttgacctagtgcccgaaaagtaaagatttcttagtggctaagaaatgataagataactattattaatagcattaatattattcttaatatatgttttatattattattattattattattatataacagataagtttatgtttaaaaaaaaaaaaacataaacagtttagtacgaacggagctctctttttcaatgtgaacaaaattctcttcctttttaatcaattttcatcaattttcaacatgaaacctaattcaagttccaatagtagcgggatagtaaattattgaagagggaaagcttaagggcccaggatcattgatcattctccaagcaagtcggccaacatacctaaaccgaaacttgaggtaagaaaagtatattgtaccatatggcatggcatgttacttgatcgtccatttcctgattaggcaatagaaatatgagatacgaactcacctatttaggtgatgcgatatgtgagtgtcaggttgtggcacggcctcacctgtttaggtgatgcgatatgtgagtgctaggttatggcacgggctcacctgtttaagtgatgcgatgtgtgagtacccagttaaagcattgactttactgattaggcaatgggatatgatgaagatagttatttctcattcctatatatatggttatcgaagtaatacatcgactttcctgatcaggcaatgtgatgtaatgaagatagttatttctcatttctatatatacggttgattatattacgtaatggcagtaaagtgaaaatctaattatcatacatattacttttattacttttcttgctgagtcctcgtgactcacgggtgctttatggtgcagataagggcaaggtgaaattagagcatccatgaggcgatagtcttctccgacgaatgtacatatcaaccctacaagcttgtgtgccgagttgccaagagttattttaggttgtatctaccgtgtatttttattttgtattttgacttgtcgctgtatataaactttttgtaaaacttttataatagggatcttcagaacacagttttagtgtcattatgatgtccgtttttagtgttttatgttagtgaagttcttaatataatcatagattttaataactaattaatctattagtacaaaactagtttataaaattacccatgtggcgtcactatatattagggcgtttgtaatgccctaacaattaggcacgctacgcaaactgatattgaaaccctaattccgctaattcgagactactagaatgataagagcgggatatttaaactttatttatatcagaataaaaataaacttgtaataatattaaactttacagataaaccaataaacattttcacaaatattacaagtttaagtcatgtgccgacctaagcggtaaaattagagattacaaaatacatcacttgtagaccccaacccgcttggtctagtgtggccgaacatgtacaagcaccgctaagctctcgcactcatggttgatcacaaactgatttaccctttcgtgcgcagtaaagcacccgtgagctaagcccagcaagacagtacagatatcaataatcacaaataacatttcacatatgtaataaagccatttcacttattgtctatctgatatagacctacgtgttacgctcacacgcctatttaagtctatgtgacatagacccacatgttacgctcatacgtctaaatacaataaggccttagaacggttcatctcggttttaattaccgagtccaaccaaattatgccttgaacgcataattcttaatttcaata

SEQ ID NO: 21683 - DNA, 3929 bp, Cannabis sativa
aaaaaaattgattctttagaatttggagtctttaagagtacatatacaataatgatttcagacacttgagttgacaattcggtgaataagataacgttgtaaaagtaacagctacaaatgaatgcccagaatctgctgtgagatttaaagtacttgttcacgaatgccttattaaatttttgtaatccgatctttacattgggttgaataatccttacgatcttctcttaagaactcgattttttttgtagtttccttaaatttgaaggatctaagaagaggtatactgcatccagggccggcccaagcattttgggagccttgtgcaaaattttaaaatttggctctttaaaaaaaaaccgtgtacattaaaattacaattttttttttttttttttgaaaataaggcgttaaatagatagaaagttagacctcgcggtcattacaaaggatagacacaggtatgcaggatgaatccataacacgaaagagtccatctagccacattatgggcagcaaagttacaaacacgggaaataaaagaaaaattacaagaaagaaaataatgagagagttgattacataaagatacataattaaaactacaattctattactagttttttttttaaaagattttttcataaattttcaattaaattttttttatttatgtatatataataagaaaaaaaaataggtattttctttaaaaaaataaaaataaaaattgggccttaaaaaaaatgagggttttgtgtaatggcccaagctgcctaatgcttgggccggccctgactggatctcttatcacttcaacaactctttgattacaaattgttagggaatagtagacatgtttaatggtgaagatgatgactttatatggcaagccttaattcaaagaatttatttcatattagctgctggttatttataattgtaacatgttattgatgaggtgcaaaagagaattaggtgagttttgggataagatttctcatatacaacacaacaaagaagaaaatgaggtagaaataggaaaaaacatcaagtttgggctcctcaatgtaacaaaccataggtagtttttatactaataaagtctacttgtttcaatctagctagattgtgtaatttcttgagagaattataatttctattgataacgtatatgtgctccttgtaactcaaagatcccatgctatgattcaaatcatagtttccaattattgtagagttaagagttaaaagaaattttattctgtgtcttcttgaaactaagagagagaagaatagtaacaattaaattggtattacttagcaattttgttaatattaagaggttactttaaactctcattttgtcatgtcggtgcatgtattattttgtgtgcacatatcattatgcttattttattaataaatttgatcattttcggagttgcattttcacttttttaatttaaaaaaaagaaaactgattaaaaacatattaccaaacagactttacttaaataactaaatataattatgtgttgtttcgttatacaaataattacaactatgaaaagagcaaacccaactatttacattactcaaatttgtagaaattattgactcaaaaaaacaactcacaatttttttaatcaaagtaatgaaagaaaatgacttttcagaatcacttgatgattaaacttcagcctcaagaattagaacaaataaaaacaaaacaacaaaccaactttgtagtcttaaggctgtctttttgataaaaatggtttcattcaattgcgccaaattgattcgccatcataagatgaacaaagagagagcttgttcttgtgttgacggttttcatgatctaagcaaccgtcccaaaatccaactcgttgttttggtatgctcatcgatcttgtcttcgcctttgcagattcggttgtagccatataagttggaaaagatggagaagaattcaacatcataatacaacttccatcatcaccaaatgaattccttctatcttggcaaaatgaattcctcatcgaaagcggtaactccgtactcaatccaaactctctttgttttgaatttttcgatttaatatgaaccattccattcaaatcattatctcttcgacgaaaaatcacctgtttttcccaaggttctaatgaatcttgcagcatgaaactattccttctctcctaataaataacaaaaatgaaccatctctcaaaatgttaacaaagaaatatagctagaaagattagattttttgggattattcacaattacccaaaaatgacaaaaaaaaaatataaaaatacgaatctacagtatttttaatattttttacgaatcatgtatttttttttacagaaacacggacggttgttttaatattatttttacgttactgctacattatactatgtatccaccatgtaaaaataacattcttttctcaaaaaatataagtaaataaaaaatttgaaaaacatttgtaaaacagtcaaaaattaaatccgtaaaaaagtaaaaaaaaaatgtgatttcgatgttttgggtaaaaaattaaaagttaccctatgtgagtatgagtatttctttattcgatctctcttcattcgcgcttcttgtcttcttaaaatgatagtttctatgtcatttttcgaaagtacactgcaattccactctccttgaatcatatcttcatgatcatgatgctgtgaaaattaaaatcataagtgatcaagaacaaaaaaatgataacattttgtaagttaaaaaaatcttgtattttacctcaagttctttttcttctaagtcttttggtttcaaagatgttgtgttaaaaccatcattattgacacatttgtctgcagcaagaatgatcctttcggggacctcgggccgcctcttcctattgcaatgtacattcttcaaggccgaaattgtttggcgccgtctcacagctcggccgcgaacaatggcttgaagtctcactaatcctttcaatgctcttaatgctttccttgcctattttttgtgtagagtttataaagacatgcttatttctcaaaaacattatgtcttattacaaacaagatgaaacaaacacaaagaagttaacaattaaagagataaactcaaaatctttccattcttcttttcttttcttttccttttttcaattatagtttcattaaggccttgtttggacaaggaaataaaaaagatttttttttttcatgtttggattgagtcaataaactaagaattctactttaaaaagaactaaaacttgagcatagtataaatttatgaaacttaaaacaattacaaatacatgttttccaccaccttttctctactatttttctctggtaaaatctaagattcaaacaaagtcttaagaattttgttatcttcaaacaaatatttgagatttgctagctaaatgtattggaatttctgtcatttttgatattaatacttaattttaaattcaaatcatcttttgtaattattattcaattacacattgttcaactaactctactagttttaggccttttgggaagcaaaccaaaacgatattaattattaatgtaaataataattattatttttatagtttttaaggtataagaaaaatatgaagaaaaaaaaaacagcaataactggttacctatatggttactctaagagtaccgattactcttatttaattttcccatatatttttttttattttttctttaaattttcccatatatttgaaaaaaaactatatttttacacaatttataaaaaatcatgaaatttgtaatttcttaatgtaaaaattaaaataaagtgatgacccaataagatagaagaactgagcccaacccacatgagagaatatgagagaagaattgctcact

SEQ ID NO: 21684 - DNA, 1673 bp, Cannabis sativa
agtcacaacttttttacttttagtgacaaattttgttgtgactaaaagtaagattttttgtagtgttatttgccacattttatcaatgaagctatacaatagctattgatttatgttctctcatttattacatatggttggaagatgagctacctctcattaactacatatagttgggagatgaactacttacctctcactattacatatggttgagaagtgagattttccttctataaatatggagcttttgacgagcatttgcaaattagggtgctacttggtgcaatcagattaatgggaagtctgagaaagagtatttatatatccaaactttgggaaacacttttgagagtttggagaaatacttcgacgaacacttgagagatattattagtgggaaatctatatttatattctgtatatttcctactcagattaataatattagttgcctactgtggagtaggcgaattacttaaataggtaattttgtatccttatattttaccactttgatatatactttttgttatttattgcttccgcgcacaataaattagtattagagccaaatatagcgatattctatatcaaatcaaactctcaacgagacgaatccaatgtcgcaggaatcgcctcaatcggaggtccgacacactgcctgtagccgctagagtattgctgccagcaactaaattaactcaatcaaaaagtgattttcagaccgagtcagcctatgtttcacccgttttcaatcgagtcatgcctatcgcagtgaagatgagagtgatgatcatcaaaaaaagatctcaactgaggtggaggttctctcaacatcaccaccaataaatcaacaattagaatctattgccattacttgaccaagaagggagattaaaaagcatgctagatagacaaatatggtaccatctgcactcccagtaattgatgatgatgtctcatgcacttacatagaagttgtgcagagagttgacgacaagaaatggaagttggtgatggacgtagctataaaatctctacactagaatcaaacatgggtgttggttcgacctcctaaaagaaagaaggttattggctgcaaatgggcctgtgccaagaaagaaagaattcacggtaaaaacaattgtcgatgcaaagccaaactggtagaaaaatattattcccagaaagaaagaatagattataatgaggtattctcacctgttgtcaagcattcatctatttgaatttccttggctttggtagcatagttggatctcaagttagctcaactcgatgtcaaaatagattttctccattgtactttaaatgaagagatttacatgtctcaacaaaatggttacaaagttccaggatgtgaaaactgggttggcaaactgagcaagtcactatatggtttgaagcagtcaccacaacaatggtacaagtgttttgacagcttcattaaagataagaagtacacttgtagctaatttgatcattcagtatacttccagaaccccaagatggtacttccatttatttactcttatgagttcatgatatcttaattgcatctaaaagcaaggtggagcttaccaggctaaagactcagctaagtttagaatttgaaatgaaagattttagagaagctaagaagattcttggga

SEQ ID NO: 21685 - DNA, 1940 bp, Cannabis sativa
tggtggctcctaggagctgccagccataatgaggccatggtggccgatccaaactccaaactcgtacctatatacatatatgtatactcaattatgtatatataatgtgtataatgtatatatattacatagtatatacacaataaatcatcaattaattttttaatgtaagtaattaaatgttattttagaatatttatttagatttagattccaaattaatatcatagttataaatttgaattttaaatttaaaatgataattatcttaattatttaataataaataataaaataattttattattttatttaattaagataaaataataaagtttggagggatatttattttttcaaattcatttttgaattaaaaatatataactgattttaagtttgaaattcaaactcaaacttaaaaccatattaacacaaaagtagtcttaacaaaaattaaataataaatattactatcttaaaaaaaaaacttaaatgataataaagttgtcttaaataaagagcttatctaaaaataaattaattaaaattattttaattaattgaaagggtttaaaagatgtcttaaattaaaatttgatttaaaattaactaattaaatttattttaattaatttggaggcttatgacgatcctacaaattataaaagtacatttcgagtgatggatattagttttataatttattctcttattttttttgcaaaggttgtaaaattaaaaatacccaattattacctactttatcatcattatttatttattgtttttaaataaatattccttaatagttaattaataaaatactaatgtattagtgagtaacatgtcatacatagaaatcccacacaaccatattatcatgcatctcatattagaaacatgatatattatgatcgtcttttatgtttatgtgtttaccgttttgaaaatgaaagcatgtaaactggctagattagtttagaattaacttggtaatttaaaatagttttaaattatgaataaagaattaattcagatttaatgattatgacaggaaatttatttatactttgaggtttttattataaatagattaattataattattaaagtggttaacatgtattaattatgagaattaataaaacaaacacatcaacctaaaatagtgattaggagaaggagtacaggtcaatgtaacctacgacctccattattggtcaatagcaaaggagtatagactggcctcgagacgacttagatttcgtccccctaaggaaggtatgtgtctatactgttgttcaagattgatatcttgaataagataagcggaagtgatgtattttagtgtgatactggcccttaaggccgcattttcaattgtcatgaaatctgaaacaattggttacactcacaaagtgcaactaagctttgttgggttagttattaacttggtcagtggtacttttattttgaaatggaaatatgagatatttagatttcaaaataataaagatgagaattgtctcataggctcaatgacttgaggtcacccattatttcagattccatgacttaacttagtaacatcgccttagggtcaatatccagctgaaatacatcacttcttcctatcttattcaagagatcaaccttaaacaacagtacagataaataccttccttagggggacaataacaaagtcgttgcaattccagtatatactccttcggtgttgactaataataatggagatcataggttgcattgacatgtaatctttctctcacccactactttaggattaatatgtttattttgttaatttccatcatgaatatataggaaaaggtttcaatggttacattaaatgtgtaaccatcatggttatattttttttagccattagattactatttaatagttgtgattaattt

SEQ ID NO: 21686 - DNA, 5176 bp, Cannabis sativa
agcaagaattacaaaaattgcatatttcacatataagaaataatacccctagagttttataaatctccgaaattgagaaattataactttaaagctcatttctaatatcggggtccacaaataattactttcataaataattataaaaaagtcaaaaattagtgctaattgcctttactaatcccaattactaaagcggtcattaatacaggtgattttgagtatcgcttggggaggtgacaaccgtgtcatcataggttcagtcagtcttgcctttgtggactagtatccagtccgttctcgagcagctttctgagtgatctcgagaatgatattgatacattatggccagaaccaaataatcttaccacgtggcaccacctttcgaccctcacattgtcaagctggctaccatgggcaaggttggtatagtagaggaggccacacaacctctagacggtagagatccggaggttggctaagcagaggtgcttgtgtccaaccatggtgtggagagctcaaacaaccagtccgaggttgaagaggttgtacttgtccagaagatatagtaaaagacctgcagtaaattcaccaacagccctttgggctcgtacgatgttgataggaagcccttgaataggcttggccaacctttagtggttggtgtagaccatgttctaaatacatgctacaaagcctcaggttctcaatcagtgttgagactctcaataggattagagagagtagagtggtaggaggtgtacattttgagtggcattgagggaccaatgagtgcactagttggccctcaactatatggagtggttagagcaccacattcaacaggggcaatattgcatttgcacccctacttcaaagaaatcgtagcatactttggaatatgcccaacacaaattaccgcaaaaggtatcaactactttttagtgatgtttgttctttatgccgagctaggctggcgttagcctactccttatgagattggatacttctttgaattgaagtctactctaaaatagaatcaaataggatacttctacttcagccaggttggctattagtggttgggtgataccaacagtacacctttgttgaagctggggagatatacccaaaactatttcattgcatgggatatccaagtccaccactgctgatttcagagagtgcccactttcaagtgctccattcctacccttcagatgagggatagagctaaccacattctatccttcccagtagagaggaggaatatactaaggttggcctatacatctaacttccagagatacgaccagtatccaatagagtttggagttccaagggttgagggcccatcgggtggtccagacggagcctcaactgatgaggaggcgtgtgtactcacaatatggacaacaatgttcctttctcctggattgccaggaacttgtagaagagagaaagagccctccatcgcagaggtactattggtgacattacactacggattagacctggcggccaaaattttgccaggcccactcaccccttgcttacatctagaggaaagggaaaggcagctactcatgatagtttagatgattcatcttttgaaaaatgatggtattttataattgattgcaccatgttttctactttcttcttctattaaatatttataacttatgttttgactttgttactttctttttgcaaatatggcctctaggctcagatatctagttggagggccttcaggtgaggcttcaagtttccctaaggccaaggtgtctcagaccacctatttaagtgatgctgcaagttcttctctccctcctcctcctcctcctcctcttcctaggccttcactacctgagcagcccatgattgttgacagcccattaaggaggactcagccttcgggcaagggcatccagaggcccaaccgaggggcgaattcggtcatggggcagagagccatggaggcagctcacaagcgtattgactgagtcttacccaccgtcaatgatgagctttaggagctcagtgatggcaagctggagaggctatcatctagcagtctctaggacttggcctcggtaagttgcacatataactttgctccattttctatattattaaaagttggctggccatagggagctactatgcaaagctgcctggctagtggtatgttcttaagaggctggctggtcctagaagcaccatagaggggctgaccagccagacatgtcttctaacactaacttgactttattttgttttcaagcctttttgaagttcagcctttcacacaataactccaaggggtcctcaggagctctccaggagaagctaaaggccaatgaggctgagcttctagcgaggggtgaatcccttaccaatttagaggctcttgtcaaacagaagcagggcgtgattactggtttggagtgcattctcaacactaagaaccaggagaataacacacttgctggccatcaatgaagaactcaagctttcccttgatggctagtaggccattaggaacgagtatcctttcttgtcttcagagatcatctatgagataaagttgcgtagctccagggtttctatttcctacataggagcttctttccttgagagcatactggcccagaggaaagagttgtatgagagtaggatcgagacagactagaccactttctagcctgagagatcgtcatcagggaagtttgatgaggccatggctgacatactcactaaggaggtggctggccaaagtactgactaggtggcccactttttggcaatctagacactgcaacttctgactcggctccacctgcacctgcacacgagtggcttcactttcttagtacttcaaacttatgattttatttgcatagacattttgatttcatgttttgtatggcctattagccttttacttttgaacactacttattttcagccttagggctttcatgtttgtacttttgacgtatgtgcactctatttttgaacatttctgctgtttagccctaaagttttttatcaggggtttgtgactgaattggtggtctttaatcctggctatcttcttatttccttaacatgttagtatctggatttacttttctttatgcaaagcagaagtatgcctacacttcacttagaggtaggtttagtagcttatactaagtgctaaaatttctctgtgctagtttgatgcattatatggtgttggtgcccccaagtgagcacccagacgtacagtctcttggtcacttgcaattcaccaagttttatagaccttcctgggaatatcttggggtgctaccagttgtacgaatgtggaactaaaaaagaataacattaagaagttaatcttgttagcaagtgatttagacaaaacatatttgaattgaaacattgttttaatttattaattggtctttgttgttatgcaacataaataaattggctctacaagcttacataataaaaagtatgcttctagaaatcaagtggctatcccagcctgacatgccaggcaaaggtcactgttgaagaacgattagaggccatgccaaaaggccatgggtactagctcttttaaagtaactcttactaatgagttggtagaactactactaaagagtatcatttggcaagctggtcactggtagtacttatggaggtgctccctaatccaatatcttgggtaggagaacaagcttcatgttctcattgtaccttcctagcttttaggttcccttgttatctctgtaacttggtaggggccttcccagttgggtccaaacactcatgctactggatctttggtgtttaagaacactcttcagagcactaggtctcctatgaagaatttcctatccttgacttgtttgttgaagtgtcttgcaaccttttgtttgtaggtctacaacattaagttgacttgatctcttttttcttcttcttcatcaagggattctgccagtaggatgttgtttgtatcctggtgataggttgtcctcctgtgagatggtggcactagctctacaagcaacatcacttcatagccataagctaaagcaaatggtgttttccttgtggccatcttctcggtagtctcgtgtgaccaaaggacctctgggagaaattttggccaattgcctttttcctcttcaaggtacttttccaaagtgtccttgaggatcttgttaacagcttctaccttcccattttcttgaggatgagccacaatagagaagcttttgatgacgccatgtctgttgtagaaatcaatgaacatgtcactgtcaaattactttccattatctgatacaatattttgtggaagtttaaaccgacatatgatgttcttaacaacaaagtcgagaactttcttggaggttattattgctagaggttcagcttttgtccacttggtaaagtagtctacagtgactacgacgtactatgcccctccttttccctttgggagttgaccaatcaggtctatcctccatactgcgaagggccaaggaggcaacatcatcgtgagctcgttgggtggagctctagggatctttgagaatctctggcacttgtcatattttctgacatagtccattaaatcctcaatcattgttgtccaaaagtatccttgttggagtatctttttggatagacatttccccgtggcatgattgccacagaagccttcatgcacttctattatcaatcgttcagcttcagtcttggtgacgcaccttaagagtgatattgagaagctctgtctgtacattactctattaaggattagaatacctagcaacctttcttctcatgattttttgcctcattcttgtttttaggcaagggctcaatttggaggtaagctgcgataggtgtcatccatgttggactgtcatccaacatgtcgacttctttagggatggtaatgcctttttccttcaagaattttattggcactagttttgccttgtcatcaatggtgttgcttgcaagacgggcaagtgcatctattgtggcattctattctctaggggatctaccttattgtatagcctttgagctgacttggcaagtcttgaatctttctcaaataggccatcattcattcacctcgagttgtgtattcacc

SEQ ID NO: 21687 - DNA, 4608 bp, Cannabis sativa
ctgaattatgcaagacatgctgtcctatgtaaaatgatggactagtattctactcacctattcaattaccagttgtacttaattctttctgagtaggctggtatgattatttacccataattctgttgtcttcagtggaaagaggaatgaattttgtttctctatagcacaaacttacatgttctcatagagtaacgatggtgatggagagagtgctcaacctccaatcactttagttgaaaaaaatatgattttacaaaatatatatatcatagaataatttcttgacatgaacaagttaactataatatttcattgaagttcctatatatttattagttattctcagtataaagggcaaatatatttttattttaatttatttggacaatactaatctttaaggttttattctttttttcaaaaccagctaaagataacagttaattaatcaatttattttagacaaaaaagttttctaaatttactagtatttaaattatattaattaattatcgaaataaaataaaaaataaagcaacatatatacatttatttaaaatacaatacaaaaatgaattatgcttcttagataaatactatattttatgtgatttatatatatatatataaaaaaaaaatacaataaaaaaataaaactaaagttcaaattcatactccaatactttttcataaacagtgtttgggttggataggacaggcccaaatccagtcgattgttctgaactgtaagcccacctgtatttggcccaaattcggcccaatagaaatagcagaacatttcagtaacaaatcttaacaggaaaagaaatattatgtatgaagctttctgcatatgaaaaatggcagcttcatttagatggataatgcagcttcacaaggacgtgcccaaagcagctcgattctactcggaggggcttgatttcaccgtcaatgtctgtactctccgatgggctgagcttcaatctggtccacttaagctcgctcttatgcaatctccaatgtaaatgatctttctccattgccctctatgtgtttgataatttgtctaaaagaaaaaaaaaacatcatttttcttttgatcatgcctaaaattctcctacacccaattgtaattatatgtgtttgttttatacttcttcattacttgttatgtttctggcagtgatcatgccatacagaaggagtactcttcattattatctttcacagtaacagatatcaacagtacagtaacaaaattaatggcattaggagctgaattagatggtccaatcaaatatgaaatccatggaaaggtaattataacctcatatttcaacatttgttgtcgatattgtagactattcagaatttttttaataactaaaaaatttagaaaaataaatatttcggcatgtatttttggacacggatattgaaataagaggttaatggtactatggtagcactcttgtagtaacaaatacataaatagggaagaaaggaaaatcagtgacttgtttgcttcataataatgttattcagagttcaacaaaaaaacaatgatggaatgatttgattgtgattaggttgcggcaatgagatgtgttgatgggcacatgttggggctctatgaacgtgcataggagctgtacaaacatctcttctttgaatacaatctttaaaggtaataaatttgctaataagctttttgttattatagcaacttcaaatctcttgaagacagatcaaagatgtgtgaaacttcatttttgtgtggatttccttgaataatcgatagcgtttgtcggtcgatgtctattacagctgtgcataatgtgtaaagtgttggacctgaagagaaggcaatcaaagatgttaactttatgttgtaaggaatcaaagttgttagctttatgtccagactctagtagtacatacctgtcatgtagatggggtatttcgggtcctctgaatctccaagaacggctaggatttcttcttttgtagtttttggtaacacagctgcttttgtttgtctgcttattgagttctcatcttgtaacttcatggaataatgatttcaatttgttattaattgaactaaaattcatttcatgatttcaatctatttaactttgttttaaacttacctgaggaacttgaagatgtagatacatgtttgcatgaaagaatggtgttttgccaatctcataaatcgaaactcgatttctagaagctgtttccacattgacaatcctacgtgttcgtgtttcgattagattgtaactatgtcccacagagacttcagaagaacaaattttctgaagtgcaaatcatatgattgattataagttagaatcataaaaaatcaaacatgaatactcaagaagttgttatgttaaaacacttaacggataatgcatcctcgatgcttgttgcttcgagtaggtctcgcgaaatgaagtttcgtccgatccctccagcttcaatctcattttcagatgggggaaccgaattcagagtaaatgcctgttaaaatcacataacattggagttaaagaattgcttagacaaattcaaaacaagagagtgttcttactagtccaagattgttgaccccaaatgcacaacttgggagctctcctgcataggtgtaagcaagaaatgatagcccatttgaaagagttcctttaatcaaatatctgcccagaaaaaaacacaaaaagatttcactttggcattttgtcgaacacttatgagattggtataatgaagttttatgctatacgtgtggtcaagtagagcaatatttgcatcctcattgtgagcagcaatggccatggaatcactaacaacaagaacacttgaacaatcagctgagatatcatccatagtaggaacatcattgctcaactctgtctttggaataaatggaagaatctctttcctgaaattaatcagtattatctgcaaatgaaaagctccttttagaaccaaacaacataagaaatacaaaattgcttaggccctgttcagctggacttttgcttctgctaaagattgaagtttcggagtttcagaaacccaaaagcaattttaaaagcacaaccaatcaaaacttatgtatcatgatgaaagaagttttccaagcaaagttaaaaatagctctgtttagtttgattttacttatgctaagaactgaagctcattggttactaaaactggattttaaaattccaaccaaccatagtctatgtattatgatgaaattagctttccgagcaacgtggcactctaaaatcaaaggtgactcgaaaagtcgattgtagaatcaagtcacttacatcaagagcagccacaccactaccttcagccaaacccacaagctcatcccaatatcttgggaatctcttttggttattggaagagagagattgaatcaagggttgtgattgtttggattgggcaaaagggagaagttgattttggagaatgagatcattagccaacctgcttctaatctggtttgtaaatctttggcctattagaaagcccatttggtaagcatctttgcatggcccaacttcaaataactccaacatagttgttcctcccattactgagcaaaaacctcttctacaatagtggatttagagtaggaagggagagaaagtggagagtaataagatcactatgtttggttggagggagggaattttgaaagggtgggagagaaagctggagggataagtgtctcttgtctccttctaattctaacatgaatccctccaaaagaacaaaaaaaaaaaaaagtaagaaaatggatagagaatacgacaagatatacataatatattgtacaaaaaaattgtatattttatgataaataaatactaatttaacatttaaatatgcttacatacatcattaatgtaaggttaacatgtttatagtaattttacatacataatagatagttaacatatttattaaccgggaaaaaaataattattagctttacaaaaaaaaatatataatgaatataaataattgtttgattttataacttaaaaactgtttctattttcaaaaagttgagaacatcttttaaaaattaatgaggtgcatttggccaacttttttttttttaaaaaaaaacagatttctaaaagctgagttacaagaaattagaatacataaaatgttaaaatgttgttttctatttttaaaaataatttttatttttgtctactatattattttttacattttgctcacatacctagactcggaccccagaacaatacacagactcgaacctaaactctggacccaaacttagatccggacttgaacaaggacccagacccagaacctagaccgaccccgacctgaacctggcccccgaacctcagacccgtggacccggtcctgaaccctaaccccgacccaggaccattaaaattttaaaatgacaaaaacctattttctgttctcacttataaaaacagaaacaatctctaagagtattttagtgcatgtttggcataataactaaaaaacagttttttgtttttaaaaacagaaaattattttttgaaa

SEQ ID NO: 21688 - DNA, 2831 bp, Cannabis sativa
ttagagggtaaaggttcaaaccccactaactacacttaatattttctttttaaatttatttacgcccctcctcactttaaattctgggtccgccactgctgttggggagtgtgcagcaaatcaatcttaacctccaaaccatccattttttcaaaaaaaccattaagtttgatagatatgtcactcttacccacaaaagcttcttcctgaacagacttactcttgtaagaattgtaatcagtgttaaacttaaaactactcagtttcaaggatttaaactcaacagaagtaattcatattagaaagcttcaactgaagaaacataaaagcaaaattatcaatatgattttcattaacaatattaaacaactaaaaaacaactatcaataaacagaaaaaaaaaaaaaaaaattgaagtaccttatctttggaaacataaaaaattgtagttttcaaaattttgaaagttcgctgggtgctacaagcccactaaacaaaccttggaatacaagaaatttccttttggaaatattctcattcatgtatttgcaacactcataaaacaaaacttagaatacatgaggacaatcaatcaaaaagtataacctacactaggcctctttcccaaactcttagcctttcttacactatcaacctaactgtcaagcttacccttcaacgacgaaatggtcaattcaaaagaattttgccccaaacaaactcattatacctaccactatctacaatatctaaaatggaccatgaattttttttatgcttagtaccactaagcaaaaactattcaagaaaataaaaaacaaccaacttaacaacatcctcataagaatcaccccacctctttgttgttaaacatttcctaacagattctttggtaatagaggtggaggtcggccaatatttcacacaaagactgttaacatcttgcttaaaatccaacacactatagtcaccttcacaatctaaacctgttatcgatgcaaactcctcaatgctaaacctaagcctaaaaccacgaatcattacccacaattcaacatcgttaggccgctgaacctccctcaacaacaacccgtgaaaatcttcgagttggactgtaaactcaagaagcttacggaaatgtccaaaataagtttttgaaaacatttaaagttgcttagaagaaagacaagacttaatattacggataaacttgtagaaagctgtggagacaacttatgcaagaaaaaattttttttagtcatatataaaattccattcctgcaacagttgaaaacaaacatcacaaaaacaataaaacaaactataaaacaactatacaataaaaaatcaaataactaaaccaagaacacaaatagaaagatacaaggaaaaaaaacataaacaaaaaatacaccttaagagaatttttaattggaatatcgaaatcttcaagcatgaacctgaaaaaaaaaatacaatacaaaaactcaaaaaataatcaacaaagtaaatttaaaaaaaaaaaaaacataaatggcaacattagctgaacatctaaaaaaataaaaaaaataactaaaaaaaacatgatataaaacagtataataaaaaacaaacaaaacagattggacactataagttgaacaaccaaaaaataacataataacaactataaaaaaaatatggaaaaacttgaaaaattattaactataaaaataacttaaacaacacaaaaacaactgaaaaaatacataaaaacaattgataaaaataaaaacccacataaacaaaaaatcgaaacttaaaaacgatttagaaaaatacataaaaattacaaaagtttcattttctcacaaatgaaaacaaaaacacaaaaagccttaaaaaatacattaaaaactaaaaaacaactaatcaccaaaaataaaaataataaacagtttaccatgaattaattttattaaatagggaaaataaaatgctaataacaaaacaaaacaataaaaactaaaaaataacacaaaaataacttaaaattgaaaaacttaaacaaatacacacataaattttaaaatactcaaaaaaaaaatatgaagacaaacatatcaaacatcaaaaaaaaaaaaaaaacccaaacagtgaaaaaaaaaatacaacttaaaaagaacaaaaacgggaaaaaatatacaaaccgtgagtttcactttaggcttcgaatccaaatcagaaacttcatcctcgaagtcagaatcggatacaacctagaaaattaggaagaaaaaaaaattaaaacacataactgaaaacaaaaaatagaaacaaaaaaaataaaaaaaatttaaaaacaattattaaagccttacatcctcaactgatttcgaagacttggttctgtttgccttacgagcttcaaccttagatggaagtggtctatttatagaaccagaagcctctgaacatcagggacattagacatttccttcttgacaatgcctttcaaacccattttaggtttaccttcaaccttcagattagaggacttcgaaggagctttcttagtcttctttgaatttttttagcagaggaaggtgacatcgaacctaacctagtggtgaccatttatacacagctaaaaaataattgagaaatgaagaagaaaaaaaacagaatcaggttatggaagagaggggatcgtgattgaaataggttgttgggaaataagtgggttatggcataaatttgggacagtttaaaaatcaaatcgtggctaattgaccaaaaaacaaaaatgaactgaaaaagagaaaaaattcacatatataagaaaatct

SEQ ID NO: 21689 - DNA, 4791 bp, Cannabis sativa
aacaagaaaactaataataataatcatatagtttattattcaaatattatcatttatacaaatagcataggcaatagggtagatggcattctcaggatctatccaaacagcaaccagcaacaaccctttgcaatatcctttcaagaatgtaccatctaaacaaatcagaggccacacccatttcttaacccatccttgcaagcttttaagcaaatatacaccctttgatcaccttccagcttagtttagatcttagtagtactatcaggattggttagtagtatttgcttgcaataatcatccagaatagcatactggtcaaccacaaatccttccaacatctctagggcaatgttcttagccctgtaaaaagtccatttgctgatcttaaaaaatttagtatttgacaccatctccttgaaggctgagaagtggaaatttgggtttaatttgaagctgtccaggaaatgtttggccaagaactctgaatttgtaagcctgttgtccaggactattccacaagaatgtgtgttttctggttttctcacttgaaaagttgactcatctgaattaaccctagatgcaaaaatcaaccacttacacccattccctttacatgtggccctcacccttcttttatcattactaatgtacttgaagtccttgtcatttgcaataaagtattccctaagggcctttcttaaagcttcaacagtagcaaaaatcatccctttcttaaactcaaaagtggccttgtcagactatgaattatactcagatcttgcatttttcctaacctcaacttcctcgtcatcacttgctaaactttgtaagtcatcctcactttcaaccccatctccttcccactcattaccctgaccacattgatagcaaaaataagtgacacttgaccaccatttgctagcatctattggtttggctatattcctctcagcttgcacatcttgctcatattcctcctcatgaaattcaaaatattcttcattattggcatgttgtgtcccatttctggtttggtgttgtgatgttgttgggtcaattatagagggctcaggtggtattgggtcaacagcattgggctggttttgtgttggtcttttgtagtgggttggtttagtgttaggttaaatgttggatcaactataatgggatggtctgatgttgggtcaaatgtagtgggctgaggtggtatttggtcaactgtattgggctagtttggtgattggtcatttgtagtgggctggtttagtgttatgtcaaatgttgggtcaattgtactgggatggtctggtgttgggccaaatgtagtgggctgaggtggtattggttcaactgcactgggttggtttggtgttggatcaactgtattggactcttaaagcattgggtcatttatgatggggtgctaaaattttggctcatctgtaatggtttggtatattattgggtattcatcttctctacatggttgagtatcaactagaggagcatcttcccctgcatcttgaatctcagggtctccctattctagtcctggaccttcaaagatgacatagtcatcagtacaataaccatcaaaatctgaatcaaatagttcctctcctaattcttctaggtcatcctcatcatctctatcatcatcctcatcatctgattcttcagaggacctacttattttaaccacatcaatttgtttacccttactgtctcttgtatcttttcctttacctatgggtactggtatgcccactacatcagccaccacttcagcatctggtggcaattcttcaatcacacagtgttcaagcttggttggtagctctagaacatcagtcacagtagttgggtctttttttccattccaattctagtgtcatttcaggcatcaccaaataaacatacatctctgtccacttcctcctttccatttggtgtaggatagctttgacatctttatcgcccagaatcatggtaccatatttcagagctctatctttggtcttatacaacatactaaaaggcagtttgtaccctagagacagtacaaaaccttctatgaacaccctgctcatttttttcttatcaattctatcaaagtaattaaccctgacaccctcatatctcctattaccaaagggtgtgaagaacatgcccccatggtagattgcaagtgtcaaatagtctaaattatcgcctataaaattcaatttcaacaaaaaaaccagatagatcacatgagaagcaacaaattagcatctctcaaacattccaaacaaaaaattaagtaaatttttttggtcaactatggaccccactttcagtaggtgcacatgcataaagttgcaataatagcaacacaaaatcctaactataagctttaaagattcttattcttattcccaccaaccatttgcttatgtggtgtgttataactcaaacctccaaaaatagcatttctttatgtcaaatggaacagaagaaaacaaaacccatcactattaactgaataatactccaaaaaaatatctttttagaacagaatacacacacttcctaatccccatcattttgtaaaccctaaatcacacaacaatactaaaagtaggagagaacccatgaattccatattcaaaactgacaaaagaaattacaaaaaaaaaaagcacatatcgtagccagggggatcaccctcatcgttcctgaaaaaatccatatcatctcttcaactttcgatcatcttcaaccttcggctgtcccactttaagcttcaacctacggtcgatcgtcttcaaccttgaagctacgatttattgtcctcaaccatagaggaatcctaagttttctctcaactctctcaagaaagtttaggatttttttttttttttttaaaaaaaatagtaaatattgtcttttcagagtctttgttatatatggttaactttaattgttttatttgttgtttcctgatttagattttcatcaaatttaattaaaagattttttttacataatttgcatcgttattattgatataaatgtaagtatttttattttgattttaagagggtttaattaattttagggtactattataagttttaagatgtatgatgtggcaggggttagttttaagtggtgagaatgatgtgacatttattttaatgacatggcacgccatctggcacattataagacaaaaaatagagaggtacctatgaaagttccacactagtgacggaaagtatatttaccgctaaaaatacgacttaggtatttatctgctactcgaaataaaacttggtatttttaccgcaaattactctaaatataatagttacataattatgtatcttctgttaggttccgtttcttttatcgttaaaaatttacatttttacaccttgaacttagaccaataccaaagtttattcccttttattgtaaaccaaaatcattctatttcagctatcaaatcaaaatcataataaagaacaaatatatttatcccaaattaaaataattgaaaaaagaatacccatggacaagaaaatatcaaggctttaatatatgaatctaccaaaaaactcattcaatgaatgatttaacaaagaaagctatttatgattgaaaaaaattattaaaaaataatgttgaagaagaactaccaatctacttgtagtctgtcacctaaggaaggtcataaatatacacccggcgtcacctaatagagcttgcatgcgcaatgacaaaaagacttggaccttcagctgtgacggtgttggcgttgcaggcagaggaatctcaggccgtgaacaacttgccgatgtcgcctcgggggagtgctgtaaccagatgtttcctgagtcggagaggattgcaggttgtgaaggagagaggaggtgggctactgtcgaggaaagagaatccaaaaactaaatcactgttattttttatatatatattttaattattttatatctttattattataaaatatattttaataaaattatacccatctcattaaaatttatgcacttaaaaaaggtctatttttcaaattatttttatttaaaataataattttagttattatagagtattaaataaacaaatttaatttttcaaaaaaaaaaaacaaaaaattaaattattagaaccatttaataataattacaatatttcaaacttttatattagaaatataaagtcaatacattaaaaagacaacttatttttaattgggtggaatcactattttttatggccataaaaaaagagaagctcgaattaaatgcaatataaaatagaatcttccattatgccacctcagcaatgtaacttttaaaatacttggaaacttgttataccaagttacccattttgctatgttatcaatatgataatattttatgggtttcatcgatggtgtagacttcatttaatattaatctatatatatgtactaggttaatgttacgtgcaagcacatataattagttttttttttcattagatttaattaggtgatgttaagtgtaatatatgtatgtttaatttttttaattaaataatttattttttttttaatttttgaaatgagacttgagattatattttttgagatttttttaactattgcaacaacattggtgtatatatgcctcatatcaataattagtactttatataatcatgatatatctgttgggattttatgccctaaataaaacacattgcaatctaatatgatttgttatcaataagaga

SEQ ID NO: 21690 - DNA, 1410 bp, Cannabis sativa
tgatagttgggaaatttgatttgcttactgaaattgtcacttttcttttttcaatgatagctcccgctaaattgggttttgtatgggatggtcaaaatctaaaagaattaagtgaaagttaacttgaatatttgttttagtagtcatgtgtgtgtagtgtaggagagactaattttcagccatgggtttagattggaagttgagtttatggtgatgggttgtgtttattcatgcctttaggtaatttgcactaacggagttatgatatgataattcattttaccatgagttaccagagcagaatagttattcgggttctgttacttttaagctctctgtctggaggactaattttctttagacggattctacaccgagttgtattaggcaccggtttatcttcttgtttggtttatatgtagtttaagatagaatacaagtgcactttgaatgcaaaagactatagtcatgtaaaaccttgttttcataaagcatgtaatttcagcattttgtttttgggtgggatagtggtgctggtgcttcattaatttgatgatttcctttctcttcactctcaactttatactgacttcttagttgtagtagaagtaggcttgattgacaaatcatgcatcttgtttttcattgatttcttgttctactttttagctataaatcacttattattatttttaatttgttttttttgttattgaacattttcaattatttaagcagaataatagtagacatctggatgctgtagcctaaggttgtgtttaagagtaaaaaaatttcattattttgtattgtgatttgtttatagctataattttgttaatttcatgtggctaagaaatttatgaggttgcttcttttcttgttggtcctgtggatgatgctgacatggtttttgactttctatcataaaattcttgcaatctctgtagctgtaaattaaacacaagtttgtatcttgttgtttggctgtccttaattcgtttattgtaaatttgtagattgacatggatactatagaagtcagtaatctcaacaggcaatttcttttccgacaatcacatgttgggttatcaaaagcaagagtgagtacattcacatgcctttgatatgaattaaatgtgcactttatgtgaggaggtgacaaattttctcaacaggttgcacgggaggctgtcctaaaatttaggcctcaaataagtattacaccatatcatgcaaatgtcaaggattctaactttgatctggacttcttcaagcaatttaatgttgttctgaatggtctcgacaacttagatgcaaggagacatgttaatcgtctctgcttggctgctgaagttcctttggttgaaagtgggaccactgggttccttggacaggtaaagtacttaa

SEQ ID NO: 21691 - DNA, 2128 bp, Cannabis sativa
aagcgtttatatattacatcatgttttacctgggacacgaacccaggacctccaacactcacacacccacttatggccacttgagctagccccaagtggttataatagagatggttggacaaatgagattgaatattctttctctttctaggaaaaataaataggattctttttcaatattatatggaagatatttttatattatggattgttattgttagctttgttttttttgggtgtaaaaatgagaaatgaatgaaaaatacaaacaaaaaaaatgctataaatatcttatccaaagaggcacggccccatagacattattataatgttttctttttacaagaccttataatattttgagcattgatattaattattagtggtgcgtgacacaatttaaaaaattttacgatgagaaaaattattacttttaattatataaaatgtaatatttaattatactaataataatataaaatattattttttaacatttctgaaatattttatatgtttttcctaacaagtaaaagtgatttgtttatgaactaagtgtttacaaactattatattgatgtacatatatattttttgaaaaatctataatacctttccatcacataaattttagtatattctttatttgtcatgctatctagttttttagttatttaagactacttataaatttttagaaaattttaattaatttacaataccaaaataagattcaaatattttattatatatacaattattttttaatacgtataataagtaatgattaactttattttcaacactataaattatttatcattttaaaaaaatttataagtaatcctaattaattacaattacacattaaaaactatagttgaaattaattatacaacataaaatttgagtatacaaattaaaagtgtacacatcatatatatatagagagtttttatttgattttggtatactatatactactgcttattttctagctaaattgtctctttctttagaaatctatgagtttagtagttggatatttcgcgcaatgtaaaaagactatctttatattaatctttggatgttttagaattttctttttttaaaattgtatagataatacataaaactattttttttttgtaagagcataaaagtaaaatattaattatttttttaaaaaatatctaaaaatattaatgagagagagggagagtacgtttcttatacgcatatatatctgtattggttgtcattgattacttgaaaatgactcacatctaacttataatatcatatctcatagtagaaacattttaagctctttcatgattgaatccaaaggccaagtataatggaaacttacaaagaaattttgtttaattaaaaatgaaattccacacatgtgccatgtatggcttgaactctttatcaaccattgaaaaaataagtagaatatttttatcaccattattactaaagcaatttatagtattcctttttatcttttttccaagtaataaaacatcattttatttactatttaacattaatgagttgtttaaatatacaatcttaataaaaagtatcattaatgaaagtcatttttttcaaaaaaaattaatgtagtcatttttttttacaaataaatatatatttttattggagtattactataagacatcaaggtacgtaacacttctatgtcatgacgttttataattggttaacagttctttataatatgtattaaattaaaataagtgaaatccgattttgaattgcaccaataataatattgcgtacatcataagagtaccataagttccctttagcatttctttaatttttacaattgaacttccatacacaataaaaagtgcattgttatagaacacatgtgcctatcatttttatgacatgacgttttgtaattggttagcaattctctatagtctttattaaattaaaataagtgagaaccgatattaaattacaccaataacgatattacacctcataaaggtgctaagcaccataaatgcccttagcatctctcaaattaataacatttagagtaccctactcgctcacatgagctacctcataataagtttttctt

SEQ ID NO: 21692 - DNA, 2516 bp, Cannabis sativa
  modified_base (2188)..(2190): a, c, t, g, unknown or other
atcttttcagttaacgattgaaaaaaaatatctataatttttatttttttattagaataatttataaaataatataaaattaattatggatattctgttaaagtatattctgttaaaataaagagataacccaaaaagaatcgttaaactaagaattgttaaactaagaattgccgttaaatacgcacttttaatatataaagatattgttatgattttaaatttgatttgaaaaaaaaaaaacgtgatgaaaattttaggtgatttttttttaatacttaataattccaattaaatattaattttggaattattatttatcaagttaataaaaaatttgaaaaaaaaaagagagaattaaggagaaaaaaaaagaaagatgactttgaagaatttttaaaccgccacatcaccgctttatgcttctcctttatatatatatatagatagatttaaacatatttgaaagtttttaatattagttttatttaattgttaattaattgttatttttaaatacatataatttttaaatattttttattttaaactaaacatgagacgtgacaaaaaacacaacattcacgtcaacattttgttatcattaaaagaaattatcaaaatattaatatactataaaaacaaacataaattcaattaaatacttatttttattctattttcataaatataatttttaattacaaatatatattgtaagtaattaaaatacatatacattttttctcgatttttctagtgcccccttcacctttatgtgggtcgctcctctatacacccaatccatcatctcctctcatattttcacgcctcatatacaatctttctttaacgcattccatcatacctactaaataaagaggtagtgctaaatttgttttggttgggttatttgatcagatatgtatacctaattcttatataattattattgtgttctagattatatacaaattgtatcttgagttatttaattttctatcatctgaccattaagctgaagcttagtctgaaaagcttgaatgtgtctcgacagtttgtcgacgttctcctaaaagcctgacgaccataatgacttaaggggatcaatgtcaaggactagggctgcgtctgggaatagcctcgatcgtactcgaagaagaatatctgaaatctcatttgcagtgtcagaaattcactggaaagttttttctgagttttgggtgattttcattctcagaaaaatttagaatcataagcaaaaatggcaaaattggtgtatgtttgatctttgctctatttatttgcaaactggcaatccacgtactctcaatcaaacgactcaagtcatatcttaaaaaatacaataagatccaacgaaccgagaatatggaagggtgccatttaatgttgtatatgggattgaggctctttaatgatgatattcaccttaaaaatcccactgacatgactagtcatcatctcgtgtcctcgggtttcatgggccttctcgaggcgcatagcatgcatgaacaagggattcatgacacgtgcagtttacttagggaaaatgaaggattcacaacttttcacaacctattgccttggaattctaaaagaccaacccaaggttccacattcctcggtgaatccagaaagaagttgtaagtcttcgtgactctcgagcctcgaaggcttgggggtaaatgttatccatgtttctagattaatgacacatgtacttccaaggcctaaaattaaccaagatgggcccctttctaaggcccacttaagttaatggattagcacacaacagagtcgggttacagctctgaacccagacccagacacaagtccaacttacaaacatgataaaggctgaccattttggtccgggaaggaccatctgcctagaagacgtgtaacgccctaacaattaggcacgtcacgataactgattatgaaaccctaatcccctaaactgggattactagaaacgtaagcgcgggaaaatttaatctttatttacaacgggataaaaattaaacttgtaataatttttaactttacaaacaatcaaaagatacatgcttcgggatcccataaacattttcacaaaatattacaagtctattttacgtgctgacctaagcgataaaatcaagattacaaaatacatcactggtannncccaacccgcttggtctagtatggcccgaacatgtacaagcatcgccaagccctcgcactcatggctgatcagtgacagatttatcctttcctgcacagtagagcacccgtgagccaagcccagcaagacagtataaatatcaataatcacaattatacatttcacatacattataatcaatccattacacgtattgtctatttggcatagacttgtgagttacactacacgcctatttatgtctatgtggcatagacccacgtgttacgctcgcacgtctaaatacaataaggccttagaacggttcatctcgattctagttacc

SEQ ID NO: 21693 - DNA, 1885 bp, Cannabis sativa
gagagagagagagagagagagagagagagggtatttttgaatttatggatttctgagtattaaaactatatgttatgtagagtgggatactaaaagaccttctccgtattttatgcttgcattaatgtcaagtttcttttttataatttatattagtagtaaaattttattaaatcatattttatttaaattgcaagttaattattataaactagtttataaatgcatacaagtagcgtccctaagagttaggatattatacatgtctgtttagtgggtatcaatagaattttaatagaatgtaattttgaatataaattctcaaatgtaaagaaattttgtaacatctcgatatgcctaatgataaataattagggtttataattatattgtgggttaattagataataagtgggattatgattctacgtactaatctagttcaacataaattttaaatttgctataagtggataaataagcataatttatgaattatagatatttctatagcatgtatgaatgtaatatgagctatatgtggaacaaaaatatttttaagtttggcgatcttggagactcgattggtggccaaaaatatcataacgggtgtaattattagtttggattggaatattgtgataagttgataatataagtattagggtacttaagagtatgtggtattaacttaacacctaaaaatagaaatttcttagtgactaagagataataggataatcattaataaattttttattaatattattatattattattattattaatcttactgttattattattaatatattatattatattatatatttattatattaatcttattaatatattatgtatattaacgtaacagtttatatatgataagtttataaataaaatttacgaccgaaacgaaactctcgttctctgtcaaaactctctccccttatatttattttctttgattttcaatctaaaacttagcgatctatgttctgatagtagcagaatagcaaattctcagagcgggaatgcttaaggtaaggtttatttcaggtttaagtttaaaacaattagtttcgcatagggattttgcaaattagaataattatgaaagttctgaccttatagaattgttctcgggtagtcatgggactagttccgatatttacttgttgaatttgaggtaagagtttggaacttttaaagcttaggtctgagctttaattgcattttctgtttaagggctcgatttaaatttctgttacgaaataattgttgtatatatggtatatatcttaggaatgatttggaatgatttggttaggtttggagctagttaggagggtttcaatttgaggaaaatcgtgttcttggtaatttagaactggaattccgattggtacaatcagaattccgtttggttagtttgtgaaaaagtcaaatttcgtattttggccagaattttttactcggttgtccattttggatgttcaatatactatttcaaagcctacgacaaactctatgatatgatgtatgttttagagccaacatataaatttcattttagtgaacttttacttcaaggcttggtagaaaaccctaggtgttcctttaaagttattaagtagtgttttgggataaacacttaattgtttatcatcgttatgacatagggcttcggatgatcgatcgttctcgaagcaggtcagaaaaattacctaaaccaaaacttgaggtaagattaatatattgtactgcatagtacattgtatgcaataaaattagtattgcaacgaattgattaatattgagatatcgtcaatattcttatataatgaaaagattgaatggttgagtatcgataatgtgatg

SEQ ID NO: 21694 - DNA, 4809 bp, Cannabis sativa
cctggaatcccttttctcattccctgacatcttctctcacgatcaagcttgatcgaaacaacttcctggcatggaagtctcaagttcttcccacggtgattggccttgagctcgatgaaatcttgctcactgaccagtctccaccacgacacttggttaatggtgatccgaacccatcctttcaacaatggcgcaagaaagatcagcttcttctttcttggattcgatcttcaatgactgaaggcgttcttggaacggtggctagctacactacatcgaatgcggtttggacagcccttgcacaaaagttttcgagtcaattaaaggccagattactacaactcaaaagccaattgtctaatgcccacaaaggtaaccagtctatctctgactatattgataaactgaaagttatctgtgattcccttgctgttgcgggtcactctatatctgatctcgatttggttcttcatctcctaaatggtcttggacccgagttcgactctgtggtatctggtatcacttcgcgtagtgataatctgtcccttgaagaagttcaagccctgttattggctcatgaaaccagactcgaacggcacaacactatgatggatctatcgactaaaatggttgccaatctcacatttggatcaagaaatggcaacttcagatccaatggtaataatggcagagggtctggtgctgatttctcatcaagatttcccactcgtagcacccaacaatattacaattccagacctgcaaactccaatcgccccctgtgtcaagtgtgtatgagatatggccatacagccccaacatgccactaccggtttgacaaaagttgggtcactcccaaagcccctactggaaattcccaacctcaagttcatctcactgaacagatcactgagtatgagcctactgcctttgtggccaacactgttcctgactttggtgatgaccaaggatggtttgttgacacaggagccactcaccacatctcttacagtgaagctccccttgataatgcagttccttatgctggtcaagaaactgtggctgtaggagatggtaagaaactcctcatttcccacattggtaaaactttcttacctgccaaacaatcatcttctttacatctaaattctgttttgcaagtgccttctattaccaaaaatctcattagtgtttctaagcttactaatgataaccatgtttttcttgaattccataaaacttgttgctttgtcaaggacaaacaaacaggggctgtcttggtcaaagggaagcttaaagatggtctttaccttcttggtgatgatggctccaacctctctcacacgtctgtgcaatgtcatctaattgagtcaaatagtactttagtaccgaatcaatgtaattcccaatgttgtctttcacagtatggttcaactgattgtaactctacagatatcaataaagaattgctttcttttccttcaaattccaatgctgttgtctatagttctacactttctcatgatatcaacttgtggcactctaaattagggcatccatccccggccatacttactaaaattttgactcaagctaatattccccactctctcaaaaacctaaagttttgtaatgcctgtcaattagggaagagtcatagacttccttttccattgtccacttcaagagctagtcaaccattagaactcattcacacagatgtgtgggggccatctcacattgcttctcaagataactacaagtattacattgtttttattgatgactatagtaggttttcttgggtctttcctatgactattaagtctcaatcatttgaattgtttattcaattcaaaagcttagttgaaaaacaattcaatcttcctattaagaaaattcaagctgatggtgggggtgagtttcgggtctttggcaaatttttgagggatcaaggcatttggttccaacactcttgtccacatactcatgaacaaaatggacgagtggagagaaagcataggcacataactgaaaccggtcttactcttctagctcaatcgggtcttgatatgtcatattggtggcatgcttttcaatgtgctacttatagtataaacagaatgcctactcctgttttaaatcatctcagcccttttgagtgcttgtttcaacaaccaccagattatagcatcctaaaaacctttggttgtgcttgtttccctcacttgagaccttaccataaccacaaattggagtacagatcagaggaatgcattttcttggggtattcacctaaacacaagggatatctatgtgagaatcccactggcaggaagtttatagctcgtaatgtggtgtttaatgaacttctctatcctgcaaccagaataacaagttcatctcaggtacattcagcacctattaattttcccactgctcaattttctacatctcacaatactgcagcatctaatcttgttcctcactgtgttcattcatctgtgtttcctgagcaacatggttctgtaccagcaactcgtgcacctgctgcaacaagtcattctgcctctgcaccagcagacattgctgcaccagcagacattgttgcaccagcagatactgcagttacaccagttgcaagtcctgaacaacactctcaggatgctcttgccactactactgctatgcatactgctgttcctactgtacccgtgctgtcaaatgttgcttcccatacacaaccagtttcttctacagtttgttcacaacctacccctgctgctgatgttaacacaggtgcttctggctcatctatccctctgagaactcatcctatggttactcggtctcaaaggggtatctataaacccaaagcttacttagctactcgacatcagcttcctgagtctcttttcccgactgaacctaaatcacttaaggctgccctcaaccatcctggctggtttgcctctatgaatacagaatttaaagctcttatgtctcaaggaacttggactcttgtaccatatgaaccacacatgcatctcattggaaataagtgggttcatcgggttaagctcaatgccaatggtactcttgatcgattgaaatctcgactggttgctaaagggtatcttcaaaaacctggcattgattttgaagacacatttagtccggttgtcaagccggttactgtgcgacttgttctcactcttgccatctcttttcaatgggaaattagacagcttgatgttgccaatgctttcttaaatggtcatcttcaagaaaccgtttacatgagtcaaccacaaggttttgaggatccacaatttcccactcatgtgtgcaaacttaataaggcacttaatggcttaaagcaagccccgagagcttggaatgacaagttgaaatccactctccttgactggggattcaaagcatcacaggctgacacttctctctttgtgtatggtactggttcgaacactgttatccttttggtttatgttgatgatattcttgtgactggcccgaatcactctctcatccaacaacttatatctgatttgaactctcagttttctctcaaggacttgggacaagttcactattttttgggggtagaaatgcatcgatctcctgaaggtctttatatgtcacaaacaaagtacattactgatctcttactcaaagtgcatcttgaaggagctaaggcttgtgttagtcctacttcaacagctcataaactgtccctccacgaaggagctccttttgaagatgttacattgtataaaagcacgttaggtgctcttcagtacttaacattgacaagatctgatgtcgcctatattataaacaagctgtcccagtttattcatgcccctacccatgtgcactgggaagcttgcaagaggcttctccgttacttgaaaggcaccatctctcatggtattcttatcaaaccagttcagcatatgtccctttctgcatattcagatgcagattgggctagctgtattgatgaccgccggtccactggaggctatgctatttttctaggcccgaatttgatctcgtggtcagctaaaaagcagcaagtcgttgctcgctcctccactgaatctgagtttcgtgcgcttgccaacaccgctgctgaaatcaagtggcttcgttctcttctcagtgaactccctgttactcttgctgcagttcctattatctgggttgacaaccaaggggctgcttccttggctgctaatcccatttttcatgcccggtgcaaacacatcgaaattgatcaacactttgttcgtgatcagctactgaataaggaacttgatgtgcgttatgtccccacggttgatcaagtcgcagatatctttactaagtgtcttccaaaagagcgttttcactatctcaaaaccaaactcaaagtggtatctaccccttttcgtttgaggggggatgataaccaaagtcaagattagttggttttgtgtcttgggtctgttattttctgttcagattctgttaaaagccacttgtaatctttctagcaattctgttataactaattgctttgtattagtttgctgcctaattgggctatataaacatcaataaagtctcgtgtaagagacaagctttgcttctcaatttcctctctgttctcctctgttctatttgtttcatggtatcagagcctttgacctctgtcaatggcttcctcaggcgacaactcgtctcctgcaagcatctccgatccagctgcaccctctgctactacctggaatcccttttctcatt

SEQ ID NO: 21695 - DNA, 3445 bp, Cannabis sativa
aataatgagaggtagctcatctccataccatatgtaatcaatgtgaggtagttcatctcccaatcatatctaattaatgggaggtagctcatcttctaactatatgttatcaatgagagagcatgagtcaatagctattacatagcttcattgacaaatgtggcaaataataatttccaaaactcttgaaagttgaacatatattcacgacttcaagacaatttgactttcgagcaaaatccaacaatctccaccttcgcaaaaaaccaaaccaaaaatcactgcctccacatgcaccttgggcgctctaactccgagagatgttggtcaagttcaagtaatgttgaaacttaatccatgtaaccacttttgtaagcatatctgtagggttatctgcagtcccaaccttctgaagtataacattcccttcatcgatgattttacgaacaaagtgaaatcgaacatcgatgtgcttagtgcaaccaagatgggacttggttctttgccaaaaaaaaatggcactttgagtatcgcagaaaatctccacgttcttttaaaaaaaaaaccaaaatccttggccaacccgagaagccaggtagcttcttcaaatgcatctaatatatttatatattctgcctctgtaatagacaaagcaatgtttctaacaacttatgttgtgtattattcctaacatctctaaattgggtagcgagtagttggtttgataaattcaccaaccaccccattatcttgtgggagcaattatccaaagaatttaagaaacagttacaggtcgtgagagacagaagactaaaggcatcctctgatgaacattaaataatagcaaggagagtctcttaaggcttatgtaagtcctttagtatagtagcaaaaaagtaagaaacttgaatgatagcattcagttaatacccctctaggctggaaaaaccactgatctgtcgactataggaggcaaattgttggatgatgtgcaaggtcgcccaattagaaaaattaatgaattcaatgatagggcattagtcttcgtgcagaaagaagaagcacaaaacgagatgaaaatgctcaaatcgagctcgagagataaacccaactcaagtactccaactgtgagtactgtaacaacaaaagtggggaatttgagctagaatgggtagattggaaagaggaaagatgaatcgaaatgttcatcaaaggatgagaagaagaaaaagaaacaagagaagtatgatccaatatacttaatttatacagagctaagtgagactcgtgagaacatctatctcgcaaaagagaatcagatcgcttttcaaagacctaaacctatgagacactcaagaaataagtgagatctgaacaaacattgacagttacatagagacattggacatacattaaggaatgtcaccaattaaaggacgagatcaaaggactcatttctcgaggctatctaacgccataagtaaaaaatagatggaatgaataaaacctgcccaacaacaacaagcaaaaccaaggtgtacaacctcccccagttgagggcgaggacatcctggtcatttttagaggaccacatctcatggagaacaacaatagtacccaaaaaaggtatatgaataacattaaaattaagaatcagtccttggacctaagcccctcaagcatgcgaatcttgaggaatccccaataatcttcactgatgaagatgaaacacatgtgcaattcccacactcaaatcccttagttattgttgtctagcttacgaacaaaagaacaaaaagagttctcgtcaataacaggaattttatcaatattctttacaaagaaacactgaagaagatgggtctgaaaaaggccaaattaagaccgtgcatggtgaattaatgtggcttcaccggggatggtgttgcgagccttgacacctttgaactcccactcactatgggagaactgccactatcaacaaccaaaatgcaagaattcttagtggtagatatcccttccgtatacaacatactaatgtgtcaccctaaactaacaagactgggggcagtaagctcgataaagcacttgttcttgaaattcctaactcattctagagttaggacattgaaaggcgaccaactgacaaccagacattgctatagttttgaattaatgaaacgaagggaaaatcactagccaatggtaatcttgacaaaagagaacaaggaatgcgagatagaagacttggatccaaggatccaagaggagttcaaccaactcaagccaactgaagagttggaagatataaatttagacccaaatgacccaatcaaatgtgttaacattggaaaagatgtggggaagaactaaaatagcaattaatcgtatttttgaaggaaaataaggaccaattcgcttggagccatttgaacatggtcgaaatcgacccaaatgttatttgccaccatctcagcaataatacctctaatccatcgaggcactagaagaggcgtcctttggatcgagcgataaaattctttaaaaggagaggttgacaaattgttaacccaacttcataagagaagtattttaacccacgtggatatcaaaccacattctcgttcctaaacaaataagacatggaaaacctgcagacttttttttacttgaataaagcatatttgaaagattactttccactcccacggatcgatcaactggttgatgtgacagcagggcagaagttgatgacctttatggatgcatactctagatcaagaacacacaagctttgttataaatatggggttgtattgttacaagatcatgccatttagactcaaaaatgttggaccaacatactagcgtatcgtaaatagtatgtttgaaaaccagatagatttgaatatggaagtgtatgtagataatatgttagtaaaatcaataaagagagaggaccatacagaagacctcgcagagtgctttataattttgaaaaaattcaatatgaagctaaatttgaaaaaatgttcattcggagtgtccttaagaaagtttcttggttttattgtaaacgcaagaggagttgaggctaaccctgagaaaataaaggcactgatcaaaattccttctccaaggaagccaaatgaggttcaatctctaaatagaagaatgacagccttaagtaaattcatcttgaaatcaactggtaaatgtctccaattcttcaatgttttgcaaggcaacaaaaagttttagtggaatgaagaatgcatgcaagcccttcaagaaattaagagaaatctttcaacacctctagtcttggaaaaattgataattggagaagtgttaagcatctatttagccatctcaaaaaatgccatagtacagcattcgtgcgagaagagggcaagaaccggcaaccagtatactatataagtaa

SEQ ID NO: 21696 - DNA, 2176 bp, Cannabis sativa
  modified_base (1780)..(1785): a, c, t, g, unknown or other
tgtggcttgaagcggggatgttacaacccaaagccaaagaaataggactgtgctgaagtttgtctcgagacatcacgtatgtacattgctggatttatgaatacacttctaggaggagtgatagttgccgcaaaaaattgaggagtcagaatcaaactgtaaagttaatgaaaaacaaaggcactttgcgtcatcacttctatcaatcagatgtatttagacatgtgggccctagggtccaccctgccttcatataactccatctaaggcattgtatagtgttctggcaatggtgcctttattattcttcccccacatggttcctgaatcttcttcttccaagttagatacgaccccactttgctactgggcaagacgttctgtgaacttagtcaattcaactatttggccttccagatgcttagtgttgtcatcgtggaacttgtgcccacgaactctatcattgatgtgacttttgagctcgtttccacgaggccttgctttctcacctttagctggatctttatttgtgaaagcattctccgaggtcattgttgacatactgtcttctgaaatcgggtgaacttcatctactccatcactttagttaacaaaattactagggaaattttcccatccccgagtggcaggcttttctacctgagcaccagacctatcgctttttgtaactctacctcgcaaatcaatcgggcagcttttctctggagaatcagctaccttctttttctgcaaaggttggttagcagtattcgttttgttctgtggagcagtcaaagaagtcctatttgtaagttctcccatggcacattttcctttgtcacttgtgggatcagaagttctaggacctttagggtttgttttctttgtggtattattttcccgaggaacaagttcttcaggagtgttttcatcaagaccaacatttcctgatttaattctagcctttaatctgccaatttttttgggtttcagctaattctttggccatctgaatgacttctggatctagctcattaatattcatcttcctctttgtctcctccatcatcttgaaaatagtcttccttgggatcatcatcttttctgggtcaacttcttcatcgatgggattctcatcaacatatttttcattatgttaagttttcttagcaggatagctagttacctctgatgtctctcctacaacaccagaatttgcatgtgcaatggaagggttcatgtcatccatgggagtgtctcaatcatgaacaccaaatttgtcgacagtgtttcttggggctactatcattgcagttcacaacttttgtatcaactctcaatgaaagcactaaaatatttactaagatttttggaaactagtataaaatatagtaaagctaaagagatagatcaaaaataaagaatgagactagagtttgtacgtggttcaaggaataatgacctctagtccacgagtaaatattattatatggctagaaaatcctatttaatttacacaagtgtttttccaagatgctaaactcaagaatttccttagctctcaagtatcgaaattccaaccctttgatgaatatgttttcttaaatttatagagctaaagttttcgaatgtaaaccttgcccgttggtggggtaaataaaaataacatattgacttcgagtctgtctggtgaagcccagcccatgaggcattgatcttctgatgacgtggatgccacatcatgttgatagttgtcaaaagagaaatgctaaagggcacnnnnnntgcctagcaccctcctatgtgtcagtatcgctattggtccagctaagtatcgggtcccacatagtttaatataatagattttaggaagtatctctagccaatcgcaatgtgacatgtcgagaaggtgctaggcaccactagtgcctaatagcaatgctcttgtcaaaaatgtgtccttcctttatggataataaagatactgttaacttcgcttttagccaacgacaatgagtcttttgataagcgataaatgatatgtcgtaataagaatacgtaataaagcaaatattaataataataaaaagacacgaaaattttatagacgttcagccccgagcagttcggtaatagcctaatcctcgttagttgtattgacttaagaataaggaag

SEQ ID NO: 21697 - DNA, 2029 bp, Cannabis sativa
gtaccttatgaccaagaaagatgcgaaagtaaggtgaatttgatgggttcttctacttcaagagtttgatttagaaattagagataagaagggcactgagaacttagttgtcgatcatttgtctagactggaactagaagagagttcaaacatgaaagaagtccacattaatgatgaaattcccgatgaccagttgttttccttgagggaaagtctaatgctcccttggtttgctgactatgtcaatttcttagctgtaaatattactcctcttaatatgtcaagacaataattaaaaaagttcttttaagaagtgaagcacgactattgggaagaaccaattctctacaagcattgtacagatcatattattaaaaggtgtgtgcttgaagagaaaatgaattctattctaactcactgccatagtttgcaatgtcgaggtcattttggtgggttaacaacaacttcaaagattctccaaagtgatttcttttggccaactttttttaaaggatgctcatgcatttgtcaaggcccgtgatcgttgtcaaagaacaggcaatatttgaagaatgagtggatgtcgttgaatggaattttagaagtagtattgtttgatgtgtgtggtattgatttcatgggatcgttttcatcatcatatacaacaatctatatattttgttagatgtgaactatgtctctaaatgggtagaaacagctgcaactaatactaatggtggtaaaacagttctcatttttcttcataaacacatctttactcggtttggagctcatcgagctattattaatgatgaagggagccatttttttaacaagcaatttcagccatttcagccttgcttgcaaggtatgaagtgagacataggactgctttgccttatcattctcaaagcaatgggcaagcagaaaaattaaaccgagaggtcaagcttattctggagaaaacagttcaacattcaaggaaggattggtctaagaaactagatgatgcgttatgggcacatagtacagccttcaagactcatatttgcatgtcgccatataagttagtttatgggaaggcatgtcatttaccggtagagctcgagcatcgagcttattgggccatgaaaactttgaacgcaaatttggcggctgctagagagaaaagaatgttgaaacttaatgagttgaaagattttcgaaacgaagcatgtgagaatgcaaaaatctataaggaacagaccaagatgtggcacgacacgaatctagtaaagaaagagtttcaaccaagttagcaagtattgctcttcaattcaaggttgaaattattgtatattgtttagcgtatgagataaatatttttggaattctcacataagatactgtatttttttcaaattttacatttatattgtggtaaatgattttatatttatactatttgtacccttttttttattattttttatttatttaaattttaatgaagtttttttttttattgcctctttctttcttcttacactagctttttttaatactaatttttgggcacgtgctccctaaatttagtataaaattagaaaaatagtgagaataataataaaagtaataattaatacataattaattaaagtgatcataggcatagtctagtggttctgtactcttctgaaagaggcggtcccaaatttgaatccagtggcgaagccagccacaagggggcgaaaaaatttggatagaaattacacttataaaaaatattatttttattataaaaaaatataaattttataaagattagagtagatatatgagactaaatattaaaatatgtgaagataaaaataaaaaaagataaatttatataggcagaattatatatggaatgacaaaattaaaataaaaattaaatttatggggacaaaaatataaatatatatataaaaaaaaatacatacaaaaaataaattttaaaaaatttagtggggtcatgtgtgtccctctgccactatttgaatccccc

SEQ ID NO: 21698 - DNA, 4152 bp, Cannabis sativa
tttatgaaccgagaattttcccttgaactattgagatttggatacataatatgttgcgttttacattctctaagatcgagttcatagagttaattttggagataggagtgttctgtgacccatcgtttcttcagcacaaagtagttatgaaattttagaataaagcccttcattctcagtagtacacatttgaactaatctatactactttaccgtttagagagttagattttattttgtattggttgttgttttattttcattcaatacatctgttctgatttcatatttttggccttaatttattaaggtctgatttacttcatctccaacagtttttaaagaacgagcaaagtgatgctcctcaaaagtaggtgagaaccaaacatgatataagtgtttgcttctctattctaggtgtctggtttagaatcacttatatacttgtttgtttgtaccaccacatcaacacattggatggatttacttcatctccaacagtttttaaagagcaagcaacatgagtctcctcaagagactattcaagcattggatgttgttctcagggatgctccatcgaaagtgtaagattcttaatgctaccttattttatcattcaaaaatatcttgatcagtgtcatattttggtagattgcatgcaaagagttaaagtccagcatggggatgttgtagttagacaggttactccttttgcattttgattttactttttttcatttaatagaggtttggctgttatgggttgacggtaaagtggtacatatatcctttaaatggagtagtattttgaaagttatattatcaaaatgtggtgttccaacaattctagtaaatttagtttatatgagtaattaggcaaatctttaacaagtgttagttttcatctttttcaggggtgaaggagattgctttgatgttggtagaagtggagaatttgaggtctttctaataatactttattgtctttccccaattcaggcattttgttgacgggatgtaattgcatgaaatattttttggctaattcttgctcttaatattatcatactaccctgaaaagttcattcctttatgattgaaaaaataattactcagcatatcatccttgttcttgatattaagatttgtatctttattatagcaatgaaaaaatagtgttgtgttctcatttttagaccttttctttttgcaacaaattggagtaaatgtatgaatgcaactcgtgtgatttgtagcaatctatacaatgaataggggtttaactttgcgataacgaaaaattatttgtaatgaaaactttataaaataataactaataacttatttcatatatgaggagaaaaagagaaattgacaaataaaaataaagagctcggaaagatagtagtttctgaaagcactcactaacatgaaattgaacaatataaggaaaagaaaagcattaaaaaaatgataaaaattagaacgctccccatccaaacgtccaaaacaatctgcttaaaatatttttctcttggtagtcttatcatgacttctctcttcgttagaatcatcctaaaaaagaaaacaatatattaacttaataaaaatattaaccaaaactaaggaaagataaatctccccaatacataaattagattacataaccccactttcataattattagagtcaagaagagttgtataaagcttagtctttttgttttgagtagatcgaatcttgatagaaagatcaccacaagttgtatttgagctcttttcaaatatttaatccatccttccgaataatccatctacttcccccaaatcttttttcatttcagtaaacaaactctttaattttaattctaacttcaagtcatgaagttctcgttcaacatctttttccattttctctttatcctgctgaaaatgaatgagttcttcaacatcctctttaattgatgatacatttttctccaagcgttcgattgcttgaaaaacatacatcttctcttcttggtcaaaattcatctgcaatttaaaccttttatttaaaaataaatacgaagtatacaaattagaggagaaattaaatacatatgagagatttacaagagtttgaaattttcacaaacatttcttgtgaatgattgaataagtaaaattttatgaaattgtatatactgattgtttgatcttatattctatatataatgtgaatgtgctacaggagaatatgggaagtactaaattaagtagtttccataattaacttaataccattctatttatgtaagaattttcctattattttttgatctgtgcccgtttttgggtctgtttctgttttttcttcttaactgtcttcttttgaattttaactgtttttcctaccgatcttcttctttgttttgaatttctttgcttttaactgctcccgcctcttctttcctcccctttccgccttattcctcctcagtctcccccgtcgtttgctcctctggtgtatcccacttccccttccctggcctgatatggatccattctcggattccctacgcactaccctctcccttacagatgaagaaagaaatattgtatctctacccactgctacagcaacaaacacactcaatacatcccccttttccctgattgcccgagttataacttccagaccagtttacaaacccggtttctttgagcaaatgcctggtcattgggcaggtcgctaccctgtggtaatcactgattttcactctgatatgttctatgtctcctttggttgtgaaggtgatagaagaagagttctgaataaggagccttggcattttcagaatcacttaattgttttactcacgccagatgctcgattaaatgtctcaaaggaagatttgatcttcacgccattttggatccagatataccgcctgcccttcctcagtaagaccactgcccttgctgaagcccttggtaatacaattggtcacttcattgaagtctttgaggattccactaatgaaggttggggtccttttctccgtgttcgggttaaactttgtgtcacaaaaccacttctacgtggccaaatgatacgattgccgtcaattaaagatgaattttggattgactaccggtatgaacgtttgcctgaattttgttttgaatgtggcattcttggccacccctatgagcagtgtgtgttgtttatggaacgaatggataatgggaacgatgatgatctaccatatggaccatggcttaagggtgctagacttccgactaatagctatgatcgataccgcaccgatttctctaaggcgaatgcatggccactcttaacacgtttggctcgaaaatccttggtctctgctgtcccacggttagccacaccaagttcccctcacccaaatccaattcatgacagtgagaaggactcttcaatttcccttccccggcctcaaatggtctccactacaacaccaatttccatttctcaacagcctcaaacaccacatactgtcgacccgtcccctaccactctctctgctacacttaccactaactcataccaggccattacaccactctctgctgcccctactgttcaaaatattaaaggtaaaaatgtacttggaactcccttcaatccaaacttcacctccactaatttttcattgcttgataacactaccaaccccccaataagtacaaaacctcaaacaacagtctcagtggcagatttctcccatatttttgtcccggacttgggttctgcaagtcaacaacataatacttttgccacctatcctccacccacgcccaccatgcttccaacctcatctttggaatctttgtcactatccactaccatacagccgacacactcaacatccatttcaacaacctttgcacatgctgcttctctcgataaagagaatatcccacccaccattactacaaaacgccaaggtgattccgtgtctatgaggaaactccttaaacgctgccgtggtgttagtagctcatccacaccctttttcacccctgagcttgctcctggatctatagtttcttccaatgaagattctattgattctcttgactgtccggcgatggttgcttcgcaacctcgccactcatcatgaa

SEQ ID NO: 21699 - DNA, 1656 bp, Cannabis sativa
tgagagggtatccttacctgaacaaaatatgtatgtccactacagaatatgcttgctggtaaaattcctagcttgagatttccatcataagcatacacaaggccactttcttcatcaaccgatggtcctaaccgcttgtggacaaggtcattaaaaccattctgatcccaaattttatcatcagctagaagcatttctttccattctgcagccaattttttcgaagagtctgttggccgccagtggaaaattccaatattgtaggcagccccaactgttttcgggaaaacattatatagttagtacaaaatataaaaaatccttcaaaatgggaacttaaatacaacacacacagaggcagattaaaagtagaaaatgagttgtgcaatagccaaatcataagtctttgttaaattgaaagagaattcgcatgaacgccttgaaaacatgcaacatcatgatctgtgggcataattcttgcacgccactacattgaaaacacaaccaacatactcaagaactgaggataaatgtacatggacagctttaatattgactaaactagataaattgtaaacaaattcaactgtgattaagtttgttagagctaagaggtacttgtaaaagtaaatagcaacaatactcacttaggattattatagcacattccataacacaagcttgacatctagtataggcttacaatccttatagctactagaagtgaaaaaaatgttaatgaagagtgcaaagttttatcctttttcatttactcatttgttttcaaagctctaccttgttgccaacggtcaaggctatcatcaacaaccgtcggtacaacttgatcactggaagtcaaaacatctgcttcgggataacgggcaagataaggaagagggttctgtttgagtaacacagcaaaattataatcatatagtagaattataagtatgtatctagttatgtgtcaagtaaaggaattggaatggagaggaaaaaagcttttacctttaaccaaaccatgtctgtatcacacatgagcagctcaaaaccataaggaaggatggaatcaatgagaataactttctctctgcccattttgtgaaatgtgggtgaaccccatccaacatctacagtgctcatatgactgcccatgtcaaatacaggaacccctttccaatacaaagcctccaacaatttggtgtccattgcacctaaaaccagcaaaatccacattgaagatagagaaagagagtgaatgaatgagtgagtgagttaaaagtgagcttagcttaccaacaagaaagttagaaacttggagatctgacaagtgcttagcccaagtgagaatgaaatccatgaaagcatagttaccaaaggtgactataatgatgttatctttgaccctttgctgaacaagctccttagttagcctaaaatgatccaaaggtggcattttttcagtgtgtggaggctcccaaataggcttttgaggtatggctggagcgtccttgggcagcagtgcatcttgttgtaccggtggtggttgagaagaatctatagccacaggcacaggagtagctgtatacacacacacacacacacacatatatatatattaatatagatgaatgaatagaagagaattgaattgaa

SEQ ID NO: 21700 - DNA, 3969 bp, Cannabis sativa
  modified_base (367)..(370): a, c, t, g, unknown or other
ttaaatattttattatatgtgtgactgttttttcttatacgagtggtaatcaattaaactttattttttgcagtgaacattattcaacattttctgtaaatatataaatggtccaaaaaaactacaagatatctttttgacctcgcttttagccaatgatagtgagccaaattaaaatgattgaaaataattaaataacagaatataataataaaaagttcaacatttcgatttcaattgtatctaccgattatggtctaacatgattcaattcctattaccaaattctatgtaatagcaggtctactcaagtaatttatagtcttctcagatatataaattttaattacatgcaaattttctactnnnntgataaattaaacatgtaaaagacattaaacataaaaaccctataagctatccaaaccacataggtactctcgtcttatattgaaattttttcctatttcactctagcataattgacactaacttctcagatttcacatcaaaatcataaacatttaattggtgatcaagaaattaaaagtaattaagtactaatgaaatagaatacatagaaattgggagaaaattaaatcacattaaaactataaatcgatgccaaacaatatccatctaaaccttaataaattgtttagctactcatgttcatcgtagcaaattcacacatattaattcaaaatagaagaagaaaatagagaagaaaagaatgttgaaaactctgttaaaaaagcctttgcgatagattttgctctctaatttttgtactcctcaatttcttgctgaaaaatatcgaagcccactccttttatagtcaaacattgatacaaatgatagaaaaaatctaaaaaatatcgtctgcttgaaattcgaaggggcggtgagcattctatgaatttatgcttaggcattggatttctatgcctagggacacccattccttagtccaatacgacattctctactaatttttatgcctttcatgccctggcatgggtttttaatgttgaggcgctcctccaaattttatattttcttttcctcaaaagctccaatcgtaccataacttttaaatttttttctcgaattaatttctaggtgctcttgccccgagaattgatttatttgactatttttttttccatatttcttcaatattttctatttttttctattttaaacctgcaaaataaaagatgccaaaaagcataaaattgcaccaaactagagtaaaacttaattaacaacacactaaaattaacctaaaaataatgctaataaaaacctaacaacctataaaaggggttttaagctttagaaggattctttagccattcatcttttaaaaaaccagagcaaagaattttttctcttttcattgttaaatttttcgaaggaaacttgttggaatctccatcggtgaaaccctccaagcacattcagaaagcttcaaacagtgagttagttatcttttcctcttctttacgcaatttttgttgaatacatgaattatttttttgaattttgtgctgcaaaatttctatggtcttgtattgttcttgacagacctgagaggataagaaattatggcttttaatttcgattaacatatgcttaggtcatttgattctctaatcccgtaccattttcttgctagaaattgtctaaattcactcattcttgggttaccaaagaatttccagatattcctcgtgattttgaacctctagatttgggaattccattttggaatgaaattccttcttttttccatttaaatcagcctggtcggcatatcaaacatgtttttccttgttttccttattcagctctcacctttcgtctccctccttttgtagatgaatcttggtgagtactaggcaagaattattatatcgactaggatctccttcaacttcttcacaagaatcatcctcaattaggcgcaaactcatcttcatctagtggcagtccttcaaattctagttttgaagactcagaagtcagcagtgatcatacatagtacccagagcctgtggtgcagcaccatcaataccttgaccatatatgtggaaaagggtacagtcgttttatttgggagctgaagaaagggtgtagacgttatagggttcgaccttgtgttttcgacacacttctagagggtcgactagcccatgttaggcgctctacccgtaggtgacattgtcgtgacttttgtgtggcatacctttgagacaaagctaccgtccagacatagaatgatggcacaacttaagcaaactatgaggaaaacctcagtatcttatcctcatcttgcctggctgtttgcaacaattggggtggagcaagttaggcctctaagcgaggatgttaaggttgtcgagggggacattgaggtccaagagattgaggacaagggcgagagctgtcctaccagcccctccgaggtcgaaggagaagaggaggaagaggaggaagaggaagaagaaattctagcacttccttttggtggttacaatgaggccgaagaacctgtctctgaggcgggatatgtcttggtggcaggctgagattacgttgaagagaaatacacagaggctcgacctctagaaactagaggtctgaagggttctaggtgggtctcaccaccatccatgcttacctttaagagatcaactaatctctttgaagaaggccttcctcgagaaggtggaggcattcctgcctagccctgggcaacttgccacaaatcccggaggtggataccgcacatgttcaagacctcatgctaagcaggatgcaatgctgcatttgcatccatattttaaggagatggccaagtactaccatgtatgtctgacccaattcactcccaaaggcataaaatacctagctgcactgtttgtgttgtatgctacccaagatggggttagtcctccacccacgattggttgttcaacttgaaatccaaccccaagtagaacagattaggatacttctatttttcccagaatgaataccagtggctgactgccactacagacaaggaggtgtcaaagatcgatgggtttatagaagattactactttgttaaggacatgggtacaaagcacgtaaccttctagcacattccttccttctgtcatcctccttttatgttgggtcttaggttaagagcccaaaaaaaattttcaactaccgaagtcagctcgaaatatttctcttttggccactatagataattttatttaaaagggtacgatttgatagtttcaaagttcaagagacaaagttactaatttacaaaatacgtcagcatttaaacgacaagatggagcggaacctagctaatagaactataaaaggactaaatttttgtaaataaaaaagtttgagaaaaatattaacaagctataagaggcatgatctaatagtgtcaaattttaaaggggcaaaaatactaataaagctcaaatataatattcaattataccgatatattattttagcattttcgtattagcacatgattattttaataagaatattgctatttggcataaatgtgcttaacattataccaatatggtatcttatatatttttttttcttgaaatgtggcatttcacaattagttatcgatttttgatgttatttatcaaattaaaatgtatgaaactcgatataaaaattagggttatttattggaattggcaaattgcggtttaaatttggacaacaatccaaaccactgtacatggtaatcggtaagactgtctttggtggactggttaattcgaacctttcaatgttgcatagtttggttgcggtttataataaatatgaaattcagtattttaatattcccagtttaattatttaattaagtgattcattaaatgcggaataatgaaactggtgctgaaaacagttttttcgtagtta

SEQ ID NO: 21701 - DNA, 10814 bp, Cannabis sativa
  modified_base (223)..(225): a, c, t, g, unknown or other
  modified_base (4365)..(4371): a, c, t, g, unknown or other
  modified_base (4405)..(4406): a, c, t, g, unknown or other
  modified_base (5079)..(5084): a, c, t, g, unknown or other
  modified_base (5165)..(5167): a, c, t, g, unknown or other
  modified_base (10673)..(10714): a, c, t, g, unknown or other
tgaggatttatattgacaaatagggatgggaacaagtgtttaagatatacaaaatttggatgacctagacagtaatgccataacaaagagattgaccttaggagaaacaacaacgatttccacgattaaacatggggttgtcgatttttagcagacacaagcccttactgaactcaatatcgccaatcatcttccccgattccacatcctaaaaaacacaaannntagcagcaaacttaacttcacaattaagatcactactcaattatggtcacaagcaccaaaatccacaatgcaagggtcttgagggatttgaatgacctgaagtgcatcagtattgcattgtcttgagactaaagagatggcgcttaatgagttttgttctgccatggagaaagacaccaaggcaacacaagtatagaaccccagtggacacgaatagagtgagaggacaccagaaaaaatgtcgctggagttggagaagagtctgagatgaagaaacctgagagaaacgatgcagaaaaaatgccgctggagactgccacgtgcatacacgcgacagcgcatggagagggtcgcgacggatggaggtggcacgtagggccaacgcgcagcccagatggacgctagacttttgggttttaccgatcggaggtgggacaagcactctgggtcagagctgagaatagaaaactacttttaattaatcgtctaggataaagcctccaaatcctaattttaagaaccctaattttaagaaagaaaggggtgagaaaataatgtgtttgagaagcttcaaatgctctgataccatgaagcgaatgagagaaaaaagctttttatttctaatgatctattttagtatatacaaagggtatatataatacaatgtgaacacctagtaatactagagtgaatgaaaaatacattaaatgtaaatttacaactaatttatagctagcttgatttcctacactttactcacatcaagtttgagagccatatagccatccctcccacttcgttttctttaaatgatgcataatctcataagcaatcataatattatttgaaattagacgaccttgtaagaatacactttgagtgtcggatataatacttggcataacattcttaagtctattagccaccactttggacacaatctaatataacacgttacataaagcaatgggtctcaagtcccccatatccataggatgcttctttctagggattaaaaccagaatagttttattcagatctggtggaaataagctatggtgaaaaaactgccttaccattttgataatgtcacctttaacaatcggccaactcttctgaaaaaaaaaacccgaggtcatttcatcgaggcttggaatttgtccggatgcatttgaaacaacaatgcgaacttcttcctctgaaactggcagcagcagctcagtattttgctcagaagaaacacgattttgcacgctgctagtaacctgtctccacccaagcaccagattgatccttaagctttgtaacaaaattatttcgtcttctattagaagctgaggcatgaaaaaacttgctattgttgtccccttcttgcaaccataattgcttcgatctttggcgccaaaatatctcccgttgaatataagcttcagataagttcttcctcacttgtttataatttgcaactgagacatcatctcgacccaacttccacctttgcacctcattgcgacactttttaattctatctttgaagttgccagtgaacacctttccccacacacgcaactgttgtccctaaaaactcactttattcgtaacctcatcattcccacaaagctcccagttgtacctaataacttgaaagcgaagaggatcccttaaccacacattctcaaatcgaaaccgtttagtaaaatggtagccagcagtaggaaccaaatccataagaatcggggcatgatctgaagtagatgtttcaagattatgaagtttagcagatgagaacatattcaaccaagcaagattagctaacaccctatccaatcgaactttaatccaatgagtagtaccccttccacgctcccaggtaaaaggatagccacataactccatatcctgaagaccactatctgccaaagcttgctgaaaaccttgaattaaaaattcaggatatctattacccccttttttatcatcatgtgagagaacattatttaggtcacccatcacacaccatggcaaagtagagttagcagccagagtacgcaagaaattccaagtagaaaaatgtgacttctattcagttcaccatacatcccaataaaccgccactcattcatcctttcaatagtaactcgcacatcaatataggcattcgaaaaaccaagcaaagacagtccttcttcagctttccataacaaagcaataccaccacttctaccatccacatccagagctatcattccctcaaagcccaacatagcccgcactctctccatttgcgaacgactagaaagagtctcatagagaaacacaatactgggtctcttttggatcacaagatccttaaggaattgtaaagcccatcggtcccaagcccatggcaattccaagataaaattttcataatgagcggtgggcctggataccagcacccaccaaattcaagttttttgacccactaacatcttaacccactgccacatcatccatgtcgtggattccatcatcaccttccaaatcagtccttcttcttttcgagtcaaccaccaataaacaagcctcatcaccgatattattattaaatgattcctgatttttatatgttagcattatttgctccacagaaataggaatcccattaacttccttagatctccctatctatctaccagattgacccgatgttgccaaagcacttgggctcccaccactcatcgtcgacatcgccatcgaccgatatccagaaactggtggagcaacgttcgcacctaggccatcatccatggcaaccataaattgcttcaaccacttcgccccaatcatgtaatttttacgttgtggtttcaccctcatccatttcccatacggcttaactaactgaccttctccaactttaaatcaacgtggaaaaaatctatccgaatgccccattattccacagataaaacagaaagtgagaagatgttcatacttgaaattagtccaaaactctatcccgtcagaattacgaagcttcattcgtctctttaaaggattcgtaacatccaaagtgacacaaactcgaagataatccctccataaacccatgaaatttctttcatccgattcaacgaacttaccaatgtaattagccacatccttagcaatagttgcggttttaaatcctgttcgggtatcatgcaattgcaccgaaatatcaatctcattcaatggaatcaatctaggatcctcccccagttgcaaccttctaaagatcaataagaacttattgaaagtccaaggactatgagacatcattctctggatatcaatctcatgataaaattggaaaaaatatcgattagtgtccaattccttcacaaacatcccctttccccgctgccatagtgaagccatctagtgttgcatagcctcaaaatctattggcctctcagtcaaaaatcttcccacaatacaccacctatcgtcatagtcatcagccctcgtagcgctgacatcgtaggacaaaacaacatcctcttcttccgcaatagttatgtccacccttgttaattcctccattaccgtaccaaaatcaaagaaaaacaaaatagaacagaaacaacaccaaaatacacaaccaagaaaccccaaaaaaactacacaaccatgtcaaaagacaagactattctcaattcttcagtagcagaaacaactcattaatttgcctctctaaatggtttcagtcaactttaatttctcctttgtctcagattttttatattaatcgtatgaacacagggacgaagatggctgaaatcacaggaaaccttctcacatgttgaattgtaggtggatcaccgcttgcagtcttaattcatgatcgggtgtatcttgcgctgtttcgtttcgtattcgagagaaagaaaaaaaaattgcaagaaagcagggactggtttgttaatcgcaggaaatcctctgaattaggatatttttttatcgcatacttttgttccgtcttgctcctttaaatcgttaaagttggaaactttcatagtgttcgtaggctgaaaagaagatattatatatgcatatgtgttgttgttgttgttagtgattctgtataaatatatagggaaattttatttacacccnnnnnnntttctaaagacactccattttaataatttttatnntatataaaatttatatctttaatcgtactaagctttttaatttttttttcaatttatattcttaaaaaatatacatatcaaacaaaattaaattatattttaaatattatgataaaaataaaataaaaaatgatatgaaatttgcttagaaaaaaaataaaaatatatatacatgagttagaaaaaattttgaaaataaaatcaaaaaagtattgaaattaacataaaacaatgcgagaaaaaaaatttaaaaattattaatagtaatttttaaaaataatttaagtttatatatttttaatattgggacgtatttataattttatggggtgtaaaaagaactcctcatatatatatatatatatatatatatctttatatataaaattaggcaatatagctacttttcctgtagtttattttaatttttttagtatattattttaaaaaaaattattaatataataaataataactgaaaaattttatttataccccaaaaaattttaaagacaccccattttaataatattcattttacataaaatttatatctttaattgtaataggtttatttttaatttttttcttccaattcattttctaaaatactatagctatcaaataaaaacaaatatattttaaattttatgaaaaaaaaaattaaaataannnnnnatatgaaattttcttagaaaaaataaaattatatacatgatttaggaaaaaaaaacataaaaataaaatcaaaataagtannnaaattaacataaaataatgtaaggagcaaaaattaaaaaaaaaaacattaaaactaatttttaaaaactatttaagttgatttctttttggataatgatgtgtacttattattttatggggtgcaaatagaactcctctaacttaaaatatttcaatatttaagaatattaaagtggcatattattattattattattattattattattattactactactattactattattattatacccaaaattcagctaacttcagagagtgaaacgtgccaattaggtggaatgtgaaccaccagatataataacgattatatcatttaatgcaaaaagagaataactcattaaagatagaattaatagagtatattcataactcactactgtatagttttacgcgagacaagaatacacaaattattaattcatgtattgacgagacaacatcctgtctcgaaagacgtagattcaaggacaagattcaaaagaatagatgaagttatccgaataaatcacggacaatatagagtgaggcatccaccttgctatacactagagaaaattgacgagacaaatcagttgttaaacacttagcgtattttccacattataacaactaagtgtatcaacttggaaatatgcaagacatgattgtccagtctgtgaggccttatggtcaaagagcagttcttaagtttgctcagtacactggtactcatgccattgttggaaggcatatgatcaaccaagtcagtattgatcatctataggcaaagcgagataccgttgtccaaatcaacatccaccgtttgtaaagataagaatgataagcaattatacggttatcaattgttatccacacatgattaaatgaaacgtgatcaattcccacatttcattaaacggttatgtaattcaaatttaaatgtaaataactgccaacctatattcctataaatagcaacagattctacagataggggagaaaaaaatcttcaaaaaaaggattactaattatatattgtatcaaacacttagaactatctggaataagatagactcgtggagtatgcagatttaactacaaaaccacgtaaaatacctggttttattattatatttattatattttatcaattttcataagatctgtgttaaatttattacaaaaaaggctcattattggttaacaaaaatctgtgttaacagtttggtgctttcatttagagcctatgtgataaaactcagaaaaaatccctccttacaaacaaaatttttccatggctcatcataatcaaaacgataatagttgtcctgaagagactacacatcctcctgggaaagaaccaatgggttcatagaggccacccatttcaggaacaaaacattcaagaaggaaccaaggtggtaataatcaaaacccagaaggaaagaatgaagaaatcaatactaatgttggttatgtacccagaagtgaggacacttatgatcccactaggtatgtaccattagtagaattggaaaacagacaactcgggcaatgcttagtcgagtctaaccaacaaaacgctgagttggaaagagaggctacagcggccaaggcgactcaaggaaacaatgcacagaatcaacctaaccctagagtaagaagaccatgaggtagaccttggggttcaagaaccaggaggcaggaagcaaatcaagaaaatttctcaaacacccaggaggagcaacttgggggaactagggatgttctagtaaatgaacaacagaacaaccaagcacctcatcaagaagtccctcaaagaccctaaggatttacgaatcaagggaatgaaaacaatgatgtgccagagacttctcgcaaaaatgagaatataaggcaacccagaactagggaacaagaaatctctcgtaataacgagataaatcctagaaatcaacctaggacaagtgggttaccactgagacacccaccagcatccttctcaaactaatagagagaaggcatacacatacctaaatagagggcgtgtatctaaccttttctgaaggagaagcttgtgcaagacgagacaagttcgacattcaaaggggaaaagtcgatcaggaaggcaaacgcgagaaagaagcagacctcggcgttatgttgatcaagagagtatgagcaatatgaggagttatcaatctgagagttactcagatacgaggtttgtgagcaactatgaatgaagacaaccacatcttcgtggacatttgaatcaaagacaacctgattcacgcgaacacctaaatcagaatgcacctgacttacgccaacaacttaatgctaaacgacagcaagaggatccaatccaattgggaatcattgagttggaggataagttcatgagatataatgatagggaatacgggaagttacctgggtatgactcagacgaggagcccgagcctttacatcctgatattatgaactttcaattcccccagggattcaaaaaccctcacgtctcgcagtatgatgggacttcggacccagtcgctcaccttaacaacttcaataccataatgcgagccagcaacatctcgaataatctacgttttattttattccacacctcgatgacttgggcagtgagtagctagtttgataaaattcactcatcattcgataatttcctgggaacagctgtccaaggattttataaacaatttcaggcagcaagagacacgtaatttgaagcatcctccctaactagcataaagcagcaacaaggagaatcccttaaagcttacttaagtcgcttcagtactgccgctgctaaagttagaaacttgaatcacattattcaacttactgctcttcaagcagggatcacgactgacctctcagtagctgggggcaagctgtgggatgacttacaaggtcgtctagtgagaaatattaattcattcaatgaaagactgcaagtgtttgtgcggaaagtggaagcaagaaatgagatgaagttgatgaagactggctcgggaaacaaacccaacactgcaacagaaaataccatctcgacaaaggctgacaatccaagtggttcgaacaccaaaagaaaatatgacttgagagaatcatctaaaaataagaagaaagaaaaaagcacgataattatgtgcaaatttacaccgtttacactgagcttaatgaaactcgagaaaacatctttctcgcaaatgagcatagggttgcattttgtaaacttgagccaatgaggcatgtaagacacaaatgcgacccaaatagattttgtcgatttcataaagacatagggcataccactgaagagtgtcttttttagcaactaaaagacgagatagaaagcttgattgctcgtggatattttggacaatatgtgaagtgccaaggaaatgaacataaccgactagttcagcccatcaacatagataaccaaagaatgcaacctccccctattcaggtgaggatatattggttatctcgggagggccgcatctcactagagagagtagtaatgcccaaaagcgatatgtcaataatgtaaaaaataatcaatcggtgtttgctctgaaaccactaaagaaagccaaaacagaagaacctccaattgtattctcagaagaagatacaaaacatgtgaggtatccacaggtcgatcctctagtgattacagtttaagtcatcaacaagaggataaaaagagtgttggtagacaatggaagctcggtaaatatcctttacaggaatacgttgaagaaaatgggactacaaaatgcaaagttaaaaccttgcatggtacacttatgtggatttactggagatagtgtcgccagtcaaggcatcattgaactcccattaactataggcaagccgccattatctacaacattaatgcaagatttcctagttgtggatctaccatcagtttacaacatattgatgggtcgccctacattgattggactaggggcagtcagttcaatcaaacatttatccttgaaattccaaacactgtaggaagtacgtgcagtgcaaggtggccagctgttggctcgcgagtgctatcgtgtagagcttcaaaatagaagagccaaccataaactaatggtggtaataacagaagaaggcgagaagaaagaagaagatcttgaccctagaatccaagacgagaaaaacatgttaaagccaattgaagaacttgaagaagttgttttgaattcagtcaatcgcgctagatgtgtgtttattgggaaaaatctgaatgaaaaactaacaaattttttgaaggcaaacaaggatcaatttgcttggagccatttagatgtggtagggattgaccctaaagtgatttgccatcatttgaatatcgaccctaattaccctaaaaaagacagaaaagacgacccttggattctaagagacaaggggcacttaaagaagaagtggagaagttattaaccaataatttcatacgtgaggcattctaccccttgtggatatcaaatcctgttcttgtcccgaagccaaacagtccttggagaacttgtattgagtgttcagatttaaataaggcatgtccaaaagattgttttccactgccaaggatcgacctgttagtggatgcaactacagggcacaagctgatgacattcatggacgtatattctggatataacaagatcaaaaggcatgtccctaatcaagaacatacaagttttgtaaccaacatgggactttattgttacaaagtcatgcattttggtttgaagaacgttggggcaacatatcagcgactagtaaatggaatgattggaaagaaaattggaagaaacatgtaagtttatgttgagatatgttggtaaagttggtaaagtgtgaagaccataaaaaagacctcgtggagtgctttaaaatacatagagtgtacaatatgaaactcaacccaaatacgtgttcttttggagtctcatcggggaagtttctgggtttcatagttaatgcgaggggcattgaggcaaatcctagaaaatttaaggccttaatagagatgccatcgcccacgaagcaaaaagaagcccaagccttgacaggaacagtggcagtattaaacagatttatttcaaaatcaaccgataagtgtttaccattctttaatgttttacaaggcaacaaaacatttgaatggacagaagaatgcgaagaagcatttaaaggcataaagaaacatttatcaacaccattagttttggccaaactaataactggagaaactttatacctttacttggttgtctcggaaagtggaatcagtgcagccttggtgcgagaagagggaaaacaccaacaacccgtttactatgttagtaaaaggttattgggggtagaatcgaggtatccccctcttgaaaaacttgccctatgcctgattcatgcatctaaaaaactacggccctatttgttggaatttattttacnnnnnnnnnnnnnnnnnnnnnnnnnnnnnnnnnnnnnnnnnntaaatatgaacttctaaaacgacaaataaaacacataaaaagttaagaaaccttacagtgatggcagcggaataatgtgtctctttccactcagatctct

SEQ ID NO: 21702 - DNA, 8246 bp, Cannabis sativa
  modified_base (7637)..(7640): a, c, t, g, unknown or other
cagtcgatttcttgactccaaaaaacactgtgcgattggcggcaatggctggggaggttatcacggttcataactcagatgtctcaaggatggtggcgaatggctatttcagattccaggtctggatgtcaataaacaaaccagtatgtccgggatttcctctaccgtgttcgggaaagaagaagtggattgcatttaagtatgacgagttgcctttcatgtgtttcaagtgtggaagaatcggccacagtctcaaagattgtcaccaagaaccaatcatagtcactagggatgataatgtcacagcttctgcatatgggatatggttgaaagtggagaatgacactagagatggatttcaagatagaaggttgggacaaggaaatcacattacacaagggaataaggtaaatcaggaggctctgggattggcacaaggagttaaaatatccaattcctttgcttcgttagatgagactacaacaagtgtggaaaacctattaataggaattgcttccaagaccgaatcattgaaacaaaacgaagcagtaggacaaagtttaatggcgcaagttaataaagaggttccaggaggcatggaaaatgaagtggataaaaggctcggtgatgatggagggagagggaagagaagaatggtggaagaccaaggaatttcatggcaaggaaagttacaaaaaactatcaacccttcatcctcagaaactcagacacacaacctctacaacgttccaataacatactcacaagagattccaacaatggaggggccctcttcatttgtgtttggttcgattttgaagaatttatctaaggagaacagaagaaaggtttcggtcaagaaagattcaaaaactaagaaagggaagaatggcggtacagtggaggatgtttctcagaaggaagattcagcaggcactacaatcactgaagaggtgaaccctgtaattcagggtcacctacagcaatggatattcttctctggaacgtccaagggctggggaacccttggactgttcgttccttgaactccctggtgattcgttacactcctcaattggttttcattatggaatcgaagcttaacaatgttcgtgcggaagctttgcatgtcaagttgggttttggtgggtgctttgtggttgaagccaaagggaaaagcgggggtcttcctttattgtggtccgagaaagttgaaacacatgttctttctttctcccctttccatatagattctttcattagaatggaggaagggcagtggtggaggtttactggtttctatagagatccggatccaagtcaacgtactcaatcttggaagctgttgaacaggattttccgtatgtactcgaggccgtgggcagtgggtggaggattttaatgaaattctgagccaaaaagaataaatgggaggtcctcccaaaccgggttaccttattaaaaacttcagaaaggctctggacgcatgtaaacttcgggagattgcgtttgaaggtagtgattacacttggtgtaatgggaggaagaataatctcattttcgaaagacttgatcgagtttgtggcaactcgattggtttgacatgtttccctttgctcaagtgagtcacttagagagaaccaactcggaccattgcccccttcttctcacggcgagtggctcttctcctatgaccacgagtaagattagatggagaacccgatttcattttgaaagtgcatgggcagatgatgaagattgcacaaggattgtcaatttggcttggcaacacagtgacccaattatgaccactagggatctgaaagataagttagacagatgtggagcggctcttcaaaagtggaatagagtaaaacggaaggaaatgacaaaacaattgaatgaatatgcagataaaatttctaaactctcccgaagtaccgatgttatggaatggcagcaattaaatgaattggaacacaaacaaaatatccttcttgacaaggaagagaagttctggaaacagagaagtagagttctttggctgaaagagggggataaaaacacaaaatttttccatcggaaagcgagcaatagaaaggctaagaataccattaaagggctgattgataataagttgaattgggtgacagggaataagcaaatggggcaggtggcttgtgactacttcatgaacttgttcacttcgaattcgaccaccccggaagagctagaagagtttcaacggattgtcccaaaccgtatctctagagccacgaatgaatatctgttagaacccttcaaagtggaggaaatttataatgcaatgcgtgccatacatccccaaaaagctcctggaagtgacggactgcctgggttattttatagaaaatgctggccgactattggtcatgaggtgtcaaaagtttgcttgggaattatcaatgatgatatgaaggtggaggaaatcaatgatacccttatttgcttaatccctaaggtccctaaaccgaagtgtatggtagaatatagacccataagtctatgcaatgttgtttataaaatagtggcaaaatgccttgcgggaaggatgaaaactagcctccatgaagccatctcggaggaacaaagtgcttttgtggggggtagactaatccaagacaatgcgataataggatttgaaagcctccactgcttgaagacaaaacgattcgaaaatggctctcaagcttgatatgtcaaaggcctacgatagagtggagtggagtttcttgattacaatgatgagaggccttggttatgaggagaagtggattgagaagataatgaaatgtgacaagtgtgtccttttcagttctaattaatggggagaaaattggaagattccaacctacccgaggtcttagacaaggtgactcgttatccccatatctttttttgatttgttcagagggtctttcctgccttatacatgaagccgagagggctggaaggatcaatggagttcaatttgggagaaatagagtcaaggtctcacacttattttttgccgatgatagctttgtgttcctagaagcaagggagaatgaatgtgacaatatgaaactaatgttgcaacgatatgccaggctgtcgggtcaacaaattaacctagaaaaatcgaaggtgtgtatgggaaagagaatttccactactcagggccatgctcttgctgctagacttggggtgcgtcttgtttctcatcatgctaaatatctggggctacctagtttcgtgagaagaaggaaaaaagaggtgtttgagattattaaagataaagtgtggaataaactaaaggggtggaaggcctcgatgttctcccaagcgggtcgggaaattctaatcaaagtcgtggtccaagcaatcccaagctatgccatgagctgcttccgtcttcccaaaaaacttattaaaaacctccataccatggcaaccaacttctggtggggcgatacaaaagacaataagaaacttcattggagctcgtgggatcagctttgtaagccaaaggaggacggagggctaggcttccgtagtgtaaccgaatttaaccaagcacttttggccaaacaagggtggcgtctcattcataatccccactccttgttggcccgggtcttgaaaaatagctatttcccacttcatctttcatggaagctaggtgtccaccgggggcttcttgggtttggaaaggaattatttgggaccgtaagattctcagcgaaggggcaaggtggtgtgttgggaatggaaggaaaattagagtttgggaagacaaatagttacctcagccttctggagcgattctcactcacaagcctagaatgaaactgaacactaagcttcatacattcataacagaggaggggacttggaaaatggaggaagttgaccaacattttcataaggaggacatcccatggatccgaggtattccgatagacttgtatactgaggacatattgacttggccttacacttctaatgggaattacattgttaaaagtgggtatagagttgggagggaaatgaatcttcatcccacgagatgctcaaatatgggagaaattaataaatggtggaaaatgctttggatttgcatctgcctccgaggatgaagctatttaggtggcgggtctgccacaattggctgccagcaaaaactaacttgtgtcatcgaggtatgaatattagccctgtttgtgatctttgtggaagtcatgctgaaacccttcctcatgcattgtggaattgtgataaagtaaaagctgtgtggaaacttcttccttggtacaaacattgtgggaagttgggtgatgggtcaatgtttaatcttttgacagctttaagggagaagctctcaaggagtgagtttgaagactctcttaagatcatgtgggctatatgggagaatcgcaacagaaaatggaataagctccctgttatgaatggggctcaggtgttagatttggtgttcatagcttatccgaattcaaatagcaacccaagtgatgatgtaaagaatagggtggcttccccatctaacccgacgcattggcaggctcctcattggggaagaatttgcgcaaactgtgatgctgcgatgaatcctaatcaaattggagtgggtataggctttttatggcctgactggaacgggaaagtgcttactgctgggattgtttacatccccagtagctgtttggtgcttgtggctgaggcttgggccattctggaagctataaagggacgaccgagtacagataccagacccttcgagatccagtcggattgtaaagctgtggtggaagcgatcaagaaccaggacaaccaactgagtgttgctggaacacttcttcatcaaataaagtctcggttggaggattctaatgaagctaatatcagttttgtaaatagaaatcataacgaatgtgctaatatgttagctaggaaatgcctagctactaaaacctcacaattttttgctcattctatccctgaatggttggccaagctttgtaaggctgactgttctaatattgtgtagttctggttcttcttaataaaattcatctttaaaaaaaaaaaaaaaaacagttaccctataatttttcataaaccaagaattctgttatatagccatattttatatagaatagatatgagtgactaggtatccaaactatgatagtagtctcactacataaaatttttttcttctaatttatggtaataaattacttatatttgcaataatatggataaataattaactgtattttcaattaactagttacccatttcaaggtaattttcagagtaacaagttaccatatgatggtaagttactttcataataaaatggattcaacttttataaatatatataatttataaataatatatgaaaatgtgaaaggtaacatgtttaatatttcaatagaaaactaaaacaagaaataactctatgacaagaataatacaaggacaaaataatagttaaataatgttacaattctattataataatatacataaaatagagaatatagaaatgaagagaatattacaacaccaagttataaacaacatgtaaaccacaagatagtaaataacacacagatataaaatagagatgtgagagcaatctcaacatcacatacactacaagtgtataatagaagaattactaaaacttgaacaagatattataccaatgtccaaaagcttatttttccctaccatacaaacacttgtagaagaagaaaggtagaaataactttttagattatcaagcctatagagtttctagcaaggtactttcttgatagaaacaagttatatcacaaagtgaacccacaactctcttttatgtggtaggagtcacattttgaaatcacacacccaaatggttgttaccaatcggtttatgacactaaatgatattcaagaagttggtgatgaattcatgaaacacccccattaaaatactattacaaccctaagtttagcttgtagaaagcttgatatcaatttcaaaactataaccttaagcttatgttcaatcgatattttagtagcactgtaagaaggatattcaattcctaaaaaattgaggataatcaccgtttcttgatagaatatatggaacatgttcatcagcatcactaattttcttgaaagaaaataaagaacatcataagctaatgatcataattcatctagtccaattatgtatgattatagtaatttcttaatgaaaaagttaaagaggaaattcaaagaacaattttgattaaaattccccattgtttcggtatagtaaatactagtctaagctgtcatcgattggggatgagtcaactagattttgtatttacaaaatacttatcttacgagatctaacactattatgttgtataacggatgacaatctattagggattgtcccattaaaaataacaagctaagttagaccaacaatgaataataagaattggtattacataatcaataacagaaaacaatgttatgttcaatataaattctaatcacatatattcagaaaattgtaaacacataatcaaatatggaagatatgggaaaaatactaaaaacaagcatacctgaaatttttcaaggtttttaaaatgatatacagtgtcacgtattgggcaggatgcaaagatatcaccagttaaacagagtagtgagctcttttaaaatagacactattttagcaaccttttattcgatcaaaataagaatttaacgttgttcagtattgaactggatgcaagattattcttattttatgagctaccattattgtttaaatatttataaactagattctaagtagtcactatttgggtgaacgttactaagaatataaaatttacaaaaatatttatctttcgagatcctacggtgttaaattatttaatagtgacatctattgggaatgaatcccattaaaacaataatcatttagaaccaataatagagatcggatatcttacataaattatagctcattatttgaacaaaaaagtagtattttattcaaatatttattttgacaatttattttaatataattattaaaattactaacttaggaataaaataattataaaattaattttatatccaaagtataaactttaatttatattaatgaaaattattaacttaagtaattctgaaaataaatagtatataatattcaataaaattaacactttagtatcttgaaaattaattatcaaaattaactttcaatactttaagtactaatttgtatcaaaataaatgtatgaaaaattactaacttatgtacttctaaaattaattaagaattaatttacaacttaagtattatttttctatctatttatttttatatattagtatattaatttaattaaaattactaatttagataaatctaaatataaattttaatttgatatttataaaattacaacttaggtagatttgaaaataaatcaaatttatttttcatccttagtattaatttttaataaatattatgaaactttcttaatttgtgttggtccaaaattaattaaaannnnttttcaacttaaatttaattttttataaatatattaatcaatttggaaaaattcaatatatttaaaaaatatatatattttatataatatttcaaaatttcttagtcaaaattaaataaaataaaattctgaaaattatttattttaatctaaaattaattaagaagttaatttttcaacataatataatttctcatttaattacgtgttataaaaattatccaatatttaagtatcttcaattaaatcagtttaaatattaagaaaaaatagaaagtagtttacttagaaattaattatctagattttatttcataaattaagtgttggttttctaactataatatattttaatctatttatttagttaattattaatgaaaattaattaatttaagttgatttaaaattaattaagaatttaattttcaactttatttaatttttcgaactttaaatttcgaaattctaatatttttttaaaaaaatgtttttcaaaaaaaataattattaatataaaataaactaatttttttttaacaagaaaaatgatctttattcaaaacaagcaaggaagcaagtacaaactcaaaaaaaaaaaaaaaa

SEQ ID NO: 21703 - DNA, 1915 bp, Cannabis sativa
agaagacatcaaaatgttgttttctgttttcaaaaacaatttttttgtctaacatattatattttatatttttgctcacatactcggactcggaccccaaccccggattctggacccgacctaaacccagaatcggacccgaatcttaaccccagactccagacccctacccgacctggacccggacctagactcggacctgaattcagactccgaactcggggctaggttcgaggtcttgtctggggtccgggtatgaggtcctgtgctgggtccgggtcggggtctggggtccggagtaggatgagttcatgatatggtatggtgtagaatattaaatttttttttaataaaaaaaaatctaaaaatagttttaaaaaatttgagtcaaacactattaaatttttaaaatgacaaaaaaccgatttctattcttattttttaaaacacaattttgaaaactgaaacgtaaaaatatagtcaaacagcctcttacaatctaaacgaagacactatactatatcgtgaacaaaactcaaaatgggacttccaaaattaaaccctagaggatactaaaccttagaaaaaaaaaatacctaagtttgttataaaatactaatttcgaaacactgagagcgtcttgataccatgttatgtgaagtgaaacaaattgtattctcttaatttttattaaaaattacatatatttaattttggctcatgcatatatctcatgtattctattatggttggaaattttgcaaccaacacaggtatgcagagtttgtggtctactaggatactacaatcacaaacttaaacaaggaatttgttcgtcatgcaaaaatggagacaatatatcaaccatgaaattgccttatgcatgcaagctcttgcttcaggtaaccacccatttctcttgaatgaggaaaagtatattatcatcactagtaattgagttcattacaacactttgctttccattttaaagtggttcaatagtgatgaaaatatgacatttagctacgtatcgtaaaatgaataacttgcatagttttcttttgtcactttgacacttggataaaactaaaagttttgtttaaagagaaaaggaacaggttgtttgtttattatgtatttattttaatcctttgaatttgctttcaggaacttcaatctatgaacattgttcctcgcttaaaactagcggaggcatgatctcacaactgtttccatcaacgagctcacaaacacagaaggatagttcatctccaatattaggttatcttataaattattgaagaaagttgtatcaagttcttattcccttcaaaagcgtatttttgttaattatctgatgaggccaaaaacaattgttttatgtacagtgaaatcagttttgataaacaattttacacaaaaacagtaaaatatatttataaaaatagacaaaaaacagagagttgaaattaggctatgttatgaaatattatttatggatgaccaaatcactaaattaattatcattattaatgctcggtagtattttttttattattatattaatttagtttctcatttttttagtcatattctttttttgtataattaagggttcaccctattggaataaacaattgagaaattctcattcagtttctctttctctcttcatcttcttcttcttttcttcatatctactttatataattctatattattttataacacgttatcaacacgagtctctgcccaagcttcaaggtaaatattttgttgaagttcttaagttgtttcaagatcacgatacactaaatatatatttatatataatatttatatatctacttatttgattgaaataattttaagaattattttttttcttttttatctatatatctatatattatat

SEQ ID NO: 21704 - DNA, 1243 bp, Cannabis sativa
gaatataatagaacatataaatttttaatcatgtaattaacatcatacaattcaaattaaataatatacattttgacatatatgatcttacatgaagatgaagacatagtattgctacatatggtggggctttatagtgcttatcgatacaccaatagcatagatggtataccatttacaattgacagtattcactgccgataacaaaataataaatttaaattgagtcgaaaggaaaaatcaataaacattaatataaatacatatatatttacctttgcacatatataagtaaagccaaaattggaagtactaatcataaaatcaaacaccaaagcattaatattcaaatccatataatcacaaaagtggataataaacactcaagaaatacatacaatcagatatctaattatatttttaaaagtactctaatataaaaaaatcataaatcatattttatagaacctttgctatatcaaaaaagaaaaaaatgataataaaatgagcgaaagcactacataaaactattgttggagattgtacaaaaagttatgatatttcaaaaatacaccatttctctaaatttctatacagttggggaaggaaagaatatagttgccctagtatttcttgggactgctacttatttatatgcttattataaaataagtttttagtatttataatttaatcccttaataaattataaattaacttataatatttaataggttttgatacctataacttagttacataaatttgtatcataatttataattgcatatctattatagatatgtacacccacaagattttaagatttaaatcgaataaaaaagttaaccataattgcaccatgatgaaaattaacgacaccgcatgcaaataatgcgggtttcaggttaattgaatattctgctcagctctacatttggcacctttaattgacaattttttattgagcagtggtttgtgtttttctaatgaatgaatttgtaattaaaattaaatataaaacaaaataaataatgaaagtttagagcacaacaataaaattgaaagacgttacgatttgtatattgatatataaatataaggtattaatatagtattattaaatataaatataatcaaaaatataaattttcctataaaatactctgttctaaatttgttgtagtttaaaaaaaaagtatgctatataagagcatattcaatcaagatgtaaataagtgat

SEQ ID NO: 21705 - DNA, 3110 bp, Cannabis sativa
aaaagaccattttatgcttcgtgatactcaatccatcctaaaccaccttatgacccacatcaagagattgctaaaaaaaataagtcatggccacttttaaagctatacctaggtcaaaaagtgtggcaaatcaatcttggccctaaaaacatccttgacatcaactaatctcttttaataccagctacattcagttggtggctagtattccaatccattactgtccatcaagtaaacgctattaatccctttaataaacaatgaatcctttttggtggcaatttcctacacatacttcccgattgcagccacatttcaatcaaggaccttccaaaagcctaaacctcatgtattctttggcaaacaagcatttttcctagccactaaacctggtcagtagtgtcggctgggcctttccaaagacaagccctaaaattggcttgtacatcctttaacaaattctttgggatgatcattatttgagcccaatacgagtgtatagttaaaaaaaacagagttgataagtgtaactcttcccatgtaataagataagtttctcaaacacaacactcggatttaaccaacaattttctcaaggatgccattacattcactagctgatattttctttgaacaaatgggaatgctaaggtacctgaaaggatgataggctcttgtgtatcttgagagatcaagcattcagttgacttcaaattcatgcattccactactataaatctctaatttttcttcttttggcagtagcccagaagttgaagaaaatgactttaaacccttcaacattagcaaaattgagacaaaatcaccatgggaaaataaaaggaaatcattcgcaaaacacatgtgattcaattttaaagtaggcatctatatggaatttaaaaccttatcaagaacccacttccttcagtattctatacatgtattccatgcctagaacaaacaatagaagagacatcaaatctccttgtctcaaatccttttaatttcaccattaattaataaggagaatttgggggttttgatacatgccataataagatcaatgaattttcaaggaaaatgaaaattaacaaacatttcttcaatgaatcctcattcaatggtgccatatgctttcctcaagtcagttttaatcatgcagctaaacttgcaattcttcctttcatagtgcctaatgaggtcttgaaaaaccataatattgtgagctatatatcgcccattaaaaaattgaccttggttctccgtgacaattttagggatgaaattccttagtcttgaacaaatgactttagtagcagccttatagatcactttacaataagaaattggtgagaagtctttaacactatctggacatttgattttagggatgagtgtaatgtttgttttattgatttctttaagaatcttcctcgtgcttaggaaattattcatagcctttttgacatcttctaccaccagctctgaattatcatgatagaatgaacgcccaaacccatttggaccaggagccttcataccaggtttggaaaaaatggcatctttcacttcttgtaaagtgaatagctactgtagaacttgaatgtgctccgatgaaagtacaggaccaacacgcacaaccgattggaacaccttatgtctattgctcattgaagtcccaaacaagttctgatagtaatcaaagaaagcttgttgaatctcctctgcattatcaaggcaaatatcactctcatccctgatagagttaaatatgtttgagttctcctggatttcaaagaagcatgaaaatggaagtattctcatcgtcatgttttacccaattcatttttaccttttgagctaataacaaattgtgagctttatggtaatgagaatacttatctcgtgccatttgttctcgttctatcaagtctctattcttaggatctctatccaactcttcctagatagctaacataacttgtttagcttgcatattagccttgtgaatctcattaaactcatccatggttatagtttggagcactttctcaagcctttacaaacaccccaccaattgatacataggagaacctacagtaggggccatccaacttatcctaatctcttcttgataatttcttgttcttgcccacatgcttaagtatctaatggctcccttcaggagcttgaatctttatagaaaggaaatgaggataggactatgatcaaagtcccctttcagaagaaaaagttcttctaaattcaagaaagaaactatccattttgagctcaccaatgcacacgatcaatgttagagaaaactctctcattaggctgctacttgttattccaagtaaagaatcatcctgaatatttcaattcatctatttgacaatggatcacacattccttaaacctattagatggcttcttgtggttccttctatcagctctttcatcataattcaaaatctcattaaagtcacctactatcatccatggttcttcatttccattcttaaggcctttcaaatctttccaaagcatatctctttccacttcctcattaaagtcatgcatacacaaaagtaatatggaactttactgacttctaattttttaagcaatacaatgaatgaattgacttgtacacattcttatatatagaatacatacaaggatttaaagccataattattctccatttatctaaccaagggttattattagtgaaataccaacaaggaaataactttaaataaagctcacccatattcttattctttattttggttttgagcaaactaaccaaatcaacattctttgagtgtattaattgcctaatgtctcaatgcttgtgctggctgttaaaccccgcaaacattctaaactagaattctatccatttgacgtagaaggatctcccccatatctagtcttaactatctcttaatcatttaagcttaatttgttcctagaatagcaaattgattatttatttttgttccaaccacatcttgttgttgtactttcttccctttttccaccacctgaaatccatcttcatccagcactggttccatggacctcacttctgcttcttc

SEQ ID NO: 21706 - DNA, 5812 bp, Cannabis sativa
  modified_base (5116)..(5117): a, c, t, g, unknown or other
taatatatagcatgtatatattatatatattatatatgttgagtatgtgatacatgatatatatttgtgataagaatatttatttatgaaatgcatatataatctatatatcataaaatgcatataataaatatatatatatatcatgtggagatgatatatagattatgatatattgatatgtatattaaagtgcatatgttatatatatatgaacatttcttatagtaacaactaatgtttataaatatttttttattttttatttatgaaaaaataaataaaattgaatcacaagtaatttattaattatttatttaattttaaattaatcacattcctttaataatgatcactaaaaataaatataactatcgtagttatatgaatgatgtaaccattcgtacccgtctaaatatatattatacattatatatatatatatatatatatttacgaacctgtcctaatagatagggaatggaattgttttcccatatatggttatacatgtctagttaaacaaattgtcactcattacatcacatgtatatatttcatgataatctgatttgggccaatgttcatctagatgcatgggaatttagtagggtttaaggaaattgcttagaaattgcgtagtctttagctatgccaacgcataaatttgatcttcaatgacaatgtcaatgactattaaaaatcgatataattatgaaaaatgtaattatcaaataataaaaaagggttgactttttaccgctctatgatgtccacctaaaatgtttgaatagtatctagttttagtgagaaaacaagttgttcatccgtacatgagcttaaaaatgaaatgatgtatagttataaaccaaaatatggtaatattcttagtattctgacgacacaaacataaaactccatgactcgatccatcttcaagaaaataacaagttttattaaatattttatttcagtaatttttaaatgattttttttttcaacattatgaacttattccttatattgatttcaaatataaatggttgccctctagaaaattacatggttatgaattcttctgtcttctattccaacatgaaaatgattcctatgtaataataatttctctctctccctcttcttctttctttctctctctctttttttctgaaaaagaataatttaaggttggacaaagaaaaaaaataaccgtccacactgcataaaatatgtgatttgaaacgttcgtagtggagttgtaatttaaatttttgtcaaaccacacggtatgatttgtgattagtggttttgcattaataattactattcaaaccgtaccatactaattatttattttttattagaaaattcatttagatattaaaaaattatattaaatgttcaatttgtaaaaactaagagcttatttggttgtgtttttcagttttcagtttttataattgtgtttttaaaagtgagaataaaaaacagttttttgtcattttaaaaatttaatggtgttttgcacaaaatttttaaaaactatttttaaattttttcttacgaaaaaaaaattaatattttagcaccataccatgacattaacccatctgggtctaggttcgggtatggtttcgggtctaggatccgagtatgttagcaaaatataaaatataatatgttagacaaaaaaaattatttttgaaaattgaaaacaaaattttgatgttttctgttttctaattttttaaaactcgatttttaaaaagcagtttttaaaattttttgccaaacgactcttaaattttacgggaacaaacttgagtatattttgtttttatcaaaaaatgtagatttgtttaagtaaacataatattttttttagtttcatttataaccttttctaaaaataattttatacttttattgaatttttaattatttttctttatttgttaagatatgagtttaaaaatatagataagtttgattttttcttcaaaaaatcttagtttatttaaattatttattacattctcaataattttggtttgattttttaagatacgtgttgataaataaaataaagtttgaaaatatttatttttaggtaaaattaatatttttttaataaatttaatatttttatctgattctttaaaaaaatctactgttttttttttttcaattaatagaatattataaatgctttttaaaaaaatagaatattataatttttaaaattagttttttttttttaataaaagggggctaaattttgtattagttaaagttaaaggagtaaaaatgttaatttttaacggagaaattttaacaaaccgtatattttaagggacaaaatcaaatatatgtatacataacttatattttaagggacataattatacaaaatcaagtagtgccgaaaatttaagagacgaaaatactaattatttataattatttcacgtctttaaagatttacgtatatttatacatataataattgatatattcagtaagatttgaaattttgaacattaatttttattttatgtgctaaaaattgtgagtgtattcatttgaactttattatatttttattagatgtgttgttaaaacttcaataagatattatatttttattgtgttgtgatgaaaattttgtattattatttgtttatttagtgataatgtaaacatcccacaccacaccacctttttgcgtttgatttctacagttttgaggttttatggtgtggttacgattcgagaaattataaaaattgcatgtcaagattggtttgagaaaatagtcataacctatatttttcgcacagcaaacacccctaatgttgatgttgataaatgatttttgtaaactatgttatgtctagaaaatcaaagtttaaggtggagtgaaattatgtatgaatggactaaaatatgttaagtgagttggagaaagttaatggagaagaagaattacgaatttctattactctcaaaatgccttggttataaaaattttccaacctagctccttcacattttgaaaaatggggtacttataggtgagtgctattggctctgatttacaagatgatgccctagtggtcccaagacgataggaaagatgccgtattcttacaagtgataggttgaaaaaggtggtcttgtgcaaagtagtggttgtcgggtgtcagatggtcccaaagtgtagggatagttgttgcagtgtacctcttgtcaggacgtcaaggcgtgtaagtgaggcgcctccactactcgttctctcttgcagtcaagccttgtaagtggtgtggtcataccttgataaatacttgatcacatgcatgccttgtccttttattcctcgtctaatggtttctttcccaatacttaggaaaattttactaagcgttggcttggaccgagatgctctttaggtaaggggtcaagatggtcttaataaataaaataattaataaacttaaagaacataatgaaagaaaaaccaattattcccaagatcattatattaacgatttcaatctcaattgtttgattttaattgtctctcattttttagtgggtgtctctatcaatggaaacaaattagttttttttggcttctttatatttaattggttgataatttttttttgatcttcattataattttggtcatatatattcaataaaaactatatatacctggtagaacatccctaaatgaaattttgggaactaattaagaccccaagacaatataactacaggcagacaacattgctaaatgaaagaagtagcaattttaaacccatcaatgcagcaatagcaatttttaagtttgtatttttaatgtatttctagttcttgttggttcttagaacagtttttttgatagatgtcaaattgttgtcttttgaattattatttaattggatgaattggtgtttcttttgaatagtcacaattactaattaacaatgtcaattttaaactgttaaaataaacagaaaatatctacaacaaagatctgttaaacacaacaaattccatccattaggcatttattatatattatattttttgagttacattgtattttgtgtattttagatacaagaccaaatatagcattagttaacatttttagtgccaatgttgatcaatttacacctttacattattgcacccaaatatcatgcatgctcaaatcataagcttctcgacatcaaagtcaactagagttcttaagtcacatcatgatgcccttttttactactttaataatgcaaattatgtaactatacatatgtattattgctaatataattacatttgttttcgttttatcctgccacaaacaaagccaggacagctcacgagttgcaaggaaataacaaggcaacacaataatttgtttaagttgccagcataaataattaaatttaatttttatttaaaaataaatacataaatttaatttttaacagtaataatatttaatttatattttcaaacttaatttatattattctagacttagtcaataaccatctcacagaatttaaggagtatgattgacgaggttttcatttgggattgagccttacgaacccagtggcaaaccaagctactcgatagatgccatcctttgccctaacgacagatgcttcggtgattctggggaggggctttgttggtttggggggagtgatacgggatgcattgggtgtgatttgggtggcgcactggtcatcattaggtgtgttaggtgatttctctgctaatgtggctgatctacttgccattcggctgggcttgactcttgtgcatcaacatggttttaatatctctagtgttaatagtgattctattgtagtaattggttggattaataagctcactacaagaaatgtaacatttgctagcatatttttgtactggcaaaagttggtattgcactggtgaaatagaatttacttgtgatgtgttggcaaaagggagttggcaaatcaatgttggtattagaacttttgtcagcataaaatgaaaagcgctggcaaaaataacttttcccaacgcgtaaatgcgctggtaaaagttnnattttagccactgcaaatgtatgctggtaaactttgacctctttacagtgaaatgtgctggtaaagatgacatttcttgtagtggctttacattaattttagtttgcagtctattttattagatgtctattctttattagctgttattgttggtggatcttgcagtgccattctgcgattagcgaatggtgttgctcatacactgacaacctctattattaatttaggagattgtatttggacagatgtttgtcctcgatttttgagttcttctgtaacagtggacttttattaatgaattttgcatttatttcaaaaaaataaaataaaacttttttaggtacttgggcatatagaatcaagtcaatgacaatgtgatagtttatgattgattcaagttattaaatttttattttttttatttaaaaattaattttagtataccaataaaaaataagacgtggataatgtctggatacttaagagttaggtatctataaaaattctaactgaaagttaaatttaaatatttatctcttatttgttttacttctaaaaacttgtttaacatatttatttactttatatttttagaccaaagtgctatactaattagtgcaaattaaacaattttttcaacataacaacttataaaagctaaaacagacatgaataataagttgcatcaaataggg

SEQ ID NO: 21707 - DNA, 2136 bp, Cannabis sativa
  modified_base (149)..(150): a, c, t, g, unknown or other
atatatatttgaatttaatttttacttacaaataaatatttgagtaattttgtgaggtaataattcttaagttatttttttttggaataagtatttttccattaaatatcaaatcattattcatttgtcatttttttattagtatattnnaattaattttttaaaaaaaataaaaattaaatagtttggactaatcagaaattatcacgtggtaatttacttaacaattaacatttatataccttagtctcaaaaatataacttaggttttattaccataaaaaattaaacttaatatttatttacagctgttagttaaacttaagtatttatatcgtatttattttaattttaataattaaaaaacatatgggagaaagttgtaggattatttccgttgatgtagacctaggataaaaagtagacatatattttttttatgacaattaagccccatagtgaaaaaaaatctaggtatgccactatttttaatatattttttttttatgattgtgtacattgtaattacttacgatcctataaattttaaaaatagtttaagagtatcgaaaataaagttcaaacagttgtttaccatgcatacaagaaaatacagtgacgagtgcaacaaacaatattcaagattaatatccaagtatcatgtctatatttaatactcgaaatatggacgtaagaggttgttagataattaggtttaattatcaacatacatgatactaaataaaatcatcgtaaaataaattccaacatatatatacacaacaatataaaaagtaagcaaatttataaaagaaaatcaacaaaaatgaaagagatggtcatcacctcatctcatttcaacccatctcatccccactatatcatctgaacctctaaaatgaatcctcatttaaatttatctcgtggccctgtgaccacgtcactattgaccacatatcattattatagtttttaatagtaagaactcgtcaacaatattactagccgaagcgttgaggaatcctcaagcatgtgaccccctattttttgtgtcttcgagatccttattatcttcaaaatctcgtcagattacagagaatttctatgtgaattcttaccttagcaaccctatacaacaaatataaataaataaatataatcaaccgttgggattgggtggagaagtagttggttgctatgctctgttgggcaatttggcaggataaaaataacaaagtatggaatagaaaaaccaaatcagtcaaaaatgttattgctcttgcaaaatgtgatcttgaacaatggcttattgctcaagaaaaaactttcaatccctcttcatattcgatttagagtggtgaaggggatgagcaatattggtgtggtctagaggtagataattacaagatcaatgtggatgcagcaatattttgtggataataacagatttggttatggttgggtgctctgtattgctagaggttacgtcttgaaggcatgaactaggtcttggagtggttgttgtgaccctacccttgccgaagctcttggagtgacggaagctctcagttggataaatgcgtcaaaggtttcaaaagtcaccgtcgaaacaaatagtctcataacgtgcaagcttttcgaagctcggtgactactacctctccctttggttgctgcattgaggaatgcaagagaattttttctgatttgaacaatgtttgcttacgttttgttaaacgttttgctaatcgtgtgattcatgggcttgcccgagcttcatggttatatgctgagcatagttattcggttgactctattccaagtcacattattgatgtcattgtgcaagattcgtcataaataaagttttagattttattaaaaatatacatagaattataatatgtatattaggtaggaatcctatgaattcaatgtatagctacaattaatacataacatataagccaattatgcaatatacaacaaatagaaattatttagagccaagatatagaaataaactaaggtgaggaaagaatcattatctgttgaagcgaaaatggagtatcgatgaccaaaaacatgaggagaagacaatgaggtttaggcttttcattgataaaagtgaaatat

SEQ ID NO: 21708 - DNA, 2731 bp, Cannabis sativa
ttcataaacttcacataacttggcatttgttcaagtgcatcggcaaaaggtatgttaatgtgaagcttttaaaaaatatcaagaaacttcgaaagctgattatcaagtttcttcttttgaagtcgctgaggacatggaatcttgatgtggtggtcataattagttggcgactgctttttctcatggttcttagtaaccttgtcttcctctagaccatcattctcgatcttgatttttggtgcaagaataggcttttttactggttcttctaactctttaccactcttaagagtaattgcactacaattttatttaggatttatctctgtattacttggaaaatttccttgaggtcagttatgcagtatattagccagtttcccacttgtatttcaagatttttgatagatgctctagtctcagtcatgaactgagtttgtatattggtgagagtaagaatagcagcttgtatatcaattgctgaagcatgtagattttgaggattttattgttgagaagtagaagcttggttctgaaattgaggttgctacccttgattatttgcccatccattatttaataagttgaagaagggtttgttgaattgcctctgaaaattggctatggcttgcacttgagcaggagtcatcacatcttcagttgattcacacttgtcaaaagtgtgtggtcctccacaaatctcacagccagtttgtacaactttggcagcttcagttgtcttttgtaatttcttagtgagagtagctacctgagctgtcaaagcagtaatagcatccagttcatgaataccagctttcttcttccagttgctctttcatcaaaccaccggtggttgttcattgccatgtcttcaagtaattcataagctccagttgcacttttactcatgaatgtaccttcagatgcaacatcattgatggtcctagtagtaggacataaaccagtataaaagttttgaaccaccatccactgctccataccatggtgagggcactttcttagaagatctttaaaccgctcccaagcatcatacaaagactcaccatcaatctgacaaaagttatttatttatccccttagtttagaagctttagaaggagggaagaatttagataagaacttttgagtcagatcttgccaagtgacaattgtttaattgtagagaattcagccagctttttgctctttcctttagagagaatggaaaaagcctcagtttaataacatcatcactcactccattgtatttgaaagtgccacaaagtttcagaaaattagccaagtgagtgtgaggatcttcaaaaggtaatccactaaattggaggggggactgaaccatttgtaaaatagctaacttgatctcaaagttgttagcctacactgctggtggttttatacaattttgtacccctgttagagtagagagtacatagtctcctaggctcctttcatcattagggtgagcctgacctccttgcataactctaagaattagatcattcccttcattatgccccatcttctctaatttttttgcttctctcttgttctttctgttttgcttgcaagatttttcaatatcgggattcaaaggaacaaggctctctgcacctcttctactgcacatataatagattcacctgagacagacaaaacatctcaaccaaacaagttagaaacaagagaaaacaaaaattaaattagaataaaaatgaattaaattgatattgataattttaatccccggcaacggtgccaaaaacttgttcggtaaattagatatgcaagtatacgcaatcaaaacaagtaatataatgataagtacagtattgttcccacgtggattgattatcaagtgccaattaattaattctttagttttatttgatgaataatagtttttggataaaaggtaaataacataacaataatgaaattttagaaaattaataataataaaaataaggattattatgattcccaactatcttttactttacttcataatgtaattacttaatttctttttttctactcaattgataagttgagcaccctccatatctgttacatttaaagttcttaaacataattgttcaaaattcatagctgagtaatagtggttgcgatatcatttggtagaaatttgcgacagatagaacacgcagcatgatgacatgacaatcatgagattttaaacctaagaacatttgactcatctgtagaaacttttcgcttaaaatttaaacagaatccatcgagaaacttgatttctttaacaaattgacaaaatagttgtcttttttcacgagtcaaaacataaagagcatgtagttttgttcggtaaatttgatacgcaagtatatgcaatcaaaacaagtaatataatgataagtaaagtatcgttcccacgaggattgattaccaagtaccaattaattaattctttagttctatttgatgaataataatttttggatagaaggtaaataagataaaaaataataaaattttagaaaaataacaataataaaaataaagattgttatgatcctcaactatcttttattttacttcataatgtaattacctaatttcttttcttcctattcaattgataagttgagttaagaaatttattgtctggttaagacttataaactcaatctatgtgaaaacttcctatatttttatggtaagtttaatcaca

SEQ ID NO: 21709 - DNA, 1718 bp, Cannabis sativa
aagttaatactaataaatatttaaaatttataagataggcatgatgtaaagttaatttaaacaaatttatttaaattatatattatttctttaattatatctaaaaagttatcctctatatgaatagttttatagtgttagtttaattaaataatttacttacataatatttaaaatgtataaataaacttaattgacaaataaaaagtaaatcactacaagataattaactttttattatgataaagctaaaaataaagtaaagatattgatatctgtttttcataatatagtatatcataaaataaaattgaattttctctttatactactaaagcattttgtcttcaatatgatttgggctatcaaaagataactttacatttgtatcttgtctttaaacataatatgtaaatttatgttaaaataaataaataaatttttattaacattgggaggaagaaattcgaacttgggacttttttttttaagaaaaaaatagaactactaaactatatctataaccacaaataaataataaataaataaactcatttttttgtagctatatctacctcattctaaaaaaaagtttaaaatttgtagttagttttttcttttggggtggggacaagaaataagttatacttattacttaaaagttaaaagtatcacaattggacatatttagtgagataatgtgtttgtttgatacaaatatgtaatggtagagattagagaagtgtcaatcataaccttcaattataatgttttagttaatttttatattcaaaatcacacgtcgaagtaattttttttatttttttacagtgatattcttcataattataatatcaattatgtaaatttttgaaaaattctaaataatttaccgtactaaaaacagagttcttaatatttcagtctaccacgcatgcgtgttcaaaaaactaattattcaaaaaatttcaaaaattaatagagatgatattgtaaatataacaaatattattgtgaaaaaaatattctaacatatgctttcgggcataaaaattagctaagaggctgtaataagaggttgacggtaacactcttctacaatagtattgttgtgatatttttttcttaagtagtttgattaattttagttccaattatgctaatttttgtttttatttttatttttatttttccattttatgtttatgaatcgttacactttgttaacttttgaaatatacaatttttttcctatgcacaaagcaaggaaaatgaaattatttatatgtatgacatgaatatttataatactccactcacctattttttaattataaaataagagatgacccatgcaagacaaaaaaataaaaatgaatagcttatctattactttattttggtcacatctatcacatttataaaacaaataataattttttcttttatgaaaaaaaaaggtgaaatggtaaaggatagttaaccaccacaaaaatgttatatattgttatcaaatttattaaataatataaaaatatactaattaattataaatcttcatattaaagtggtttaaagtggtattagacactttaatttactaaataataatgataaaatgaaaaaaaaaatcgatagaaaaaaataaataattacataaggcataatttttataaaaaaaaattatatgtttacgtttaaatattttttttttatat

SEQ ID NO: 21710 - DNA, 7673 bp, Cannabis sativa
cgaacccagacccagacccaaaccgagcctcgaacacggtccgagtctgggtctttgtctggagtctggggtctaggtctatgtttaggttcggggttcgagtttgagtctaggtcagtgttcgacttcgggtcttggtttggggtcttggttcgagtttgggtccgagtttgggttcgaggtttgggttcggggtctggggttctcgtccgggtttgggtccagggttcgaggtatgggtgtggtccagggttcaagtccggagttcgggtccgaggtctggggtaatcttccacagctgacttcccttgagaaccgacaaaggaagtaatacgtacggtttgtctattgagacttattttaccagtatttaaatttactattatgtatgtttgattatcacataaataatctaacatcctaaaatatgaaatcattaaaaaacaaaaaataacacatataagattaagaaaccttaaaaagatagcaacgaaaataagttaatccttacattctatcactctaacccttaattctcttactactgtagtagggtattgctaagtgatgaacctggatagcttccttaaactcgaaagtaaaaaatcttcacaatcttctttagagaattgagtaccaccttgagtagtgtgcattgatactcaaatcactaatggaacaatatgaaagagagaaaaaactatataattttgaaaattatagaaggaaatagagagagcttttcttgtgaggtttaggctaaaatcactttgaaattaggttatctcacaaatcatgttccttataggctctctattagattatagttctattatggggtagaaaaataataatgggccaaaaccataagcctaggccgaaatcactatagggcctttggatttttttttttcattttatttcattaaatgaaataatcttatctttttccaaatttattagctcactctattctaagtgttgaggctagcttaaaagattgcggtgtgaattctttaacgatagttctttgattggatgatcgtaaattttactaaaagatagcgaggataccccgataggctacaaaaggtattatcttcttttcattagtctagatttaatttatatacattatattgagatccttggacttatggttcatattagataaaaactatttttatcagactcgcttccacttttctaactctgatatggaccataaaaacacaaagctactcttaggcgagcttaacgatgaagtatcccatctttttgggctgagctccaagatcaaattctctgtgttcatatatacttttgtatgtttctctttaactctaactctcatctctttgcactattgtgcgcgtatgattgtgttcttgatgttgtgtgtgttttgatttctatttcgtgtgtgtgtgcaatttgtgagatcgttttttcaaaccctaggattttctttgggagaagacaacgaatattcgagagttttgtcttgaagttatttaactcatattagggtttttgtttatgctattaggttggactgagttcagtttggactctatgtttttatttttgccaattttttgttgtggtcgcataacttgaattgcaaaaatattctaaatttgtttttgtatttattatgtaatcttagaattagaagctgcagattctaacatatatattgttaaattttacaaacttaatatgaggtttatgtattttaatttaataaataaatttaaaatagctatattactactcataattttttacccttatacgatgttgaatacaacattcaagtttttttagagcagtctaaaaagattaggtaaaatacttctttagctaaatatatacctaaaacatgtaatataaattggttcattatcaaataagctaaaatacatatgcactattgtaaagcaaaatccttgctatgtagctaaggtattgatgtgagtgaaacattttttaatagatttttattcatttctctctctatatttcacatcacaaatataaatatatatttatttatataatatttaatgtagagaaaaagaaaataaagaagtgtaatgtatatgtgtgagttaaaattaaaaaaaaaaaagttttaataaaatatattaaagattagaataaagaaactaacgagcttgttatatatttattttaagtttcttatattttataacaaaattttatggtccatccacaggtgtgtcaatcttttatactttagacatttacataactttaattttaatttttttatatcataatttattatgtcgtagttatacaagatattctgtaaagtttttaaaacattcaaaataatttattatgccaaataaaataaaataaaatttaaacagtttattacacgcgttttttttttttttttttatatgtatgtgaaatagattgtacaaattctacttttcatattctaaattattaaaatttttattaactgtcttaaataattataatatataatattatataataaaattaaaataattatataccatcatattgaaaagacaaagtggttgtattgcattgaaagctatatattttataataattcttaatatattttatctttatagatataaatatatagtatgtggtcctcccttagttatatgtttatactaaaggaataaaccgataaaaggcacatgatagcttaccatgagtaacaaaagacatcaatttattgaaggataataagcatgagaaacaaacaccacacataacaaaacttgatgtgtggtgcctaattaagtttattactacattcttaatagtttactacatagaattaacaccaccaccatttttaaaagccgaaagttgcttaataaaagccaaaacggcgataatagagttatcagcggcgagattgataaagatatcagcttcattagagtcagcagagccaccaccggctaaatcagagagtgccctaatagcaatgtagggcactctctgttgaagactgatgagagcgaccgcagcgctctccatgtcgacagggctaactttgaacttgtcgtaaatgaagctgcggtacgctgcgttgtctaggtagatgcttgcacttgttcccctttcaactgtgtaaactttaggtgttgttgataaacatgtcgttgagtttatacacttctctagttctagattctacacacacatgtataaattaaattaataatgttcatttcattttgtgttatataaattaatgattatataattgctagataatattgtaaaccctagctgcatatatatataaaattgatttttttactataaaaaaaataattaaaaaaaaacccatccagaagatctgccgggggtcgcaaagtccaaatagtgctccaaattattttttcgaagaaaataaaaaattatccataatttttttttatatatataattatagaaatatctaaatttttagagttgtctagtccgaacatgaatttataatatagacaaattatgtatgtacgtaattaattaaaaaaattataaattttaatttaaatctcatttccccattagtatatattatatatttattgcagatatataacaagctcatccaatattacatattaattaattcatcccaccattaattattattgattaaattaatctcttcaacaactaattaattttctgtctttacctttttggtggtactttacttctcaattatccacttttgaaaagaaggaaaagatgtaatcaaataagacgtacttacaatattttacaaaatcacgatgatcacattattattaattaacaaaaagtctactttatttcttgaccaatatatatgtatatatatagatatatatacctgaagagatttggcgacataatagtaataaggatcaacagggatccaaaaggcatgttccctttgctcaggagtaccatcaataggaaatacttcctctggttggtaccatatattgttcaacacattatctgatccacctttattacttacattcactgcataatctgcaaatttcaagtacccaacttctcttgtgtagtctccatttgcttccaatgctagctcattctcagccccttgtccgtacctctgcatcatcccacaaccagatcaacaaccaatgaataataaatatataggaacacggttttgttccgtcttcgtactttcacggaatgtattctgtgatgtacgacaaccgttagatgaggtagttatttgatctgagagctagagttgatctaagggtaatattagggttagaaaatggtaacgtaccctgagaccagtgacgaacccaggatttttactttgtgggggcttatttatcataaaaaaatatttatagctatattataatcactcttactaaatgtatctaattttgtgggagctttactactattttagcctataattattagattaaaaaatttatatttaattttttgaaaaacaatatttttgttcgtggggctatagcccccacatcaatcttaatgggtccgtccctacctgaaacccatctaatgtaccacggaatacatatatcatcacggtaacaaaatcgtgtcccaataaatatatattgaatatatattttgtgtgtaaatatcataatatattatgtttatggatggacctgccaattccaaagagcagtatgagcccagtactgtggaatagcaacatctccaatattgagagaagggtttgcatttccagctataccatagtgcacaactccttccacgttgaaaaagctcaacaaaagttgagttgttattccagcattaatctaattaatatatattcatcatcaaaaacaatttaattatttaataatctcaatatatataataattaaaacaatttttatattatatatatatatatgtgtgtaccatgcccaatcctgtcatgactgaaaccactttttggtcaccaatttttccaaaacgaaatctcctccctaattaaattaaacaataaaaccatacataaatatttaattatagtaaaaaatgtacacacatatatattaagtgtatatatatgtaccagaaatatcaataacaacgtcaatagcagtgtagtcaggagaattaagaagagggttttgctcaaagagatttggtatgactacacccaaataagggcctttattgttgattttgttgataagattttgggtctttttggacataattgcaccattggtgccttccattattaacccaaatatcataaaaataagacccaagaaaccaatgtaagagaaagatgccataatagtaagtcttaattttgagtttgttaagtaacaaaattgtgccctaattgctgagaacttggcctcattttataatgggaataggtaggtgtagttagctcagcacattgagcacgtgagtttttcttcaccactaactttaaaaaatattatcaataatggttcacaatttttcttttattttactattttgtagtaactcacgtgacgatattgtactctaatattaaagggtactaaaggattagaatatttaaaaaatgaaaagaaatagggtagtagaggatgaaatatttttgttttattatttgaagatttgtggtagagaattaattataagacctaatttaagagtgagttgctagagttttattaacccgagttttgataaataagtaaatattgtgtttggtgtgatttaatgtataaaagaaagtgtgaatgttaataaatagttaatatttaggtccatgcactattattatatcttaccatgcattgagagttaaattgtaattttttttgcataattaagaataaatataatttttgtagaataattattttaaggtttttaaattacataatgtctttttttttttttttgagttgttatataataatctttatccttaattattaattacatgataataagattgggtgaaattgttatataccaaaatgttatttaagttgtaattaaaccttattaatcttaatgtcatatataactttgtatacaacaatttcaacaggataaagatatgagattgttatatatatacaagttgaaattaatttttaagttgaggttttttttttttttgagataataaatttttggagttgagttgtaaaaaaaaatagctttataataatataattggagctgatttaaaaaaataaataaaaattctcggttgcggcataaatatttaaatttaaattttagttgtaaataaatatttaagtttaatttttaacagtaatatttaagttataattctagaacttttgtagatatctgattgttaaatgtttatgtaaattactacgtaacaattattgattggtcaaaatcattaaagttttatttttttttaacaaagaaatagtttaaatatactaataaaatataacaataacgacttgacatgcattgaatgtttatatattacagaagttctaaaaatataatttaaatattattactgtttaaaattaaatttagatatttatttagaatcgagatatttattcacaaaaaaaaattataataataattgtgttgacataacgtccctttgaagtttttggttttttgtgctggtgatttgaccctagagacataatatatctctttctatagagataaaataaaataaagacacatgacttataacatttattatatatatatatatttatataatttgaaattacgttttagacacgagctttaataattcctactcccatataattgtataaagatatcatttaaaaattagactatttaacatttttgttattaaattatgatatatgtattatgtattttaaaatttgttcaatctgttacaaatagttcttaaattattcatagtattataaattgattattctatcaagttttattatacgtgcatagaatataaaatgataacatgactgcttagttaataattatattagtgtcacatgtataattataacatttaaaaaataaaatattaaattaaaaattaattaatagttaaaaaattacgtaaaattaaatttaattttttttcaaattaattactcatgtagccggagaaggattattaaatttaaattttatttctttaattatttttaaatattttttttataattttaaaaggtttatataatatttaaataataaaagtgatgtggaccactcaaaatcaactacatgtacatttgagtatgctatggtatgtttacgagcattgctattgagtactagtggtgcctagcaaccttaacatgtcgtcttgtgattgactagcgatactcattaaaagctattatattaaaccacatgggacccgatacttaattagaccaatgcgatattgacacgtatgagggtacttggcaccactagtgccttttagcatttctcgtatgtttacctaagcgtacggaatagtgaatatatataaaaaaaaatatgaatttgaaaggttttactagtattaaaatgggtaaatagcggcataagtacttaaagtttaaagtttgtaagtggcataatctcaatgtttattttta

SEQ ID NO: 21711 - DNA, 2173 bp, Cannabis sativa
aacataagcagtcataaaaacctgtaattttataattagataaaataaggaactaatgtcttaactacatttgagtacgtacacacattatatggtaatggaaatttatgagatagattatagtaacctgagttacgagacccaacaagtggcggagccagagctcattgtcctcaagagcaaaggcagtaatggtgtcagggccaccaaggtgaagaagaagaaatggggcccaaaaggcctggatcatgccgtctgctcggttactggatttggagccagcactagatttgtcagtttgtttgctggaaatgtggcctacagcaaagttggccgcccaatccgcaagcaaataagccgtccagagtgagaaaatgatgagtttcctggaggagcgttttctgagtggagcggccacaatcagaaatgcctgtaatgccaggctgaatagaatgattgccctaatgttccactcattccacagttccagaacattgtctggaattggatgaaccattcttttttctctttctaaaataaatattaaaatccttattttacttattgatcgggaaagattgacaattatagtaaaattcaaggtacatataaatatatagagaagaaaaatgtttaagaggctttccaagttcgcaatcggctttttagtcaatcttgacacacgtgacaagtgatttgtagtatattaattaggaggaatagagaaatgttaaaaagcagcacccgcgtttaattaagtattaaggtattagacactatgggtgtccaataacaatgctcggaggaataatatggaaatgctaatcgctttttatgtgattccatattatgatttcattaagaaaacctggttagatatattcatgaaattccatatttagttattatttggaaagtacgaaagaactagttcttctatcatttctcataatgtaattgaaaagttatcacgtgtttagtaagtttataatatatgtttgagaaaaaagaaaaaagtctatatgacaagcactgcagtgtgcactgttagtactttattttttttttttttgttcttcagcacactgtcttattttttttttttttttgggtgaaatggggcagagtgtcttacttatccattaaaaaagcagtgggtcgaaatcgaatcatggaccaaattgggatccaaaatatagaaatgatggcagccaaacttggtcagacgacattcctaacttgttggaagtgcaagggattttaatttatttggttcctttaaatcaaactaaagtgagaaaaacaaaaacataaatactaaagcctaaatcatatgcccaaaagaaatacgaaatcgatttggcttcatcttttattttcccttgataaacaatatattctttttgtttagagaaaaaataacattacaatcaacaaaattattaaggaaagagtcaatatgaagaaaggatagaataagacaccaagcggatgttttcgtttgataaagaaaatgagaattgttattagatatcttagattaggtgtgttcataaaataactaatctaatacaatcggtatgattcgatctaattcaattcacaaaaataataatttaaaattctaatatatatatatataatataaatatatttacaaactcaaatgtatattccattctaatttataaggaaaatataatttaaaaaaaaaatgaacatttttatacatacaatttttttcttcttactttgaattttttttttatatatatattttatttatttaatttgtttgttatacccgaaattcagcgagcacatcagaagaagacatgtgtcgagctgggaagaataaagaactcaaacacgtaatcataatcacacttgacatagaacgcacttcagaggaacagttctccaactgaagcacacgacctgtagagaaacaagagtctcttgccaagaaatgagctaacttatttgcatatcattttacaaaacacaaatcaacaaaagataaagccaaaagcaaatttcgaacatcgatcttcaacaataaggccaaactgtgaatgcataaaaataccgctctgaatcgcttggacacaaaccaagctatctgtttccaacatgactccatcccacaaatgagttacaatccaactcaatg

SEQ ID NO: 21712 - DNA, 3058 bp, Cannabis sativa
cagacgttaatgagccttagtccaaaaatcattctattggccttatgaggcttgtatggatattttacaatgtttatgcaagataccctaactttgtactcttagtttctcttgaagaagaaaaaagcttagagtaatttgagcagagcttcaactatctaaattttcgatcctcctttcatatagaactaaatggatatttataggctaaagagcgggtatggacatgcgcatgacccacctagggtttctgcaaaaagcttattaatagggtcaaatacatgcaaagagctgactattgagacccttagaaggtattgtggtgtgttgaataagctggacaataggggaccaccattcgtataggacgcgtcttaccaaaaggtttacccttgaaaaggaaatgcctagaataactgtctggaaaaaaggtgtagggggtgtgtgcactaccatggcctgacacaggggacaagacctaatcctgtgttaagaaaagcatacccgtcattgagcgatccgagtttatcttcaaggtacacatctgcatctcttttgggtggtcagcatctgtgataggcccttcgtgtaaccttccatgtatcgttttgggcaaacttcgatcctgggccacttcggatcccggagtgagggtaagccttccgtgtcaatgaagggataatgaggctaggtaaatctctgtatatcctttggacttgacctgcttctggatccacgaagcttctctatgacttaatttaatggggagggggatttagttaatgagatctaaaagttgtatcttactttttgtgccacatgtctcatgtctgaaaataaggataacatttacccccaagcttttaagaatctttaggttgcgagagcttgcagtcctcctccaaatctttgaggcgcatttatgacacacgggtgatcgttgagaatacagacgtgttcgttttgttgagttgtcatcatttgaaggatcgagtggtataatagtcactggcatggcatgcatgtgtcttggtgcgctgggttctgttcatctcattttgattccatcttgatcatctaactgttttttttagtgaacgagagttacaactcgtgacaagtgaaattcatgctttgatatttcacctttaaataaggtggaatatcggtaaaatcggaaagttttgagtttacccaattttacaaaaaagtaacacctctgagaactggtgaataacttcacctaaactaagaaattgactaagtgatgtcaacatatcacttagggatcgaaaaatacgagtctgagacattttttcacttgcctagcgtccaggttgacgtcagaatattaacctaggtggtgggtgtcaaccttggcgctggatcctgaacaacctttagtaaaatagacataactccctcaatattggttcgattgatgcaaaacaacttgaattttaaagatctttctagtcatgtcctacacccatatcacaattctaaagattttaagttcaaaattcgtcctcgagacaagtgcaattttttctgcagattacccaaaaatgatctaacggacgagtacaaactctaaaaattgatgattttcgtcaagagtcaattttagctattaggtcatcactaatggtcaatatcagcccaaattgatttttctatatttttgtattatttcattattattttaataggacctcttttcctataaaaggagagccccactagtttattttttacattcaggaaagagcccataaggtcagaacatctctctttactttctctctctagaaattagagctcttgcctaagtaaattttcttttaatttttgtgagcaataaaaacttgaagtagacgtagctccattaccgtcgtaacacgaggagttaactactatatctcctctcgccaatctagtgagcaagtgttggatagatttctgcatcaacaaaaaggttagggacatgtgcttctattcgaatcacaagtgatccatgtttgcttatggattctcatttagttctattcatgtggttctagggcttgacaattttatggttcgcaacttattctaggtcggatttcgggcataggatagtgaggttgtggaggattcattttttcctgatgatgcaattgttattcttggtattccactgaattatgatacttctaaggattccttgtactagttcaaagagaaaggaggcatctactatgttcgtagcgcctacaagcttctccaagtaatgaaaggtaagttttctcttgaagctaattttggttttaagataaaaaaaaaaaaaaagctctattaacttaaagttccttcaaaagttaaggatctaatgtggcatactctatctcaatgtcttccaacgagagaatgagtcttagaggtaaacatgtggctacggaagaggtctgtcccttatgtggtatttttgctgaaacagatatgcattgtttgctcaagtctcgattttttggtggtgtttgggaagctactggttttgtaacagcaggttggaatttttcttctataagttcttggtctaaagctatttcccatggtttagatttgaacaggttaagtcgtgtaatgatgatttacatataacactcttgatgtaaagctattatgtaatggtgatggtagggaactttggttgaaattgatttcaaacatcaaagtaaatgtgaatgcaacacttttggagagggacgagaagtttagatattcttttggtgtgcaagatacttatggttcattggtggtggtgcgagcaagctgctatttagggaaagtggtcccgatgtggctgaggcgattgggatcaaaaaagatttgagttgattgaagacccaacaattttagaggtggttcttgagtcggatagttttgtggctgtcgaagatattctttttttgctaattaaaattcatatattaaaacaaaagctaacacaaaatagtagccaaaaggggagctacttccctagcaaaaccaacaacatggattctcccaacacgag

SEQ ID NO: 21713 - DNA, 2168 bp, Cannabis sativa
gacaaggagaccctttgtctccttatttgtttataatatgtgctgaaggtctttctagattgtttcaatttgaagaagcagctggtaatctttctggtttgcgtgtggctcgtggggctccatccatttctcacttatttttcgcggatgacagccttgttctatgcaaagccaacaatcgttctgctgaagcaattaaaagatctttaaacacctactgtaatgcttccggacaacatttaaatgcagccaagtcagtactctccttctcatcaaacacataccagcatgttcaattgcacttccaacaaattatggatatgcctatccagccatgtcatgaaagatacttgggtttgccatcttattttggaagggataaacagttgttgtttgctgatattaaggataaactttggaaatttctttcttcttggcaagaacaactcttctcaattggtggtaaagaagtgttattgaaggcggttgctcaatccattccaacctacgccatgagttgcttccggctatctaaatcactcattgatcaaattgaggtcatgatgaataagttttggtgggggtctaacttttcgggtacaggaatcaattggaaaacatggcatgctctatgtcaatctaaagtcgaaggtggcatgggttttgagagtttcgttcttcattcatttctttcaatcaagcaagcttttactcgctaagcaagcatggcagattctctcagatccgacatctcttctttaccgtgttctcaagccacgatatttcaaaaactctcacttcttggctgctggaactggtgtttatccttctctcacttggagaggcattgtgtgggggcaaagagcttttaattaaaggtctaaggtggaaagttgggaatggtcaaaccatagtttgtgctactgacccgtggatacctggtatcacttatttaaaacctttgttgttccaaggcagtgacacgagtatgaaggttgcagatttatttttggacaatggaaggtggaattttactcttctgcaatctctctttcttgcttctgatgtcgagaaaataatgagtattcctctttcttttcaaccaacctgatcaacttcttcggcatcatgaaagcaatggatgttacactgtcaaaatatgttataagttagccttaacattggaagaacagcagcctaacaccagtaatactgctgctatgtcctggtggaaaaaattctgggctctatctctgccgtccaaggttcgaatttttctttggagggcaatccaagattttttgccggttctagatgttctgcattcacgacacatcagtgacacaaatacctgcccattatgccacagagaaaaggagactatattgcatgctctcttccattgtaagcgtccaaagaaattttggcgtttatccacctttgctgttggggatttacttcactcacatgtttcattaagaggtatttttctccatgtatccacaatttggtctaatttagagctggaacaatttgcttgcattttatggagtctttggacagaaaggaataatgagcgtcatggctcaaaaactcagccaactgagctattgcttttcaaagcaatgacttatctcgatgaattccatactgccagaggtgtcaataacacgcatcagtagccattatcgaaccagcagcctactgcagcaatgcatagtggcaggcctttgtcaactcctccaaaatggttgaatccaccctctggaagactgaagcttaatacagatgcggcggtcaacaaagcttctcaaattactggttttggtgctattttaagaaacagtagtggtgattgtattgttgctatgtctaggcctttccctggctgttttaaaccagaaattatggaagctttagctttgtttcatagcctactatggcttaaagaccttcagctacaagtggatttcattgagacagattcactcttactggttaatggtttgaagtctactcaaactacagtttctgatttccattgcttgttgtctgatattcaacttttagtgtccaacttccctggagttcaaatttctcatgtaaagagaggagccaatactgctgctcatactcttgctaaatttgctctttcggtggatactgat

SEQ ID NO: 21714 - DNA, 7752 bp, Cannabis sativa
aattttattgaacacccctaaatacaagtatgaaaggctaccaaaaatgtgcttcaaatgtggtctcctcactcatgaccaaagcatttgcttcaaacctcccacagtagttaaagatgacaaaggtaacttctacccaatgtatgggatttggctcaaggctgatgccaaggagaagtcgacattcaccaccccccttgccaaatggtttcaagattgggtctttcaaaagaggttattcctagaccctacccttcgaaaccaactcaaagtgcaaaaggcactactccatggtgaaatggatgaactcagggagaaccgcaaacaacttccatccaagaaacgcatagtcgccaacgaagaacatgatcaacacggtgacgaatcttcacccgaagaagcggttattacccaaatccctctagtttacctaccgggcattggggaaattgccccttttggcaataactcaaaaacagtttctatcctagacctgcaagaactcaaagaggcggcttcaggaagtacggggaaaaggcccaatcgcaataccccttctgcacctaacacagacaaaatggaggcacgccaaatgagtccaaatgccagcagtgtgcagaaagagacccctcatgaatttcccatctcaggcaagcaggagatagccgttggtgactccagtcaaaccaatttccatttggaggagaaggaggcatcatcgaatataccaccctcacctggctatgggagtaataagacaacaaataaacaaggaagcccttgtaccaagcccatgtccccacctattccctatagctcatctattttgggctcacaagcccatataatggaatggccttctaaggagtgctgggcccaacccaaagcccgagagcttttcaagggtggcctcactgtggacaaaatttttcgtgaggccactttgtttaaccctttattgggcattgatgattttagagtgtatgaacacctccaaggcccaaggaaaagaaaagccatggatggcatcctcttcaacacctcccctgaaactaaaatccccacatcaaccatttcggattctaactccacttttcaacatcaagactcgagcttaatcccaatccctacctctgacgaacaaaagcccccatctccaaatgaatgtttcacgaatgggcaagggaccttcaatggtgcggtcaagagacgtggtaggccgagaaagaaagggagccctgctacaatggacaattattctccaaggagaaggggaagaccaccgaaaactcaccatagcctctcggccacacctaaatcattcaaggtgagaaaaacacccatgaagatggcttcggagtccacgtctgtacagctccacaaggatgggaaactgtttgacttgaaggtggatttggataatcgttttgttctagtggaaaagcaacaaagccttaaaggaaaatgcactatcactgagattgaggaggatgtgcctcttaaaaaactggtcaacaaagggaaagctaagctggattttcaatttgggggctatggagacttgcccggaaaagtctccacgattgccatgaaggtctttgcttggaactgtcgtggtctcgggagtaccacgacagttcgtcaattggcggcccttacccgccaacataaatccgaattgctactgatttccgaagctcgccttacaactgataagttccaaagtatttgcacaaaactcaggtatgaaaactactcctatgtcgcacctgttgggagattgggggggctgggattgtgctgggaaaaagaagtgaaatgtgtgattgactactcctctaagtatgttatctctgccacaattgaattggaaccaaaaggcctcaaatggaccttgctggggatctatggaccgcctcatagagaggacaaagaagctttttggattcaagttggcgatatcgtcaacaactcccctagaccagtcctcctcattggagatatgaacggaactctcacggattcggaatgtttcgattatgctaaacagggcaactcttccaaatactcctttgacttccgtcgaatggttcagcgggtggggcttattgacttgggatttcaaggcccctgcttcacatgggctaaggacagaaataaccccaacaacggcggatcatcgaagagagcaaggctagaccgggggctggttaactccgactggcgcatcttattcccaaacgcaattgtcaagcacctctcctccaatggctcggatcacaggcctctcctgcttgacacttcggggggagctcgttgcaagagtcggacattcaaatacaaaaacatgtgggctagagacccaagatgtttttggattgtaaaggacgcttgggctcaaagattgcaccaccaccccatgatcgacttccatagaaaggccaaaaagacgggtcagatgcttaaactatggaaccaaagacagtttaggaatgttaaaagacaagtggaggaggccactaatcatttacgtgaggctgaaaccaatagaactgatgactatttagccatccattcggctaaaggtgaactcgcagaggccctactaagggaggagatacattggaagcaaaaatcgagggttcaatggctgcaggaaggagacaagtgcaccaagttctttatggcttcagctactgtacgcagaagacagaattatattcaatgcatcaaaaaggcccctgaggataactggatagaagaccctaaagagatcactaattgctttcttgctaagttcgaagaacttttttcaaaaaatacccagtgtacaactgatgcactccgagaaattctgctaccaactattgataattatgcagccgagagcctccaatccattcctacacatgatgaaatcaccactgccctctttgagatggggaaggataaagcaccgggaccggacggtctccccaccagcttctactcccatcattgggacactgtgcaaacagaccttctggccatggtgatgcacttcttcaggacatgtgaactaccaaaggtaattaacgacacatcaattgtattagttcctaaaaaggaggccccagcccttgtcacagacttccgaccgatagcgctttgcaatgtctcttacaaggtaatctctaaagtgcttgccaatagaatgcgccacattctcaacaaaattatctcaccaaatcaagcggcttttgtcaaaggaagatatacagccaaaaactctatgatcgcaagagaaattgtccattccatgtgcaagaagaaggggaaaaaaggcttcatgatgataaaacttgacatggaaaaagcgtacgacaaaatggagtgggattttattatctcagttctaaatacgttggggttccccaacttgttcacaaagtgggtaagctcttgcataatggtggaagacatcaaactcctgcttaatggtgccgtggctggtcgaatcaaaccggagaggggattaaggtagggagaccctctttccccagctctcttcattctcggggctgatgtgttgtctagattaatcattaacaaggttgacaatggtcaaataaaaggctttcgaatgggaaggaatggagtggtcgtaagccacttattatttgctgatgacattatcttgttcgggcaggccacaacccgtgaatcagcctcttttatggactgccttaatgaatatagcaaactgtctggccaaaccgtaaacatccacaaatcggcggtcttattctctaagaaagtccctgcaagaacatcgcaagcaatatctcagcttttgggcatgaagcggatgtctaaaaaggcctcttacttggggatccccttgttccgatctctaaagcgtacaacggacacaaaattcctagccgaccgggtgctacatcgagttcaaggatggaaagccaagcttctctcatatgcagggaaagcctgcctcgttaagatcgtgggctcttctatagccaattatgtagcagcatcggatgttatcccgtcttccacatccaagaaaattgacaagctccttcgtgacttttggtggggtgactcggaacagaatagaagattacatacaatcgcttgggaaactctctgccgcccaaaagtaaatggaggtctcggtttcaaagcaagtgaagcaatcaatcaagctttcctcatgaaatgggcatggaaagtgctatccgataaagaaagtctttggcaaaaattcatggaggccaaatatctaaagacttcaagcttccttgacttagatataaagccaactgattccctgccctggaaggcaattctgcgatctagatctcacttggagaaggggctctgtcgaaaaattggagatggaaatctgacttccatctggtttgactcttgggtgccgggagggaccctccagcctacgccaaggcataatgccacctttggaatgagcatggtaagcaactttatctctcaaggtcgttggaatgaatcacttcttcgacaatggttttaggaagatgatgcaaagcgcatactcaatataaccctccccaacacaccttgtgaggatacgtggctctggctccccgaaaacaatggaacattctcaagtcaaatcggcctacaagataggtgaagaatctacaaaacatggctcacgacgataagaaatggaggacaatttggggtgctaagattcatgagaggcttaagatgttctggtggaaaaccatttccaatggtctactcaccaaggatcgactgtgctatattcttccctcgatagatcctaattgttcgttatgcaatggtgatatggaaacgtcacttcacctcttctagaaatgtaacttcgcaagagccttgtggtttggatgccgctggcaagtccgaacaaccgcgagtcttattgattgttgggaaaattggcttgagtggttctcggctgagtcccataggccataaaacatccacctgcatcttttcttgggtggggcggccaccatttttgagagcatttggcacgaaaggaacaacctatcccatggaagctctcctactcccattggggctataattcagcacataaacttaagaattcaagagatctccgatgactccgaacccaaagctgctgtgttgaagacttggctccctcctcctcctggttgggtgatatgcaataaagacgtctccattggcaagtcgcagacagcaggggctgcagtgtttagagatgaaactggggctgtcattaattgcttcaccttcaggctgactgttagtgagccgctccttggagagacaatgaccctatgcaagggagcggaagaagcagccaagaaaggtttcaggaaggtaatcttccaaaatgactgtgctaatgcaatctctgccctgaaaaccaaattgcaggatatcaactcgttgaattttaatatccaggagctggtgcttaagtttatcggtatttcgagcagtttcaatctctgggaagcttcttggatacccagaaatctcaatagtgtggcccattcgttggcgaaatgggcaaatcaaaacaactgtttcggctggcttgatttgtcccttgaggatggtcctctacgctctgttcttacagagattggatgacttaaatccttcctctttgttagtagctgtttgttggactggctatttttaattttagtttagtttattggtagttgtttagtctttttctggcttagcctgctgtttttccttctatgcctgtttcctgttaggccgcttggcctggtttgttgtttgcgttccctggcgcttccaggggtcccattaatcaaaaaaaaaaaaagaaagtgaagaagttgttcaatatatatataagtttggtatcgcattgaaccattaaaaataaaaagttattatttttaatagaataaataatatttttgtccttaaattttttatattactaaattatgctttttaaagtatacgacttgcaaataatacttcttggaatataacttttactaaaaagtccttccatcacattttattcaattttatcatgaaataagtgaagtggtggatgatacttgataaatatatgcaaattaatatctttaacatttttcacaataaataatagaataattttttttttcttttttataataatttatatttatattattagttttttaatcattaaagtaaaaagtgtaaaatgtatttaacttgcatctatttatcaactaatattcattgcgtcacttgttttataataaaaataaatagaatatggttgaaggaccacattaacctaaaaaattatattttgagagatattattaacgagttgtatattagaagcacaacttggtacgtagtgttaaaagtttaaaaaataaaaatactgattattctttttaataatatggacggtatttttataaattaatactttgagtgttacgtcaccaaccgtaaataaatatttattttattgaaaaaaattataaattctactaaaaaaagagaaataatattaaacactcaaaggaagaaaaagaaaatcttaaattcaaaagcactaaaattttttttaaaaaaaacactaaaacgactgttcgattgtgttttcagtttttaaattatgtttttaaaagttagaatataacaatttttttgtcattttaaaattttaatagtgcgtagctaatattttttaaacactatttttagatttttttttctaaaaaaaatacttcattattctacactataccacgacatgaatctagtccaatcccgagctcggccttgggctccggaacccgcactcgagaccttagatcttgggactcgggtccttggtccctagtcgcagatccagacttcggacccagacctaaatatgtgagaaaaaatataaaaaagaatgtgttggacaaaaaaaataaaaattatatttaaaaatagaaaatatttttatatttttatttttctaattttttgtaacattattttcagaaaattgtttgtaaaaattgtggccaaacaccactatattaactttttaaaattcatttttatttttatttttaaaaataatttttaaattatcaaaccaaacatacctaagccactcaaaattgtcaaaataataataataataataataaaaacaaacaaacttaggatttgtcacatttataaattataagtacttcaaagttacatgtcgattttcaaatcactttcagaactataaatatacatccaataattaaaagactgaattctccaaaaataaaataagacagagattgatgtactctcgttttccatctacaagacatgttattaattaaatgggatttatatggccaatcttttattttaacttctttctcaatttttgttctcaaaagttcatgttgtaattttcttttacatcaaaaactaagaataatttatagtactaacaatatttataataaaaaataatatttataaacgtaatattaattttagtgtaattgttatgtgttcaaatcctaccaagaactttttttttctttacctcctaccaatattgggaagttatgttgttgatatttcaaaaataattattttaaattttaaatacatttttaggatatttgtaagtaacatgtttgcattcttttgctccccacaaatggcaaatagatgaaa

SEQ ID NO: 21715 - DNA, 3407 bp, Cannabis sativa
  modified_base (642)..(645): a, c, t, g, unknown or other
ttacaatcccgtagaatctaaagaaagtccgagcagaaaaaggtgcaatatataattgcaaacgtggtggatgtcaagttacacatgacctactcaaatttttggaagggagagatggcaacttttatgctccctcctccaccccgtgaagttcctatcttgattctgtatttcttatggaaagaaaatttaggtgaataaatgactggtagtcgatggaggcacttttcttctctctcaaagggtagagaagtatattgccttttatcgaaaaaaaatctaagagtacaagtaatgtttgtcgtagaatttcattttcaggtgttcatatgggattttgaaattgaaactacgcctactatttgttgtatggatgacaagaaacaataatttggaatgaaatttcggtaattatcaataattacaacatgcaatggatgagagtgggcaatctccatcttatcttgacagataaagacaaaaataggaggtacaacaataaatactaaagacatgaaaattcttggaatattttcttgaaaaaacgagtacgagtagcattgatctacattttggtggctgcaaatttacattgctgaataaatattaagaattagttccacattgctaatgtgtggaaannnnttgtgatatataagatgaaagggctactcctcctattgctaattggttttgggatggaacctcattcatcttatcctcaaattctaacatggtatcagagccacttgtatacccacaacgttcggtcctgtggtctcttaaaggtcgttcgttatacccacactttccagacgtgaggagggtgtattaagagttagtgatgaaagggctactcctcccattgccaattggttttgagatggaacctcattcatcttatcctcaaattctaacaataaatgttttcatggggcatagatcaaacaaagataaagattggatatcgctcttacttctcacgaatgggtgactaatatcaatcatggacccaaactatatcacacttccttgcatcatataaaatatgctattactacaattttactccaattatactcctctataattaaaacctgttttttattcaaccaatctctttcttctctctttaggaaagtcatatcacacccacacacactctaccagccgagctacccgtagtaggagctcccgtcatctggccaccttgcatgaaggtgcaatttgttggattgctatgtagggtcggccttgaaatttagtggggtatggaaaaaaaaaattatttttgagcccttaattagaaaaaaaaaaatagtattttttaaaatcaccaaaaaaattgtataattttaaaagaaaaagatttttttttgggacctaagcacagacctagcccgcctatgcccaggaccggctctcttgccaggaaattgccacttttagtaaccaatttcttgcaaacaacaataagtatataatttcttactaatgattgttagatttaattgtatttagttttatataaatatatctatacatatgttgttgtttgtttgttcttccaatttctgcaatgaaacctaagtgattctgcattttatataagatctttgggctttattccatgtgctctcaactattcccacaattgtctcggatgttcacaatgaattcctatctaaggattttatggctgctgatgtcttttcagtgttaaaaataatgggctccgataaaagtctgaacattgatggaatgccagcgatgttttatcaacatcattggcatattgttggtgattcagtttccaaagttgttctacatgttcttaatgaaggtggtaaccctgctgcattcaataaaacattattaacgctgatacccaaggtaaaaaaattaagtactatgaaggattttaggcctattagcctatgtaatgttatatacaaactcatctccaagatgcttgctcttaggctcaaggatgttcttcctgtggttatctcggaaactcagagtgccttcctccctaatcgtttgattactgacaatgtactggttgcttttgaaatggttcatggtataaaacacaggaagaaaggcaacaaagggtatgctgcccttaaattggatatgagtaaggcctttgatagggttgagtggtctttcttagctgttgttatgagtaaattgggcttttatatacgttggatctctctcattatgatgtgtttacacactaacacattcagctttttgcttaatggtgctgtcacgggttctatcataatgagacaaggggatccactatctccttacttgctcttaattttttttagggcctctcaagattgttacaatatgaagaaagcattggccgattgaagggttttgctgtggctcatagggcaccttctattacctacttattttttgctgatgacagtctcctcttttgccaagcggatgatcggtcctgtggagctattaagcgtgccttagatacaattttgtcattctctcccaatactacagaagctgctaagaactcttttcaacatattattgggatcccgattagtgagtgtcatgagaagtacatggggttccctgcatactctgaacaagataaaaaacaacttttcggggagatcaaggaacgtatttggaaacttatgagaggttggaatgacaaaatgttctccattggtgggaaagaagttcttttaaaatcgatagtccaatctattcctagatatgttatgagttgctttatattgccttctattttctataaccaactagaacatatgacggcccaatattgttggggttctactacttataaaaagaaaactcattggaaaaagtggcggctactttgcaagtctaaatcacaaggaggaatggattttcgttcgtttgtgcactttaaccaagccttgctagctaaacaagcttggcgtcattgaatatcccaattccttgcttagacttgtgcttaaaggcatatacttctctaataatgacttgttgggtgctaagaaggttggtatgtcctctctaactttgcaaggtatctgctggggccgtgaacttttacttaagggattgagattgaaagtgggagatggttctacaattcatagtggtgtcgatccttggatacctcgtaattcggacttcattcccctacaattttctggcagcaatgacacttgtgtctccacctatattactgctaataggacttggaatatttcactgttacagcaacatttctctcctactgatgttgaatatattctcactatcccactttcattttccaacctgcatgactgttggatatattttaccaggatctagatttactagcaagtatgtttcattaacatcct

SEQ ID NO: 21716 - DNA, 3430 bp, Cannabis sativa
  modified_base (1278)..(1292): a, c, t, g, unknown or other
  modified_base (2476)..(2482): a, c, t, g, unknown or other
tgtacattgccgggagacctctgattcatggctggtcaaattttcccttccttttacctgtaccacgaagcacctgtgagtcacaaagactcagccagaaatgcaagtaaaacacaaatatcgcataacacgagaaattataacaatgcataacatacgaattcatcatacagtataaatacttattcaatacgtaatcatacatcacataaataattatttatcttataagacaaattgattttgatgcctcataaagcttccttaccactcgttactcacgagctacatatgccactatcgttgcctaattaggcaaccgataagtaagaaacctatcagcggtttcaaagtcagttattactcattctcaacaacggtaattatcatatccttaccttgattataatcgagtcacaaacgataataatcgttgctcacttgacatgctaagtagtgcaattggctttttcttacctcaatccaatatcaagtgtacgggccgatctaagtggaactatgctcgacgatcctagatcctatgtcacgataatgaaacttgataaacaacttaaccaatttccaaaaataaaccctaatgtcacaaccgaataaaccctaatctccactggcttcaaaaatagcttaaacatcaataaaataccccaaactaagttctggaaaaatacctcgagcaaaaactagcctcgaagaaaactaggattttccactactggccaactggttgaccggttctccagtgacctgtagaaccggtcgaccagttttgccagcattggaaaaatcttggtttttctcttcgaaactaaaccaaaacttcatcaatcctactcaaactttccataacaattctataacataaaaacaacatattcaagcaatcaaaacttagtattatctcaaaatcacaaattcaccattaaagagtgaaaattgagttcctaaacttaattctcccattctagtctaaacaaccatgtaattcatccaaaacacatttaaacaaacctaatttaaacccaaaacataatctaaactcaacttacaccacagacccaaaaccaagggaaatctcaataaaacctaacctaaaacttaagaaatcatcaagaacacatggagaaagcttacctcaaggttttagactggtcttaagattgaaatcttcaagaatttgtcgaagaactagagagaacacatggttttcttctgggtttctcttgagctaaaaggggagagagagatagagagagagannnnnnnnnnnnnnnagagagagagagacagagagaaagagcaatatttgtgattttcttagtttaggttttatcttcaattaaataaataaacatttaaattaataatataacctaacattaaaaaccttactttcagcctagaaaaatcatgtaagacaaaatctaaaccccaaaaaaagactattttaccctttcaagatcacttaagctaaaaacataacctaggggtattttggtcatttctaactaatccaactaaactgacaactcaactttctaaactagttcgatataattccaatttatctatgacaactcaactttctaaacaagtccggcataattccaatatatctcatcatttatcgctgtgacatttccgaccaatctgtcaagtttccaggtctttgaatctgaaaatattttattttgaaaatggtatgtaaaatacccacataatctgataaaatctctgtaattatttatttacactttgtttattcatttactcaatatttcactaattaattcaaaattagcttaagtaggattataatcctactctaatgtccatataattactcatttaataaaatatgtccaattaaatgttattatattttcttagatattagattatttcttccttatataatttcgtcctcaaaatttacctgaataattcgggatactgttcccgcatctgcgactctaactcccaagtcgcttcctcaaccttgatgttcctccacaatactttaactactggaatagtcttgttctgcaacactttctttttcctatccaagatctgaactggttgttcctcgtatgataagtccgtctgaagtttaatgtccttgtaactcaaaatatgggacgtatcagacatatacttccgaagcattaaaatatggaacacgttgtgaactctaaataaagcaggggattaggccagctgataggctacctgacctaccttgtccagaatctcaaacggaccaataaatttgggacttagctttcctttcttttcgaatctctgaattcctttcattggtgatactcgtaggaaaacaaagtcccgaacctagaaatcaatatctctacgcttcggatcaacgtagcttttctgtttactttgtgaggcaagctgatgagtccgtatttatcttataaatatgatcaatttatgnnnnnnnattcttaaattgattctttaaataattgattagtgtgattttatttgtttaggatattttaaagactaatcatgcatttagaatcatttggagggatgttagcatatttttgtggaaaatagtagaagtcggtgagctcgattttacaaggcaaaacttaattacaaatattgacaaccttaaagtcagaactagagttggagctcaaaattaaagttttagatcttgttcttagctttttagaacatcttgaatcgtccaattctgagttgtattgaagaagtaatggccaaaatactaatcaggtgcagaaacaaaaattgtgctaggctctatagagccaagttcctacgctatagccccggtctgaaaaaaaaaagaagataatttcagcacatggttattcgagaaatatctgatgggcgctatagcactgacttatctcttttttcttaaaaaaatcctaattctaaggagattcatctatcttttcaagcactataaatagacctttttaggctacgaatttgagaaccctagagctaccaaattgagatagaagcttagagaaatagcaaggaagagacggagattgcgacttcgaagtgttcttcatcatagttttttttttctccttaaatcttactatgtattatgattatcattataatgtctagttctaagtagtttccttttagttaagagttatttcaaagcccgagacatgaattcttaattttattattgaatgttaatttctagtttccattatatcaaattgcttatattcttctatgttcaatgccatgattattggtttaatcttgtttactgtttagatggccactaaattaagttttactttaatctaccgtaatcttaagattactatttacctaatagtctaggattctaagtgttttcgataaattacaatttttaatattg

SEQ ID NO: 21717 - DNA, 2247 bp, Cannabis sativa
  modified_base (56)..(57): a, c, t, g, unknown or other
tgtatggttttatgtaataagttttcaaaatatataagtttttaaaataatttttnnttgcacattttttgtaattatgttgtttttgttgtacatttatgaaaaaagcccataaaacttttctcgagaaaatgaaaccgccaaaatacttattagtaaaagagaaaagaccaaaatgtccgtttgtagcttttgtaaaaaaatccttttagttccaaaaagagtgttttaagaggcaattgtgatgctcatatttcaagctataaatatggacatgacacgtaaataattggatacgaaaaatatgaaaaacccattatgtaataaacagattgacttggagagataataaataacgagcaacatctgtctcgcattatgcattgacaattagataacgagataaaaggtaaagggtgcatcaatacatcccttttaaggggtgcactgtaaaagtatcctaatatttaaatacatatgtatatatatatatattattgggtgtttctatgatacacacttctaaaaagggtacaccgatgcacttctatctgtttcgatatccaaaagaattttctaatcttattttttatagtcgtgtatattatagttatttaagagattttgcaaaattatgagaaattttgaataatttacaatatagaaaacagtgtttaaatagtttatttcacgcacttataaaataaaagaccgctacatgctcaacagactgtttgaatcctgttttcatcgtattaattttttttttaaatttttttaaaattttgtaggatatcttaaataactacaacatacataatcatgaaaaaaaaattgaactaaaaattcttcagggtgcatcggtgcaccctcttaaaaatgcattatagatttttcatatattatgtatattaacaaaaattaatatattttattaaaaaaaaaactaatttgtaatcataaattaatattatttttagtgtaacttttggttggtgttgtggttataatggaaagagttttaacactaaatttaatgataaggttggagttgccctcacacccccaagtttaagaaacactcatgtgtagatttaatatttcaaccttacactagctaattgacaacaactaataatttctaaatccttaacctcatggcaccatttcttgacagccatgcttggttgtgagacatgtcatttatagaagtaaagtccttaaataaaatgtgttctcacccataaaataataaaaacctaaaaaaggtgagagacattcatgaagcctctaaactgtgcttaaaacttttcatttgattacaaaatattttagtacaatagatgatttggataaagcctgcaaagcatttttgagacaaaaagtagagaagtaacaaagtttacagatactcattcataatctcaccaccaccaccacactattacctttcattactaataattatttttatagccaattttggcgtgcatgcagctaaggccttcaaaaagggttagtcacacccacctcctcttccaccatcatcaccacaaacaaacctccctaacaacactttccacctaacagtagtactactatatatacttcactaattctagttaggtcattgttttttgaagaacaatataaaataaacaaaaattgtatgtgtgtacgatctcaacatgaagagtattaaattaaactttttgacatagcatgaaattagtactattttgagatacgacatgaaaaatatataagtttggatcaattataatatgatgtttgttgatggatattatatgacaagacacaaaaaatatgagcttaaatacagtacatcatgacaaatttgaagatatgataagtaaatacaaataaattaatttgaaaacattacacattaaaacactaatttttgtacgaaaaaatattctataatttgataataataatagtaataattatttttaaaaaataattaagtatttaattattaatcatatatagctaagatggtaataataaaactcaaatgcatataacaccaagtattataattttataattaagcttaagtatgcctaagcatagtttcatcttatagcaggctgtgaattctcaacttttcaccaagaatttactttctcgtttttgaattgactgttttggctgttgggttggatgttgttgctatgttgttgtagcctttattggttgttctttgtagtgtttgtttca

SEQ ID NO: 21718 - DNA, 1729 bp, Cannabis sativa
  modified_base (1080)..(1091): a, c, t, g, unknown or other
aaaacaaaacaaaaaaaaatcctttttaaccgttttttttttttttggggaacagttggggtgggaattacccaataataatgatgatgcagtagctaatagaaagaaagcaaaatttcacaattgaactttggaatgtacttcataaattcatataattggcctaaccttggcataacaacaattgttgtagatcagatcaacactccttaatctacatcaaacaaatacaagaaattatctttgtacaagtttggtggctgtaaagcaggcagtcttcggccatttctacattgcaacacctcaagcaacaaagacgtttagctcaaatctaaattctttctttccttttttaagtaaagaagataataaatagataagacacacagagcatatgaacatcaacttataatgttaagctacatagaacactgccaagttacatactgatgatcagtatttatttaacattaatcacgtgtccccgagataagttaaatccggggatacgcagaacctgtttagtaaggaacaattgattcaataagttcttggagtggtgcaagctccttcttgtctatcagtccaaattcctgcagacaaaattatagagaaataattagcataaaacaaagagaagaaacttgatacttttattgtattttttaatttttgggagaagaaacttaatacggtatataggttaataaacacatttcaaaaacttcagcatcatttttcattaggtatatccgttccatttccttttagcttttatgtccactggatcctttttgttaagcccctctacttttctgcgtacttttaagcaaaatactacacccctttatactattaaaaggctaagccaattaatttgtcattcagcaaaaaaaaaaatgtcaaaatgaaataagctcatcactaggtgaggccttcttttataatttcatgactgagtaaatatgatttagcagaaaagctaaaatggatggggagagaaaaatgggttttgctttattttttatgttaatgaaaaattgtaggagtataactattgttagagagagagagagagannnnnnnnnnnngagagagagagagagagggagcttacacaggtaaaaagtatgaaatgcttaaagcaagtatttagatgagcctcctccttcagactcacaatcttctgaaagtgagaatgataaatgtgggcatatacacggaatagtcttttaaatattgtcttgacaacttccctgaagttagtgggaaatggtgcacctacaaaaacatttcaaacaggtaattgatatgctatttaaattgatcacagcagtcgcatttcatattaaaacaaaaaccaaaattcaagggcaagaaatgggtagataaacaaataaaactccacaatatttttctttgtcggaaatacaagaacgaacagaaatgtataccaagtttttgaggaaatattgattcatcatcaagttgagattcaatccagtccattaagtattcaacatattttggagccgaaacctcaataggcttcttgatttgtacgccatctgcccatctatactcatacctagggaaatttaatgtgcaaagaggaggaattcaacaatatgataaatacttagaaaaacatcgaaacacttcggcagaataatagtacatcaagaccaacagcataactaatgagaaactcataaccccccctcccccc

SEQ ID NO: 21719 - DNA, 1871 bp, Cannabis sativa
tatatatatatatatactactacaattccatcgtctaataataacttgtcaaataatctttagatcctaacacaaaatttagccttagatcttaatgtttcatgttattattacatatatgtatacatattaatgagttttataaataatgaccatttgcaatataataaaatcatacattaaaatttttgtatatgaaaaattatcactcaatttaattatagaattattatctcctaattatgatatattaaattgtatcgtacaaactttttatatggttaattttttttttaattattgagtaatttattagatttaaagacttttctatctacttttttaataaacacttgacgtgcattaaaatacagagagtatgattttgtatatatatgttaaagtttgaaatacggtttggtacatatcaaaatttagagcacaatttgttacataaacattgttacattagtgaaattaaaaagaaggcagaaatatcttgaattccaacaatctcaataattcgattttttttttttttaatttaatggtctgcaaagtttaaagatataatttagtacatgttaaggggattaaaatcctaattagtaaaatttcagcttttatattctctcaaaggttaagagtatgaaaaaaattaaagtttctcatttttaaatctatagtaattattagaggctatcttttttctctggctagatcagccgattttatttgggcttaagtgtggcttgatcaaagttgtattttgctactacaatttaatttttactattgtgattagtcttatctctgtgacatgattttgagtattttagtcttgtatatgtgacataattttgaatgttttatagtcttgtctctcttcatgatgatttttagtgttttagtcttgtctgcatgacattgctagttttttttttcgttatttgttctttgatggctcgacatcaaatcattgttagtggttggtgataacaagttctttgctactaaagaggttgttaatagtgtaattacgtacctcatacaatagttgagtactactcgaagttgaatgaacctattgcgtacaatttctactgttgtatattgtgaacggtggatgaaacataatatatatggattcttatggttaattaatgctacaatctttttcatttaattttattttaggttttttgtcaaacaatatgagaattagacagctgattatttgactcgtttttctaattctaatcataattgtgtctttaacaggaaagatattctgtttacattgcaaactattaatttagttgatttccattaataatttctatgattttattaaaaaaaatatcttatataaactttattttcaacatttaaattattcaaaaaatttctaaaaataaatgagacatttgttatcactacaatatatattaacttcatatctaatccaaatataattatatattttactactacaatcatcaaataatttgtcaaataacattagatcctaaacacaaaatttagtccctagatcttataatgtttcatagtttattaattaataaccatttgcaataatataaatatatatcttacattaaaatttaagtgaggtatatcatgatgaccatttttaattgtttctaattaatattttaaaatatatgatgcatttttttttcaaaaaataaagcttgatggaaaaatcatatataaaaaacaatgcattttttgaaatttaacaagattaggcttttactaattactatttttaaatataattttgtaatttaaaaaaattatactacgtatatataaggttattgtaacgtccccgcttcaagcctcca

SEQ ID NO: 21720 - DNA, 3644 bp, Cannabis sativa
aggtagtttagctgccaaaatttttgtttttgtggttaagtgttacaaaccgtaaagttcaggtggtttagccaccaatatccctgtgattgagaattatataatatgattgaaagttacattttgtaacttctattatattatcattaattaagtgtgtaaagtgtatttacataacttaatcttttgaaatttaaaactatattgtaaatatagttgttgagaatttaattttattatttataatgtgtataagtgatatagaataaattagaaattatttggaatgctttggagagttatttacaaatattgaaaaatttagtaactagtaactagttattagcttttttagctttatgatttgaacgtttttgacaatgtgaatactttttaacagctctcataaccctcaaattactcatttaatttcatttacacccaattaagagatggtaacaatcattgggtgtagggtgtttaaatttcaaagtatgtaactttaaacactataaatagagaacttagttcattctttgagatatcctattctcttctatctttcaaataccaagctagagagctttgaggcttgataattctcagaaatgtttccgtaaaaccctaagtgtttcatagagggagaaataatctttttagacaaaagtgtaggaaccttgttcaagcttttggtgattcctatctctactttgggtatttattcttttattctttgttctattctctagttttatagtgttctcttcttctcctcttaacactcttatatatatatactatcatataaatatatacatactatatacattcgttaaatataatatatatatatatctttactatgtattatttatattatatatatatatattctatatcatatatgtacactattatatatgttgaaataaatctccacgtgcactgtccatatcagcaaaaacaaagattacaagtataaaacctacaagtggccttcggcctctaacaacttattctgacagatccagaagttagttgcaaagtttattaaaactgttgcaactaattcccacaactaattcccagctctctcaatccatcctaaggctatataaacatgcatactcaacttcaaacacttatcagaacagaaaaatttgagagaaagagacttacagtggttaattcttggagccctaggtttagggctcggagatccaacccaagaaggagacatacacagagaaaggaagaagaaagagttagtaaaatatttagagagagaaaataaacactgtaataaaaatggattatcaattgtacctgtgatttggaatcttgctttgtaactctttgatcttgaaaatctaatagtggaaacgagctttttctaaggcgagctcaaagaggatgtacccagcaacatttaagaacctctataaaatcttggtgcaatctttatattttttttgctagctcctacttttttttgtatctctgtttgtgtatggatctaaggttttattttgatctgggaagggttgattaggatatttgggttgtgagcagtcttcgagtttcttctcaagaaattcgaagttctgctagggtttcgatttgtggattgtgtgtttgtgttaatgacttggttccagagggttctgaggttattggatttgttcaatacgactaggcgttttggttgaagcttgtcgtttaactcattattcaacagagtcaactatgtttttgactcagggtgaaaggtcgattttgaccttgtgtaatagttgattttatttatgttgtgtgtaggttagaaaggtaaaattcctacaataaatacaattttttataatttacatttatttatatctttgagttttgagttgtaacttttttcttttatttttattttgtgctttggtattgtaactctctatttaatctattgtccttgtagtatttttcttaaagttatatttttttttatcctttattcatcttattttattcttccattataatctctcatatatttctaacaatatgtatttttttaatttctcttataaattattccatgaatagaaagagtctaaatggtgggcctaataagaattttagaattttcaatccttccatcctttaataagactatctcttattcataattgtaatcaattaattttttttgtatttttgttaaaccatcaactaatataatagcttatagttttataagagctctaaattattttaagatttcgatttagattctattctgactgacttattaccatgttttataacaaatttcaatgattaataaaattacgatttccattcaggaaaaagattataattttttggtttgataagtttatagttaaaagtaacatattattggtaatttttgtaatagagtctccgaaaggtttttggtagacatcatatctatttcggtatttaagaaaaaaatttagtttaagttttgtcatgattgtgtatgttatagctatttaaaatcatttataaactttgaatttttttttgaataatttacaatgttaaaaataaagttcaaacaattacttacgatgcgtataagagaaaatagtcataagtacggaagaagaaattgtgattagtatatataaccaaattcatatactcacgtaattaagttatgaactcaattttttcttttacaataagtgtacttttttttaagtaatgaaatcttcattaataggcaactgcctgcaaacatagtcatacactaatacaaattggaagtctaggccaccaaaccatacattctcaagagatgatgccattttagcaagatcatgagctagctattgtataagtgtataccttgttagttaaaataaatctcttaattttaaagatatataaagttaatttattgtgtgctttgaaaataattaagttctcccttttaaaaaaatttaaactgtagactttctgtgttaaatttatataattattatttgcataaaatatttttatgtggtattagtagtacttaataccaccttgtaatgaagccttaaaatttacaaatacttactttcaatatcaactttaaccattattaaggatttgttgtctaaattaactttgagagatatatttttttttttatgttagtcgtaattttaatattatagttcatgaattggctagtaagcatacatcatttgtaacttgatttcagggcaagtttaaatttataatattgcattcttgataaaaaaaaaattatgtggaacttaatacttaattatactaatagtaatataaaagtgtattggtgtattttatcatttctctttgtaaaatatcaacaaatattgttattaaatatcagtagtattacgttaaagtgacactttataaatagttattgatattttataataattattaaattaaattatttaaaacttaatacttaattatataaataacactacatggagagattttagcattattcatacctataatataaatttagtagtatgagtgcctaatatctatatacacatttcttcacccatcactttttggcttccaaacacatcatgatgacctttttttttttttttttt

SEQ ID NO: 21721 - DNA, 1424 bp, Cannabis sativa
tattttaaatattttaaatattatgagaaatatgagaaaaaaaattaaaataaaaaaattatatgaaattttcttagaaaaaataaaaaaaatatacatacatgacttagaaaaaattatgcaaatgaaatcaaaataataattgaaattaacataaaataatgtgagaacaaattttaaaaaagatattaagagtaattttaaaaattatttaagtttatattttttttaataatcaggtgtacttatcattttatggggtgtaaatagaactccacttttcttatttgctacaatataatatcatacttatttttatctttgctataatataataacgttcttagttttgtctctccttttactcttatatatcaactttttttttaaaaaaaaaaaactagattaataataatttaaaattaaaaataaacttaatttataacaataaattagaaaagtagaataaaaaatgataaaatagctaacctaatgggaattcaaatttaaaattaattaaaaataataaaaaaaaatattaaacttagttaatgataataaatgagaaaaaatagaataataataagaaaatataaattgaaattcatatttaaaattaaaaaattatagtaaaagctttaaacataattaactaatgattataaattattaaaatgtaataaagcataagaaaaataaataaataaaaagaataataatttgtacaaatttttaataattttcaaataataattaggcacggtaatattatgaacataatattggaaggatttaagaatgaaacactaactataaaatttataaaataaaaagtgttaattttttttttttttttttttgtgataatacaaaaaaatcccctttattttagctaaattttaatttgactttctgttttaataaaccataaaaatggccatttgtttattaaaatggtagaaaaaaatatcactggaaaaaattttagtcaaattttattgatacacatcatttcaaacaccaataattcaataaatagtactctgatacacaatttttattacaagcgtacagtcactacaagaaatgttttgccaaacacaaaaattattactggcaaaagttggtattgcgctgtaaaatagaatttacttgtgatgtgttggcaaaagggggttggcaaattaatgttggtattagaacttttgccagcataaaatgaaaagttttcccagcgcgtaaatgcactggtagagttagattttagccactgcaaatttacgctggaaaatttttgacctctttgccagcgcagtttgcgaaaatgcactggtaaaagttacttttaccaccgcagtagtgaactgtgctggtaaaagtgacatttcttgtagtgagatttgttataacaaagttttaatact

SEQ ID NO: 21722 - DNA, 2750 bp, Cannabis sativa
gtgaagtgattaggtcattcttttttttacaaagaaacaaaaaagaaagaataataacaataattatctcttattcaaaacttttgaattgtacttgtacatcattctaaaagtccttttggaattgcaaaatattgaattgtatttgtaagttgaacatttttctttgacaacatattcccttaccaaaaaatttatgtttgctataacattaggatgagtaagtaatggtcatgtgttctatacattttgacaaaatttaacttaatttgttcaatttgaagactcattatatatatatatatatatatatatagttactgaatttttgtagctaatttacctaacttaactaactatggatgtttgcaagttaaagcaaccaaggagagaagtaaagattaaaaagaaaagaaaatgtgcttgtatctgagaaagcgaaaaggacatggtattatgaattaaattcttggttggtaccgatattctttcatatataatcatgacttttgaccaatctctctctcagtacaggttattgaaatggcctacataaataccttatagattctaataaaaaaaattagagctattatcatgactaaattatgagaatagaaaacagttaaagcatctccaataatctaaataaataatagaaaattaaaatatagctgacctaacaaaaaatatgttttaatgacgtgctaaaaaaatatgtaaaaatttaactcataataaatgttgtgtcaaatttagcttgtattataatcatggtaacaaacgaaactttttcttgcttcagcatctgttacttttgatcattggaagaaaattcaagacaattctattttattatcgtaaaactaggtttgaatcacatcaaaattaatattgatgatgttcttttttatcaggagtgttcatatagttatacgttagtggcacgggataactcagggaagtcaatagaagccaagatatgttttcaacgaggcaattatccaactgaggttgtggaaagtttgggaattaaagaagcccttagttagattaagagtcaaaactagcttaatgtagagattgaaactgatagtttgctttcggttcaggccatccgaagtaactaagtcttgctctccatttttggtttacttattcaggattgccaatttttgttatcttctttacatactgtgcacttacgttttgttagacgatcaataaatcgagtagctcatgctattgttagacattctcgattttcctctagttgtagcatctttgagcataatgcttaggctgattataaagtccttattctgaatgctaatatttcaataaagttaatattttataaatatatatatatatatttatatataaattgatgtaaatacatactatatatataaagccgaagttaatcatttaattcaaaaaatatttttttttatattaaatatgttaaaaataaaattaacagaaattatatttatttattattttttctttactaatttttaaatattttttattgattagtatgaaatattgaattaaaattattttgaagtgaatatgatattgtcgttaaaattatccgtgtaaaatagctacggtctgtggacataacatgcccataatgtatatccaagcaatatctcagagaaagtcttgagaggtgcatgctctttgttttaacacataattatgaaaaaatggcccacaattatatataactaagcaacttttccaaattttaggcttgtgaggcctaatttctcttttgacaataaatattattggaaatttttatagtaaatcctttaaagttaaatgattctttcggtagaatttttatttatttcgacattttaaaaagaaaaaaaaatagtttaattttttttgtatgattgtatatattgtaactctttaagattatttgtaaatttttaaaaaattctaaataatttacagtactgaaatttaggtctaaataattactaactacgagtataagaaaaaattgtcgtgcatgtaataaaatatataaatctcattttcggtattataaattacttaaaatttttaaaaaatttacaaataatcttatataactataacatatacgaccataaaaaaaaattataaaattgttcagtatgtcaaaataaatgtatttaataaattctcaatagttgataaactaatcgatcaaactgattttcatcgttgaagttaattgatatctttgtcaagatccttttgtgctcaaatgaatgatgatatgattttttatcattgaaaatacaatagcaataaaaattgggtgatctttaacaaaggaaacaaaattcgtacttaaagaaaggactaatatatagcttggtataatagatactcttttaaattaacgataagatgattaagaaatgcattgtcattaatcactccattccattttctttgacatggacataaagtttggacaattgtgtcacaacacggcattagtaaggaaagaaaaaaaagctaacgagtaagataatattgtttttcacataatctacatcaaataatatgtgtagcatttatattatacaaaaattctttcataggagtatgcctttttctcatctcactggtaggagtgggactgttcatctaatctaatccgtacttttttggtcaaacaatatccaatctgcattaagtgcggattttattttttggatccaatccaatcc

SEQ ID NO: 21723 - DNA, 2325 bp, Cannabis sativa
  modified_base (38)..(40): a, c, t, g, unknown or other
  modified_base (1930)..(1933): a, c, t, g, unknown or other
ttaggtatttatttacaactgagagttaaacttaggtnnntatgccgcaaattactctatatttaaacatgtatataaattatattatgtataatgaaaactatttttaataaaatctcaatcaggttggttaagttagttcaagtttattggacaagttaattgtatttttaactcgttgggcaggttataatttcgtcagttttttgactttgtattttttattaaattttttgatttggtttgagtgatttacaaaattttatgtacaatttaattgagcatagcatgacaagcttaaatgtataacacttaaataagaatcaactaacctaaaaatacatgttaaaaagctcaataatttaacgttaacaaaaataataaatatttgtttgtttagaaatatgatatgcaactcaacatgatacgaagatatcaatcctacaaattatcatataagagtttggtacaactagatatgattcttacttttatatgagttgggataataaaaaatactaaaaaatattagtggtatctaatatattcaaatatgttatattactattgttacaattaaatatttttaattgagtcttatataatttaatatattaatttttataaaacatcactaaccaagtgcaatcccttataacaataatagggcacaaaatccaaaccgtatggagtagaatttgatcccaaactatcaatttgacccaactaatggtaattagtgaattagcctaatgtgtaaagtataagattaattacagtactctttaatctattttatatagaaaagtacaggatggaaagataatatagcaattaatataatccataagaactaaaattgtatttgtgtatttataatatgagtattagttaattttaagatgatgtggaatgtatatataagcaatatttggggtaggttccattaaaaaaatcccaattaagactctaccacctcacctccactccaaatatgaccttgttttgtttcttttaattttctacattttgttgttcagagtttcatccacatgatatgattaagctatagagagacgctttctaattcaatgtatcttctgcaattgatttgacacactgcatatctatttgtctctttctttttctttattaattcttttattctctatcatcattcaacaatataatatatccttctttttttttttttgaagaaatatatccttttttaaattaggacaatttaattatttattttttaaatttgaaagttctatcatttaattttgttacaattttttttttctaggaattaaagttgaatataattcaccccctcaactatatagtttaattatttgaaattgggcatataagttagagaaataaaataaaatgaaagtgcataataatgataatgttaactttatagggtgtgaagtgggacttgctgttatcataaagaagaagtccctatatttatccttatagtcattaattcaggaattaataatattatcttttgacaatgttctttaatagactgaattttagtcattttttaatatttaaaacgagaatcatagttttgaaaattttcaaaaacaaaatctaaatccctttgaaaatttatgggccttttttagaaaaatactaaattttgaggtaaggtttacaattataagataactgatatattaattataagagtatagttattaaatatttgaaaattctttatccatatagagaatgtgtaatcttgtaaggatgtacaagagaattaagattatacgatatgaataaaataagttggtagtgtgttaaaattctgagaatctttaatatgaaactgttaagtacaatttactatacactatacttccagtgtgtgtgattttgattcggatcacatatgtagatggannnntagtaaaggtactgtgtataattagattattcatgacagggccgatatgtaataaatatctttcattaacttgtcgtttaccatgaaatgagtttatcatatcacaataatgatcattagtagatcagcctgaatcatgagtatatatgaattcatgtttgtgttcattgagttctttgattcactcgttaaagtttctcagaaaatatgattcttacaacttatgttttgggagcttaataacatgagtggctggaaacatattatacaacagtggaatccaagccatcctaaatgatcaaatattaattcccttatagtgttaattttgggagtgctaacaattggatctaaatctataataagttatagattaactgttcacattgaat

SEQ ID NO: 21724 - DNA, 3778 bp, Cannabis sativa
  modified_base (1500)..(1503): a, c, t, g, unknown or other
tttatgcaactttagtcttccctcatagaagctgaagtctgcctcataaaaatttgacctgactcttgcatgcacgtagttttctgtgcgtgaaagatcactaggggtaccacacgcctttaaccctccttcctggaagagaaggactacttgtagtttgtcacacacccagtggttacttgtagtctgtcacacacatcgtggtgttttagcctttggccttttaaagtgaagtcatcgtttgaattttgaagcaactatagccttccctggcggaagccgaagtatggctcataaacattcgatatgtctcttgcatgcacttagctttttttctgtgtgaaagatcactaggggtacgatatgtcttcaaccctccttcctggaatagaaggactacttgaagtctatcaccctcctagtgaagtttcaccctttgttatgttaaagcaaagtcatcgcttaaatttgtatgcaactttagccttctctcacggatgctgaagtttgcctcataaaaatttgccaagacactcggaagcaagttgtttttcgtgtgtgaagtatcactgagggtatgacacgccttcaaccctccttcctggaagagaaggattgattgaagtttgtcatccacatagtgatgtttcaccctttggtcttttaaagcgaagtcatagcttgaatttttatgcaactttagccttccctcgtggaagccaaagtctgccttttaaaaattcgacatgactctcgcttgcacgtagttttttgagtgtgaaggatgacaagggatacgacacgtctctaactctcctttctggaaaggaaggactacttgtagtctgtcacatgcccagtgatgttttacccttttgtcttttaaagcaaagtcattgcttgaattttaattcaactacaaccttcccttacggaagccaaagtctgccacataaaaaattgacatgactcccgcatgcacataagttttcgtgcgtgaagggtcactggggatacaacatgtcttcaaacctccttcctagaagggaaggactacttgacgtctgtcacaagcccagtgatgtttcacccattggtgttttaaagcgaagtcatcacttgaattgtttttgcaactgtggccttccctcgcggaagtggaagtctacctaataaaaatttgacatgactcttgcatgcacatagtttttcatgcctgagagatcatcggggtttagacacgtttttaaccctccatctcagaagagaaggactgcttgaagtctttcacccgcctagtgatgattcaccctttcatcttttaaagaaaagtcatcgtttgaatttttatacaacttttttcttccctcacagaagctgatgtctgccacataaaattttgacatgactctcatatgcacgtagttttttgtgcgtgaaagatcactgggggtacaacacactttcaaccctccttcccggaagagaaggactgcttgnnnnctgtcacacacccagtgatgtttccccctttggtctttgaaagcaaagtcatcgcttgaatttttatgcatctcttgccttccctagcggaagtcgaagtctccctcataaaaattctacatgactctttcatgcacgtagtttttcgtgcgtgaaagatcactaggggtatgaagcatttcaaccctccttcccgaaagagaaggactgcttaaagtctgtcacacaaacagtggtgtttcaccatttggtgttttaaagcaaagtcatcgtttgaatttttatgccattgtagccttccctcgcagaagctgaactatgccccacaaaaatttgacaagactcttgcatgcacgtagtttattttgtgtgaaagatgactgggggtacgacacatcttcaaacctccttcccaaaagggaaggactgcttgaagtttgtcacacgccaaggatgtttcaccctttggtatattaaagcgaagtcttctctgaaatttttatgcaactttagccttccctcaaggaagtcgaagttatcctcataaaaatttgacatgactcttgcatgcacagttttttgtgcatgaaagatcactgggagtaagacatgtcttcaaccctccttctcagaagagaaggattgcttaatgtatgtcacacgccgagtgatgtttcaccatttggccttttaaagtgaagtcattacttgaatttttatgcaactttagccttccctcgcagaagctgaagtgtgcctcctaaaaattttacatgactcttgcatgcatgtagtttttcgtgcatgaaagatcactaggggtacgacgcgtcttcaaccttcctttccatgaaaaaggactgcttgaagtctgtcccacacccaatggtatttcaccctttggtcttttaaagcaaagtcatcacttgaatttttatgcaactatagccttccctagcgaatgctgaagtctgccttataaaaactcaacaagactctcgcatgcatgtagttttttctacgtgaaatatgattgggggtatgactcatcgtcaaccttccttcctaaaagagaaggactgctcaaagtctgtgacacgccaagtgatgttttaccctttagtcttgtaaagctaagtgatcgcttgaatttttatggaactttagcgttcccttgcggaaactaatgtttgccactttaaaattctatgtgactcttttatatcaaagtagaccctagcatggagcgattgctcaagtgatggtgcagttttagctttcctcacaagaaaccaaaagcctaccattccatgaaagctccttcctccaccatgaggtcttcatcatggaaaaggatcacatacataacttgtggatggaaatacctcttggaagaccagcgtcacttcaaccctccctcttttagggatgaaccactcaaagtcttccatccaacatggtttctacctataattcaagaaataaatctttggcttaaacatttagtccaagaacaaatttccgccatggaaatcaagagatcattgcaaaatttagccaatcctctctcaaactttgggaaaaccccctccaagtggtaatggaaggaaaagatatggtctgggtgattagcttaaattatgcccccagagcaagggttggctaaaaaacacacacccagacctcctcctagggacaaagaaatggtacaggttggattttcagcaaatgactgagagtttagaggagttccaaatctctcagctcatttgggggtatggtatgtccaattgtcgatgactacaattctgacactcatttggcaaagttattagctcgacatgcatatgcaaccgaaagcaagaaacattttcaaccaagtttccctaagggaaacacgcttgaattcttttcttcaaaaactaaacttagtgtaaatctagagatgagatgcgtatttggccaaaattcttgaaaagaaaaatttacctgaatcccttctttccgatctcaatagatttcctaaagtttagttttataggttttacaattagctagaaattcatgctggcaaggatcaaaataagacaaatgcctaaagtctaggacagttgcgggcgttactcctagaaccaaacttcgtaaagaagctaaagcctcaaagatgtattaaaaagcgaaggttcccttctgcaaaaaaaaaaaaaaaaccatttctaggcagggacttagtgagcagtcctcccaagtaggaaattagttagcgggaagaagc

SEQ ID NO: 21725 - DNA, 5723 bp, Cannabis sativa
tgatagaattctcatacaataacaactatcagagtactatagggatggctctctacgagatgttatatggtaggaagtgtagatctccaattcactgggatgaaactagagaaaggaaatattaaggtcctgaatcggtacaacagaccaacaagactataggaaagatcaaggccagaacgcttgcctctcagagtaggcaaaagagctgtgcagatccgaaacgcagaaatgtagaatttcaggtaggagatcatgtattcctatgagtatctccgttaaaggggattaaacgtttcaggaaaaggggcaagttatgccctaggtttacaaggccttatgctttatttctcctctcaattgggttgtacgatccgataagctctgaatggagttgtccatcctgccattgcctatcaccgacgactaaggcgactcttcagctgttggtcgtcaccacctcctccaactgcttccatggtggtcgaaccatatgcatgtatatacagttaataaaaaaatatatacatataaagttttttattagtatttttattttattaattaattaatttgattagttattaagttttaaaaataagttttgagatattttgatattttattttattttttaaatatgcattatcttattttgatttgttaaaatatcatattttttattattattttattttatatatatatttttttttaaaaaaataaatatgtatttttcaatatatattatatatatgtatatattgtataaaataatatttttttaaaaaaatatgttagtttgtcatattttttttaatataattaaataataattatttgaaaaattattattaacatagactttatactttttaaaataatgaaaataagactatgagctcaattttcaacaattttattatttaatataattaactttaagataatttttaacacgaacagatacagaaaatgtaatcagttttgttacaacatttgtatatcagattatttattattaagttttattttcacaaaaaatctgtttatggttttatttgtacaattttgaaaaatacatgatctattttattatttaataaaacagagagtccaattaataattttcacaaaactcaagatgcaaaatgatatttagccacgtagataacaatagtgatatatttaaacaactcatcaatattttccaacggctagtaaactgaaacaatgtcccaactccaatttgatttatttaattggtcagctaatcaaattgtaaaagttttaataaataaaatgtatgaaaaaaatcacacaaaccaagatatgaaagagtatgtgactgtaaatgattaatgaataaaatggtccgtgccgtcgaaggtgttattataataaattctgtattactatatataattatggcttaattttcttactctctatttaattttatgagctgacaaactcattcctctgcttccttaatttctcttcttatacaaatctcacctattcactattcactattcacactgggattctctcgttttcccaagtacccattctgactgtaactcagaaaataataatggcaataataatattaataatttgatggtgtcattttcaatgaaaacacatcattatttcaatttttatttttggggagaattaagaaacgacaatggcatagtagagtgagacatgcaccgtgtttgaataaagaaaataaaaacaaaaacagtgtgttgttgtggggacacacttacctgaattggaagtgattggttcactatatatattatgaaaataataagttaaaaatcacctaccatttactgctttacatgttgtcaaaaaaaaaaaaaaagcactgcttcacatgttttacttttttttttttttgaaatacattcggttagataaaaaactagacctgtcattacaaaagaaactccatgttttactttgatgtaacaaataaagaaactccaaattttagaaacttggtaggaaaagttggaaggccaaaaatgtatatataaatctcaatcatgcagatttctacaaccatttatgaaaaacattgccttttgcgacagttcattgcgtatatttgtattgtctctttaaaaaaaatctacatttttagctgttcaaattaattcatataatgctgtttaaggagaagggacaaatattttgatttttgaatttgaaaactagaagaaaaaacttttaatatgtatagttggtgatacttaaaaataataataataaaggtacattttttgaacagatgagtggattagggttgttgaattttgaatgtttaatgaagaaaaattaattaaaaattccaacatgtgtatataaatatgccataaaatcatgtgtataagtgtctttttacttaaactttcacataattatatggaactttaaatgttctggcaatttgagtctcgtagtttcacgattttaccgttgtagagtagtagagtagaaaaaggataggattattattttaaagaatgatactattacaaaattaatcaaccacctccctcaagttccaatactatagtatattgtagcacttctctatggatatattttggacatagaagaatccaaggatagtcaatgacattaaatgcaaactaaaggttcttagcggaaaaaaaaaaaaaaaaaactaaaggactgttttgtcgtatatggttggttcgattagtttgtcatctcaaaatgatcataagagcactcatagcttcactctactttattgtttaaaatattcaccaaattacattttttattttatctcatacatttagctcaccccataacttttctatatcatttaaaaattatttattataaaatattatattcaattttttaaaaaataaataaattacatattattatcggaagaaaataaacaacaccacaatcgaatatttgagatgaacaaaatcactcacttacagaattacaagtagacatctagagtggcaaatactcaaaatgaaataacaaataactaagccaaaacaatatatatataaagaaagacacaaaagtatagtggtgcaatcacagcttggtatgcttagtccacttttataagagatttgattattcttatttttagttagatcactcatttatatatgaagtaagtgattatttgaattacaatactggtcagacaagactgttacaatattaattacatttattaagctagaaaacttttacaaaataaatgagagaacaatatcgattgttcttagttaatatctaaacgtatgcgtttttggaagttacatattgatggttcactttcttaagtaacatatgaacttggaggttctatagtgttactcgtatataaagtctttggtgttggattaaaatctctaatgtgagctcatatgtatttatgaatcaacaaaggtattctttaaatctatggttatacacgtataattatatgtaatatatttatttatgaaattgaatcttgatattgcatattttgtgagtgttaaaaaattctaacaagtggtatcaagagctacctttcattgattttttgagaatttaaagttatgttaaagagatttaggaatttttacaaatcttaattaaattagggttatgatctttcttaaaattttggcttgaagtatatatgttatggtgtcggttgtgattctttagttttttctctactcaaaattaaggttcaagatattgatttgttaattttttggaaacattttttttttatttggatcaagtttggggcttcccttttctatctttctatttaataggctgtaacttataataggtctgattcaattgttatattaaggattattagctatgtgaaaggttcaatctatttagttatggtaaagcatattcgtatatattctatgtactgctcgatttcaatgaaggcatattatactgtaatatatgcaaattcatataagtgtactttttttttttttttgtggatctcgtattgtcagtggcattatataagatgatcttgatagtgttcttgtgttatttaattcttggcaaatttatatatataaatacaaggattttagattagtgcatttgggattatttatagcttttatgtatatatgagtatcgattttatgttatatggtgaattatatacacattacgaccaaagaatatataattttgaaatttttttgttcaaatttagcataaggtttgtctttcattgttaatgagttcgttgaaataagatatcgccaaagcaacttctcttgcgtaaattgctcatgtgaaatgttagaggtttgtatatgtgtttctcatgtaagtattgatcggcctaaagggaggttatacttattttaagtcacacatacctgtgatgataaatgtgtgataattataagattttcatgtgagcaatatgtacagtctaaagattgacaaattgtttgacaaaatttattgttaaatatttgattgctacaacaagagtactgctttacatttaatattattgtccaaagacttgaaattaacggtgtgcttggtatcttgagatgagattcgccattatttgaacttattgtgttatatggatccttttgtgaacaatatttattttgttctctttttaaattcatgttttcatttatatctaccaacataaaatttattctcatgctaaataggcaaaattttaactaaaggaaagaggcaagcatgcttctttagctaccttatttaaataagggataaggatacggataaaactcagaatgttgcatatggaacactactaaagaaaagaggcaagcatgttttaagtatgtcattaggcatatcgaaggaaaatgagttttcggtttgttttgtaaatgatttaatttattgtacctaaatatacttagtaagtaaaattttgtgacattccttatgtaagtataactatggaaggttatctgtgaaactaaaagtcaagtgatgatgaaagattcatctttcggggcaataggaaaacaactacagttgaggctataatgatattcaaactatagttaaaaaaactagttattttttgattttggaaagacttatacagtatcatcatctagatgattttttggttttgaattctatattgaataaattaggtcattctcgttcatttataatttgaaagtcttttctaatattggttctactagttctttaatttatatatttattgaaatttgcctcatataaagaaaccttgtaatttttcttatggtatgaaacataaatttaatcatgagaattctattatactttggtataagtattaaggttatatctcccaaagaagaatagaaaaattatttttgatggaatttttaaccccttgatttaataaaatttagattttgtaaaggggtaacaaacaaacataaaaaaaaaaccaagtgacaaaataaagtttcattgtctaagaatttatgctatatttaggtagatctttcctcatagtttcatgaaatgatcaataatagtatcttgtctttagactaatgaaatttattttattcataagggcattaatcttcagatgtagtttcttttaaattttcaaaaccatagttgacaaatatattagaatatttctaattaaggaaata

SEQ ID NO: 21726 - DNA, 3339 bp, Cannabis sativa
  modified_base (1762)..(1767): a, c, t, g, unknown or other
caaattaaatgtgattaaaataaagattttgattcaccaaataatttctttctgaattaattgttaaaatatatattctgaccattaatatacttatggcgcatctcatctatatagggtctcggtccctgagcttactactcattctctgcaaactaaaaaatccatctaaaatagagtagagagagcttggaagcccggatactcacactaactagtttctttttcttttgtagatccgaagttcgcgtgggattgaaactcaaaagatcaatggctagaggtatttcgatctctttcgtcgtatttgtatatgatcgattttctttatttgtttgtattataaatcgagcatatatactttatattgttcatatattaatgtcttatataattgtgatcttgcaatctttttgtttgactttattttagttttttattaaaacaattcaagaattaggtagccgattagttggtttgtttttacgattctaatcctagttgtatttccaacgggggagatatcctgattggactgcaaattgctattaaaagaactgcatttcaaaaaaaaaaagttaaatatttctttcaaaactttattttggtaatcaaaagcatcaaaatataactttaattgtaatccaaaatcaatatataaaatcgatgggtttgttttgatggaaaagtgatagtttcggtatgtgcttaaataattattaaaaaagacaaaacagagatgatgaataagaaatgagattataatcacaaataactttattaataaagactacacatggtgttccaccatagataataggtcattgaatcaattataaacaacaaacaaatgaaagaaatgaatgaataaaatgtgatcatgagttaattgaaagcagtgcaaagccttcgaatttcaccgtcactgccagttttgacaccaatgttgctcatcttgaccatagattttccaaactcaacattgaagttcaagctcctcaatcctctctcccccaagaaccgttggacgaagggcttggtggaaggatcagtccacagcttctgatccgactcaactactccacgaccatttctcaagtttctgaagaaagtagcatcaaaattggctgcgctgcccgtgtccatatcaacccgcttggccccatcgccgttgtccgggcaaagagctctgagttgaggaaggaaagaagggttgattgtgggatcggcgccgtttccggtggtggtgaagttgtagagtctgtatctgaagagttggcatgcagtggtgccaatggtgtgtccaccaactagggtgaccaaatcttgagtgttgagccccttggctaaaaacttgcctttctgtaaatcaatggactccctaaatccgggcaagttgttagtgtcgcttgctgatgaaacgagcccatctctacgcccagtaggcactttccagctgaagccttttgtctgtaacaaaattaagcataacattatcaaatcatgttattatttttttccaaacattttggaaactagaaataacataatatgagcaatattcagtacaaaaaactgctacttttaatgacaattttttagtcacaaaatgaaaaatttaggattaaatgtgacttttagtcaaaaaaaaaaaaaaattatttgtgacaaaaatataccatttagacctaagttgtcactaatttagttttagtcacaacaagtattgtgactaaaaattagtcacaacaaattataattnnnnnnactaatacttttagtcacggaccttttaatcacaacatataggaataataatttataattagtgacaatttttttacttttagttacaagttttgttgtgactaaaagtaaaattttttatagtgattatggcacattataaagagaaaaatgctaatgaggatccatggtgtgccacctgtatgagctatcaattttatattttgtcctatttatttaataatgattgtaaaaaacggctaattatttatacaacctcatcttctcataagggtgttagggactacgatggcttataacaatgcttcattaatatatgaaagttctaatattgtattttgtattgatgtgatgtgcttaccaagacgacagagtcacgagcagcgagagctagaatatcagcacaagaaacgacaccagggcatgcagcttcaacttgttgcttagcatcgtctatgacattgtagccaggtattccactattgggtggagcagtcttttcagttgctgcaccctcgataaggattgaaccgtcacagccatggacaaagcagtcgtggaaatgcattctcaagattcctggagctattcgaggattggatttaaaatgagtctccatggttgatctaacaatggactctactttggggcatgttcttgagtagaacccaactctagtgccctgcccattcactaacgtcccaactaaaccaagtgacattataaacaaaatcaacatgactttactataatggcccttcatcttgcgaatattatatagatgtaattgtatgatataattggaaggattttgagatgttaatgctgtattttttagctagttattagtttggtttgtggatattatgggttgaggatatcaaagattatatataagacatgggtttgaaggtcaaaggcttttaaagctggtcaactagaggaggtaagaatgaaaagtcaaaaaagccggccttaaggtcaaatgctcaaagcttggaactgatcaataaaagaggtatatatatatatgtagagtgtaagtaggtatatatagctggaatctgcagtgtacgtgtactgtttgattgaatcaaaactggtggattccattccattaatgcttttgcaatttgcatggttatgtacgtagtttgcgcgtttggtcagaaatattagcccaattattatcattagtagtactatttattattatcttttgatttttattatcgtttggtgcttataattagttaaaaggccctcaacagagaaggaagaaggatataactgtatattgatgattatattgtatataaaagaatagcaggccaaacgccagaaacaaccaattaataaagttgaaaagtaaaacaaacaaatagagaagaagaagataatcttctgaacaaaaaaccagaagaattagtcgaattatgtacaattgtacgcgtatgtgtgtcatttcttcaacatataattaatatacaattaataatgtgtgacaaaaagtgaaaatatagaagtaaaatgtatcatatacataataatattgaccgtttcatttgtaaa

SEQ ID NO: 21727 - DNA, 2496 bp, Cannabis sativa
gggagactttagaaatatctttatgaaggatagcgagttcgaccaagattccctcgttcaaggcacttttcgagactattattgcttgttttttttgctccaagcgagcctaagatcaccatgtttggcgttgagtttttgtctcgaatcaacatgagggtctttgcggtttttcccccttctctcccccgactcttggtgcatggatacgctttttcggtatccccggtcttgagggatcattttcctttgggaacctgcccctctgtggaccttttcccttagggagatcagagtaaactttccgcgaatcctgagcctttttgttcttttcaggaatggttgtggggtccacttttggggagccttctgaagggtaccaaatagggcttggctctcaatttgtgtgccttggattatttggtggtggagactcctctcttgttttttctgacccaatgggtccagcatttggatgcctgctatttccatagctttttgcatggtgaccattatatcttgtatcctcatattctactccttttgctctgccaactcggcttcatggttaatggctttctgtcttaacgccatgagttcgatgcaactaccatcatcatacacgttgtactcctcttagttttggtcgtattccatatcattagttttgtcttgttcttttgcttctgtgtctacttgcgaagccatttcttctttgtctggccccttagggccttgagatggacatggttgacgcgcaaagtttctagtttccaccattgtaatgagaatttacttttgatattcttcttacgtaaggtcttctacaactctcaatgaaagcaccaaaatgttgatcgagaattttgaaaactaattaatgaaagttattttaatgattagaagagattagatgcaaatttttttacatggttggggtataaatgagccttagtccacaagtcactggtatttaatgtagtagtttttcttacaaggatgtgttacaccatttttctaacccctttctcagaatatggttggggtatttatagcttcatatagaaagtcaaaagatctctattgtcgcaagtgtttgaagcatggattgcacaagtttctaggttcgaataatagagtatatatgtctgcacagtaggttacataggttttagctaggtgtcaggtaagataaacccttaacctttcttgattgatgtgataattcattatgcagctgtcataaatctcatagattagagtgtaatcgctaaagattgggtttaattaatgcctctgacacgtcttttcagatccattcgcaaacgcttcctctataccgcatttaatgcactcatataagtcatgtccgagacttaatgaccgaccatggaggccttgcatagctcgtgaagatgaacaaaataccttggcatcaggatgcagttgaagctctctaagggacatcccagagatgaccatccaatctagataagttatcttaatatttatcttaagtgcttcctaaattgcttatgtgtacactcttgtacacatgtcacatttatattggtatacctaatatgattatttcaaaattataaaaaatattttccaattaataaaaaattaaaaaataattattttttcttttattctttgtttttttttttttcatttcatcaacttttttttcagtttctatattacttaattcttcatcttcttcacactactccaccaccaatcactattgaaaccaccatccaccacccatctcaatcatatacagcaagaaaaaaaagttaaacaaaatttgaatttttcacaaaaatcaaacccaaatatcacaaatctgaaacacaaatatcaacatccacaaatttaagctccccctttttagatttgagtttttcatgcaccatcatgtttgtatcaaaacgataagaggagttggctccatcaaccattaaaatcgacgagcaaggtcacccaccgagctgcacttagagcccaccaaccagagattccagatctgtaactcgacccacaccatcgagcacaaatacttcccctcatggatcagacacacactagcaaccaccgtgtattcaacggacaacaaagatctcaaatctgagatctccataaccctaaatacaaagaccgtttgagggagaccatctatgagttgcacatttcgacaagactctaaatgcacggccaaacttcgatgacgaccatggatgccaaacgcacggccaaatgctgacgacgattccttagtcgtacagctgttcacggtgcggctggtgtagtttttgaccatttttttcaaaccaacccgcacatgtgattttctttaattttccaaaccgcacccacaccgcaaaacttaaaaccacagaaaccacaccgcaaaaaatagtgcggtgcgatttttgcaatttttacgatttagactatcaccaaataattaaactatcacaaatataa

SEQ ID NO: 21728 - DNA, 4918 bp, Cannabis sativa
atgaatagcattatttaaatttttaaagtttattatttaaatttattaattaattacaattatcaatttaaattttatttattagagctagggttactcaatctctcaatcgaccttattgcgtttttctcctctgtcactaactcatcagctgaaacactatcaacctccttcaccagctaatcacagaagaagaattcctcattaccacctgcgcttctctcacaggtacgcttttattctttaaacgctcagagttgagatgaggactatcagtacccttctgaaaaagatgattatatgttatttaattataagataaactcatggggatgatatatttggtggtttaggggtctttgagaatggcagaggaaatcgaggaggttcagaaaacatttaaagagttggggatatgtgatcaattggctgacgcttgtgataaattgggttggaaaaacccttcgaagatacaggctgaagcaattcctcatgcacttgatggtttgctctctaactttgttaaaatttgagtaaagggcaataatcgttatgtgaaatctagccaattattgggccagtttctgcattgcgtgattgtttttttgtacatatattgtatttttaatgttattagttcactaaatatacttggagtagatggcataaaatagtgtctaaacttatctttactttaactataataaattcttttagcctatgttaatttgttgttcttggctgagtagtacatttgatgcgagattttgattaatttataatttgaagacatttatgtatacagaaaaattgttgggctataacattttggttgcttaatttgaatttacaggtaaggatctaattggacttgcacaaacgggttctggtaaaactggagcctttgcccttcccatattgcaagcccttttagagaatccacaatcgttctttgcttgtgtgatgtctccaacaaggttagttttcgtgtagtgaataatattgttgagtggtaattgttatatctcatgtaaggttttgattttatctgcatttgttatatcttattccagggagcttgctattcagatttctgagcagtttgaagcattaggatccgaaattggtgttaagtgtgcagtggtgagcatttcagacatactagtttgcttgatagttattctcgcatacgatgtttctatatttgaatggtgctttattatgcgtcatgtgaaactgataattaagatttctgataagtttgaaggttactgttgttttattgtttggaaagcttttccagaaacatagattctactgtttgttttgaatttcacagatttaaatttttagaaattgtaaagtaaaagtatatttgctaagctgcattcgttttattttcttcaaatggtgacttttttatcctttctctcttttggttaaattcttttgcaatgaattcctcaatgtttcttttcttagcctttgcaatagtagatactttttccctcatctcatctctaacaattagagagattttattttctcttgtttggattgtgaagattaaggagttgaatatatctatatcattggcaaactttaagtctataaccaatctttagcaaggctttaaattataataaaagattgatattgtagaaaactttaaaagcagacattatgaaaagttaggaaaatgttctctcttttttcccctaaaaaataattagttcaaataaagcctaaagaatctgagctaagatgctgaggtgactgaatggaaatttcttgtcttgtttatttactgtattagcttattatctttacataattttctgtagcttgttggaggagtagacatgatgcaacagtctatcaatcttgcgaagcggccacatatcattgtaagtgttgaatcaagactcatagtgctgtcaaatatgcaatgtgttcactatttaagaatgtggctgtgctggaatatgttactatttgttctttcctaaaatttatcgtgtcgtaaaataatgatatgaaaattttgtgcatggaatgaaagatgttctatttttttgttcttttggtttttttttcctgttttaacctatacagtaaatcaagcaaaaagtgtttttttttttcgtataattgactggtatatttgtaatgatgtgatcatgtgagttatttttttttttttatttttagtgctgagattttgaaactgccctttagtaacatataaactgtatgaattgttgtaataaatgaatatctattttagtatatcaatgaaatttcttcaaagaaaaaaaatgaaggatgtatcatatgatctttattattatttttctgaatagatcatatgatatttattaatgttgagaatattgtaaagtgatgattacattgtagatgcaggtttatttgactgatgggattaaaaggattatatttagtggcaattgacctttgataccagttgcttaatttattattcaacacgtttttgatattccaaatttctattttttgggtaggttggaacacctggtcgcctgatggatcatttaaccaacacaaagggtttttctcttcggatgctgaaatttctggtattttttaaatttgaatttgttttgtttatattccgatggtttttgcagtcattataattttttcgccatttagaaaactagttgatcatttttttgactgaggaatcatggtcacggtctcatgggttggctgcattctatagcgtatcattgctgctatttgggcatctgtgtaaatgttgattttaaaactctttaagctgttcataattttggtttgcactttatacaggttttggatgaggcagataggttgctgaatgaggattttgaaaaatcacttgatgaaattctcaatgttatccctcgtgatcggagaacgtatttattttctgctaccatgaccaaaaaggtgattaatatttatatttatataaagtattcacagatgcatgtatcatatgatggtgcatattttcaatagtaatgaactttgaatatcttctgcaatgcagcagttgaatgttttgtggcttgtttctcattcttcttaaaatttggttacaatctgtatgcacttcacatgtgaattttttaaagtgaatgtgcatgtgtcccattcctgctaatcatagcctgaacactttgtattgctggataatggtaatttttgtgatatcaattgcttcttgaaagtttttttggttgatttgtggctgtttagtctttaattgtgaaaatatttgacctgatttaacatgttatactataatagcaattttctattgttcactgttgggtgatagtctagataggagttgcaattttctgaacttatatgacttgatctactctgcaataagatcctcttacattgatcaaattatgcttgtaatataatccaggtcaagaagctgcaaagggcttgtctaaggaaccctgtgaaggtgaaaaaagaacttcatattctaaatttgttatcaataatacttctcctgacttggagtgaaactgattactggttttatgatatctcagattgaagcagcatctaagtactccacagttgacacgctaaaacagctttattgcttcgtgcctgctaaatacaaggtttttcactttcttcatgttttctgtttcataaatctattaaacttggcatgtttactaaagtgtaacgggaatcaaatatgtgataacaattcccattcacttatttactattaataagtaacgagaatattttgtgagacccacctaaattatgggtaaatgaacgttctctccttccattttgttgagggatgatatctttgttttattttaatttttaataattaaaatttaaaagacaaatttatccagaaaaaatctctttcatccaataaaaatcttaacattttttttagaaagaacaatttagtcaaattaaagcattttgattgcttagttgtgtaaacaacatgataaaataataattctggttattttatattttatttccatttatttttcctgttgatttattctaattatgtttagtaaacgggctaagcctaatttacttgtgtattaaatcatattccgtctgcaacaggattgctatctagtttatattcttactgcaagatccgaatctacatcaatggttttcactcgtacatgtgatgcaacccgtttcctagcattggttctttcaaatcttggcctaaaggctataccaattagcggtcatatgacccaggtatacatatatttaccagaaaacccttttttgacactagtttaaatattcaatcacttttttattggaattttcctgacaggcaaaaagactgggttctttaaatttattcaagtctggacaatataatatacttgtgtgcactgatgtggcaagtcggggactcgatatcccagctgtagatatggtcattaattatgatatcccatcaaactccaaggtcagtggtattgctgttagctgtcctagaacatatatcagtatgtaaaatttgcgtccatccacaattctggcctaacagagtctacaatgacctatatgttattgacttatgctactgagttttttttttttgctttatcttgcttgtttattattcatcaatatcaataacttctctctaagactgactatgtcaaaatgccgtactgagtgacgtttttccttcacgtgtattacttggtgttcactaattttcttagaagctccatatgatattctaatgagtctatgatatcagcttttttctcttgcatgcaatgcaatacaatcattcattgctgttgttggtggaattcttgcatgttttcttgttatttttctggtttac

SEQ ID NO: 21729 - DNA, 1643 bp, Cannabis sativa
ccaaagataagaaactcaaaataaaacaggtctgaaaattcaaaaaagttctctcataatcttttttgatgattcataatatgacataattaagtttagcggaagacagaaatttcaaagttaatacagaactgtacctggatatcattgtcatttaaaatgctgaccaaatatccctggttttgcagaaactgtcaaaaaggaaaagaaaaaacactcagcattatctcttaccacccaagaaagaggaaagattgtgaaacgaaaaagttgaaaaacacacacacaagcattgaaatacatgaacatgtatgtgcatgcacaaacatgattatatacacacaggcacatgcaagggacatacatattcacacagtccttaaaatttcatttttataaggtattcaaaaatattacacaaagtatatccaaaaagaaaaaagaaatatgccacaaagaaacaatttcagcacaatagttaagatttaagaaacacacctcgatatttttgaaaggtaattgctttggggatataagaagtccttcaatgccatcaccaccgatcacttttatccttccatccctgcctccaccaaacaaataaagaaatgaggtgatcatatctcacagattccaattcccaccaaccaatttagttcaggggcgcctggaaaccacctaatccttgtctaagctagtgatcactagaataatgtcacttcacctaatatgctcctaaagagaaactcaccccaatttatcattgagtggaaagtgtgaaaccccatcttaacatttttcatataagaaagaacaaaagtacagttaacataactacaaagttcggtgtcatcaaaatgaaatgcacaggaaacaattgtgaaaggtatattagtattttctcagctgtttttcttcattttagtctctctttattttttcctacttcaaatatcttttgaaacaggccataatcatatcctagattcttgctagtagctcacatattgatcaaaacaatgtcaatatcaactcacagtgttccaatggctaaaattcgctgaatggggtcgaaagcaagaagagaagaggtagaaggaatgccatagtgaactgaaatccgcaggtccaagtccgtttcggtcaaattaccctgtttcaagttctgctgaaatcaaatcaaatcaacacaaaaccgaatgaacttcactccattttcccaaaatagattgaaaaccaagcaaatatgttaattcaaatcgaacagtaccccgattctcaagacttcaacaatacaatcaatttaaaaacaataaaaaaaattaaaacaatccaaaaagaaacatatgtagatatattaaacctaaagcaagtccaatctccgttcccgatgtaatggaacattttgtggagggagaagaagaagaaatagagaataatggaatccaatgagtaaagtacctgagaattgtgagcaactttgtgtaagagacgcttggcaaacatggcgaatcaggtgagctctcagagattggaacaagtttgaagctttctttctttctatctttgtttcagtgatgatcattacgatgcattttgcacagaatatttcaaaccacaccaaagagctacaattttttaaa

SEQ ID NO: 21730 - DNA, 2533 bp, Cannabis sativa
ttgcacatattttgtaattaattaaaataatgtatacaaaattgtaaaatgcccatttaattatttttatagtttcaatacaaagttactctttgaaaagaacaacaacaacaacaaaatcactttgtacctacacttcctttctaaacgacaacagtttaggaaaacgacaacagttaaggaaatgtaccagaaaacaataatcaccaaacgacacacttcgaagaattgaaaaacaataacagattagaaacgacaacagtttaggaaaacgacaatagttaaggaaaccagttaaaaacgacagttttatagagacagaaagaaacaaacagtatgatattttccaagcttcaagtgattatatccactttgaagctataatttaacacatgaacatgatcaccttgtaatttacattacatattttcactgagcaaaagaggcccaaaaaaatgcatcaaaggatctatatatagaatagtagagaatcattatttgacatgtattcattcatacatgatgagatgagatacacacatacacattggatcatataactaactagactaggtggattttatatcttttctgtgacaacttcctaatcttctttctttggttctgtactgcttgaactgctatcagaatcattagcatcatcctttaagcctgtgtcaatcttgggatcaccttctacgattttcggtatcaaaggagtataataaggttgtggatgaatggagatgtaatttccagctgaagggaaagattgatgataaccatatgttggtgtgtaaggtgtagcaggagggtatgtgtttggaggaggccaatacattaaagctggcacaaatggatttgttggctgcggtgatgagagtgtgtggtgatgatgatgatgatatggggtttggtttgggaaaatgacattagtagcagagttgggaataacagagttagagatttctaatggtgtctgaggctgctgctgctgctgctgatgatgatgatatgctgtcattgcttgtgtatgaatggaggtataccccattagtccaaattgagcaggaggtccagaattcacatgtttctgttttggaagagttgaagatctttgtatgttgtgattatgaggcttactgttggagttggagttggtttgtttctttacctttggttttgtagaacaagttttcccagtgagttgttgggaacctgggctagcctgttggagaaacaaaagcacacagtatagaaagttagaagccaagagatttttaacatatgccaaaactaaaagtaattaaacttacagaatcagaaacgattggatgttggagaaataactcttctccttcagcctcctcatctgtcctgtaacaaagaagctatgcatgaattattaaggccatttttgttctgtattcatcttattagtatgcactttctttctcactttacctataatacttttgaagcaagtctaggttcctgtacttggtttccctttgaactagatcatcaggaaaaccagccatgaagagaagtgtaattcccaatgctttgaagaagaagctcccactgcgaacatgagctaacattgccattcgacatatgagtggaccgaaagacttgagcttgttccttcccattcgctgtcgaacatatctacaacaagtaaacatgttcaataatcttttgagtataaaattaaaatggaaagaaagactattccaatacaagacgagaacaaattttacttcattcccatgtctatctctatatttgcattcctcccaaccaaacgcaacctaagtgttggatagtatagcatgctaaaatggtgcttactcattttggggaagatttcttgtccttccaccatactttatgcatagaaataagcatgatgggcagctagaatctgatggacgcatagccttttcttcctctagtacctgaataggacataatgttgggttctgtctatttggatagaaaactttccttctaacttgaggattctcatacagaacatgctcctaaaacaaaattatgaataaaatcagtaacaagataaaaattatgtcaatgctgataagaattatgaaagtattacattacccctggattagagggagactcatatggctctccttttttcaaaatgctaaagtgattaaaatccaactcatacatatcttcacatccatgccttatcccaagtgatgcaaacacaatgatcttccttatggtgtgtgattgagcattcttttgctcaagagcttcagacacaattattctcttcacttctctaggacagaaagccacttttggaggctttttactatgtgatatgctccctgatcctgcatagcaattagtatacctccccatattaagaatactagtttgtggggatttataatctctgatcacattgaattgatcagagaccaaaccagaagaaatatgctgtgtttcaggtagttcttcatttgatggctctattacaacaatgtgtgaagtt

SEQ ID NO: 21731 - DNA, 1731 bp, Cannabis sativa
gttacagaagagaagatcttttagttgggtgaaaaaggtagcatgataaatttgtgaccacaaagtagttgataagatgagagacaactttgtaaattagggaaaagaaatcatatctatttcatttaccccttatgataatactacctctcatctcaattagttgattagttagtttggaagcttgtacttttttattggccccaaatatagaataacgccaaatatgattgtacctcaaccatatataataataacaaacacaaatgagagagatatgatatcttttctattttaatttacatttatttatagagcaattgaccctcctgttagtatacatgtgatcaagcacacctagttgtaacttttagtatatgaatatgtcttaatttgagtatttcaatcccttttgaatggatacattaactttaagattctaatggtgatattaaaattgccaaaacacaattgccaatctgtgagaattttgtactataattagataaatgggccggtcgagtagtctaattgttacaattgttattgtacgcacatcctctctcaataaaaagaatattgtaatgaaaatcccatatgatcacttatctacaaaatgatatgcattggtattcccaaaatcaagaaaaagttaaatagtgtgagatgatatcacttgtcaaaaaataaaaacataattttaaaaataacaaagtatggaatgactcaagaattggctttgctacgtactatatgctagtacgtactaccttcctgtcattagattggttaaagcttgattttcgtagaaggaaccaacatcccaatcctcagttgtagatgtaagtgtcattagtgcaaccactattgacctcatgcttggcctaagttgaggactatcatgtgtacaagctttcgcaagctgtgccatctgccatatttacataaaaaaaaacaactaattagtaagagcttgctttattattttctcttaattagtattagtaatttagtatatagtaatgtgttaattaatcaccttcaaaaccgagtcaaatgggtagttttggccgagcctagggtcaattaatttgatgagatcttctttgggatcaggctgagtaagaacatcttcaaactatacacaaatcagaacaagaaagagcacagaatttaggttaagtattgtgtagtaaatggtaagtatatatatatagtgaaataaggaagttagaatagaaaaacaaccaaagcaacaagtgcctttgattcggtggaagtaggagattctttggtcctgactacagcttctttggctgatataagctcataaaggacaactccaaaagcataaacatctacttttggggagacatcaccatactgagcatatctgttagcaacaaaacaaaaccacatatttcagacaccaagtctgtaaagatattttagtgtcggaacctacccaataattatgtaagtatagtccacccaaattcaaaagcttcattcattaatactaaaagcaagtgtctattcatataatttagggacacggagcttggggggccaaaacataaaaatttaagaacaatcttatattattgaaaaaattagcaaaattgcatttttttaaaaaagaatatatattttgtatttggcttagtttctataatattttgtgtaatgactatctagacgtgtaacagtttttttttttttttttttttt

SEQ ID NO: 21732 - DNA, 5342 bp, Cannabis sativa
caaccaagggaagttttatgctacttaaaagtcaactgcaagacactaacaggaagtaatcccttccgaggttctatcgaagtgtgactagttagattatttcatttgatatttttttctcttcttgtaagagttctcattgacatagttcatttggtctcaaagtaatctcaatatttgtctgccatcacagtaccggatgcatgaaatgaaatccgacaggatcacatgacccctgtattggtatggtgaggttgagtgtagcaagaaagagaaataagaatgtatgattaagtgtattgaggttgaggagagttgggtggaaaataggatagtataaatcggcgagtaagagaatagaatgggcatgcagtgaattgagtatttctctgtaaccttgtttctctgtttcaatagcaattgcctatgatctctactctttggctactgttttattggttttcttgcgtttggagtttcggctcttatcacataaaacatcaaatagtatgccataacataatggataaagccaatgtggattttgtgggcaacaacagtagccaatgatattaataagaacctgattataatcatcatcgctaagctcttcttcagtgtcatgttcatctagctcttcatcttcatcctcattttcgccgtctttcttttccttttctcctttctcatttagagcctattattaacatgaacaaacaataaaatatatgagtttattggtgaaacacaatgattcatctgatctagccaagatttaatttaagtaaacaaagaaaaaatgatatttacctcacgttgttcaagcttctcaaatagatctaattttttaagctctgcaatgaaaacataatgagtttgattcaagtcatactaccaaacaaacaagaaacaaaacaactcatcttcaatgtacctgaatcaggattccatcgaactctctttcgactagactgtcgccaccccttcgaacctgaaattatacttcactaatgaacacagtggcagaagccagtgaaagatatagtatagaaaatacagtcttggatatcatttcctaaacaaaattcacagggcattgagaatgcaaaccttcagttagttccaatggaaattttttctggtctaagatttgtgaaagtgaatctctcataatggtggtattgattttcttcctgtcagaaaatcttcctatctctgagctttgatcctctggaaaaccaagattcaagtaaactttcaacttccataattgtattcatatgtattagaaaataaacaagaattattatacacctataaattattgaaaaattctgaatagggacatcacttttgtctctatcgatatagttatagcagacattctacataatcttgaaaaatttagaacatttacaataccaaaaaagaaattcaaacattcatttgttttttttatatgtgtgcaattgactattttgagttttattttcgacattgtaatttatttaaaaaaaaaaagaaaaactcaaaaacagtgaatttttgaaaaatttgccaaactaacaatttaaaatattaaaatttataaaataacctcacttaatttactttatgcgatcatgatagttgcacaatgtaaatctatgatcgcagagtgtaattcatgatcgtttttacaaccatacaaggttattttactgataattttttttttattttactaataaaaattttcacaaagactatttttacatagtcggattttttcgcatcttaatttatttataatgttttgaaaatagatagaatgcctactataacacgataatttaaaagaaagctaattaaaatttttgctctctaaaatcatatcctataaacttttaaggtcattaaaaatgctccctaaactattgagattattggatttaaggtcttttatctaatttcatttaattttactatttcaatgattgtttatatactaaactatgttccccatcatgtctttcaaactttaacatatactaaatcaagacctctgaactttcatccatgttagaccatttttaataaaattgaaaaaaagtccttaaatccaagaatctcaatagttcaaaggtattttaacgaccttaaaagttcaggacatgatttggtacaagccaaagttcaggatcaaaaatcttaattaaccttgcaaaagaattataatttctccaaatatcgaaaacatagatgtccctaaactattaagacatactgtttgaagcattgtcctcaaggtagtaaggagaagctttccaatagttttgcaagatcatacttcgacggattaaatctttctcaaccaacacaccctttatatcaggcaatacaacatcctaacaaatcacaaaacacaaaactttcaatcttcaaaattggactaacaaatataatgaaatggtttgtaaacaccaacctcaggaaataggacaaagggttcctgcgtaccgaatcctccaaatccaccacgtcccctaccacgccctcctcctctataagccatttatttacctttataaacaaatgaacaaaacccacaaacataagcaactcaattttacaattacaataagataattggtcagtcacatgaacaaagtagtctgtcttaccttcagggtctgaattaatgtagaatgatgaaaagaaaatggaggagataaccagagagagagagagagagaagaggttataggcggcggcgagaggctgaggccggagaccaagacggagatgagttgtgtttgtatgcgtgaaagtgagaagtgttatattaatgggctgggcctcctatgttgggccttaatatttttagaaagtagaacttacatgccatacttttgtaaaaagaaaatggtaagaaaaactaccgtaagtttgctttgtttaacgtcgttacttcgactgcatgttgtgctcacgtggtcttcaagtcgggtcttttaacaaagactcaatccttatgtacctatcaatagaatctaatacattgaatttgagtgtttcaccatcaaattttattctaagaatctatgctttcgtatccaatttcttactcgcagtgagtaagaaggatctcccaaatggagttgatgtagtattggaatcaccctcatcttctatctcaattatataagaatcacttggagaaatgtccattagtccgattagtcaattgaatcaaaacctgagtttctcttaacaaatcaagatttaaagaagcaaaactagaataagacataatattaataattgctcctaaatctatcatgcaatgatcaaacctggttttactaattgtgcattgaattgtacttgtcttaggcaacaactttctttggagaactacagaaacattctcccccacacttattttctcacttccattcaattttttctcatttagacacaactccttaagaatgatattacaatgaggcttttctttgatatcctcaagatatgaaatttttacctcaattttgggaagagtttcaagaatctccttgatgacctcctctttcttagattttttcaatctacttggaaaaagtggaggagtgacataagttggtacaattggtttgtatgactttttcagtgatggtggaccaactaatgtaagagactcaacttttggtggatgactcttcaagtgatgaattgttgactcctttagttggaatcaaatcattaacttcttggtgtggtggtaattcaagttgtgtaccattttggatagtgatgccattgacattctctattgggttactctccacttgtgaaggcatagagtttgaacattgaattttatactcactcatagatgtttccactgactctacaagattctctaacttttgtggagattattgaaggctttggatagtttcatgacagctttgcaaaaactgcaaggtattagctgctaacatttcaaccagcttagcagtagttggtttttcactatatggtgcaacatgagtaggttgttgaaattgtgcattattttgttgcatccaagtagtagaagccaccaaagtgttgagcagatcaataagagaatgatcttgatcttgtggtgctacaggagaatagtaagaagttggttgaacatattgattgatcctactgtaagaagtgaaagaataatctccccattattcattgtatgtgtaagtatcgtagtagaaatcatattgatacacttgtagctagacataatatggatcatagttttattgattgtacatcgtcatctttccaaaaaaagatctaaaagttaaaaccacaactcgaagaacaagttagtaaagcaaaaattaaatatgaataataaaataaaacaataatccacggcaatggtgccaaaattttggtgcgtgtcgtaagccacaacaaatttattaatattttaattgtaatacctctaattattttaatataaccgtaagtaagggtcgatcccacaaggactatgtttatttaattactcaaaaactagtgacaaaagttagaaaaagggattttgagatttagagtaaaatagcataaataaaaataaaaataaattaaaattaagactacaatatgagaaactagttaaagattattagcaccctcaacaatcatttctaattcttattaatgaatgtaattttaatttccaatcaaactattaatcccgcaaataatgttgaagcaatcaattatctcaatcttcctattacatgtaatcaagacgaaacgctcaaaaaataactcttttacctaagtagtaaatccacgaagcatggaatttatttaacttagataaaactttgagatttatggagatagattaatctaggcaataaattaatgaagcatataattcatttaacctaggttctattcttcatcacaattaaagtacatttgacaatattaaaaattacaatttatcacaaacacttagaatcttagactattaggtgaatagtaattctaagttgacggtagatcaaagtaaaacctaacttagtggccatctaaacaagattaaaacaataaccatgacattgaatatagaagaatagaagcaatttgatataacgtaaactagaaattaacattcaataatgaaattaagaattcatgttttgggttttgaaataatccttaactaaaagaaaactactcaaaactagatattataacgataatcataataaatagtaagagtttaaggagaagaaaaaaaaactgtgatggagaacacttcaaagccaagatctctctctctctctctc

SEQ ID NO: 21733 - DNA, 7891 bp, Cannabis sativa
tttaatgatatagtatatttattttttgtaattactgtaattaatatgtaatactagaattttaataaaatatattatcgttgtataaaaaattaaaaacaaaattattgacatgaaatagttttataatttttattatatatttattatatttggtcttttgttcatttttttacatacctaactactgtatctattttgggtcattttccaacttaatctttacaacatttaagtcttattttttcataaatgagctacttaatttctactctatgtattttttctactctaaattaataggtctttaattactatttatttatgagtgtaggatgattatgttgagctcatatatttataatttcaattttaaatataaaaaaatatgttagaataattactcatctaattaaattataatgtaaaatcctttacgttatgtttggaaattaaattttggcgaaaaaagaaaaaaagtaagaaatattttgtgaatggtttataattttgtgggtgtggtataattattttaataatggtatataattttgctagtttggtatatatattttttctacaatattattttatttttaattattgtgggtatatattgtttgttgtatcttatatatttttcgttatatagtatattatttatttaagatgataattaatttttattttcttatatatataatgactacatataaatttgttggcattatatacgtatattaatagtggtatatataattttgttagcatagtgtatacgatatgttaataatatttttgttaaatttttttgtagtatataattttattactatgttatattaattttctgttctatgatacatcaaatattattttatatataatgtatatttaatgatatagtatatttatttgttgtaattattgtaattaatatgcaatactaaaaaatttataaaatatattatcgttatataaaaaaattaaaaaaatatattgacatgaaatagttttataatttttatatatttattatatttggttattttgcttttttctttttttaaaaaatagaatagacatttacttaactaattttgcgtcattttccaacctagcctttacaaaatttaagtcttattttttataaatgagttacttaatttctattctatgtatttttttctactctaatttaataagtctttaattaccacttatttatgagtgtacgatgattatatgattatgttgagctcatatatttatcattttaaatttaaatataaacaaaaacaaacatgttagaagaattactcatctaattgaactatgaatgtaaatttttttatggaagttgaattttggtgagaaaaaaaataaaaaaaatgtaagaacaaatagaaaataaaaattaaaatattctcatatttggtatggaaagaaaaattgtatagaaaaaacttaattcaacaaaatttttcatatcaaacatgaaaaattaatttatttttttgttgtccacactttttttctctctacatttttcctaccttttcttttctcaccaacatctaacttccaaacataaccataataaaattatgaaaaatattaaaacttacacactaacactataatttataactattgtataagagcaagtatgagttatatatggtagtcgtttattgagttttttaaaaatcaataaatataataaagctaaagaaatatatcataaacaaagaaggagataagagtttttacgtggctcaaggataacgacctctagtccacgaggcaatattattatgataagactggaaaagccataggatcaacaacctgaccgaccacctcctccatgggctggcttgccatatcctcatcaaagtgacgagacgatgttccctcagtctcgccgacagtttggcctgccccctggccagcccaaaactattagacgatgaactagataggtcaaagggctctccattctcagcatacattaataccttgcccttatctaagtttaaatgcatgtatggaagatttataccggaagagaagatcctctcgcacacatcaagtactttaagatgcagatagatctctagaaagttactggtgatgtgcgctctatcagaaatagtccaataatggtacttcaagctggctccaggaagattaaattcttggaatgaattttaataagaaatctgcacacaattctcatcctcaaaatggatgccatctcagctagaagaccttgtcaaagtcaaacagtgacaagacaaacctttgaaggattatatcaaaaagtttatggccgaggccactaaggtcatatacctaacaaaagaaggtcgttatacaaccatactggggggcatccttccattgagtaacttcttgaaaggtattcgaaagatctcaaccaacaatatgaaggagttcctcaaacgagcagacgacttcataaaactagaggaagtcatcaaacaagctcagaccggagggtaagtcagcaatatgcaatctcagggtgttatatagccccaagacctgccaaatatgcaggtcaacactagtagtgctggccagccctccagttgcaagaatattagaggcaagcgcaacaataacaattctagctggaacagtggaaaaaaaagggaagtacaatacctcccttatgccacgaaaccaaaaggagaaggaggagaagtacacatgcttcaccctcctaactgagaaacctgagaccatttacatgtcaactcaggctactgtcccatacaagaagcctcctcctatcaaaaagaagatgaacaagagggacatgtcaaaattctgctatttcacaatgatttcaaccatgacacaaccgagtttcaaaacttgaagagggagattgactttcttataaggaaaaaaaatccccacttgtgttgttatgtacagaaagaccaagttcaggcataaactacccagaatggagaccctatgcaacctctagtggcgggtcacttgggagtcataattggcgaaccccatattacaggtgagacaagcaaggctagggagcgctatgcttgtactcttcgtcacgagcctaaaagatacatcccagccgttgaagaaagagactttaagcaactcaagttgggagagcctgccatctcctttacaaagggagatgttgcccaggtcagcttcccacataatgatcccttggttattactgcacagattgggaacatgacggtcaccaagtgcatggttgatagtagagcctccaccaatattattttcaagtcagcctatgaaaagatgggcccctaactaacagacctagcaccttgcacctaagtaatatatgagttttttggccaaggcattgcacccgtgggatacattctgatgcccttgatagtcggagagaatcccataacaagaatgttgatggcacaattcgtagtaatcaatactccatcagccttcaatgtgatgatatgtcgaccagccctgtacgacctaaaggcagtaacatccatctaccacctatgcctaaagttcccaacaagtcatggggtaggatgtttgaggggagaccaatagtctgtctagctctgttacaaccaggctttatctaacgctaagaaagagaagatgctcgccaagagctctaaccaagagcccgacaaacgggaatgaagtccagcccaaagtggcgaagtagacgtagatcctcactttggggatcctacagatagctttggaccggtggaaaaactggaagaagtggacattaatcccattattccaaccagaaaattgaagattgggaaaggtttcgcgatagaaataaaatcaatcttgataaaatttctaaggtcgaaccttgacctctttgcatggtcgcatgaagacatggtggggatagacccttctgtgatgatccatgcactaaacatagatcccaacttttaaactgtgcaatagaaaatgtggttattggataaagaaaacactcaagatgtgaaagatgaagttgaaaggttgagcgccaatgacttcatgactgaagcattctatccaatttgggtatctaatctcgtgttggtacctaaaatgaacaagtggagggtgtgcatagatttcactgacctgatgataaagcatgtccaaaggactgcttttcgcttcccaagattgaacaactagtagatactacaactggtcatgagatcctaagcttcatagatgcttattcaggttacaactaaatcaagatgcatccaccggaccaagaacacacaagttttatgaaagacctaggcctgtactgctataaggtcatgaaaaatgcaggggccacctatcagagacttgtgaataaaatgttcaaagatctcattggctgcaacatggaggtgtatgtggacgatatgctagtcaagtccaaaatggtttggggcatgtggaggatctagatgtctgctttaagatcctccgagagtaaaacatgaaactcaaccccctcaagtgttcattcaaagtaggcttaagcaaattccttggcttcatagtcaatgctaggggaataaaatcaaactcagacaagattcaaacccttttggatatgaagtcgcccacaacaatcaaagaagtacaaattctaacaagacgtattgctgcactaagcaggtttgtgtctaaatccacaaataaatgtgttcctttcttcaacatactcagagaaaacaaaaaatttgagtggacaagggagtgtgaaaaaacattccaagagttgaagaaacaattggattaatttcttgtcctatcaaaacctctagataatgaggacctaggtgtgtacttggctatcacaaagcatgatgtgagttaagttttgataggagaagaagatggtatccaacatctagtatactacatcagtaaaagattaatcgacgctgaaagtcgatacacactcatggagaaactaacatactatttaatcttagcatcaagaaagctaaggttgtacttccaagatcacccaataagggtgtacactaaccaaccattgcgataggtttatagaaacctgaagagtctggctgactactcaagagggccatcgagcttggccaatttgagatcacataccaacttagagtggcaataaaaggccaatctcttgccgactttgtggctgaatgtacaagcatatctcctaaaatctctcaagattttggagaaaagcaagagccagagaaaaagcaagagcaagagcagcaaccaaaacttgaagaatcaacatggaaattacatgttgatggaagctccactgatcaactgtccgatgcaggcattgccctcattacacctgggggcaatagctacatggtgcaatcaagtttggcttcaaaccctctaaaaatgaggctaagtatgaggccataattgctggccttaagctggcgcatgaagtacaagctgaccacctggacatatacaacgactatcagttagtcataaatcaagtcttaggtgagtatgtagcccgaggtgaaagaatgatagcctatttgagcgaaatccaagacttcttaagtcggctcaaaggctatacaatgaggtaggtccccacaaaagagaatgtaacaggtgatacactcgctcgtctagtgagcaacaccattattgataaggcaaatttggtgcccatatagttcttaaaagaacgaagcattaccattctagaagaggttgacatgttggatgacaacccaacttggatgacacctatagcagcttaactccaaactggagccttgcctgagaacaaaaacgaggcaagaaagatgagaagaaaagctgctaggtacctaatcttagacggagtaatgtatatatgagacttctcaatgccgctcctaaggtgtgtcactaagacacaagtcaagcaattattgatagaagtgcatgaaggcttctatggcattcgtgcgagggggcaaagcctatccaaaatgatactctgacatgggacttttggccaaccatcatggctatgtcaaaaaatgtgataagtaccaaagattctcaaatatctcgaaagctccacccgagctcacattgatgtggtctccttggccctttgctatatgggaatagacctcattggtcaactcccaaagagaaaaggaggtgtgcaatatgtcgtagtcgcagttgactactttaccaagtggacagaagctaaacccctggcaacaataacttccaagaaagtcctcgactttgttctcaagaacatcatatgtcagtttggacttccacagaagattgtgtcagataattgaaagcaatttgacagtgacatgttagaatgatttttaaaatagacacgacattatcaaaagcttctctgtcgttgcccatgctcaaatgaatgggaaggtataagctgtggataagactctctaggatactttgaaaatgagtctagaagaggcaaaaggcaattggcctaagttgctcccagaggtattctggtcacacaggaccactgagaagatggccatcaagacaacatcatttgctttagcttatggctatgatgcaatattgcccgtagagctggtgccatcgtctcataggaggataacatatgacaaagaagtaaacaacaccttgttggcagaatcccttgacgaaatataagaaagaagagaccaagccaacctcaagttgcaggcttgccagcagaaggttgcaaggcacttcaacaaacaagtcaaggagaggaaattcttcttagaagacttagtgctctgaagagtgttcttgaatacaaaagatcccgcaacatgagtgtttggaccaaacttgaaaggcccttaccaaattacagaaataacaagtaagggtgcctacaagcttggcgagtacaattagaacatggagttatttctcctaccaaggtactggaatggagaatatctaaaaaaaaattacttgtgaccaacttgtaagaacactacttttcagtagtagttctagcaactcaattataagagttaatttagaaagagctaagtctccatgactcttcagtgatggcttttgcctggcatgtctggcaggggtagccacttgagttctagaagcagaatttttattttgtaagcttttagaatcaataaatatatgttgcacaacagcaacacatattaaagaccaattgatgaataaaaacggtatttcagttcaatagtgtgtctaaacaacttgctaacaagataacttcttaaagttattctttattttcagttccacatgcgtaaaaccggttccctccaagaaaattgacaggcaagatctatgaaacttggtgagttacaagtgaccaagagatcgtaagtttgcttgctcatttgggggaaacccacaccatacaagcatcgagcaagcacaataaacttaagcagagaaatttaaagcttagtataagcaaaaaattgaaagctaagtaagtacatgcatacttcaattagacataaaaaaaactaaatccaaatacttacatgtctagcaaaagaagaaatccatgattaaataccgcatgatcggtcatatgtccaaaataaaagaccctcagaccaaatataagtagtgttcaaaagtaaagggccaacatgccatacaagaacatgaaactaatgtggaatataagcataagcataagatactaataaaagtgtctaatcgtgtgtaggtgtaggggagtcgagctgtgagctacagcatcctgatctccaagaagctggtcagccatagcctctatagactagccagccataggatcagcaac

SEQ ID NO: 21734 - DNA, 5577 bp, Cannabis sativa
  modified_base (482)..(485): a, c, t, g, unknown or other
actgtagctaaatctcatatataatgatgaaattgtactaccttagagtgatatttctactataacctcaaatttgaagtctcattggaatgactctaaataagtataattgttgattataatcttttattataatttttttagttaattttcatgctcaaaattatattttataattttttttataatattattcgttatagttaaaatattatctctataattttttgaatttttttaaataatttataatatcataatattgttcctgatattctactttaccgtgtgtgttcaaaaaacttcaaacgtattttcgacacaataaattattcgaaattttttagttcagtagggtcttctttagggtgggcctcttaattttttagtcacagcataaattttttctaactaaatgtgacttttagtcataacaaaaagttacttgtgactaaactataatatttagatacaagttgtcnnnnatttaattttagtcacaacaaattgtgatttttatgactaacacctttaattacgggtctattagtcacaacatagaaatgataatttataattagttataaaattttcacttccagtcataaattttgttgtaattaaaaataatttttttatattaaaagtgaggtaaaataaaaaaaattgaattttaatactttttattatcctctaaaaaaatcagttaaattaattttagacattattaaactgaacacagtaatctaaaatattaatactaaaatttataattatccattcttaaacaccaagtggttatttttaatctttaacacacttggtacttaattgagattaattaagaataatttcattataccaagagatttaaagctcaaactttgattttgtcccaattcccaattcctttagttaacttttgatattaattatttattaataacatttaaagtgaattttgttaggctataaaaggacatgtattataggttgagcaacaaattataatcttaaaaaagatatatttattttatacacacatacatcacatgagatatatatttgatatatcataaataatcatttcaaatctttttcaaataaataaataaataaataatcatttcaaaatatatttatatatccatcctggcaaatttttggtcctcacttcttcacaccttcaaaaccagccaccctttaaagaatccaaagctagattagctatctattcatttaattattttaattattattgattcaatttcaaagctacttctaataataataataatatatagctttttaattttgtcactttctatacatctaccctaaaatgtccatttcttaaacaccctcttaattatgtttcatattcatagctggtttctccttcaatgattgaaaatccatctttttcttatttaattatttttattttttataatgaaaaatgacaatattagtaataataatttttgggaaaaaaaattaattatgactcctgtacttaactatttatatatgatatgatatttataaattccaatataacactaaaattctcccacctaatcaaaattattatgtgtttttttttttcatgtttttatgtttgaaagatgcatgtaaggtttgctctcaaatttagtgaattataagaagaatattatttttagacttttattttaaaaaaatatagtaattttaaaaattagtcaaaaaaatatgtatttttataaggaattttttttggaccaataagttagttgagctctaggtacatgtctagtctgcttatgctcagaaccgaactagatgcatgtgatgaaatctgaccactacccaatatatatttgtatatgacatgaaaatcatgaggtctataaattacttatttattttgtaggattaatattattttagattttttatttgtaaaagtttcaatacaacttattgttttgtaaaataataaatttgatcttatattttttaaatttgtacaaaatagtacccctgatcttaatttttgatatttttttaatataaataacttgaatacaatttctaacaaaaatagatacaaaaaatatatcaagttttatgataacaactctaaattgagttattgttattttttatgagggtactattttgtacaattttataaaatacaaaatctaatttgttatttaacaaaatagataattcaattaataacttttgtaaaaatatcaaatttaaaatttaaaatagtatttactttttttattttttataatcctttgtatcttaatcattaattaattaattttgatgtatatctaatttatttttaatattaaccaagaaaggtttgaagcttttaagaatgacaactggcttagaagaaagtggtcctgttttgggaatgaagaaaagtattagattctcttccatctatttctttcttcttctttttatttatttatttatttataattattataattatttttgaagtaggataattagattctcttccatcttttaatgcacattgtgttatatattccatttgtttactaataaaattatgtaaatcaaaagtggtattaaaaaaaaaataaagcatttggtgcttagaatataatatttttttttcaattaataaaattaataatgaatttatttcgtttttcattttgaaccgtacacgttcttaaatcttaattatatattatttaattaagccgactttgccaattaattaaattggattatggattataatttatatcttaacacgtgttttgttttattattttttttttaaaagtgcaataaataaaatataatttatatattcatcaatatataataatatttattaggaatattataaaagccaaagcttttatatttaatctgttatacatgtgcaacgattggacaattttaatgtataatatttaataattaataacttatatttttacattgaatattattattattttggctgaaatctatattattttaaatttggtatcattactaatcaactactaatatgaataaaaaaatgtggtgtataattaatataattaataaagaaaaaatcggttacaacctgatggtttaaacattgattaaaaaagaattaatatattatttggaaaaaaatgagaacaactaaataaatataattttttctaactgaaaaccactatttattataaatatatattatgttttactataacaagaatgaccaacctaataaaacctttaattataattaagagtaaatattagtctaatataacgtatacattcatgtataattatataataataataataaaaactgattaacggttaattaatacatctatacaaaacagaagaacaaatttacataacataatattaatatgaggctttgagcttttctttttgttatttcagtttctatatccaaagcatatatataatttaaacctatatacacttccaaagaaaaaagagacacataaacatatacatatatataatttaattaaggagaaattaaagaaattatttcagagatggaaagtatttcaaagatagaaaatgaagaatgcagggctgccattagagaccttatagagcaacaacaacctcttctcacgggtaataatattgaagcagaagcacagaataacacggtccgtcctaaggtatatggagattaaaataaaattaaattttagtagaacaatttaaaattcttaaaagtttcaagattcaatcatgtatagccaaacagtaaatgattctaaaagaatagaaaaataaaataaaataaaataaaacatgctagaaattgatctattgacctcttagcttaaaataacattattttgttatatttccttattatttaatattttgtttatatactgataatttttttttttcataatttcggggtcctgagcgtttgggggtcaaggcgaacgcctgactcgcctcacctcagggtcgaccctacctataataataataaacagacgaaaactccggctcagaaagctgttagaaagacttttaaaggcactgcgcacttggccaaccttctccctaccggttcagttctagcctttcagattctctccccggctttcactcaccagggtcagtgtcgatccccagtcagccaaaccatcacactcggcctcctcatctgttgtgtcgcctcctgcttcctcctttcattcacagacagcttcagggaccacagaggtaaggttcgctacgggctagccacctttggagggttgtggatcatcgatggctcgtcatcttcatcttctgatttggatcattttgcagtcatcattacgcctgaggaggcttcaaaataccgcattagggctatagattttgtccacgcattggcatctttgcttgtttttgcggcggtggcagcatttgatcagaatgtagtcaagtgcttctatccttcgccttctgaagaagcgaaggagcttcttgtggctgtgccagtggcagtcggcgttgtgtgtagtttgttctttgttgcgttcccaagtaggcgccatggcattggctttcctctatctcgccattaataactagtttttttctttttttctttttgggcattttacgtttcatgtataatttgttgaaaattataaattgctttattttcattataatttgaaagagagaggggtaaatattaaatcacgttgttgtgttgtgtggtgatagagattatttttactgtcatctttcttgggtcaaggattcgaaaagggattaaggcttggccattctaaaagttaacttagctatagttaatttgggcctaaaaatataactttttggacccttttaataataataataataaatgatatttttaaaaattattaaaagaatatgtgaatttattaaaattcttttatttgggcccttaattggagtgggtgggctctaagcacgggtctaacccgccctaacttagaattaacctaattagttgtaagtagtgtcatctgtatgatgggaacccttaagagattaattaaaaccggaatcatcgaaattgccaatatgactgaaaaagtgtgaaaaagatctccaccaagtgatccctttattttttttaaaaaaaactatattttaaaatcgaaaacttgcaaaagtataagaaaaaaacaaataaaagtgtcacaatttactaaaaagtttttttatgaaattacgtttacgttttgttttcttatcaaaattttgataaacgtgtttagatatatataatattaattaattaatatgaagatctctttcttcgtgttgaaaacatatctatacaactatctggtcaactggtcaattcaatagaatttaataatcacgcgtttatagcaaataattttattttattttattttttttatgaaggaagaaaataatgcattaaaaacttaacaaagagattgctaccaaaaaaacttacaacgtttattaaactggaataaataatcaattaaataataaataaatagggtt

SEQ ID NO: 21735 - DNA, 4548 bp, Cannabis sativa
  modified_base (4317)..(4317): a, c, t, g, unknown or other
tattttactttatctttatatcagaaaaacgacaagagattttgaatgaaaatgtttaataaagtttagaggagaaggacaagagatagagcatcttctttgtatcttttataattattattttttgcatatatgtatggataattgtaatagtttaaaacacttttgacgatgggaaagatatcagaagaacatgtgaagaatatgaaatacttactctcctagctaatatagctatatatatagagagagaagaggtggcagttcctatcaccacatttagtcatatgttggtcatttgtttgtatgttcttatcttttgcctctcttttgtgtaatttggcatcgttttttctatctcagtttaggtatttcttataatattaagcttgattaaggcaataaaagcaaataaattatttgagtaacattgtggcgctgtaccttttctttcttcttcttctctttcataaagcatttcgaatgctgtatatagcaaaacattgtgctaattatatatactatatgattaagcaagtatatatatatatattttgccatgcaatgaatatagatttattatcatctttaaatatttattttacagttttagtgttcaagtagttccaaaattatcttactaagtaataaaaatcgattactttatccaatttgagtaccttttctaaaaagtgtaatttaaaatatcaacatgcatgcaagattaattttgggatttttaataataaatttagcattttttttaatatttttatttatgtttggtttttaattttttttttcttcataaaatctgtttttcaaaaagttctttaattacaaaaatacttttattgcttatgttatctttcattctcatttttcttagtgacttttacatgttaactcctcttttttttttttttttcctctttcttctttttatttttttctttctctctttatttttttatgacttattatgattttttttttatattttatttcaagataataattctttcttttaattaaattataatgactataataatttcatactcattatcatgtacttgcttcactttaagtctcttaatacaacaaatgaatatttcacattttttaagataattagtatacattacaaattagtttaggtttgtgatatatgtttgactggttggtgtgtgatattgttaatgtggtagtttcttagttatattaacgcctctaacaatcctgcatttagatgctgatgtggtattattttttgttgtacttgtaatttagtttttgaatttatatagtgtaggattgatgatatgttaaatttttgttggtttgtaatttattctaggttggcgcaaaatgagattgatacatgtcgtttttgagttgtttgttggttgttttatattggaatgacacaatgcctaggttgatgttgtgttgtttttatattatttatattgtatatattttaaattttagttttggagttattagtttattagttgtttaataaaaaaaagaatgtatgtttagttgtttgttagttatttgcatgtaaaaatgtaaacatatttgtattgttgttacgttctttaatttataataatatatttttatataattttagataaatatttagtttttaaatgtgtattttaggttaatttcaagtttatttatatattttaaataagtttaggtatattttgaaccgtgtgtcattttgaatttaactcatcatcatgatttttctcaaactatttattttcctttctaatttaatgagctttttttgctaggtaaaatataatgagtttatattaatgatttgtaatttttttttgaaatgtatcattgtgaatatatttttgttgttattaaattattagttagttgatttaaaattgtcatctagttgtttaacaaatattaaaattatatatgtttagtttttatggtgtataaataatattttatatgtgtttttatcttattaaattatttttgtatttattaggttgttgactcaatttattatgtctaatttatttgcatattaacactactacaaaataatgaattcgcgatggtcccaaaaataatttttttcggggaccgtcgttaaaaaaattaagcaattatttaaaactgttgagaaaaattagtattcccgacggtttataactgtgcctaaaaaattaggcgacattttttaggaaaaaaaatatatgggcttatacccgacggttcaaaaccgttaggtatagtatagccgacgtaaagttgcttcgggccacattgtcaaggaaaaatatttaaaatatggaaagttttccattaacatggatgaatacctatacaaagattatcgtcgggtatttatcgaagaagccaatgtggagaatgcactactactcccatgttccatagccgacgattcattgacgacaataggtcaagttgtaaaatattatatagtatggccgaaagactatcttacacctcttggaaaatgtttggtatgtttcaatttatttacttaacttattgtgtttattcattattgaaattgctaactttattgttttttgatatatatagacacaaccacccatgagaaatttcagaaccaacccgtgaagagaagcacaaaagcctttagatttactcggtcctccaacacagcctctaaaataccttgagaggccgagtaaggcaaaagttcatggtcgttatgtccaaccattccaaacttcctccatcattgccttttgaaacttcctcagaaggtggcccaagtcatctataatccaatttcaagttaataatgagctatttgggggtcacatatgactctatttcgcttgctaagagtgacatttaggaattgtgcaccatacaatacttgggagcccaaccaataggagtttggtgaaattatgatttctaactcttaataataaacttgataatgttcttttgacaacaacgattattaattatgattttttatcagatacatgaaagaaagattgttggacattggtagactgaatcaagtatatgaatttctgaatccgggtgcgattgtcactgatgcaagggctgatagtaatcgttgtaaagcactagtcactcgaatgactaggatgactatttcagacaaatagcttattgccccatataataattggtatatgtagatttaaaataaataatttcagtatttataactcttcataaaatttattattttgtatatgctaacaattttacacatatttgtcaatgcagggacatgtttcactggatgcttgtactcatccaaccaagtacgcagacggtggcatacttggatccaggcaacgacgacatagcggatgatctgaactttatcatatacacgcaagttctatatcaaacgtcccaatatgtaaacttattctttatatataaatatgtatatgctaattaaatttactttttgtgtagatcgttcaccatatataaccaaatgataggacggcctgatcgacctatctaatggatgactcctatctgtcctcaacaatccgacgacaaacaatgtggatactacatcatgaaattcattaaaagtttcatgatcgtagaagatccaatgcaagtacagttgatccgacatgataggttctccactccgtacactaatgatgagataaatattatgcgtgatcggtggatttattaagtgaaagtggaagcggagcgacaacagtttccgtgttagtcagtgtgtatatatctcgatttatcgttactatatagatttgtaaatatatttaaattattataattagcgttaacttaattatatatttttgaatgatatgagcgttagtttaattattgtgactatacagaattttaaatatatttagataattatagcgttagtttaaataattgtgaaaactatacagatttgtacaaattttaaaaattaatgcagagaaaaaattacagaaaatctgtttttcccctatttttcaaatgtaatgaatgaaaaaaaccgtcgctaaaaaaattaataaaaaacgtaaccagtctataaggcacggtttaaaaccgttgcctataactgtttataggcgacggtttataaccgtgccctatttaaccgtcgcctatagtataggacacggttataaactgtcgcctatacccatttgtaggcgacgattttaaaccgtcggaaaacccacattagcaacggttttacattgtttcctattctgtccgttttacgacggtcgtataggngacggttatagaaactgacgggaatactttaaacgactgttaaaaaacgtcgaaaatgtctatttttgtagtagtgtaaagttgagttgttgtccttttttactgtgatgattttggatttatatacagttgttcttgcgtatatttttagtttatttttgacacattttgttgctgttttattttttatcggtgtattatgagtttgatgtaggtttttttttttttttt

SEQ ID NO: 21736 - DNA, 1752 bp, Cannabis sativa
tttactttttcaattttaatttttcaattttaaaaacagaaaattttaaaaacagaaacttttaaaaacagaaactgataaaaacagaaactgattaaaacagaaactgattaaaaaagtgttaccaaacgacaccttagtatattctcgtcaatttttatatattttttaattaatgtaattttttcgcactcaacaagtcaaaattaagaaaaataaaaccaatattattttttcctttaggttatatatgtatcttatttgtaatagcaaaataggattcccaacctttgtagagtttttttcttcaaccttttttttgttgcaattttttttttcccaattatacaaatagttacaaatatttttttatggttacattttgcttatttttttaaataattaatttatttatacaactatgagttacatatataattacagcacgataatctatttaacacttttataggctacctgaaattcatttaatttgttagcatttaacatacaaacatttactctaaaaatacatatacatattttcataatttatcttattttttgttttcacactaaccaaatatttaactttatgcttgtattatatcaacaaattgcttaaaaaatatatgagtagaatgtatctgcagagggttatatattttgcaacaacttttattcagggtaatttttttgcaaccaaaaaaaaaaaaaaaaattgagggtaaaacactatttattctttattatattataaagcttatatcagttattgaaactatgtataattatattgaaaaaagaaaaaaactgaataaccctcattattataagtaacttgcaaagcaataataccatcatcttcttttgtggcattaataaattccttccataaataatttgtaactatacatgtatagtgctaaaaaaataaaaaaatagtattcagtaatttttctttatatatcacttagttattattgtatttacgaagaatatatatttaatttgtatgtattaatagaaaaaatatataatatatataaaagaatgttctgcaacactccaatttatttgggtatcttaatttttttttttttttagtttagctgcctggttgtttattattaattatattatcttctcaccttattaattaattacaatatatataactggtaagtacgtacgttaaataaaactagctattacgtggtttaatattgtatataaacagatcatgtataaacgtacgttgaactctatttcttgttgatatgtatacataaaaagctgataagtttttacccatcatatatgcatatgtctatgtatataataacatagattttgatcaagcttgcatgaaattcatattgttgtgttatgatttctaaattaacagatcttacaagctttgacataaccgctttctttgagatttcctactagttttcgttaataatacatatatacagaaacagttttgttgtatatattgatgatgcatatctgtctatacatgtatttgaaattttcttgaaatatttttagctatatatattgtatatgacctgcaaatatttatttgaaacttccaccagcttgtcattagattgatatgtattaagtctatattaattttactgtgtatatatatattaattataattaggcttcaaaacttattttgtgattttggcactgtaaactatttaaaaatcttgaaattttgcgtgtaaattattt

SEQ ID NO: 21737 - DNA, 2151 bp, Cannabis sativa
cgtaaaaatatttaaaattttatgtaaccatattttatatttttaattatttttatgtatttttaaaataatctctataaaatatactattagttttaatttaaaaaattaaaaaacaaaaacagttacatatatttttatcattatttttgaaaaacaaaaatcctactttgatatttgtaatttaaaaatttaaaaaacaatagtgttatcaaacacaaatgctaaaaatagaattaataatattgagattttattgtaactccacgaaactagttataataatatttatccacatacatagcgtgcactacttactactgcatgtatctcaccacacatctctatatccatccatgtccataaatatttatatatatatataaatataaaattaatttaaaaaaaaaccgtattagtatttaaatttatttgagttcaacgtacactctttaaaacaacatgtttctttttccacatattacgttacaaaaattcaaaggtacttagtgtgattaagtatttgattttatataatttaaaagtattgttattagacatcagtggtagctaacatcttttataggtgacgcttcaagattaattagcgatattacctaaaaaattatttttttagggtgctagataccgataatgtctttctgcaattctcttaaaaaaaaaagaaaaaaaagtaatttttaatatctcaaaacaaaataggtattactatacctaataataatgttctaataataataatgtatagtaaaagaaatggtgggtcacattaattataattaattaattgttgtcccaaaacaatagatattattattttttattatattaaataaatagttgtataaataggttagtattgacaagttataaaaggaagagagtttcagttttcttatttcttcttcttcaattcaattacatacaaagaaaatcaaacacagattacagaaaacaaagaaagaaagaaagaaagaaagagagagagagagacagatttgacctagggatttgggcttatttatatcgtatttatatatttatatatatacacgtttctcctttctctctttctctctctgtctgttcatggtgatcgctgtggagattgagagcagtagtagtagtcatcatcatcaacagaggaagataggtccgacgggaatgcgactggggaaatacgagttgggaaagactttaggagaaggaaactttggcaaagtcaaacttgctcatgatcttaaaaccggtaatctatttgctcttaaaattctacagaagaatagaatcatcaacctcaatatcaccgatcaggtattaaagcccctttcaatctcttatttgtttttttttttgaattgaaatatgttgtttatgattattgacacgaaacgaaacgaaaattgtttcagattaagagagaaatcgctacccttaagctcctcaaacatcctaacatcgtccgattacatgaggtaattttgaaattaattactctgtttttcagtttttcttttttaaagaataaaatattattaagtgtttagaattttgtgttgtccaaatccaattccaatcctaatctgaagccataaatgattaaatggtggcgggtcatctggaaaattatgactagtgtttgtcgttttgttctattcctttatttccattggatttcaaattcaatggctggcgtatacccatacgtctgattcaagttagctgctattggtaatggtattgaatgaaatgaatgaatgaatagtgccaaaaccaaggcacgtgtattttgtggttaaagacttacctactgtcctgccctgaccaccaacccagacccagtgtagtgtagcagtttggatatgggcccatgcctcactcctcttttgccccttttgtctatgctcttctttaccctttttgcctttgtgacacttttttctttctttctttaattatgatttatgaattccagactttgtaaaacattgatgtgatattctgtaatctcattcaatttttactctttacaggtcttggcaagcaaaaccaagatttacatggtcttggaatatgtcactggaggagaattatttgatagaattgtgagaccatcttattattattact

SEQ ID NO: 21738 - DNA, 25118 bp, Cannabis sativa
  modified_base (47)..(61): a, c, t, g, unknown or other
  modified_base (14525)..(14532): a, c, t, g, unknown or other
ttaaattacattgttttagaaaatcatatttaggatgttaaataacnnnnnnnnnnnnnnntctagatcctggtaaaatataatccaatataccattcatcatgagagtgtacaagattgcattcagacatgaagatttctttttagaataattgtatgttcttatttctctaaaatattttactattaataggctaattataaagaattgtacaaaaagaaatttacaactaatttcagctcagatcctaaaactcagaagaaacaagaaaaaatcactaagaaacggtttcctaataattgatattgaattaaatacataaaatatttacataatactacactccccctcaagttggtttatgcatatcaaacattccaagcttgcacattaattcatcaaaaaattgacctatgaagagctttggtgagaatatcaattgtttgaagttttgatggagtatagatgatttgaattgtggcatttttaattttctcagtgatgaagtgactatctatataatatgttttgtcctgtcatgatgaacaggatttttagcgatactaatagcagcctgattgtcacaaaacatctttatagatccttttgtaaagagtctcagctgaactaataatcttttcagtcgaatcccttaacagacaccaagagccagagctctaagttctacctcggcagaacttttagaaaccacatattgtttcttacttccccatgttactagattaccccaaacataagagcagtatcccgaagtactcctatcagttacatctcttgactagtctgcatcaattttgactttgatctatgtcagagtaccccaaacataagagcagtatcccgaagtactcctatcagttacatctcttgcctagtctgcattagttttgactttgatctctctgtttttaattttctcgaacaaaaggcctttcccatgattcatcttgagataccttaggattctaataacaacttccatgtgttctttagtgggattgttcatgtattggctaacaacattgacagagaaaccaatgttaggtcttgtatgagataaatagatcaaccgtccaactagcctttgatatctccccctgtccacgggtgtactgtctatttctgaaccaattttcttgttgaaatctattggacttgagattggattgcatcttagcatcctgtttcatttagtaagtctagaaaatacttacattgctagacaaaaataccatgttttgatcgagcaatttccatgttaagaaaatatttaagattcccaacatctttaatctcgaattctctagataagaagtctttcaatatttccatttcctccttataatcacttgtcaatatgatgtcatccacatagacaattaggttagatatcattttatcttatgagaacttgacggataaagtatgatcagtttgacattgagtgtaaccatttttgtatgattgacttagtgaatctactgaaccaagctcatgtagactatttaagaccatatacggatttcttgaaattgcaaaccttatctttgtttgaagagttctcaaatcccggtggaatgtccatataaacttcttcaatatcatcatttaagaatgcatttttcacatcaagttggtgaagaggccaatctttatttccaaacagatataacggtatgtgtatatttagtttggcaacaggagtaaacatttcttgataatcaactctgtaggactgagtgaagcccttagcaacaaggcgagctttaaatctctcaatgctaccatcagctttgtaaacggtaaagacccatttgcaacccatagatctcttcttaggtgttagatttgtgattgtccaagtgttgttttttaccaaagcatgtatctcatttactacaacttttttccatcgatgatcagccatttcctatcaaatagtgtgaggaatctatatgttaccaatggtagaaacaaacacctgataggatggtgacaacatcttataggacacaaaatttccaatgggatgttttgtacatgtacaaactcccttttttaaaacaataggctattgaatttgtgaatagtgaccagtgaaacaacttcactgctgttagatgaagagctaattgagacatcaggattagagagagtagaagatgtatctgaggttaggctttctttttcaatagccatggtgaaagagaagcgtgaaaggtgaacaaaaaaaattggctagaagatataattagagtagagaaaaagaagtgattagggttgtattacccgctctgataccatgaagatttctttttaaaataattgtatgttcttatttctctaaaatatttgtctattaataagctaattacaaagaattttacagaaagaaatttacaactaattacagctcatatcctaaaaatcagggatataaaataagtaaggaaacaagaaaaaatcactaagaatcaatttcgtaataattgacactgaattaaatatataaaagatttatataattctacaagacaaatcattacccatcttataaatctagcatggaaacacagatcatttagctattcttctaaaaaataccaatccattgtattataggccttactgagatctatcttaatagcacacttgggagaagcattttttctaccatagttcttgatgaggtcttgaaaaatcaaattattatgagctaatatattcttaacaaaagctccttgattttggctcaccaagaaaagaagaacagcatatagtcttaaattgttaggcactaggattagtatggtgtgctagcatataataaataaaaaaagtattttagtctttgtttgggagagtagttttgagtgaaaaattactatatataggtaagtaagaaaatagagagggtatgcaatgaattgagtaaaactctttgcattaaaggggactaggggctcccatagtttgtaattggttttctcgcacgttctctcaggcatatcgaaggaggtggacaatccaaagtgatactagttctctggcatcgactccatcttctggtgtttctctagtggcatttttctcttctcatccttctctataatcgtcgatttttaccgaggcatctaagcagcgaagagattggtagctaacggtggcgattgcataatctccaatcgatcatttgttctagcagtaaaaccaacgctggctgctaattctccctcaccactgtctcttgcgagaccttctccggtgtcaattccaacggttggtcagaaccgatttctgttttcttaggacaataattatcttatctatcaatatccaagatagccatcattttgttgaagagatggcactcgtcatccgtcatcccaagatttatcctttaagtctttgaatgtctcttcgctttccaacagagtcgtcgccctctcttggtcattcttttttgctttccttagtcccatatagtcttcccactcgtaacgaaattggtgttgtgataccatttgataagaaccggatgccaaattactcaaaccagtaaccaaacacacacaaacacaactgcaaaatgatacaaaaacagtggaatgataccaaaacagtagagaattgtatattgagtatgtgagaaaactaattacatattatgcaagcccttaggcccctttgatgctaagagttttactcaattcattgtataccctctattcgtcttacttacctttatatagtaatttcttattcaaaactactccctaaacaaagaaataaataccctttttatttattatatgctagcacaccatactaatcctaatgcctaacataaataaagtagctttgagatacatttataaatggtagaacaacatgcagtagattgacagtcaatagtcttagtaggagaatctacctagtagtcttactgaactcagctaggatacttcctgttttgaagaaaagaagaatagccttgctcacctccattcctattttagatcacatttctttgaaaaattcaaagccaaacccatctggaatgggcttttagtacttggaatactaaaacgaataggtctaatctctatgtaagtgaaaggtttgatcaagaagagcaactgctgttcaaaagatagcttagtgccgagagccaagcaggacagattgagtttaacattagttgtacttttattacccatgaagcttcaaaagtgagttacaaagtgatccaccacttcagagtaattgtcaataacttaaccatgttcattcataaagctagcaatcatattttcttctcttctcttcttgatactaacaaagaaataggcagagttgtcatcacctttttgcagccaattgatcttgcttcattgaataaaaagtctctgaaacattctaacttgagtactaaagttagtaacagcatcgacctatgcttttttgaaggacaagtctctcgaatttgcttgagtctaaagcttagcaacttgatataagtctttggctgttggtaattaatctccacatcctgagaaaaattgtctttaaacttgtaccaccaacaggttttgcccaactatccaacacaatctttttgaaatccttgtggtctatccagaagttaaaaacctaaaaggttttatcccaatatctgcaatacagtagaagtaatgatacaagaacggtgatcaaaaacaatttcccattaaagataagcagtagaagtaggaaacgtattcaatcaagcttcgttcttaaaagcatgatctatcctagaatagattctatcaattccaacctgattgttggtccaagtataatgagatccacttttgttcagtaagtccaccaaccccaagttaatccagttgttaacatcctcaagctcattcttagaaaccaagttttccccaatcctatcctcatagtgaaagataacattgaagtctcctaagattatccaaagttttatagggaacttaagcttagttaaatcatcccaaagaatcttcctctcaacaagagaattcgagccatagacaaaagtaacacagtcagcttcattgtgactaaccattttaacataacagtgcacatattgagaagatttagccaaaacaatcactatcacaaaggttttcctccatataagaattattcttccttctatagttggactagagtagtgattccaactaagaaatctagttgaaatcatttaccctattttatttcatttaattttaatttctggtaaggcaccaaccccaatattccttattctacacaaatccaatccagcttcttgtttattactactattcgaaactctaacattccaacttagaatattacaactttccatatcaaaaaatggagagagaattaccagctttatccccaccaagctattgttgtaaagtctcaaccgtattcttagtattatgttcaatctctgccttattccttgggtcaagataagctctctagtcttgtctttttgtgctcaattctttttaaggtttgccactggtcagtctctttccctttctcagtccagtcttaattcgagctacaactttagaaggatcccctccttgttcagcattaggaatattcaagctatcagcctaaagcttgtcccctgtattcacatcaataatatatagcttttcacctttcctagagtctattgcaccatgtccaaacccgttgcaggatttgcacttaattggtaaccactcatagtccactccctgctcaacaagttgtccatgttcattaagaaaatgaataattattggaggagtatctgtaatattcatttcccaagcactctagaaaatttaaccattaatctctccttagtgacctaattaaccataagcggtttgcctattgtactcacaagagaattcaagcacttattgccctaataatgcagtcctagatcatctaatcaaatccataatggcattaatttaaccaaatgaatcacatccaaatcagtagtccatggcgggactatgacatgttttcgatcaaactgaatcacaccattctcaagcatatgatgtctagtcgcatcatcattgaacttcacaattgtaaattccccattcctccaaacaatttgtgaaatccctaagttcccaagacacacttgaggaatccctcaaaaatagcaatagagggattagcccctgacagcaaaattgaaatttgctacttaaattttgacttactctcatcaacttgagctattttcttcccatctttaatgatcagagttgtgtacaacattttagcatctatattcaaatgcttacctgctataaattgcttccaattttgttgcaaattagtctggtagtctccatgttcaacctcttcaatctaggataaaggagtcgcacaaggttccttcaaactagaaccagtaacttccttattcaccgccatatctacactaataatatcctagcttgaatagccttcgatatcgaatcttgactattatcaccaacatcctcaccaggatcgtgatctccatcgcaatcttggattgaaggaggatctaaatctagaaatctagctagctttcgaaccaaacacacacgccatgtaaaattttttatagttttttattaggaaaatgttgtttatattttatagttttgggtaaacatttcagtctccaatttactccttataacatttctctatttaataaaacaggtagtgttgttttttacctcaaaagaaaaattaaacaaaaaaaaatcaatgtgattattcaagttcattttactttcattttaatcaaggtaagaaaaatgcaacttgcattacaaagtaacctatactcctctccaaattggcgaatttcatcaacaaaatagttttaattagtagtttttattaagaatcgtaatttgaagcagacattattattgtaatagtacattcatctgcacaaaagaactacttattacaggaaattgagttttcgtaccaatcataaatacatgttgctattgctatgataagattattggcataagttcattcttccctcgaagacgagaaaaactgcaaagcataagaaggatacaatttaagtgatgtttgctttgatgtaatataatgtaataaaaatagcgatagtataatggatgataatataatagaataacaattataatgagaatgatattatgatgtttcgtttaactctaatgaacattgtaatcaaataaaatatattaacaaaaatattcttagttttattatttttaatatttaaaatttaaataaaagtaaaaaaatgacaaaaaaaataatttctaacaatgtaatcatctttacattgattttataatacaatacatgatgtaatggtcattacaaagttttaaaagttaaagcaaataatgtaatggttccattataattcctcattacatcaaatcaaacatgctgttacagtgagaagaaatcaatctagtactccctttataacatgtatttagtagtttcccatttagtctcttagctttgtatactattttatggaatacaacacacaattctattcaccattatttacatggtatcagagtcatacttaaaattgtgattctaaattcaaaattcgaaattagagttcataaaaaaataagattagggttttaagtttaaggttatttttttggaaaccctagttacagtgcaagttctttctcaccgcccatatagacagattgcctagccaccaatctgcaaaatcccaaagtttggcggccagtatcaccgcgcatgggccccacgagccgcccatctccgtcgccccaactctcacgcgtcggagcgtgagggtgcatctggcctcttttatggtgacggtcatcgtccatcaagctcccaccccttccctgacctctttgcatcggtctccagcagttcttgtcattttgtggtttgatacttttgtcttcttcgtgtttgggtgttcattctatggtgtttggtttcttttttttctctttcacttgtttttgctttcaagattatggcagagataaaatcaaatttggaatcagtggttgtttttgatgtggttctcgtaatgtctaaaatcacagaccataaattgattgatttgaattatttagaatggaacaaaacgattcgattgtatctgaagagtattgacaaagatcacttgactgacgatcctcccaaagaaatagacaattcaagaaaaatattgctccctggggatgcccgcttgttccttcaatttcaaaattctattgataatgaggtaattagtttgattaatcattgtgaattggttaaagagctaatggattacttagagtagagtttttgtaaaatgacaaaaacatctcgcatatataatatttgcaaagcctttcattgtgtggagaaacaatatcattctcttatggtttactttatggcatttaaaaaaatatatgaggagcttaatgtgttattgcttgttaacacaaattttcattaaccaaaattaaatagtctttcagtaataaatattatacataaattaataagtgataaaagatataataactctaaatatttttacgtgattttgcagttaaaatctacatactccactagcttttattagaaatatttttagagtacagaatacaatatctgactattaataataatggttctctatcaaatttgttgtccctttttttcatggagtatgcccctatttataggaatataggttggtagttatcttttttgagattgattcatggataactgttcatgaaacgtggacaatcctcacgtttcatttaaattacatgtgggataatactaaataactgaccagtcattttttagttttatattagatggttattgctgacgtggaaggtctctgattcgagttatcttccttatccatcttgataagaaaaaacgctaagtgttgagaaggtttccatctcgatatgttctctttgtggttttcgtaatgcgaggtgccttctcactatatgcaatacgaggcagttcatgttaatacattcatcttgctcgggtggatgaatatccacttcttgtttatatattccgaggcatacatatgtctcgttaatctcgaatcaatagttgttattcttgtctcgcttttgactataagccaaagagttttgaatattatctatttaacctttatttaataataaagagttattaaatatgcatttatataaataatattgaatagattacttataattgattcatattctttctagtggacacgtctcgacttttgaagtgtagccaattttcgggtgtaataattgccccttaaaagtactttttgattaaaaaaagaagtttttaaatgattgccaaggtattttcgtcttaactcaattttgaaaagatgcatgccttggttttttggcggttcaaaacttcgaggcacatcattagcattaaatgtcccgacttttcaaatttgcaggattcccatccgttagatcaatcctcttttgatctaacggtgttttacaatatggtataaaacacaagaacattactctatttcaccatttttgaattttaagctttcaaatttcctctgtatccttcgattttcttctctttctctttgcatgccctcactgtccttaacttttttcttgcgcatctcatcagattacatttccattctcagagaatttcaaaacgcattgttgtagccattgaactctcaatcgcaaagttcttcattacccagaaacttacaacgaaacaataaatggttcatctcctctttctttatacctttctttttaatatttgcagtctaattttcgtgattgattgttttctttatctacgttgtttggttatttctcttttaggtaatttttattctattagtttggaaaattttaggattaagtaaaatttctaggttattaggctcttaaatttctgggttaagttgaatttatcttttccagaaattgggattatacaagtctgcaagtatgacccaatttatttctgaaactacaatcccaaaattccttgaaactatatgtcctgaaaatctagcccttccatttgaatccaaaacttacgttcctgaatctaaaattgggataaacgatgccaaaattaaggatcatctaataaaaaccaatcaatatgagatttcaagtcgatataagcgatttttgcaagaaataatcgagggtaaacgtcattttcttcgagatgtagcttggcctgaaactcaaactttatcttctattcctctagcgagacctttattttcacctcgagtcactgttgctttttcactgggtgacttaaatttcgaaatcatgaccactcaagctcgaaaatcaaagactcatcaaaatccaacagttacattcgaggcaaaacttattgaatctagggtcagatccattgcttcctatgtttgtaatatattaaaagcttatggcatcaaatatgagaaaggatgtcgagttaggttcgtcgccccaggggaatttagttaatttctccctgaaagagtaattcgagaagagtgtggtggtgctagtactagtggctcgtctggaataggctcttagagcctcgagcacatcagaactggagtaatactccctctgagagagtactacaaggatttctgtaattatctcataattgctcctttttagttaattccgagttcttatagaatcctggcctgtttaaaggacttgtaccaaattatgggatgggagtgtccaactccccttttaaattttgtagttttactctataaaggccgttccctgaaggaagcgaggatcaagtggtttttactacctcgggacccacacgaatgatcgaaggatcattgtgaggttgcctaataaaactgaattcaaggacgaattcttctggacatctggtctctcccccatcaacacgacatttcgcattatacataagtattaccttttctcaaaagcttggttttgagtttttaatttataaattgaaggcatttatttattttacttattgtattgacagcgatcacgaaaaggccaattccaactcctgagatggtagaatggcataactttttaaggtcttccgtttggattgcgatcagctgatttttttactgaacgagatcaatctgaagatctgtaatcttctcaacagcaaacaatccacctgcgactataagaatccaaagtattctaagtggcagcaagtccagttcctgctgacgagaaagataaggactacgtggctcgcatccatttcttgaagaaagtatcccctagggaagctgaagtgtccagaggtaataattgtggatggtctcctattgcacttaaggctgagcgtacctcgctagttaagtttaaggatagccagtataacttctatatttgggatcgtttatgtgtagattacatagctcataggtttgacagttggtatccctagtatcatgtccaattaagttgtaatagttcctactttaaaattgtcgaacaatacggtaccaacttggatagagcgagccatctggactctgattgggatacgtctccaataaatccttatgacatatacatgatcactggctctagagagtttaataattactatagttcttcgtcatcagatgatgattatagtaattttcttgagtgggagattacctctctacatttcccttatttattttgttaccagtgctaactattcttttttacctcgttgatatggactttgagagtcttgttaacacctcgggaaaaaagggaaagaaaaggattgttgcatctgagacttcgtcgagagcaaatcgaaaacccgtgaagagagaggaaaaccacggcaaacaaaaagggtgcctcaaaccaaataattatcgagccagccaatgaccaagttcactccccattcccaactaatgagggcattgatgaacatgtcttaagatcagttcaccagatcaaattctcgggtttagaacccgagatggtctttttggagccctcctgccccttgccacgagatgcaaggatcattgcctcgcaggcctgctcgcaatatgccaccccttgttggcgtcattacaaatccttccaatcgagtgattgggattcgatcaacaatggtagcttccatgaactgtctgagaggagcttgaatctcaatatctcggttaatccctgtttttttatttattatctcataaagtgttctttcttacctattcttcttctaactttatcttcattgtaggcgtctttgatgtctcacttggcacatcaaagagaccttcaaaaaattaaacagttggaatttgaacttcgcaaatccatcgaacaatgcaaggttattgcgtagcagtggctgatgcccaaaaggagaacatttatttgacaaaggatgtcgaggaggagaagagacacctcaaggctgagcttgaaaaatctcaaaaagaagccaagaatcaccaagaagcccacaaaaaggttctagagaaacttaatgaagacaataaaaagtttgaaggcgctgaagccaatgttaaaaatagatgcaatatagttgtaaaatgttctatcgatagcgcttggctggttaatcccaatatggatttaagcttcctggaaagtgatgatgcagagatgctggcttattgcgagcaaactaagaaagatgaagcattggatgtcgaagaagaagaggaaaaagaagaattatccaagtctcctaccatgtagacttggttattattattattttattttattttattttagaaaaatggccatttggccgagacaatggttgcccctagtgacatttagtaaaaacttttgcattgttggatggccaactttgcttatttatatattttaactttttatgcctcgtatcttgtgtttgagctaaatatatttatttattgtgttttatctcacaatctaaacatgtatatctcaatttaatctagatactttgggttaaatacatctctattgtctttttctttgatgtataataggagttaataatcaaccatgtctttcaggagcaatttttaatctgccttattatatgcgagcagttctaatctgccttgttatatgcgagcagttgatgatctgctacacacacatcattatcatcattttttagagcaaacttaaaatattttgaatatttcacttttagaattattttaaatatctttttgattgttcatatgaataattaaatcttctattcatatttttagcttaagtatttattttcaaggcactcactcttgtgcctcgtttataatacatgccagaacaatgaaaatcgttaagtattcaactcgcatatagttttttgttattttatgagttaatctcacttacaactgttattttgattttttttttttcctgaagaaaaagttttttcaatctcttgactttatattgtcaatagacaattttaatcaattatcattttctttctttaaaaatttttaataatattttaagttcgcaatatagtatatatttctaggtggattccagttattatacacatatgtaagcccctaagtaattttaaagaaagtaaactttgtaattacttgaacaaattctaattttattcataataagtattttaactattacagagataaataaatcatttacattttgaatatactgataataaggtcgcaactattcactattctagagtcattaagcaaagcatattgtaaaccccggttcccacgaccgcttaataacataaggaccttcccagtttgagttaaacactccagcagacggatctcgcgtatttgcaaatacatgtcttaacaccaatctccaactttaaaaaatctttttcggactcttttattaaaatatatcgtgattcggtgttgataagctatattgattatttgtgactcattacatttttcttcaagtaagtctaaggacaaattcataagttcttagttttcttcttaattatataattcacgcctatgggtcacaatgttaacttctactagtaacattgcttccaatctgaatgccaatgagaatggagtgtgtcccgtcattgttttctctgttgttctatgggcccaaagcacctgtggtagctcgtctacccatcttcctttagcagtgtccaacttcttctttatagtatctttcaaggttttattaacagcttctacttgactgtttgcttgaggtctcgatactgatgagaagctttaaataatcttattcctttcacagaactcagtgaacaactcaccgtctgagttccgttatcagatactattttgactggtagtccaaatctacaaaatgatgttcttgataacaaaatnnnnnnnntttttgcaagttatggaaactagaggttcagtctctgtccactttgtgaagaagtcgagtgccaccactgcgtattttgctcctcctcgccttgtgggtaatgccctaatcagattaatgtcttatattgcaaatggttatggtgagattatcattctcaactatgttgatggtacgcaaggtatatgtgaaacctctggcatttgtcgcatttcttaacaaattcatgagtgtctttgtcaattgttggctagtagtatccttgacaaatgattttcttggataggttttgccaacctgcatggtctccatagaagtcttcatgaatttctttaattatttcattggcttttgctggtaacacacaacgcaagagaggcatggaataaccactcctgtataatttgccatcgactattgtttagtgatgtattgaattcaaaagtctgcgtgcttagattttgtctgcaggaagttctccgttgagtagatacttgactataagtgtcatccatgtttgtgaagtatgtatcatctcgatttctttctcttcacatatacttggatcgctcaagacttcaaccgataccatattcagcttgtagagatcatattgggatgctagttttgccaatgcatcggcattagagctttcttctcttgggatttgtttatttttaaaataatcaaatttttccaagttcttccaaacatttttttaaatattttgtcatttttaatccatttgcttggtattctcccaagacttgatttgcaattagttgtgagctgctaaagtatataagattcctaacttttaacgcctaagttattctcaaacctactaacaaggcctcatatcctgcctcgctgtttgaagtatcaaattggaatcttaacgggtagtagaatttgaagttgtcaagcaacatcattatgactcctactcccgagccattctcatttgaagtcccatctacatataacttccaaatttctgcttcgtgttcaatagctaggactttttctgagtctataccttcaactaaaaaatcaaccaaaacttgacctttgattgatgctctcgggtggtaggttacataaaattaacacaattcagttgaccactttatcaatcttcctgaagcattaagttttgatagaacttgtcttagtggttgatttcttaagactttaattaggtgtgcctggaaatatggtcgtaatttgcaagatgcatgaattaggcatataatgcaagtttttcaagaggggtatatttcgattctgtcccagttaccttttactgacatagtaaacaggttactagtgctttccctcttctcgcaacaaggttgcactaatgacatgctccgagacagctagataaaggtataaaatttctccagttattggtttggccaaatttagaggcgttgataaatgcttcttcatgcctttaaaaacttcctcccattcttctgtccattcaaattttttattgactcgcaatatattaaaaaacggaaagcatttgtcaattgacttcgagacgaatctgtttagtgttgtcattctctctatcaaagcttgaacttctttcggattcgttggtgagggcacctcgatcagggccttgatgtttcctaaattggcttcaattcctctcgcatttactataaagtcgagaaattttcctgagaaaaccccaaaagagtgtttcttcgaattaagcttcatattatactttttaggtatctaaaagcatttcgcgagatccttagtgtgatctttactttttattgactttatcagcatatcatcgacatatatttcgtccgatctggttctcaaacattctattcaccaatcgttgatacgttgctccaacatttttaaaaccaaacggcatgactttataacaataaagtcccatgtttgtcacaaaacttgtatgttcttggtcacgaatatacattttaatctagttatattcataatatgcaacgcagattattcgagacgttataaaatgatgaaaaaacttgtcgaaccagctgctcgcgtctccagttaatgaggtcgggaataagatgcaacgcagattattcgagatattgttggctcgtattataataatgaagttgttcaaatgagagactggatcaatcgtcccatcatactgcgaaacatgtgggtttttaaatccctgaggaaattcagaattcaaaatatcaggatgaaacgactcggcttcttcatccaaatcgtaaccaggcaattttccatgttctccatcctgatcttttttgatcaagaaagcatgagcaacactatcgtctcatgctttcttgatcagcataacgtcaaggtctacttccctccctctcgcgttggtctacccaatcgactatgtcctcgagaccttgagtgtcctgaactagaacttgcttcatcttgtatcagtcttctccttcgaaagaggttagacacacgccctctatttaaatacgtgtatgcaacctctctctgatcgagaaggaagttgagggtgtcttggaggtagctcacttgtcctgggttggcttccaagttctctcgttgccacgagggattccctggttcccaagtcgagtctatctcacgtcctcattcctgcgagaagcttccggtacatcattttgttcgttcccttggttcgtaaatccttgggatccttaaggagcatctcacctttgctcttgattttttgtttgattatccattggaacatcctttgtaccatcaagttgctcttcttgggtattttggagatttccttagtttgtttcctgtctcctggttctagagccttgtggtcttcttaccgcaagatcaggttgattctgaggatttgttccttgtgccaccctagctgttgtagcctctcttaccaacttagagtttcgtcggttagatttggctaagcgttgtcggagttgtctattctctaactctaccaatggtacatacctagttgggtcataagcatcttcacttctagccacgtatctggtaaaattattggcatctccatttcttctttttgaattttgatcaccaccaccatcatttctccttgaacgtgatgttccagtggtatggggtctctgagatcccattggatcttttccagggcgacgtgtgattttttcaatgatattttcgtcgtttcgattgttatctgtcattgaatattgatagatttttgtttgtaaagaagaatttttctaagttttaccactaagactctcaatgaaagcactaaactgttaacgcagataaccaaaattaaatagtttttcagtaataactattctgtagaaattaataagtaataaaagatataataactccagatatttttacgtgattttatagttaaaatctacatactccacgagtctttcttattatggatatttttaaagtacaaaatataatatctgatttttaataataatgattatttatcaaacttgtcgtctcttttctcatggagtctgcctctatttataggaatataggttggcaattatcttttttgggattaattcaagtacaattgttcatgaaacgtaggcaattctcatgtttcatttaaattacatgtgggataatattaaataactacccaaccgttctttagttttctcctttagatggttattactgacgtagaagtttatatcatctcagattcgagttatctttcttattaatcttgaaaagaaaaaacactaagtgttgggaagatttccatctcgatatattctctttatggttttcataatacgagtgaccttctcgctatgcaatacgaggcagttcatgttgatacattcatcttgctcgggtggatgaatatccccttcttgtttatatagtccgagacatgcatatatctcgttaatctcaaatcaatagttgttattcttgtctcacttttgactataagccaacgagttttgaatactatttatttaacttttatttaataataacgagttgtttaatatgcatttatataaataatattaaatatatcacttataattgattcatattcattctaatggacacgtgtcgacttttaaagtgtagccctttttcgaatataacattgccatttagtcctaatgtgaggtttcaacagcgccaacgagaacagatagctattgtgagttttcttgcaggactctcatctgaatttaactttgcaaagtcacaaattttctctggttctaatatctcctctttacaagttgtgtttactcgttttcctcgcacaaaaactacctctttagctcctcttaatagcgtcttggtgagtcgtaacaattttgcgccagaataaaactctactccacgtggatacaaaggaagtaattcataaggacctgataatcgaacaccaaattcctgagagcatcatttgcaactattgtaagaaactaggttacactaagtttaagtgtaggaagttacagttcaaaaatcaacaacactactaatattgcaagcactagtgatgcatctaacaaatcggtctttatttctactgatgaatttgtcaagttctcaaagtatcaagaaacacttaaatctgcatctcctgtcactgcgatttctgattcatgtaactttaatgcatgctttttttcaaattcttaaaatgggtcattaattctggtgccacagatcatatgataggtaattccagtctctttttcacttttcattctcatggtacaacttttattgttaccttagctgatggatcaccatcttctgttcttggatctggcactgttgttcctacacttatgcttactttgtcatcagttttacatttacctgatttgtcctttaatttgatttttgttagtcaactcactcgtaatctaaattgttgcctctcattctttctcaatcattatttgtttcaagatcttatgacgaagaagattattggtaaaggacatgaatctggtggcttgtatgttcttgacccacttccaccaacctctattgtttgtctaggtgttacttctgcttttgaggctcattaccgtttgagtcatccatccctacatttgctcaaaaaaatttgtccccaatttagtaagttgtctttattagattgtgagtcatgtcagtttgtcaaacatcatcgtgttagtttgagtccttgagccaataaacatgctagtgttctttttgagttaattcattctaatgttttgggtccttatcctattttgtcttaacctggactcaggtattttgttagataattttcgtgtaaaaatcatttatatttaataaaaaatcgttctaaattgttttttatattttgtgctttttatgttgagattcaaaatcaatttaatatgttttttcgtattttgagaagtgataataccaaagtattcacatcttaattttaattttacatgacttctaatggcatgtttcatgaaacttcttgtgttgatactgcacatcttcttaatgtacttttcctatttcttataatcatctctcctcttcttcttgctctcatattgcttctctcgattctatcactatttttaaaattgttcgtgaagcaatgtctcgtcttggttggatttaatgaaaaatcgttctgagttgttttttatattttgtgttttttatgttgagattcaaaatcaatttaatatgttttttcgtattttaagaagtgatatcgccaaagtatacacatcttcttaattttaatcttacatgacttctaatggcatgtttcatgaaacttcttgtattgatactgcacctcttctcaatgtacttttcctatttcttataatcatatctccttttcttctagctcttctattgcttctctcgattttatcactattcttaaaattgtctgtgaagcaatatctcgtcttggttggatttaataaaaaatcgttttgagttactttttatattttgtgctttttatgttgagattcaaaatcaatttaatatgttttttcgtattttgagaagtgataatgccaaagtatacacatcttcttaattttaatcttacatgactttaaattgcatgtttcatgaaacttcttgtgttgatactgcacctcttctcaatgtatttttcctatttcttataatcatatctcctcttcttcttgctcttctattgcttctctcgattctatcactattcttaaaattgttcgtgaagcaatgtctcgtcttggttggcttgctgcaatgatagaagagatgaatgctttaattgcaaatgatacttgggtcttagttaatttacctttaagaaaacgagtcatagggtgcaaatgggtgtctacagttaaattcaatcaagatggaaaaattgctcgcttaaagactcgtcttgttgccaaggatttatactcaaacttatggagtggactattgtgatactttttctcttgttgttaaactcacatctattcgactattcatttctatgacagctactcatcattggcctttgcatcagcttgacattaaaaatacttttctttatgaagatcttgagaataagtgtatatagagcaacctcctaggtttgttgctcagggggagttagggcgagtttgtggtcttcacaaatctttatatggattgaaagaaagcccttggtaagtcagatcattctgtgttctataaaaagataaactgttgatatcgctttgttagtgatgtatgttgatgatatcgttattactagaaatgatactgaaggtatctcattccttaagtcttttattcaaacccagtttcacacgaaagatttagaggagctcaagtatttcttggatattgaagttactcagagtaaataaggtatttttctgcctcaaatgaagtacgtacttgatttattaactgagatagaaaaattgagagcaaaactttgtaatgctccaatgaatcgagttgtgcatcttacacgtgatgggaaactatttgaagatcctgaaaaatattgtaaattgcttggaaagttaaattatctaactgtaactcgtccagatattgcatttccaattagagttatcaatcagtttatgtcttctccaacaattcatcattgggcagcactagaacaaagtttatgttacttgaaaggagcaccaggacgaggtataatttacaaaaatcaaggacatacctagattgagtatttctcttatgcagactgggcaagctccaagctagatagacgatccacttcaggatattgtatctttgttggggcaatttgatctcttagaagaataaaaaacaaaatgttgtgtctagatctaatgctaaatcagaatatagctatggcacagtctgtgtgcaaggtaatatggagttatcaacttttgcctgaattcaagtttaagacttctattgcctaaaatctcattttccactagcgaactaagcacattgagattgattgtcactttgtgagaaaatccaacaaaggtctaatctccgcaaaatatgtgaagatcggagaaaaattataagatatttttacaaaagttttaaattgagtgcaggttaattatctttgtaacaagctgggcaagattaacatctatactctagcttgaggggaagtgttagaatattaattgtaaatattagggtaaattgtatttagtagtttctcatttagtctcttagctttgtatataaatatatactattctatagaatacaacacacaattctattcactattctctacaataactatataaattaataatacaaagtataaaacaatgcttgaaacaagacaaaagatactcacacaattacctgtactgacgtgtgttgttcatagcgtctcacaaatgaataacaagattacttattgagatgctttcaggaaagaactcaaggtgctaaatatcgattcatatacctttataccattcagatagacggtatctttcaagaactgcagaataagttcaaggaatgaaaaaagaacaaagcggcaaacaaatagaaaagtagatagggaatttgtcaaacctcattatgatcatgtagcaagatgggagtattcatcattggtgagaatccaacaactggaattcccaactgtctaaggtatcgggcatctgtagttgaagccaatatttcaggctttgaaagtttccctccaactgctgcaatagattcttcaaaaacagaccaccatggattggaatcattagtcaatgtcaataatgggtgaccgaggtagtctctaagaggccctttctcaagaatctacaagcatataaagttcatcagcacttcctcacttaatctaccgcttctagcaatgaaaataatgtaataccttcaagtcaagcctgaaagagacttgctacaacataaatatcaaaatcatgatgcccatatacttgttcagcaaacttacaagacacaaaccacctatccgtgttctgggatatattttttgtatattgaaaacagtataaatagaatctagtagaaatggctcgactaatgtatgttgcctcactcgctacaaagtagtccgaattagaaagtcaaaagtgggtgagtaatacaaattctaacactaacacccttgcacagataactcaagaaccaaaagataatagacacaattgcaagatcaaaaatagcacccgaaaagaaacaaagtttgtattgataagattataaacacaaatgaagcaaagaacaaataagaatcaaaaacaaaaacttcataagatatccattaatggtaatgcaaatcagtagacacactaagacatttattcaccttgtaggtcatgttcctcacagctggcgcccattcctccgcaattcttttctttaaaagatctggatctgccgttggaggcaatctgaggtcaaacccagcttctgcctccgaaggttgcatattcatcacaaatccctgaacaaaaaatccaagatacaaatttcaataaccaacaacattattatacgagttaaatttagtaaaacacccctgttttaaacttcttatcatactatattgtgttgaccttattcaacagtcaacaccacagtctaattctaatcatttctttacataacctatgagcctaaaacactgttaaaactttgaagtgggaatttctctcaaaaaaaaaaaagggaaaacttcaaagtggggatttccctcagaaaaaaaattcaaagtggggtttaagacatgacctattccttttgtagcagaattacctcaacaaaaactttcatttgtacaaaattttgctaaatctttttaactttctcaagttatataactatattataagcctttaaatggacatatatacatataaatatatgattatggaactcacagtcggagaaggaatcccagatttcaaataaacaggattaaccgaaataacttccgagttggcagctcgaccggatttgaccacatcgaactggctctccctgaaccggcttataatatccacgctcttcatcaaattttccatggcgctgttgtcgtacatcctcgacccgtgccctggcgttcccttagccttgatcaccaactcccatggcgacctatccgcgtagaaaaccctaaactcctcacccggattggcctggccttcgtccatggcaaaacccaaattcaaatccttgaattcctgcgagacagcgaacttggccattccctcaaaccctccgacctcctcgttggggacgtacgacaagtgtagggttcgagtgggttggaaattcttggcctttagattgcgaatggcctcgaggtactgcatcccgatgcacttatcgtcctgggctccacgggcgaagattcttccgtcctgggtcttgacagcggagaatggtgggtgggtccacttggagggctcggcggggacggagtcgaggtgagagttgaagaggatggaaggaagagaagggtcggagccgagccatgtgaggaggaggataggattgttgagggagaagtggaaggtccgggattgcaggccgagggaattggcctgggaaaggaggtaggaaacggcggaggagtaatctggggatggatgggctgtgttgattcgcaggtagtttcggaagcgggaaatggggtcgtcttcttcttcttcttcttctacatgggaatgttgttgttgggtctgggtctgggtcaataagaaggtaaaaagaataataagtaggatagagagggagagaagagaggtgtgagttttagccatcgcaaataaagttgagagttaaaagtgatggactttagtttagttgtttgttttaacgagaaactagatgtgttgtagatgatgttctttcatggattcggtcaacattacctggctgactcatcactcgctagtcaagagtaggaatatcagtcgccacaaacccggcccggcccggcccggcccgactttttcttttggcctagcgggtcaagcccggcccgagataat

SEQ ID NO: 21739 - DNA, 1332 bp, Cannabis sativa
  modified_base (66)..(66): a, c, t, g, unknown or other
  modified_base (1286)..(1303): a, c, t, g, unknown or other
aattgcctttactaatccacattactagagcggtcattacatacttagtagtaaatctagatcctngtaaaatatttccaacaaaaacttctctacttcaaatgagcacattagactcctttatatagtatttaggtgatcacacatagaattcaaacacaccacacctaatttctctcccataaatgagtattaattcattttgtaacaactatatcatcatagttttgaattccttaaataatgtaacaacccttttattactctaataatgtgtgattaaccaagacttacaagtgacaataaattgtaactcctctccaagttacaacctataggttacaaaagtgtaggttaaatatatgttacacatttatttaccatacacttaatatatattattcgcataataatatatttatcaagtaaaataaaataataaagcagccactaaattaatatgttcgagacttaaacatctcttacctaatttggtggctcaaaatcaaggggtatttgttcaagggcgtttcatagcacatcatataatgatttactaggatattgtctatcactatgggaggaagttgacaaaagctaattgcataatcatatttaatttacaaaaagcttatgatacaatcgagtggagctttactgaaaataatgcttcatggattgcaatttcctgagcaatttatatagctcatcacgatttgtatccgatcacctagattttctctcataattaatggatcactccatggttattttgaagcaaggaggggtttgagataaggagattcgatgtctccattgctctttgtacttggaataaagtatcttactagaattataaggaacattggacataaggcagacttttccatgatagacttttccatttattgaagtgtgatgtctaacacagaggtgcaatatattcttgatgcatcggggttccagaggagtgaggtaccttttacttacctaggtattccaattagccccaaaaggatctcttctaaagattgcaacattttggtggataaaatgactcatagaataagatcatggaatactaggcacatttcttttgcaggtagggtagtacttgttaactcagtgctccttattatacatacttattggagtcagatcatgctcctttctaagaagattctaaaagaaattgacgctatgtgtaagcttttttatggaagggacaacacatgatgattggtacaggcaaatagcatgggacaactgttgggttttatgccctnnnnnnnnnnnnnnnnnntataatcaaatttacttattaatatagat

SEQ ID NO: 21740 - DNA, 4786 bp, Cannabis sativa
gatcttccaataccatatttatcggaaaaattagaggattatattaatcaaaataaaataaataaattgattattttaattagtgttgggaagagaaatgataaatagagtatgtgtaagggtgttggaaaaaataaatttttgtttggatggaaaaatagtgaaaagatagggtaaaaataaattgggaatgtttatttagatgaaatacattaggaagataaaataggatatttatgtatgtgagagttgtttttttttttttgagataagtaatctgtgagagttaaatgtggatttttggctttttttttattgtaatttttggttgttatgtatcacatttaatcaaccattttttccttcttctctttcttctgcaggacacttggcagattgagattggaggaaggttgaccgcttggcgatgacgcgtggcggaaggagaggcttcaggcaggtcccactgatgctggcatgcgacagaagaagttagagctcactctcggctgtctcaggtgaagtacacgctccaagatgagccgttggatgagaacgtgtacgtctcaaattgagtcaaacatctgatcgagattggggctcttttgggctgttatggttttacttttttttttgaagaaaagcgtgctgatatataacataaaatttgcttgaggatgggccacaacagagaagcttttgatgatgccatgcttgttgtagaaatcagtgaacatgtcattgtcaaactgctttccattatctgacacaatcttttgaggaagtctgaatcgacatatgatattcttgacaacaaagtcaatgacctttttggaggtgattgttaccaggggttcaacttcggcccatttagtgaagtactctattacaactatagtaaacagttccctccttttccctttgagtgtggactaattaggtcaatctcccatacttcaaaggaccaaggagactgcatcattgtgagctcattgggtggagctcttagaatttttgagaatctctggcacttgtcacatattttgacatagtccatccagtctttgatctttgttggccagaagtacccctattggagtatcttcttagagaggcttttcccctcgacatggtttccgcagaagccttcatgcacttcgatcattagttgctcatctttagccttagtgacatccatgttggagtatcatcaaacatgttgacttcttttgggatggtaatgttgggttcctctaggaactatattggcaccaattagccttgtcggcaatggtgctccttactagacgggcaactgcatttactgtagcgtttttctctctagggattttcctaattgtgtagccttttaactaacttagtaagtctttgatttttctcaaaaacgcaaccattttttcacctcgagctgtatactcacccaggacttgattcacggccagttgagagtcacagaatatgtccaggtgatcagcctgtacttcttatgccagcttgagatcaattattaaggcttcatattcaacttcattgtttgaggctttgaagctgaatttgatttctccatccagttgctgcccccaggtgttataagggcaatgcctgcaccagaaaattggtaagtgcaacttccgtcaacatggagtttccatgttagttcttcaggtttttgctattgctcttgctctcacttcttctccggctcttgcttttctcctcaattttgagagatttcaagaaatgagtttgtgcactcagtcacaaagtctgcaagggctagaccctttatggctgttcttggttgatatgtgatctcgaactggctaagctcaatggcccacatgagtagtcggcctgatacttcaggtttctgtaaaacatgccgcaatggtaaatgtaatacaatttatgtttatttattaaagtttaaattttatcacattttgataaatcctttgattagcaaagattacacagtaattatgaaaagtactgtagcatgcctaaactagttgggtcttacgtattcattcacaattacggtgatgtcatcacagtagaaagtaattgtgattatatgcttcaaattatttagtccaatgatttattagtgtagtagatttacactgatgtgataatcagcgatggggtttacttacacttggataagtggaatatcttttccaagaaattagtatagtaaactagcatcatatatattggatatacatcgaactggactgatatgtagagtggaaaagatatcgtaaacttaccgtaatatctttttgaggtaaatatttaaaagttgatctttgatcaatgatcatattcttgagatgattatgttctagctcaattgtgtttcacatgttctttgctttattcgttaaaagctttcccgttggtttagctcaaatacttacatcttgggaacatggtagtgtaattgagtgggaccgctagtcatagatatgaaatctatagcttctataagtacttagaagtgaaataatagttcctttagggcttggctaaatgagtttaaatgattgacacctcattttggaattatcttagtttcctaaaatatcatttacaagtagctaaggttttaaggataaaatacattgaaacacaaaatggtaaatttaatccctattcaatgtagaccatttatagagaattattgattatttagattgaaataatggataactaatagcgtatttattcttggagaatagagcattctatataatcaggagtaaaattctaaatctatagtggaatcaagaggaaataagaagataagaaattcagtcgataattttggatctacttattaggagcttaggcccatggtccccatatgttttgggataatatcatgttgtaggctcaactaattgatttaataagtcaattagaattcaaaaataaacaaggtttcatttgagaattttcaccaagcttgggtaattttgagaagtaaagagaaatatagatttatttattgattggtaccctttctaggtgtaatgaataaatatatttatattgtatttttatttataattattaaaataaaattagtatttaaataattagatgtgataagttgtaaaataggaaaggacactttagttttattaggtgaaataaagtggaaaaatctaactctaaagctcataatatatgcggccctatgagttagatatcagcccaagtgtttattttagtccatcacatctaaacttagctctatgtgaatgcctatataaagaaagagaagagaattgaaagggttaatgtcactccttgttcttctccttatttatcaaaattcacaagaaataactctttcaaattttttccaaaggtgtttgagtatcagcccacactattcaagttgatactcagacattagtgacagattatgatgaacatattcgaaggaggagaaatctaggtccaattcttggtgatactctacggaaaaaagataaaaagggttatagaactaaacggaaggagacatttaattttgctacaatcaaagtaaagtttttttaaaatttttatgtgtttaattttaattattttaaggttccatggattaaatatgctttccaacactaatctatctatggagcaagttctccatgatattgatggagataatccccttgtgagtcctagtgataattctttattgatggcttcttctacaactgaggatgtgtttcaagtggtgaaagcaattggggccactaaatcaccaggtctagatgggtttcatgcgatcttcttcaataaattctaggatgtgttgggtgaaagagttactaaggtgtgtcttgatattcttaatgacaagatgtatgttcaacaatttaataagtcaaatatagtgttgattcctaagattccagaatgtaaaattgttaaagagtatcgatccataagttagcgtatggttatgtgtaggattgttgctaaagcgttggggttgagaatgaaaagtacacagaaccctcttatttcttcttttcaaagtactttttttcctgggtgtttcattcatgataatgttattgtgggttttgagtttctatattcgtttaaaaaaaaaacaatgggacaaatggatttatggcgcttaaacatgatatgagtaaagtgaatgatcaggttaaatgggagtttttgagatttgggtttgcgaaagggttgattaagcttattatggattgtgtgatgacccctgagaatgtttttcaagttcataggaaggtcaggggacgtgcattcctactagaggtctgcatcaggggtgtcctttatatccagacttattcttgttttgtgcaaaggctttgtcatcgttgatcacacaagcaaaagctaattcaaatttagttgggttttgatgttcaaggtcgggcccatgggtatcacttttgttccttgctaatgatagcttaatttttgggcaagctattggtcatgatggagagactattaggacaattttacaaatgtaagaagaggcttcgaggcaaaaaattaatttttttaagtcagctatcatgtttagtcttaatgttaatttcaattattttgcatgataagcatttggggtttccaatggtagtgggaagttgttaattctatttttggcatatttaattgacaaaaatattttattatttcctattaatttcggctggtatgtgtgtaatttggtttcctattttgtgta

SEQ ID NO: 21741 - DNA, 1852 bp, Cannabis sativa
catctctaaatttattatgtcattaactaatattttgaataatgtaattctttttaaaagtttgaaaatgactaaaacaaaaacttattttggatgcaaaaaggacagagccactaagtcacctaaaaattacattacgttggatttttatattgtaatccttaattttatgggcattatcgtgtgcccagtggcgtcaaagtatgtttaaccatttaaagaattatattatttaaaatagaaaattatacattgtatatgctaacatattttgtaagaaatttgaagagaaaaaggagagaaagagagtatattgtcaagattatgatttttaatttatggagatgttattcataaaatatcatttttgaaatgaattattatctttgtaaaaagaaaaaaaaaatgagttattcaggaactaacatgaaaattgacacttataaagacagttgcttaggcataaaaagtaggtgaaaaattacttttcacaataattctgcaagataatttataatcattaaaaacaatcgacagtttccttaaatatttatatttttatggttcatccaaaacatgatcaaatgtctcattcattgcggctttgatcgaagttgtgataaattaatgtcgttatatttagcttaaaagtatgttattgggcactagtagatatgttgtcatgtaattgaatagcgatacttcccaaaatttattatattaggattatatgaaactcatacttaattggaccaataatgatattgacacgtaagaaagtactagacaccactaataccttttatagcatttctcttaatttaatgcacaaatatttggaaaggaaccaaaaaacaaaatgagattctataataaaagtgatctttctaaaaaaaatggcttcaataacaaaataatttccctcataattatgattagaaatttatactaaattctattattttttcaattttactcttcacatttgaaaaggttctcaatctctttaagagccaatttggtacaaatgtattgtgagaaaaacaattatagctatactgtaagagaaagtagatgtgaaaaagaacttagttgaatattagataaattatagattttaaaacattatgaactattaagattatattataatgataataatattacaatctagttcattatgatcacaaatatataaaagtttatgttatgtaaaatttattttttattttttgtctaaactgcaaatttatatgcatttgataaaattaattaatagtatttttcaattttattttttattacatttatgaaaaataaaaacttaaatataaaagaaactctagtttggtgtggtttgttgacataaaaaatataaatataaaatatttttttaaagcaaaaaagtgttagatctctttgacaatttaattgtcaaaatatattttaattcaatttaaatattatgttaaatgtttaatgccttgatttgattttatatggttaatcttaatttggttgttctcaaaagaaagaaaatattccttttatggaataaaatgatataaattgtgtttactctaaaaaatagcttaatgacgtgaacactattttcgacacgttgtataaaggaaaacaaaccctgaaccccgcttctcaagataaggcagtgtcacctaccacaaggggcatctaggtaggcatttagatctcgcgaagttgtttccaatgtttttgttagggtttatgctttgaaaaaaatgtatagatattttttgttataaatagtagttaaaatttttgatatataattcaatgttgaattattaatattttatatttaataatttat

SEQ ID NO: 21742 - DNA, 2284 bp, Cannabis sativa
gtgatcaaagtgattcattcccattcccttccaacaaacaagggagaattttttagaactacttgaaaactaaagttcatgaagaaataaaacataaaagttacagataaaatgaggggaaaacctttgatgaagatggggagcagccatttaagggatttgagaaaacagcctgcaatttgagattattatctgcaatagaaggcaacaaagccccaaaccttgcattgaccccgactaaagttttgccttcatcgccatcaatccagttgttaaccttaacctataatacaggaaagtattggaaggcaaaaaacaattagaatatgatttaaaacttgagctgaaaacacaattccaaaatagcttcctcacctataatatttgtaagacaatcatgaatcaaatatgtcgcaacataattataaacattgatagtttttagttattaaacaaaagtcccagagtcaaaaacatgttaactctttaattttatctttcccaaacaaccgcctactttggtaatcatgttcccgacaatcataaatttaaaattagtaatcaaataatttgccttgtaagaagattaatttgtcaataaaaaaataataataacaagcacaacacccgaagatattctactgcatgtcatatatttgtgatttgttttttcttagctatggaacttcaaacaatgctaaagatttcaactaggtctctatgcagtaaaagtcatttctctagtggtatgtatttggtttggataatggctcctgctatacagagaagcataatctaggattgccaatttacacggtcttatgatgttgataatagctagtaatcattcgtcattgacattgatttcataataaaaccacccccaccaaaaaattcatatacaaaacaaaataatcacagcatcaaagcctcaaaaaagctcaagaaacccaatctgatgcaaaacaatagtttataatgcaaatctgtgaagccagaagaacccccaacaccaattctgaaatttaactctccaactaaaactgggttcctccaaatttaaatacaacatatatgttcaataaaaacgcatagcaacgaatgatctctagttagatcaagaagtccatattcctcaaaattcaatagatcaccgatccaatccataatcaacaaatcaccattctccgaaattcagcactcagctctcaaagttccaaaagcaaatgcctaaatggaatcaagtgaaatccccaaatgcgtttaacaaaaagaaagaaaatcaaattcaatgggaatagtaccaaattaaaagggttgttgcaaaagggggacttgggagaggcatcgtcgtcgagggtgacatcactacctccggcgaaagagagagcgaagagagagaaaacgagaaaaatgcggaggctatgaggatgagaagccattgacagtcgtggtcaccgctcctcacgcctgagaaaatctttttgtctttatattcgatctcagaggggaaatgagaggcagagagagatggatatatttgcttgtaattagttagttattaatataaaaaaagaagaaaaaacataaataatgggaagaagaagaagaagaagaagaagaagaagaagattgtacggtggaagatcaaaccaacggtactcaatacagtgctcaagattgattgaacacaccggcaccaaaaccaacaaccacttctttctacaatactagtgaaactacaatggttactaatactatgcccctaatatttggcttatttatcgcaaatgataataataaatttattcaaaacaaaagtaataataattttccatagaaaaaaagtaagactaataataataataataatagattttttttttttctgtgaagtatgaatcttgaagagagttttgtttgttgaattttttattttaaaatatattaaatatcttcgagtcaatcacactgtattttgactaaaatagggagtgagattaaaaaaaatgaacatcaaccataatccctcaaaggaatggacctatgatagttgggagtacataattcctcaaaagaatagggaaatttaaatttccatgcttaataaactcataaattggccccctaaactaatactatgcataattatttaaatgggataactttttcctaaaccccaaaatactcctcctattttttccaaccgtccctctctcttcctcttttttctctcaaatatcacaggatccaaacccataccggccacgcacggtgtcacggg

SEQ ID NO: 21743 - DNA, 2273 bp, Cannabis sativa
tgaaattctattcattttctctcttcatcttcttctttcttctcatctactttatataattttataacaatttataatttataaatattattaataaatataaaattaaagtaaactttttttttgaaagtgaaattataaccaacttttagagaattgtaacaaataatttaatcagtatttttttaaattcattaaaaataccattaagggagattttcccataaaaataataaaatgtgtaatttctctgaataataaattactgtttttcataaatgttatatttggagtgatttaaacaaaaaaacattggcaattttaattttctggggacttttctgatatcgatgacttttttggcgtcgatgactactttcacaactttttcggcgatagttgttattataaataccccatatattgtttttaaaactttttttttttttaaaattgacgatatggatttctaaagtggttgcagcactagttacaatagggagtttttatacgattttttattgcaatttaagttgcagcgctagttgcaatgagaatttctatgtagaattccgtaaaaatgcaaaacaaactgttttgaaatgtataaatgaaaaattcctacaaattttacaaactttatttatggttttatttattttctcatattttaattattactgattttttattcacatattttttttttgtattatttatttctattaaagtaaattttataattagttttttccatatttataattagtcacacaaaaatatgagttatccaactaccaaaactttattataggatcatagcttagcttgcctctatatatatcttaaaattgataacttaatattatatatattagaggtattagtggctaattaatttctttatttctatttttaaatttcatttaatatttaattagtattaaaagtgcaaatcaattaatatgttaactgtatacatatgcttatttgaagtttctcttaagtgtacgataataattaagaatattattctttcgacctatagtcttttcaaatggtagtgctttgaaacattatactcaacgactcaattttcattatttttcgttacaatataggcttttttttcaaaaaaaaaaaaaaaaagaaaaaagaatagattctattacagaacaatctttagtggattataatgaattaggcttacgtttaataatatacactaatcatatatttaattacttaatgtgagtgtaatatattgtaaacaaatgtgtatggacacaaaaatgatggctataaggcctaagagcactccataaatgagcacacaagaatcctgagaaaaccctatatacttggaagtcttttgagaaataaaatagtacagttttttgtgttatttaatttatacctatcttttttgtaggccacaacctccactttgtcaagattcccctactttccttttttaacaagcatctgatctgatattctggtttttagcttcaaaatatttatataattcaatgagaattaaagatattgtattattaacatacatatgagagtgagtgtagtagtactactcactttttctagcttttttatttaattatgatggctatacctgaaaattaagtacctatatacatatagtaccgtaccattatagctaacacaccatacaaattcattacaatatttacagaaaaacaattggaataatctatatttatattataaagtttaagagtaattaaaaagatgacatcttactttttttttaatgtatttttaagattttttttggacatttaagttcttcctaaagaaaaatgttatattattttttattaattaagtaaaaagtctgacattgtataaagatattttggtgttactcataaagactataaatgataatcttattttttttttttacttttatgcgactaaatattcattttaatttatttttacttccacactattatatatgtattatatatatcgagtttatatatggagttgataatttattcttaaaattatttttttttattttattttagatggataatagtgaaaaaaattatgttatttttattattatatgtgtgaaaataatattgagaaattttaagaaaatattatgtaactaaaaaaaggtactaattttaaaaaagctatacatgatttttaataaggtaaatttcggcaaaacccctaaaagtttcgcactagttgcaactaacccccaaaaccta

SEQ ID NO: 21744 - DNA, 4274 bp, Cannabis sativa
  modified_base (2693)..(2699): a, c, t, g, unknown or other
ctccatgcaaccctgatttgaaacaactgtttaagacatcccacttggaaggatcctcatcccaaacatcatcaacaacaaagagaaacttcttcgtactcagagccttctttgcttcttcttgaagatcatatggctcttgaatttcacatctttcagaagtgaccttctccacaattagtttcatcactttcatgtagtcaactttttcatctcccactgtaatccataatttagtatcgaacgtttcgtgaactcttttgtccttgtatacaagttgagcaagagtagtctttccaataccgcccatccccactatggggatcactaacaatttatcaccggcacttgtgtcatccgacaagagcaacttaataatagcttctttatcatcatcccttccataaacatcaggttcttccaccgaaggagcacatactctttttggatgttcttgtttttctatacgtttcaaaccaagatctttattgtctagaagaagcttcaatttcccaagtgtctcttctatctcaggttttatagccttatcgaaagaatttaaaggaattgatgagatgagttttagaagtagcttactagtacaagtgcagccaccaagagattcatgaggaccaccatcttccagttcatttctccatgcttcagtgtcaatcttgtaaaccaagtcgtctgcatcataaatggcatccttgagatcatcaagccattttctcaccttcgggtctttgatgagcttctcctcagcatcaatgagcaacagattagcagaggacagtaaagttttgaactccttcaacagcttaagaatggcttcttttcctttgaagaaatccttgacctcagtagttaacttgttcaccaatggattaagcaaagcagagagaagcgctcctccaaccaattcagccatcagatcttcaaaaactcagaaaggattacaggaaatagtgattgatgaacacaatgtagtaattcaaaagagagataatatgagtgagtgtagtagcatgtatttgtatagtttacaataaaattttgagtacacactgctctgagagaacatcatggggtccattgaacatagtttattacgagtttggtttactataacttaattatatgttaatttaattttggtagaccgtgctagtactggtttacataaatttaaaataaaagaaataaaatagtactcattatttgtgccttcacgtgtttgaaagtcaaacacagcaacggctatgaatagaagagatcaaactttgaaatctgatcatttcttttattattaaatttaaagggttgattggaatacatacaactcaaaaagcagatcatggaattaattaatcaacaatttggataaatattgtattgcattatatgaattgaataactgaatccaagatttatagaggttcaaccaaaccacacaaaggccaaattctattctgaactcaactcatttatcgaggttcgaccaaactacaccaagattttttcccaataaaaagtgaaaagaatatcataagaatacattattcaactattcctagattatggaataatcttccatgtacattatactgatatgaacttcgtattatgtgtggtgacaatctttttcctcccaacagtcaagtgatgggaggtctaataattttcgaaacactgtcaatgtgaacatcttctgcaagccttgctcctcttgttttcgcaacaactcctttcttgtctcgagagctcgaaatgttgatgagtcatacgaatggcaagtaatccaacaacctatgaaatgtaaacaatgtcactaacatttaaaatgatttgctgatttattcaagttaccttagattcatcaaaatagaagtcaactacagaacattcttccaaacattaatagtttccaacgatcacagacgcatatataacctagcataagaaacatatataaaaacagtaactttaacaattattaagggcaagatttacagggaaacaattgtatttacaagagctttacatttaaaatttactaatatttgagggaaagaaggtagaaaagtagtccattttctgtatcatctgagaacacttgcaaggttaagagagaagctggtttcaaatgcaaactaacatcatacacttgatgccatcccaatgtggaaagcttcttttgatgccatgccatgccatcccaatgtggaaagcttcatcaacttcacatctgtctatgatataaaaccttgggagtttcatccatcaacttcacataacatttttcaaagtaataccccaaagctgcacatatgaaatgaaaggatttcatttactatttctatccatcatgcaaattgagattttattttttattttttataatagaattaaattgtacctcaattccatatggttattctatctgttcaataaaaaggatgaaactctgaatgaaattttaattttaaaatataaattgattgtgtcaaacaaacatattaacaaccattgaaattctacaaaaatataactaagcaataattacagcagaagattacaaaatataaaatcgaaaataaagaaaaagaagaagagaaaagagtaatacctatactttcttccaatcaagagtgacatttgggatgtgagcaataattggccagtcctccccnnnnnnnctctccactcgtggtcttagcaatggacaattgaaaatgtgtagttcagaaagagaagtgggtagttcttttggcaaacatcggaggtaaggacactcttcaatcgtcaacttcttaagacgaggaaaagcttcaccttccataaatgaccactcttccagcttagacaagcgtataaatttcaaggtctccaaagatgtaaagaataagggctttgtttgtattgcaacagaagaagaagtgacaagagtagtactacaataaaactctgaatctattctcaccacaccacaacccctaatcgaaagatctttgagagaaggcagctgtcccaacgacggcaagaagctgcaattatagcaatatgaaatcttcaaccttactaaattagacaagcagcgatgatctcccatccaatttggaaaattgttgcctttgtagttacaaatgctaagttccttcaggtttggatggggttggagggcattgagtagctctctttctttgtgcaactcatcaacttcacgttcatgttgatgaccatattcccattccaaagataggtgactaagagacttcttactctttaataatggtgctgcagcatctgaaacttcctcaagcctaccaacattatttagtccttcaatccgaaggctgccgtgtagatcttgaaactctttcaacaattcaataccaccacaatctctatttcttcccacaacaaatctatttagtgtttgcagattttgtagcttccccaattgcaatggcatctcttctaatgaatccacaggaacactaagatgtcgcaacttgattaaatttcctatatcagctggtagtctgataaccatttcacattgcttcaacaatagggtctccaaattatacaacttacaaattgtattaggtatctctttaatcttacgaaaatgtaacttcaaatatcttaaatacttcaaattgcctattgaatcaggaagcttggtgatattacggtcctctatggataatactctcaagccttggaatgacttgtccaagtcttcaatctttaacaaccttagttgatcactgcttgaaccttgttcccacaatagggtgcgcaagcatttggctttaaataaatcctcaaattccttagggtcttcggcctttgcacattgctgcatgtacgaaaaatgacgaaccttgcgagaacatctattgattttattcatcgttaaacaaaaatcaccagaaacaaacattgccaaatcatgtataagatcgtgcatgagaaaagtcggtttcttcgcagtgtcatttgatggttgaaaaaatgacacagaaattagatctttgaagtacttctttccgatatcttcatttctgattccctctttagaaagtaaaagaccttcacccatccacagtaagaccaactcttcttctgtgtattcataatctttaggaaatgtagcacaataggagaaacaagacttcaaattaaaaataactcagccataaagctggaagaataccaacactctcactctcgtacaatccccatatatcattgtttaatatgtc

SEQ ID NO: 21745 - DNA, 7273 bp, Cannabis sativa
  modified_base (1422)..(1428): a, c, t, g, unknown or other
  modified_base (6273)..(6278): a, c, t, g, unknown or other
ttatttacataaaatatattttttgatatacttatatattgtactcttgttattttactgttgattttttgttatttatatattattttttttttatgtagttttgatgttgtttttaaattactttcatatggttttcttgtattttatagaatgcggtaaaaatgaaaaactttggatgtaaaagtataaatagtttaccaaaaatagtagtttatgtatttttctatattttttttgctgaatattatatttatattttttgttttttttcttctttatattatttttaatcaatttaattttatttttaaatacgaacgtttttttttttaaagaaaatacgaactaaattagaaatcaactgcgtgctaaaaatgaggttagtgacaattttttagttacaaaataattttgttatgattaattatttttaattacaatataaagttacttgtcatgaacaaaatagtatttagacataatatatcaataattaaaagttgtgattttttttgctatttctcatacttgacatcgttgctaaacatgagccgattgaatattgataaatggtcacctgggttcatcatccactatatgaaaccatctctaagatcttgaaacctttggggagtggtgcctccagaacgtgcagagcacatggctccacattgtcttctttggattcgaattttacacccctacctcattagagccatttctttctatagggctatcaactcaaccattatttcctcattagagccgtaggtcgtaggttgttacgtcatacgtgtggttaccatttttgcaaatgataaaaaatggtgcaaaactttcttttagttctctataaaaacactaaaatattgactgacatttttgacaaattataaaaatatagagaaaataagacaaattaaaaaacaaaaaaatagattacaacacacgcattttacatggctgaggtcctaaaatagctctaatccatgaatcactgtattagacttgagcttggttacaaacattaatgttcctctaagaattttggtggcattattgcttaaaaattaaaaaatttgatcctttacaatagagaaggtggtcctatttataggcagttgcgtgattggattggcccaatatattctaattaatattaacctctcttatggaggatttataacaaattaaataaaaaaatttccccataagtaagccaatacaaaaaagacaaaagttgacatgtcctatttgatgtgcaccattgatcagtgtaggtgaaatcgccactagacacatgacaaatggttttattagggcatctctaatggagatccaactaagtgatgcaaatataaaatatagcttattttgttaaaagtctactccaatagtgtgctaaattatgatgcaaannnnnnncataatcaaaagtgatctaaatttgcatcacaatatagcatgatgtaaaatttatatcacaataatgctacgcttttatatttacaattataccatttttaatttttttttattaaatcttagctaatatacttctttgcattaaatgacttccattattgttattattttattattaaattttacatttaactttgtattattattattatttatatttcttactaaattattaagtgagcattaaataacatattaaaagttgatgtataaatattacaaaactactttttatataaaatatagatcaacttttacatctcccaatcttagagtagtgggtgcgaatcccatgtttattaatctttattcaaaactttctttgctgcttgtatggagacaagctacagtgtccttcaactaatgtgtcaaaagacgagtcgaatactctgatcacgtgaacaatgtgtgggtcttactcaagttgtcttggaggcctgatgttagggtttatattttaaaaagtctaaaaatatttttattataaattgaacaatttgatatataattgaatgttaaattatttattaataatttatatataaatatcccaaaattccttatttatatatgagaatgtgagttgtattatacggagtattaagatcatgagctatgaataaaatagtcagcaacatattaaaattatgaaatttttaatctacggttgttagcacggttcattagcccgttacttggtgcaagcaattttgattcagatcattgatgtcgatggatttttcaatgaatgtgttgtatataatagagattatatatgacataactgatatgaaattaagttgtctttatcataccagtcgtttattataaagaattaattcatatcgcagtgataatcaattagtagatcgacctaaatcctaagaaatcttgagacccgtaggtaaaggccaacgagaaatcttctaaaatcggtggattaccttgagacccgtaggtaaaagccaacgagaaatcttctaactatgtcatctaggaatgacttaattgagcctagacaggatgcaacccaagctttgtaggccttatgtgtgacctgtgtggaccttctttgatagtgaggctaatttcttgatgtattcatctgatgcatggtaacacatgtctcgtctaaaaatataaacaaactttcttatttagttaatcttagtttattaactccctttcggtgcccttcctcttacttttaattctatttaacttcatggttagttcaataatcttttccaatttgaaaggaaattatgttcttttgaataactttcttgatgtacccagactgttttaagttgattgcccttttcttcctatttcttgaaacttcaataccaagtatcttttcaataggtccaagctttttcatctcaaactctctcttgaatttggctttgatacttttgatcactgattagtcttgcctcattatgagcatgtcatccacatagagaaataagaacacggctctacattgctctagattcttaaaatataagtagtgatcatatgctgatcgtttgaacctgatttgttgtatcaaatcttttattccattatcttgggaactatttcaaaccatataaggacatgttaagctagcaaactaactcaattcctttatcttcgtcctcaagtcttggtggttaccttatgtagatctcttcatctaagaatctatttaaaaaagtagtcttagcatcaagttgttcaatttcaaactccatttgagctgtcaatgacaacatcaatcttatcatcttgtatttaccacgggtgagaatattttagtgtaatctatttcttccacttgagtaaaacccttagccactaacttagctttgaacctcattggttcattcttattaattccctctttcaccttgagaatctatttgcactccactatctttttattctctagctttggtacaataaccatagtcttgttcttctagagtgagtccatcttctcatccatgtcctggatctattttgacttttttttttcacttaaaattacctcttcgtagcttctgggctctttaatcttagtttgttgtactgttgccagtgcaaatgctattaagtctactttcgcaaaccttgtcggaggatggatcactcttctgaaactatcacacgccaactaataaccttccaaaccttcctgtttgaatctttttggaacctctatttgggctcagcatcaacttttatctgtgcattgttttcctgttccatactagcttctgtctatgaaccttcttctaaatgcttcattccgtaatccatttccatgcttgtagtgttcttgtttcatatttttcctacttcacatggagacacactacctttatcggatgtcaagtgaggatattctaattcattgaaaataacatttctagcaatcacaacctttggtctacccttcttgaaaatgcaaattctataccccttggcacctaaggcataaccttgaaaagttctcttaactctaggttccagcttgtctatagattagtgtacataagtcgtacacccaaaggttgttaggtgcattaggttcgggattctgttataccgcatttcataaaggatttttaagcctataacacgatttgggcttctatttataaggtaggttgcagtagctagagcttcccccaaaaatggtttctctaattcagaactgaataatagacatgtaacttgttcaacaaggttcggttcatcctttcaacaataccattttgctttgggattttcactacggttctatgcctaatgatctcttactctcaacacaatatgtcaaagtcagagttaataaactctaactcattgttcgtcctaaggttcttaacttttagatcagtttggttttccacctgggttttccaaattctaaactgttccaggcactcattctttgttgctaacaaataggtccaaacacacctactataattatcaactttagaaagaaaatattacttgctagagtgagcaggcactttgtagggccctcaaagatcaacacgcacacatttaagtaacttcttaattgtgtgccttgttagagtgaattttaacttatgttgtttccttaaaacacaagcttcacaaaattgtaaggcatgagaatttgaattttcaattatgccttgtttgtgcagttatttgaggccttgttcactgatatgcccaagtctgtgatgccataactttatatctcattctatccctttgaccaaacgtgcctctccgactggaacaatttctccttagagatcatataaactatgatcttttcacctttcatcactattagtgaacctttgatgatcctcaagattacgtgcagggacatgtatccataaccctcatcttcaatcacacccagggatatgagggttcatcttaactttggaatatgccttacgttcgtcagcaccttgattccactatcatattgtttgatgacaaccttgttggttccaatgaccttgcatgaatagtcattttccattagaactttacctccatcgactgatttataatcaaaaaataattctcgacttagacacatgtgataagtatatccggagtcaagaatctactccttgttcattaaagattctgatatggacaacaattctccatctgctgagcagtcatcactgtcttccgtgattacagtagaatccttcccatggtgatgattttggttgtccttcctatctccattgtgagatttgttgaagccttgatgttccttgtactttttgcaaaatctttgcaagtgtctggactttgatcttgattgagagtgatggtgtttactttacaaacttactttcttgggtgatctccctctttctaaacacttcttctttcttggattctttttccaattataatgcaaaatccttggacttgagtgcggcaagaacatcttccaacgcaatcacatctctgccatatttgatggcagccttgacttcttgatatgagattgggagagatctcagattggctttcttaatcaatcttatggtttatattagccaatcctacaataatctcttaaacctaacttctcaagctttttccatattccttttgttgtcttttctctgacaagctttctcctcatgttgttggacaagtacatgatgatcgtgtaataatccatctcctccatttctattttctcttttgtttcttctcagccaataacttctaatctcgaagaactctaggatccctttcaaactttctctccatagcgcaaagtctcctgttccatcaaattctctaattcaaatcaagccatcaatgacaataattgtttcttcaagaattagagcgaaaagaatcttgattctacgttcttgatcgattaccaagctctgatttgtggaaaaattacaacttatgtgcagaatcaaatcaacaaacaattagcaatgacaagattaacgaataacacacaacaatcagagataaaatatggatgaatagtgtattaaaacaagaaacaataatgcaataaaataatgaagtcaacaccaagatatatactgattcaagtccaatagatcgatgtgatctatggctctactccagttctagaacaccaccgaaatcctctttattgattgagtaagaacaaggtacaatacagtcgagattgattctctgttggattctctcaaagtgtttatctctcacactcttaccccaagaatcttcttcatctacagnnnnnncttcttacaaaatccaaacccaatctctctccctctcttttctctataccactctctctctacttctcaatctttctctctcaaggtaacctctcgaaactcgtctaaacttcttcctccttgaaatgctaagtgttagtagtatttataagttcaggatatagatcttaaagtcgatggctgcaagtgctaagttattaagttagttacgacttgacaaacttaacaaactcctcgtaacagaatatccacgtcaacttaagttatagtgcacccggatgaaataaatgcttttgggactatgaactaaagcacacgctgaagggtcgtcccggataagaagagcacagttggagtcaactatctggaactcccttataggaggaaacaactagccatttgaaacttctttctggaggaggactagctttcctgaaggcttccactattacaaaaactagattttgtgtcggttttgacgtcgacaaaatttaaaaaattgacgctattaaagaactcgtgaattttgcgtcaattatgcactggtgcaagattagcgtcggttgtaagactatttgcatcggttctgcactgatgctaatcttgcgtcggttcacaaccgacacaaaaactcctacataaaaaaattaaatcaacagatgggccaagcctattttacaaaccctaaatatatataacctactactttcaaccgccccatataccatttttaaaagccctaaatccatctctatctctctctttctctctctctctctctctatctatctcggtgaccaagcctagcaaccggccagccacaccccacaatgtcgaactgagcctagtagcagccacaccccgatcgacaatgcccaggtacgtttctcacatctctttctctttttcaatctcaaacgctctctttctctctcatcttcggtggtttttggctccggtggtgtagcacttgcacgctctctctctctctctct

SEQ ID NO: 21746 - DNA, 1344 bp, Cannabis sativa
  modified_base (902)..(905): a, c, t, g, unknown or other
caaaatcgatatttaatcccaaattcaaatgtaaaattagattatattattcaagcatcatgaagattctagactcaaacacatattaacattgttctaattagataaaattaaagaaatagaaaataaaaattacatcgcatgtaaattagatatgaacagtaagtaacccaccttgaacttctcccctgcctagacgttgtattgtcatcaatacagactttacctgaaatttgagtaatcaatttgaaagcaatttcttgcttctccaaactctccacagtttctttctcattgaacacgaaattcccactcatttgatctgaaatttgacttgaacttataggtgaactttgtgatgaaatcaattttcatcaatttctcagcattggaagccgaaatcgaaggatagttctgagacagggcaatcaaaaagccctataaaactacaacaatcgcctgtcaactcagctatctcagttgcaaaattcagcgacgattctgccgctttgcatacatatcccaaaaactcagcaaagaacgaagcaattgcatcagtaccaaatgcttgcggccaaaacgatttaccgaataagtccgaatagaacaaaagaactccaaaaacactgctataggatggagagaccattggattattggggcttcagggattgaaatttgggtttaggagaagaaagaagaatcacaataaatatggggatgaagaatcgcgatggagaattgttgggattgaaaattgcaggttttgttagagaagaaataggaatcgcagtaagtattttggattgaatgagattaattaaaagaagatggtctccgttaaagttaacggaataaaaaacaacaaatcgttaaaccaagaattgccgttagatagacannnntaatatataaagataaagataaagatatatatatatataaaataataaaaaatatttgccgcataaatattatgttttcgaatttataaagtaaaaaatttatatttcttttaaatatataaatatcatacattacattttccaattctgtgttactacaattctattaaatgatgagtgtagttattaggataccaaatatcatgttattattggtctattttgtattaagtgttaaatatttaattaattattttgactaaaataataaaaaacttattaaaaaaactaattaattaataaattttttcaaaaattatctctcaaatttgtcaaataaaagaaaaaaatatctccatcactttcttcttcactgcagttcttcttcttcaagtttacccaaaaacatgtgatataacataaaactccaatccacaaa

SEQ ID NO: 21747 - DNA, 2325 bp, Cannabis sativa
tctaacactgacatagctaagatataatttcaaacataatagatttgttgtagatagatgtataagtttgtgggaaagttggtataaaattttaattaaagaaaaataaaaactgtcatgaagtgataggagtaaaattagtaaaatgattgaaaaaaaaggtaaacataatagatttcgaaatagtgggtaaaaattaaagaaatcaaattaaaagaggtatctagtgtaatttcctccaagtatcacttagaagaactgggcctctgatgtttttggcttacgaggaagcccataataatacactcttttcatcagcccaagcccagaccttcaacagtctcatctcgacctaccaaacacaaatcatagaaagtcagcagccaaatttcctttcccactatttccacttgtcctactttttctccctattttcctttcgcacgatttttttatggcaagaaattaagtattgaactttctaaaaaccctatttattataacattatttaagacattttaaactaaacttaattgtacaattaagtttattattaatttattatatttcttacttaaattgatcactaaaaaaggaacaaaatcactccatcaacaaaagtgtaaatcatatttaatttatttttttttttaaaaaaagaaagaagttattgatggcatgtttatctaagttgagtgaaagagtaatttaatcaattcaaacattaatttttcgaattatgtttctttttttttttttgacaaagttgtcaatcatgtttcttaaatattactttctcacaagatgaagtaattttgttcttctttcaagtccgtaaaataaacatattttagttttttatttttatttttaaggactttaattttagttttgattctccttattcccaataaataattattctaaattcttttccttagaaattatttcaattataaatgattcctatttacctaaacatgtaccatagcgtaaagtgttaaccaagttaaattattagattagttcatcccatattttagttgtgtattattagagggattattgaatttacttggtcagaatcagtcacaaaatattccacaacgattttttttaggataaaaccaaaatttcaaatctattcataacatttttccaaatcattttattccagagcacacaatctaaaaaactatcctaccaagtcgtaaataaattatgagaaccaatcaaatcaagagaatgctaagagaaaactaatcattgccgtaagacattaatactttttaagagtgtaagcatctctaataattacattaatttagtactgaatctacactaaattggtgtaaaatcttttatttttatgacatgtttacttaaagggaatgtgaatgaataatataatattgattaccataagaaacccacacaaattagggagaaaacaaaagaaaaagttctccccatctttataagaataactttccctttcctaattattttaattttaattttattaattaaaaatgaaaaagataaatatacactttaaaaatctataaatagaaaataattatatattctaataataacaattttatcaaattaaagcattctgattacctttcctagttatataaataaaataatagacagttaagtaaacaacataataaaatattatttttatttatgattatttatttttattttaaatcgatttatttctctcattgattattctgattccaattacactttagtaaacgcgcagtgagcaactccaatgacttacaccaaacaccacactaaatatccatcaaataaatattttccttaaaatatttcacattttattttatttacattattaacccatatgatatgatgactattagtaagaatttaaaatcttataataatttagtaaataatatatttattaaatgaactaaaatttacacattttctttttgaaaaaaaacttaaataaattaacacctccataatttatttttctaaattgttatggtgttcccacgtatgatcaatgatactattgaaggacatattgagcatctgtatccttgatttgtctatgtcacctaagaaaatgttaaattattttgatatttttcaatattattccttaaattattaatttgactattaaattataattttattaatgtttatttttatttatttgttcttttaattttataagttatgatgtctttattttattttatattagtatttttgttattgttattttgtattttttaatatgctagttttttaaatcaaatcttatt

SEQ ID NO: 21748 - DNA, 1953 bp, Cannabis sativa
atgataccaatgagtgcaaaaacttaaaagaaaagattaaatttctcattagaaagaacaatccgcacatacaaaggtatgtaaaggctgaccaagatcaaagggccaccaaactagataagaaccaaaatttcttaatgcctccacctgtggacgagcacttacaagttattataggaggcccgcatattgctagatattctaaatacataggggaaagatatgctcaaactcttcagtacgagtagggcaatgaaggcttggccgtagaagagagaagatccaatcataactttcagtgatgaagattccagtcatgtgatctatctgcacaatgatccgcttgtagtggatgtgaaaataacaaacaaaatagtggcacagaccatgattgacaatggagcctcatctaatatcttgctcaagactacttatgagaaaatggatcttaaacttaaagacgtggttccttgtatgcagttagtttatggattctctagccaaagcatagcgcctcttgaaacatgctccctaccactcatagtaggaatctccagctacaacaacaatcatggcacaattcttggtagtagacatcccctctgcatttgacattatgctaggttgtccagccttgtatgacttaaaagcagtaacttatgtttttcatttgtgtgtcgaattcctaatacaaaatgggattggttgtctaagaggcaatcagaagactgcacgagaatgttacaaccttgctctaagtaaggccaaaaaagaagaaaaatccaacaagggtttagagaaaggaaaagccaggaatccgcctaaggaagggatggggatgtggattcgtggcttggggagcaaagtacaaacattgggttgctagaagaattggatggagttgagatcgatccaaacattctgtctaggaaaatcaaaattggtaaaggttttctgattaaaatgaaatcaactttgataaaatttataagagcgaatcttgatgcatttgcctggtcgcatgaagatatggtaggaatcgaccccttaataacaacacatgtgctgaatgtagatcttcatgttaaacccatacaacaaaaaagaaggttactcgacaaagaacgagcaaaggaactaaggaagaagtggaaaagcttcgtataaatagacttatcattaaagccttttatccgtcctaggtagtaaaccccgtcctagtgccaaaaccaaataagaaatggcatgtgtgcattgacttcaccaacctcaataaggcatgttcaaaagactcccaagaattgaccagctcgtagatgccataccaggtcgtgaaattttgagttttatggatactattcgtggtacaaccagataaggatgcatccatctgatcaaaagcttacatggttctatacagatgttggcttgtactgttacaaagttatatcgttcggtttaaagaatgcaagtgctacttaccaaaggttattcaataagatgtttaaagatcaaatcaaatgaaacatggaagtttatgtggattatatgcttttcaaatctagaaaggttgggggacacatatgacttagatgaatgcttcaaaatcctcaaaaaatacaatataaaactcaatcccttacaatgttccttcagggtcaactcgggtaagtttcttcgttttattgtcaaatctcacggaataaaagccaatctagataaaatgcaagcccaacttgataagaaatcgccaacaaaagtaaaagaagtacaaagtcttattggtcggatagctgcactaagcaggttcgtgtcaaaatccactgataaatgcgttcttttcttcaatatcctctaaacaagaaagaagtttgagcggagagagtgtgaaaaggcctttcaagggctaaaaatacaactcgcacaatctcttattttatcaaaacctctgga

SEQ ID NO: 21749 - DNA, 6085 bp, Cannabis sativa
gtgctccaccatcaacagacttgttaccagctgctactgtcataccggtatctgctgctgtaattgaatcagcatctgttgctcttgaattagcatcagttcctgctacacaaccagaaatcaccactaattctcacgcatttcaaacaaggggaaattttggaattcataagcctaaggtctatctcacaaccaagattccaagaaatgtcaaagaagctttccagcaagaataatagaatcaagtaatgacagatgagatgttggctttaacaagaaatggaacttacactcttgttcctctaccagaaggcaaaactcccataggctacaaatgggtatttagggaaaaagaaaattcagatgggacacatcataggtataaagctcgtcttcttgctaagggttttcatcaacaacctaggttcgattttactgaaacttttagtccagttgttaaacctgtgataatttgtattgtcttgtctataactttgtcacatggctggtcaatcaagcaacttgacattaataatgcctttctaaatggcacattgaatgaagaagtttacatgctacaacccccaggttttgaacttgcttcagctcctcatcttgtatgctagttgcacaaaactctatatggtctaaaccaagcaccccatgcttggtttgataagctccacaactgtcttttagacctaggttctgtcccatctaaatctgaccactctcttttcatacaacacacttcaacacataccactttagtgcttgtgtatgttgatgatatacttgtaactggcatcaacaacactacaatcaaacatctaattgcagcacttgacaacaagttttctctcaaggacattggtgacttacactactttttaggaattgaagtgcaacaaacaacctctggattacacttgtctcaagcaaaatatattcgagacttgctatatagatctcaaatgcatgatgccaaaccagctcctactccaatggtcagtagccttcgactctcatcatacggtagtgaacctgttccaaatcctcaattgtatagatcacttcaatatcttctcataacaagacctgaaatctcattcagtttcaataaagtctgccagttcatgaaaattccccaactaacacactggttagcagtaaaaagaatactacggtatctcagtggcaccatcactcatggtcttcatctcaaaaagtcttctctacaggaagtggtgcttttgtgatgctgattgggccactgacatagatgatcgacgttccacctcaggggcttttcacacaatcttttatggggataatctaattgcttggcaatgtaaaaagcaacacactatatcaagatcaagcactgaagccgagtttcgcaatcttgctagtacgattgctaagcttacttggatccatttgttattcactgaattacacattcgcaccatcctgcctcctgtcatctggagtgacaatcttagtacggtccttctcacggccaatccagttcttcatgcccgtactaaatacattgagcttgatctttactttgtgcgagagaaaatccttcaaaaattggtccaagttaagcatgttctagctcaagatcagttggctgatggtctgacaaaggcaatatccactcaaaggtttcctatgtttcgttccaagcttacaattgaagacatctcatttattcaagatacttcaaattgtaatcttgaggggtcgtgttaggagtgtctattcaattagctgttggttagagagagtcagttatgttcggtattgtttgttgatttcctttaactaattctgttatttttccagctaactacagttgtaatcattggctatataatgccaattctcttaactgaatagtataagattgtcctttgtttttaatcttctctttcactatctttatttctctttctcttcttctcttcgtctctgtatctcttgctactgtgtttgttgattgttcattaatggcgaagagattcaacagggagtaattcatttctcgagaaaatgtaatttcatggcgcataacatatctaaataggcacacactacaaatacagttggaatggttcagctgacagatctgaatccaagtttgttggacgactatgttgagtggtcatttgataatggctaaggcctttttgttgtaactgctaatcttgttctgtttcccactgcattattattttcttatctttacttgtactggtctttagttagtttgtagctctcgtttcttctgttcaatgaagttgggtgcatagtcacctcattcttatcaataataataataataataataatataagtgagagagggatgtgccaatagacacatggccacaactagtaatatatatagacaaacgtagtaacctatgcctataaatattttgggttattttgctggaacattgtaaaagtaacataaaaatctattttgatgctaaaagagctaaatgatctcgatctctcagagcatgttcataccaaaattagctagaaagatactataaagaggttcaatctcttgttttggaatctcctgcaatcaatatacagttagttaggtagtactagaagagtaccatatgttatgttaacaggcaaaaactgctaggcaactttttctgtactaagaattgcatattgataagtgcatgttttacattataattaaaaaaactgtattttgtttttaaaaatataagtttgaaaacaaagttacaaaaaacaagaattttgaaaacaacaaaatttaaaaaccaattcacttttagtcaatattgtttttaaaaaatactaaccaaacatgacttatgttttaaaaacttcaaaaactattttttgttctcaatcctagaaacaatttgttgaaaacaagaaaatagaaaacaataccaaacatgctctaaatttttctcatggatccgttctctcaatttacttgtttcgatagagaagtaatcctagctacgtctacatggttctattgcttatgatttaagtatttgtgacttcaaatcctcacttcaaaattgaagacaaattaaaagtaacaaaccagaaagtacgattctcacattatatatatgagccgatatgtatatatacaatacagtcacctgtgcgatgctgatgttacaaatcacgacaccataacgaaataaaataaattgtttttaaggtctaagaatttgcccattacatatcatataagttgcaaccatatcatatatcataatgtcattcatataaatattctataaaagaaattacccttaactttaaaaacaaaccatattctactaaagttggaatctcatttccaccctcttcactgtttgaaaacaatcaatgttttcacccatgaggttctcactttttctcctcaatcatctgcaaagattgataaaactacttaaacttttatgaactcgatccaaactatttcaatccattagaaaaatagcattaactatcattatagttaccatgatcagctgcaagcttggaggggtcttaatcttaaggcgttatggcgaaacacaggcgaagtagggtgacggtggtggtggtggtggtggcgcggttctggagtgacagcttcgaaagcttcgacaagcaaagcaaccttcctcttccttgctggggcgagcttggtcacagcttgttggagtgcatagtcgatcatccattgctctgagtttttgctctcgtccatcatctggtgcttcaagtcaactttctctctttccgggtctgccacaaccggtagataatttggttctcttgggttgaattctcttgacgtttctacctccaaatctttgactcctcttctggacctgttacacaagttgcggagttcttcctgttcatctttcaattggcctagacgtgagaatgttgttgatgatttcttcttttgctgctctgttttgttttccatttccatggttgcattctcgtttttgtcaccttcctccctctctggtgaatttttctgccgttgatcttcatattcattgaagctcttcaattgggtgttctggttttcatcaatatcttgctccaacttacctgacttgatcctttcttcaatgtgttcagtaggtgaatctagtgttgagatttcgtcaaacacttgttgttcttcaagtaaatcactctctttctctgtcttatgaattccatttttccctccctttgtttcctcctcctttgattcatctttaggattgtcacaagaatctttatctgtcagctcatcatgattgatcatcttttctgcttcatctgctttgagtctcattgttgatgttgcagccatgaaaatgttgttgtgcatagaatctgggtcgccaccttctccaaaagtttcttctttttcgtataaatctttatacacttcgtcagtgtaagaaagttggtctgaatcttcagtccccaattcttgaatctccatatcttgctctgtaacgttctcttcagcaagttcttcaaaacattcagttttctctttaccgacatccaattcatagtcgtgaatcatattaacatcgcaggtagtaataatttttgatgagttatcggcatcatcttcaagatctgcgtcggaaaattttccctcttcccactccatatcagtaatttcagaggcattttcacttgagtacattccttcagtctcttcttgttccgacattgaagagtaatctctgtcttcataataatttcctccttcagaaaagatttctgccattcccagagattcatccgtgtcaatctcagactgtggtgatccgtcagacaagatctcaacaacttgctcttcaaaataaccatcgcttgcttcaacttctcctttcgctgcttcttcagttccaccttttgaacaagctaatacaaaatcattcttctctacatcatcttccttagtcataggatagatttctataaagaaatcaatccctacattctctgcagcctctctattctcaatactcacttcctcctcagatggtaactttctctcctttcttgggctcaaaacttgaattttcatgttcttctgtgtcttcaaggaacgtcttctagctgacaagaaacacttcaatggaggcaaaggagtatgaagatgtccatttagtgagcaatacgtatatgggcaaaccttcatgatagaggttccatcggactcagttcctccaggagcaagagtaagatgagtaggaaacttggagtccttgagagttgaagaacaagttggtctctcaacattgacatcatcttcagcagtacaaagggcaaccctggaagattttctcttggctgaagttggtcttgagtgcttaaaactaggagtctttgttaaagtcctaacaagctttgatgagctagataatgctttatttgaagtttttcccggttttttggtattagaaactgaactaacaactttcgaggtacttgagttcctaagactcacctgagattgttgctcctttctggcatcaaaacagctagtggacttcatataattaggggagccatatccagtcttgattgttgtcggctgcttgtgttgtgttggaggctttcctggatggcatatgttgacttgtttgatgatcaaagttgaagttgatgaagatttcatgctgtgatgatcaaaatcagaaagcttgaaagattttgatttcttcatcatttttgtcttcaagtcaggccctcttcttttcccatcttggtattgagatgaaaaagtttttcccaagctcatcaatagcttctgatcatagttcattgaacgatcagcttggattccaagcttatcgggaacctttctttgaaccatattccaagaaagaacaatgaccacaagctaaagacaagtagagaatttggtttagttttctttccttcgaaaaaaggtaacataaaactgaggagaatttagtttgtgcttttgggcatgttggatttcatgggaaagaaaggagattctttggaaccaaaacaaccaa

SEQ ID NO: 21750 - DNA, 7806 bp, Cannabis sativa
  modified_base (5683)..(5685): a, c, t, g, unknown or other
tatagtcagacataagggaagaactcagaatctctaccacgaaaatgaagggtatgagatttggagagtggagatcaatcaactactcgacactcagaattacttctgtgatgaataaggagcttcgtacttcgcttgaggtcctaatggccaatagtactaatacttcccatgggtgaatggagacatgttacgcttgagcaatcggttcaactccctctacacatgtcactctaaggaggactatcttgaaggaaattgtcggtatagtgtacactagtcaagagtatctagacatagctgacagtttcattaagctcaatgaagctgtcaagaatgtcagaggattttctaaaccagaagtaaccgaatacactgcttatcttttttttgagtctcgaatagatattaacaaggatttgaagaagaatcatccctaatgcctccactgaggacaatggagccatgatgaagattctccctttatttccaacaatgatcaggaacaggggagcaacaatgaaaatgtatcatatgagtcctctaaagatattgactaagaaagagacatagaagactcctaatgaaagagggagggatcttatgtcatcacaaaagggtttgaacatgggacaaataggttggatttttctatgacttccacttgactcccgtgtcggtactacgatattggaacgtggagcatctaagacgatattattaataaagcaactgttccctagacagtttgcttcgtagtgagattcactttaccttgtgcaagtgaatcaatctcctctcggaccaacaagatgtggcgaagtcatgctttggttaggaggtctatcgctaaggtgtggaccctattagtcgaacacgacattagtgtagtggggatcacttcagctaagctttgatgaaaaagaatattctataactactacttctttttctttcaacgtagctcacaatgatgtaattgaatttaatatcaaatgaagaaaattgttcagtaaagcttgatggtacttcattagtattaatcaattgcagcaagcagacctgacgacgctctcaagcgcattgatctgagctccaagactccttaggtaaatactgagaggaattttactgttgattccacaaacatccttgatgtttttcctccggccaagaactcttcaaaatcccaaccatcaagcaccttaaccaagaactcaaagggggcaaaccatgaggggcctggactacctaagcttgggccatgctgcccacacttcaaccatagaccaaaaagccaaaatagagatgctctctttctgccaagattgtctaatgcctgaggtgaacgagaaacttattagggccgaggagatgccagtagagctactggtcagtggaatcttaaaggaggttacctaggtaagtgttttgtcttaggattatttttgtatatatttttccgcatacaagttttaactttgttttaccgtgaaggttaatatgaagttggcatacactaatgcttgagcaaagtgtacagctctaaaggccaccacgaccaccaatgaattgaagaagtcactagaagatgcttagaaagtggttgagaaaaagatccatcagtttggcgatgtgaacaagaaacttattgctacgaacaagctcattgaagaacttaggcaagagaaaaaggacatgccatccacgaccaaactcgaggaggatcctgaggcggtgtccaaggaggtgcaaactctaaaggactagcaaaaaactcttcgtaccttgctttaaagctaggaagccaagattacactgctgatcagggagaaggctaccttgtaagagtcgtttgacactgagcgagagaaactttagaaggaagttaaagactatgaatcaactgccttcgaaattttctacaaattctagaaggaaaatccagaaggaaattttgaatatctcaagggggatctccgtgctagctttctcagcttctgagagacacaaaaagctgaggaagaagcaaggaaagctaccgaagattcttttaccgtccaggagctagaaaaatctaccgccgaagactccattattgtcgctcaagatccaattgattagtaaacagagcttgggactcctttttaataaaaattttaaacctcttttatttgttcaacctactagcctttttgctagtacaatatggctgaccaagcagcttttgaacttggagaaatatttttattttgtttaagacaactggcttgtcgggaaacttttaatcccaaacttatcttgctttgttatctaaatataaatattttcctttttctgaattttgtttttttttttcttgagcttgttttttaccaatggttgtatgggtgtaattgcactcaagtgaccaagtagacttttgactcttggtcatttgcattttatataagttttattctatctatcttagttttgggttcagtcaaaccctttgtacacattttaggtatttaaataacttgctataatttacaaaagaaaaggcataaaattgacacaatttgaatgatgattaatatctttatttatttattgtttgttatctgttgttaccacggtaacgtacatttattgaattataaaaagctattacatgatctatatgatctttagctaatttaaacagtatattctacctaaagacatcactcaagagaaatttttttgaaataattgtacttgtgaaatggtcacctgaccttattaccagttgaattcttaaccattaagtgaggtctgctcagaaggccatcactaaagagtggtgttcaagcattgtgaaagttgtgtggtctacaaaccttttgcacttattggtagtattttcttaggtgttcaccattgcagtaccttggtactagaactaattcaatgttttcatcatacgaaccaagtttgtatgctccagattttgtaactttaggtactaggtatggtccttcctaattaggtctgagcacacctgctaaactgtcttttttgtttaggaatactcttgtgagaaccatatctccaaaaaatatttccttctttcacttgcttattgaagtaccaagccattttttgtttttgaggtagtagctttagatttgctgattctgctaggagggcatgcttagtctcgtggtcgtaagtcaatcttcaatgggatggaggttctaattgaacgggtaacattgcctcatagccataggccatgacaaaaggtgtttgcccagttgctgtcattttagttgaactgtatgaccaaagtacctctagtagttcttccgaccatttcctccgaagtatactaactacttcgagatgttcgttttttggagggtgtgtaacttctgagaaattctttatgattccatttgttgtgcaaaagtctgtgaacatttggatatcaatttttttttcattatttgaaacaagtttttgtgaaagtccgtaccaacatataatattttttaccataaaattccaaaacattcttggatgtgattattgccagtgcttcgacttccgtccatttggtgaagtaatcatattgcactccacctttttctttgggaaattatccaatcagatcttttccccatatggcaaagggccacaaactttgcatctgcattaactcattgggcaacgcttagaggatattggaaaatctcttgcatttgtcattcacatgagcctttcaatcttcaatcattgtcagctagaagtaaccttgccttagtattttcttaaataaactttgcccccagcatgattgccacaaaagcattcacggacctcggacaagttccatgcaacttcttcatttgttacacatcttaatagtggcatggggaaacctcttctgtacattacaccatccatcattatgtatcgagccaccgttctaaccattttttgagcttcattcctattgctcagaagtaatccaatgttaagataggttgttatgggagtcatccagtttgttgcattgtctatcatctcgatttcctccgtgcatgtgttgttgagatctttcaaaactagattgggacaaagttttcttgtttgttattgtcttgttcgccagctgtgctagcgcatgagctgttatattttcttcccttggaattggcttgagtaccctttcaattgtgcgagtaggtcatcgatcttactaagatatgccacaattgtttctccttaagccatgtattcccccaaaacatgatttaccatcaactgtgagtcattatatatttctagatatttagcacgaacttcccaaatgagttttagacaagcaataagtgcttcatattctgccacattattggattctttaaatgaaaacatgattgctctgtgcaagggtcacccccaggtgtgatgagagaagtcctagctttggacaactagtcagtggctaatccatccacatgcaacttccacattggcttatcttgatagctttcttctagtgggctattttttcttcttccctttttggcttgacattatcctttgaattgtctgccttcttgcctatgcatttagtcacaaaattgacaaagcttgtcctttcactgttgtgcgcggttgataagttattttgtactcccttaacttaatttccatttgagcagctgactagatgcatgcatctagctttacaaagacttggcgtaaaggatacaatgtattcggtgaatgtaaggtagattcttaattcttctttgtcaggaggttttgagagtgtgggggtttctgcaagttgcttcttaagttattaaaaagcattctcacattcctttgtccattcaaattttctgttacctcagagaatgttaaaaaaaggaacacaattctctattgattttgaaacgaatctttttagtgtggccatccgaccagtgttgtgaatgttatatgggcgtgtagatgagagagagagagagagcgagagagagatattacacttagagacttagacttagaatgaggcttaacacttaatgcctaggttttctagggttgaattaaggccctttatataggagagcctaaactcgaatttaacaataaaataagtagatatttgtatattaaatatattaaatacaaaacactaaatttcctttaaacatagagattttttagcttttttattgggctgttaaggcctaattcccaagccaactcgcagtccacatgtaaaactgtgtacaggatcttgccatgtccaattctggccggccagccccctacagcgagcaggctggatggtcttgtgttgtccaaaggctagccgaccatagggctggccaccagctcttttaaggtagttgatctatcacttgttgtcatgtttgagtgtcaggatacccgttggctgaggtgctgacatgaacttcttgttggtgagctgtattaccacatagcgctaatattgtccacataagcatgtcatgtcaagtggacaaaaattgggataacaacatttaatagcagtaaaggaagagaatgaataatgcaattaaaattgagtaattaccattttggactctgtgttttgtaaaagttaacaattggaccttctcttttgttaaataacaaaatggaccctgtattnnntaaaatggtacaaataggaccctcaattgattttttatcaaaataaaatttaattataattcgatctaaaagtgatatgacaaaactgtttacattttctgaatctgttcgtattaggaattgtcttcaactttgttacattaaaaagaaaagttgtcaaaaattaagctcaaggtcttatttataccattttggaaaatacagggtcaattttattatttaacaaaacagagggtttaattagtaaattttacaaaacaaaagatttaaaattacattttaacataaatttgtcagattaagttttggtagaattattcgactaaaattaatcaattctatttaacattatctaattaatcagaatactgtgtcaaatattagaatatttagttaaaatttaaccataaaaacaaataacaacgttaaactaaaatttttgttacatatatagtcacattttattttacatagaaagatatatttgtataattagttcccttatgatgaaattgaatcatttgaataattatatcgaaattgaattattatgtaatggacaaatcgattccaactataagtataagctaattatttagctggggatgagaaattactaacaatatttctttccaaaataaaacaaaaacattggaataattcgattatacaaacatacgtacacaatttatatatacaacaaattaaaattatacatacatataatacactttggcaaaaataatatatatgtatatatattacacagatatttattgataatgcatgcaccatatttatatataaatttaaaaagttataataattctatctactagttgtatacatgtttacagcttataataaataaataatagccaagagagcaaaaattacgtagttgatcagcgctccatgattgggataaattgtgaaagagcttgaataataagattgaggcatattgtaattgggaaagtaggaagctggaggagcatcaccgtagggcataaatgggggatttgggtaaataatatggccgtcttcatcttcaccaccacaagtattttcttggcaaggaggcttgggtggaggggggcattctggtcctttaggaggcggcggagattgtggaggaggagctggagggggtgggcattcgatgacgggcggcggtgatggtggaggaggagctggaggtggtgggcattcgatgacgggtggcggtggtgatggcaagggttcacatggatttccacagccgtagcacatggatgagcagggtacttggtctttggacgtagctttggttatagttgtagtttttgttgttgctgttgcgtggcttgaagaatggatcagaagaacaacaaagactacaaggattgaatatattgtgtgtgggattcggatgttggaattttccattggcaaatattaatatttattattggattttcagagatagatgtagtagttatagagatcgtaaggagctcttattatgaagaaagatgataccgaaaaaagtagtaatatatataaagagtgcttgtgtattggtgaccgcaccatttatccatgtattatcttctaagaagaattaaaataaattggaagtctcaagtttcgggtactcttttatttgtcatgatcagcaacaaaaataactacctagctaaaaatccaaatgacttatagctaggtagattcactagtaatcaaatttactagaatcatatagtaactaattgaacttagtaacattcttattcattcatatatgtttactttaaaaccggaataataaaccattaatttgagttataaaaatataccctcaaataaaattaatacatgcaagagataaattctaatttaaacttttgatatttaccatgatttgccatcacgttgagatcgacaatcacccaactgatagagctaatctataaatatatattaagggatattactggtgctaaataattgtaatgtgttacttttaagtggtgctagacacttttaatgtttaataacaatggtcaatgtaatatttcataatttcaaatttgtactaaagtccactaatatttgttctcatttcataataatttaaat

SEQ ID NO: 21751 - DNA, 5839 bp, Cannabis sativa
ggctggccagccatatggccagctaggggtggacgtcaagcttctttgaggaacccgtttgagcgctgagatccccattggctaaggtgctgacttgaccttcttgtaggtgagttgtcttaccacatggcactgattttttccacgtaagcatgccaagttaggtgggcaaaaatcgggataacattttcccctaaagtccttttgcagacgtctgtacggataagagcttactagttaggttggaactaatgtagcctttgctgaatagaagttgctccatttttagccttttgaaattcttgttcttgactgtctgatctcatttgttgcagcgaactaactacttttatatgtctctttgttgagtgtgtgtgttaagtgaaggagtggtcccacagatgttatttaagtgcttttagtgagaaactctctgcacttttcactatctcactagaaagtaacttttgaagaagctcctccttctctctagagggttgaacccacatagcattattctccatggatttttgtgttgtttcaacgatccaagcttcccatcctcttcaccaacaatttcttgttgttggtaagctttctattcccgctattttcttgatttagttgattttgccatgaatgcatgaacattattctttgctttaaatgttttttgattcccacgttagattattatcctttcagtattatgattcgcatagtagtattaagatgctaatgtatgatttctagacaaaaaagatctaaatttgaccttcattgtgattcttggctctttgagtcatgaagaacacgaagaacatggagaacatatttgagttcttgaaaaaaaaaacacatgtttggatctgtacacatcctggccggccaaggaggtcttgtttaagacttggccagctaagggtggccatcatgggatcttgccggctaagggggtataccccataggctagccggcctatgcctagaaatatggttcttggctagccctaggctgggtcatgggacctggtcgacctctaaggcttggaaaccatagccgacgaaggctaaggttcttagtaggcagccaattttttgtcctttattgaccttggctagggtctcgtgacggccttcgaggcatatacaattgtagtcttatgcgtggtttcccttgggaactttgtatgagacttggtagtgagtccattatagtaatgtgcacagcttaggactcaccatatgtctaagtaatgtacttaagacggtgcttggtcaatactcgaccttgtacattgcgatttacctagaaggtacccttgagtactattgactaggatgtgtttatagctttgtcaggttgctcaactccccttatctcttctatggatgtgattttgagtgttggattggggaggtgatagccgcataggtcccttagttgtgatcatggtcaaaacaaaatagacatgccgtaaagcacgaccatttgatcccatgttgttagggtggcaacaaggggctgagtcaaagttgtagaggaggctactcagcccaatgttaatgtatttttacaggttgatcggacatgagtgcctgaggttgaccaagggactgagagtcccgatactgagtctaaagttgaggaggccgcaccagtcaggagaaggagatacagaacttgtatcgtcctctccaaccaccccttgggtaattatgatgtcaatggggagcctttgaagaggcttggtcagccttcagttttgggctttgatcatgtcttgattcagtcttctaagcccatgataatggatgtcagatcacagggagacaagtggctctttctcacttctgtcatctctattgattcttttagcaggatacttgctagtggtataatgggggtattcatattgagatacctcttatagattagagggtacaccaaattcccctacgttagatggcttggtcggagcgtcatatagagcaagggagtgttgtcactccacccttatttcaaaatgtgcccaacacaaattaccccaaaaagtatcaagtaccttcggcaagtttgttttgtataaggagctaggctagcctcagcccactccttatgagattggatactatttcgatctaaagtctgctctaaagtagaataggactaggtacttctactttagccaagtcaaccaccagtatttgggtgacaccaacaacacacccatgtccaaagtagggggtacgctcaaaactactttgcttcttggggcatccagaagattagacagtatgagttccagggagtgctattttcaagagctccatccccacactacagatgcgggatagggcaaaccacatcttgtctcttcctgtggagaagagaaacataatcagtttggtcagtgtggaaaacttccaaaagtaccatttgtaccctcttaatactggagttgtgggagcctagggcccatcagctagtgttgatggagccctagctacagagggagcttgtcctagagatggataagttcctgacttggatgatgacgtgcctctatcttgaatagcttaaaatctagagaggagagagagggccctccattaatacttagtctgcaggggcccacttggtgatgcttctctctgaatcaggcctggaggccagagctctgagggaccttctcaccctttgcctacatctagaggtaatggcaaggtggttgttgaggattttgacgatttctcttctaaggtgatggtatttgatagttgacaacaccatcttttaaattcttgtcctgcattgaatatttatgacttgctttctaactttgctactttctttttgcagatatgtcttccaggttgagaggtctcgctggggggccttttgatgagccttcaggttgtttgagggccaaggtggcttagatcactcatggtggatatgctgctagatcatctctgcctcctcctcttccagggccttccctagctaggtagcccatgatcaattatcctccagctaggagggaacgacttttgggttggggtgccccgaagcccgatcgaggagtaagctcggtcacgggcagaaaggcatggaggcagctcgtaggcaccttgagagggctattctttctatggatgatgataagcattaggggcttggtgacagtgagctagataggcttcactctattggccttttggatttgtctgtggtgagttgcacatctaaatttgctcattttttggctttttagtaggctggccaaccataatgttgttgcatgaggctgaccggccaagagtgtgtctttgagggactagatggccataacgaccttgtggaaaggttggccgaccagtattaagttttgacactgattttgactttggtttactatcaggctttgatgaaactaggtgtttcacgtgacaactcctaagggtctttgagcgctcttcaggagcatgtgaagaccttggaggctaccctctagatggactagactatctctgagatggaggctctcagtctgcaaaaattggagtatgatttctggtttggagaccatgcttggtactaggaaccaagaaaacaccacgcaagctgctaccgtcttcaggtttgaggcttacctcgctaggactgagtataagctaaatgtaggcctttttggccagcaagccatacgggacgagtacgttgacttgtcttcagaactcatctatgagttcaagctgcacaactccaatgctgacttgtcataaatggacgaaaaagccttcctggagaagacattagctcaggggagagcgatatttgagagccagttaggagcagaacagactgttatccgaccagagggtcatcctcaaggcattatgatataaagatggccagcccacctactaaggaggtggccggccagagctttgaccttgtggccgaccaacccatagaggctatggctggtccacactctaacgatctagatctttcagcttcttgattcagcttcgcctacccctacacacatgtggatgtactttattagtattcagcattatagttgtatgatatagacaatattttcacgttttgtatagcttgtggccttttactttttgaacattacttattttcagccctaaggcctttatgttcgtatctttggcctataggccctctatttttgaacactactatttttttggctctgttgctctttatcatggattatgtgactgaccgggcagtctttaatcctggctatctttttatggccttgacatgtaagtatccagattgactttgctttatggcaagccaaagtatgcctgcacttgacttaaaggcaagtttagtagcttattctaagcgttataaaatttctttaccataagttcttctatgtgctagttcgatgcattgtatggcttgggtgccccccaagtgaacacacagacttacggtctcttggtcacttgtaattcaccaagtttcatagaccttgcctgggacatttctttgggtgctacttgttgtacacatgtggaactggaaaaagaataactttgagaagttaatcttattagcaagtggtttagatacaataatgtaaacataaacattgtttttattcattaatttgtctttgttgttgtgcaacttacataaattgaatctaaaagcttacataatatagttttgcttctagatatcaagtggctaccccttcttaacttgcatagcagaggccaccattgaagaacggtgggagtccacaccaaaaaggttgtgggtgctagctctcttacactctaatgtggagtaggtaaaactacttctttggagtagtgttctgtaagctggatactgataatatttgttaaagtgctctccattttagtatcttggtaggagaatgagttccatgttctcgttgtaccttcccagcttgtaggttcccttactagttatctttgtaacttgataagggccttttccagttaggtccaaacaatcctactgctagatatttggtattcaagaacactcttcggagcatcagctctcctacaaataatttcctatccttgactttcttgttgaagtgccttgctaccttttgttggtaggcatgcagctttaagttggtttgttctcttctttcttctactctgccaagggattctgccagtaggatgttgtgtgtatcttggtcacatgttattctcctatgagacaatgacagcatctctataggcaacaacgcctcatagccattagctagagcgaatggagtttgcatggtggtctttttctcggtagtcctgtgccaccataggatctctgggagcaattcaggccagttgcctttttcttcctcaaggtgcttctttagggtatccttgagggttttgttgaccgcttctacctcatttgcttgaggatgggccatgaaagagaagtttttgatgaagtcatgtctgttgcacaaatcagtgaacatgtcactgtcaaactacttcccattatctgacacaatcttctggggaagctcgaatcgacatatgatgttcttgacaacaaagtcaaggacttttttagaggtgattatttctaagggttcagctatcgcccatttggtgaagtagtctactgtgactacagcaaactatacccctccttttccctttggaagttgaccaattatgtctatctcccacactatgaagggccaaggagactgcatcattgtgagctcattaggtggagctcatggaattttcaagaatctctagaacttgtcacatc

SEQ ID NO: 21752 - DNA, 1440 bp, Cannabis sativa
acatgtcaaaattcagggggcaaaaatcctaattagctttcaaaacaagatagctagagagaatgaggggaacaaaaaatgaaagaaatatttttggtaaaatgtgaattagggttgtacacaaatttttgtaaactgcccaatccgaacaactagattaaatcaaactgagataacctgatgaaaaatgcaaactaaaaaacctgacaaaaatataactcgcctaatctttttatattgggcggattgaaaataatacaaacccacgattaagaggatttttctatatatatattattatatataatctaatctaatacaatttatatacatatttataaaaaataaaaagttcaaactattatatttttttcatatatgtctcattatcataattaactaaaatataataattgaatgaaataaaattaaatattagtgttagttttggctggttaacccgactaaactaaccaattcattgggcgagttaaaattttattttttcttaattaggtggattgctcttaaatttttgtaatatgatctttatgttgagttgaataaaatgtaacgtaaattgaccaaatcaaccgacgtacacccttaacgtgaatcattaaaatatttttgttatccgattataatatattaggtaatttacaaccaaacttacatatgctataatttggatatagctaattcttattttttttttgtgataatacccccttaattttacttttgtttgtaaatttaagagtgtcgattaaatattacgattaaatacaaactatttaaaataataatataatatttaaataaataaattattttaattaataaaaatataccatgtatacatacaatgaatcaaaatttaattaatactcaaaattaacaaataaaaatgaaactaaatgagtgttgccataaaaaaatcgaaaaattaaccttacaatctatacagataaaaatataagaaaatttgattgcatattataatatatttttgttttttttttcccacaaagtatatctaaaagtaatttacggattccattgatcacgaacaggttttgtggccggggatggtttagaccgatggtgtgcacctaatgctaacgaaatcaagattaatgtggatgcatcaatatttgggagtagtcatgactatggttatggaattgtggctagagatgaacatagttttatggtggaaggtgtttctcggctttgtcatggtaatgtacgtccggagctagatgaggcaattggagttcgtgaggctctaagctggataaaagacaaacaatggccacaggtgattctagagacaaactgtttggtggtggtacaagcaattcgtaatccaactcatatgatctctttatttggtgatgtaattaaagagtgtcaaaacttgcttgtgaatttaag

SEQ ID NO: 21753 - DNA, 3341 bp, Cannabis sativa
ctgtgagcaaatcttatccacagacaagatgagttctcacatttagaaacttcaagaacaagtaatatagtagtggctttggacagatttgaaacgaattgcaacaaatgaggcatgggtaatactaggtgatttcaatgagattttaagcaaggaagaaaggatagggaaaaaggtgaaatatagtgaagctactgattttattgagtgtgttaattgctgtcagttggaggacattaagttcagaggcagttactttacatggagcaacaaaagacaaggaaatgaacgaatatggtctaagatagatcgagtgcttgctaataagaagtggatggatctttatccgaatgctgaagctgtctttatggtggaaggtttgtttgaccatacaccagtaattgtctcaatttatccagaaattcgcagaggcaaatcgccttttaaatactttagaatgtggtcctctcatccacggttttcagagattgttaccagaatttggaagtcttctgttgctagcgctaaaatgttccagcttgtttacaagctgagaatgttaaaggctgaattgaagagctgaatagaaaagagttctccaacattcaagaggcaactactcaagctaaagaggatttagtagcgattcaaacgaaaattcaagcagatccacttcaacacgggctgcttgaacaagaaatggcagcaaggaattaatatagtcttctacttaaggggctctcttccttcttacagcagaagtccaaagtaaattggattaaggaaggtgacgagaattcagccatttttcacgcaagcattcgagaacgaaggaagcaaaatagtatactttcaattgaagaccaacagggaataagggtggaggatcagaacaaaattaccgaagcctttctttcattctattaccaactattaggtagtaaaatggagaaaaggcaacaagtaattaagagtatcatgcaacaagggcctttggttacaaagcagcaagcagaaagcttaatgaaagagtatactaaggaagatgtcaagaaggtgatttttgagattccaggaattaaagccccaggacctgacggttattcaagcttcttttttcaggataactgggacatagttggggatgatgttactgaagcagtattatcattcatacactctgggaagattttgaaagaaattaatgcaactgtgctaacactagtccctaaaagtaagtgtccgaacacagtaagagactttaggccaattgcgtgctgtaatgttatttacaaggctgcaaccaagttgctgtgctctcggctcaaggctcttctcccatatctggttgcacaaaatcaaggaggctttgtctcaggccgttttatcgctcacaacattatgatatgtcaggacttaattagacactatggaagaaaaacagctcgaccagggtgtatgattaagctggatttacagaaagcttatgacatatttgaatgggattttttagaagagattatgcaggctttccaatttcctggggagttcattaatctggtcatgacctgtgtacgcactactcggttctcgttaatgtttaacggatctcttcatggattctttgagggaaaacgaggtcttcgacagggtgatccaatgtctccactcctatttgttcttggaatggagtacttgtcaagaataatgatcctaattggaaccaagccagaatttcattatcatgaccggtgcaaggaactaaagatgaatcacttaatgtttgctgatgatgtaatcctattttgccacggagactttaaaagcattcattatttgcttcaaggattgaaactattttcttgtacatcagggctgcaaccgaaccctgataagtcggccttttactgctgtggaatggaagaaagcgaggtgcaaaggatcatagacagatcaggtttttcaaagaaagaggtaccatttaaatacttaggcatccctatttgtgccaaacgtatttctggtaaagagtgtgctgtgttagctgaaaaaatgacagcaagaattaaaatatggagttcaaggaacttgtccctagtaggtagagcggtgctagtaaactctgttttgatatctatccattcttattggagtcaaattatgattcttcccaagaagatcataaaagacattgagcagatttgtagagcctacctttggaagggccatcatacaacaacagggcctggattaatagcttgggagagtgtgtgttagccgaaggcagcaggaggcattggactcaaaaaaatagcagaatggaacttggcggctttgaaaaaatatgtttgggcaattgcaaacaaggaagacaatttgtggattaagtggatacattgtgtatatataaaaggggaggattggtgggactaccaagccccacaacaagcgagctggtattggaaaaaactggtatatgtcaaagagcaaatcaaggaaaaaatgagtatgcagcagtttactagttcaatctatacaatttctaatggctataatttacttttcccccctcaaaggaaggtaaattgaagtcatggagtttggaataggcaaaacattccaagacaaagcttcatcttgtggactgcagtgcaagatcgactcagaactagatcgagattgaagaaaatcaatgtcatctcagatgactgctgccttctctgcagtagccaacctgagacaaaagctcacttattcttctcttgttcgtttgcttctcaatgtttgctgcagattaaaacatggctgcattggaagattgaatcgatggacctggatgcaatattgaggtggattgaaagatcaaaagcaggcatatttcggaagagcttctggtttgctataattgcttcagccgtgtaccaaatttggaaaacaaggaacctactgctgtgggaatccaagaagccgagagtcattgaggtgactaggaatatcaaggaagaagtaaagagtagattcatttatgtatggcctaaaaaggtatctacatatgacactcaatggtttttagagattgtacaacaataacaaatgggaaaggaaagggaatcatgtaatattgggatgtaaaattgtgattagaattcggttcacacatataaaatagatcttctctttgaagatgataataggttgtaaacaaattgttgaggtaatgcattactctgatttaccaaaaaaaaaaaaatatagtagtggctttgttttataattagcaaagacatttatgttccaaacttttattgaaacttgacttagacacatatttaaaggtcttt

SEQ ID NO: 21754 - DNA, 3744 bp, Cannabis sativa
atttccttttctgtcctttgtgtttatgttgtatttggacttaatatcagtgtaagtggaggattatttttaacaattgtgaattataataccaaactcagtatgacatttatcattcttattaatcgcttggacaatacggagataatatgagaaaacagtaatgtagttgttccccaaatggtgacacaatagcaacccatttaagagagttattgtctccgccacatggggattagaggaggttgactttgaagcacccgaagaacacaagaccaccctgtcacggtttgtcaccactatcccaagacctacacacctgtggttctcattgatacccgcggctgcatccacaaatagattaaaatcacccaaatgcaaagtctcaatcaagccacttgaaagcccaaccacaatcgtcgccagcttcacatgaacagtcataaccaaattagattgagcgtcttgatactaacaaagaaaactcaaggcccatttactaaccatatcatcagagagcagcttattcttatgaataaaaatattgcgacgatattaaattctctaacataacacaagaaattcttctatatcgtacgtgcttcgaaagaacatccatacaacccttaagcaattcatagaaacatgaagtctctcttttaaaatatccagacctttaacaacccagctgttatacctatattttgagcaaaaatatggtattgacatgtctaatgaaactggaaactaaaccagttcgagttataaagcaataaatgcgttcgattaattttccttagaaagtacagttagtagagatattaaaactcactcttttaaaggtaagagcgagccatgaatataactactgattgatgatgccagcgagacgaacaataaataaagaaggttcatcttcgggtacacagaatacaaaacagaatgacaatacttagatatgttgagatactaatgataatatttccagcattcatctcagaattgtcatactgtgatagcatctcgcatttgcatcactcaacatttatagaaagacgcgagaagtattacataatatatacttaggcaatgagaaccctgttcaaagtataacaccttgagaagattgtttgtaccatgagatgaataaagcatagtaagcataatcacttacagatagagacaaagagcgattatagctgttatttattatattctcatgtgatgtaaatatgaaacatggagattgtccacgtctcacaaacaattacagggataagatcccaagggaataactgtcaccctaaactcctataaatagggacagaactcagggaacaagaaacgatcaatttaagaaaaaaaaaagagatattatatcaatatgtccttgcattctgtataaaatttattaaaaattgattaaacaagaacatatcacgaaagcccatacccccatcagttttatgccagcaaagacgagggccaagtacactagtgtatcttttgtttctctaggacccctaccaaaattgagcacacatacaatgaatctcattaacaatgcccataagaagtcggaacaaccccatagcataagtaaaaatggcttgaataatcgatttcaaaagaacctcatgcaccagaggagaaatgtttcaatttccacccaaagagcttattccatatttatccttaatagattgaaagagcccactcttactttttcccgcaaagcacaggagacccaaatacttatcattgcaggacaccaactgaacacccaaatcatgagctggagcacacacaagtccctagacatacgaggagggaagcacacaacagatttattaaggctagctagctgacactaaaacgtgactagtctgcatcaatcttaaatttttgaggacttttgtcgcaattattccttaaagaaaaatcctaaatattatttgaaagattcggaatgatcattctatttactcatgacaaaattgaatcacttagaaaaataagagcattgtgtataatctctcccaacaaatgattttaactaaaaaaaaaaaagagctttgaagtcatctaatgtatttttcgagtcatgaaaagaaattaagcctttgacacattaagttgtagcaatattttgcttattcagtttgtatgagaacttattagatctcttttaacttttaagaacaatcattaaaaaagaacatatatataataagattattaattagcactaaaataattttgtgaaatatatattgggatgattctttgtaaccacgcaacatgtagaggatgcccaccacaccaatccccattcccaattggaaaacaatttataaagtttaaattatgtgttctcttctctaactagttgccaattttgaatcaaatttcaatcatattatggggctaatgtggcacatgattttagacctttgtgagggcctagctctacctattcaaaccattaaaagaagaaaaaaactacatcaaaacccccattttaacttctttttttttttgaattttatataaaatttcactaatttgattagtttttgagtaatttgcggcataaatacttacgtttaattttcatttgcaaataaatatttaagtttatttttttggtgataataacacctaacttatatttctagaattctataggtacatgtccattaaatggcatgtcataatctacgtatcattttttaattggtatatttaaactaatttcttttttaaaaaaatacaaatttaatgacttaaatcaatcaggaattgtcacgtggtaatttacttaggtatttatttgtaagtgagagttaaacttaaatatttatacgaaaaattactcattagtttttagaattaataattagtatttttgtccatgtgtcccttaagatatatgatttgtaaataatacccctcaaaatttaacgtttgcattgatgtagtccttctatcacgctctattgaatttttattgtgaaataagtgatcctatgaatggtatagtagttgataaattaatgcaaaatatatatttttcactacttttatgttaatgaatataatagaataatttttttttcttttttctataacgatttatattaatatttttagttttttaatctttaatataaataggtaaaaaatatataatttatatctattcatcaactattatctaccaggttacttattttacaaaataaaaacttgaataaagtgtgatggaaagactatattactataaaaattatatttcatgtattattattaataagccgtatattttggagagcacaatttaatagtgtaaaaagtttagaggataaaaatactaattatcatatgtaattttgtgatggttatggattttgatgatcacaaattaatataatgcttcatttgttctttcatatcttcattgtggtaagtaatttgcttttcaaagaggagttttagactatattttggctgcttttttggtcaaaaaaaaattaaatcgaacttttgaagagtagtagtaaagtaaaagagacatttgtaatcaaactttttccaacataaattgtctttaaagtttctaattccaagaaattaacaattttttaattaattagtagctttggctttataaacaaatgaatctttggcctaccgtttgtatagtaattcattctcttgataattttgcctaataattaatta

SEQ ID NO: 21755 - DNA, 16494 bp, Cannabis sativa
aagttttttttaaaaaatgtcatatttaaggtgattaagtttttatgctatatatatatcaaaacacatctttattttctcatatttttgtaaatagccctataaaagattcatacaagaatgtcgtaaaagcctcattttccttggcaaacttacccaatacattttttttcgaaaatatttacccaatacatttaaaatggtagtttttttttttttttacatttttatatatttttacggattttttcttatttatatttttataggtttttcacttttttttctttaaatattggttttaagtagcagtaacattgaaaaaatgctattctgaaataaggggaaaaacaacgaaaaaacaacaatatgtattttttttaaaaaaaataaatctgtaaataacagcaatttctttttttttttttttgataaatgaaacttcattaataaaaccagcaacagctgggaaagggaacaacaacacagcagcaggaagccaccgccacagcagaaaaaataaacaaacacaaagctacctaattagagttcatagcagcagacacatccgtaacagaaaaaagaccacaaaaattcagggacgcagcccgagtggccaaagaatgagctgcaacatttaacaaccgagagatccaacaaagcttacaagaaacaaagccatcaagcaaattaaaaagctgaaggaagagagaagacagcttccaatttggaattttcctggccaagaccgcatcaacagccaccttacaatcagagtagatcctcaccctcgaccaattgcaagaaatacatctggaaatagcatggaaaatggccaaagtttctccttcaagagaggaaccagcagaaatcttcaccgaaaaggcctcaatcgctctcccctggtcatccaaagaaagaatagcaaggaaagcatcagtccctctcatagcagcatccacaaaaatattaactaaggacccagaccacagcctatccaaaccaggcaccacaataggctgctgcaaagatccagaaggagccacccaatctctagtctcacgcagagacttcatcaccgtctggaaaatggattccggggtcgctaatagattatcgtggaaggttttattgcgcacattccacagggtatagcacaaggaggctgcgaatagggaaaactgaggcaggtcaacactccctccaaatggagggttaaggatccaattcaaaatctctcttgtcgaagcaaaggagagaagatcgctacgaatcccccaagaactcttaaaccagcagtatcgagccatatgacagtggaaaaacaagtgttccagtgagtcctcagcattctcacaaaggacacaacaagacgtattaccaaacagagcatagagcctctggccacaaggaaggatgtccttgcccactttccacataaaaagtttaacccgttcggaaaacggggttttccatagttgttgaaagagcacatccaagtccccttttctacactcaataatagcagtataggcagactttacagagaagcttccgtccagtgaacttttccaaacaagggagtcatgggagccaggaggaagaagggataatctccccaactgctccaagaactcgggtttaaaccaaatcgagagatcaccaagattaagacttctatcaaaattaacaaactgatcaagatacaacagctcagacccccgtatcattattgaaggcagcctcatagacatcccacgctacccatggcacccaaggcgaactccagatgtccacattttgaccattgcccaccaaccagcagctctctctacgaataagatcccgagtagcgaatattcctttcgctccccacgaggcagaactcgggatgctcgcattccaaaaattagaatccctcctacaatacttagccaagaaaagtcgacaccacggggtcctgtcacccttagctaaggcccaacccagcttagaaacaagagccaaattcatatcatgaaattttttaatgcccagtccaccacaagcctttggtttacagatctcatcccagttaagcagcgatagatagcgttgcttatcactacatccaacccaccagaattttctaaccaatttatccaaaagctcacacacggactttggaagcaggaagcaagacatagtataaatagggatactcgaaagcacagaattaatgagggttgttcgccccgcttgagagagaagtttgcttcgccacccttctaaccggctcttaattctttcaaccacaaaattaaagtcacgcctcttactcttggacaccaagagaggatttccaaggaaaaaatcctctgcccgtagaaacctgaagccaagaagatcaagaacatcctgttttaacaaatctgccgtattcgctgaaaacaccacagccgatttggaggaattaatcaaaagccctgaccactcacataattggtgaaggcaagcctttaaggtctcaacctcttgaagagtagccttacaaaacaaaaaggtatcgtccgcaaacataaggtgagaaacagaggggctgcgaggagagaccttaaagccatggatccgcccagcagcttcttccctagccaagagtcgagaaagaacctcactgccaaggatgaagaggaaaggcgacaaagggtctccttgtcgaagtccccgagacggtctaaattgtttcaaaggtcccccattaagtaagatcgagaaactaacagattgaatgcacttagccaccaaggagcggaacttagaatcaaaaccaaaagcctctaagacagtgtccaaaaaggaccattccattcgatcgtaggctttagacatatccaacttcaccccaacaaaggccgtcttacccaccttcttcttaaaagaatccatgatttcatgggccatgataccattctccgcaatccatcttcccggaacaaaggcggattgaaatggggaaattagggaagggatcacagctttcagacgatttgcaaggatctttgaaataaccttatagacaaagttgcacaaggatataggtctaaagtcatcaaaataattagccttctgcttctttggaattagcacaataaaggttcgattcaagctctgaacaaactcaccagtatgaaagaagtcactgactgtcccaacaaccgtctcccccactgtatcccagtgttcacgatagaaacatcctggcatcccatcgggacccggggacttgagagggcccagagaccaaaccacatccttaatttcatcacagcaagggattctggacaaagcagagttcatgtcatccgagatggaagaaggaataagatcaatcaaagagctgtccagaacaggagaagtagaacggaaaacatccttaaaatgattgataaagaagttcccaataggcatcctacccgaaatccaatttatcccatcatccgtgacagccccaatgaagtttctctttcgcctaatcaccgtcgaggcatggaagaacttggtattgcggtccccatcctttaaccaagtctcacgagacttttgacgccaaatgacacactggtgggtttcaatttcatcgatttcaagcaagatatcagcttccaaagaagcattttcaggagaaggattacgagactgaacttcaatcaacaatctttccaaagcccgcaacttactttggcacataccaaagtactctctattccatttggccagcaaacgcctggtgcaactgagtttagccatcaattgaaaactttgacaccccctcaccgtagtactccaagcttccctcaccacctcacggcaagacggatcccgattccaggcctcaagataccggaaagggcgccgataagtgtctctatccaacatcaaatccaaaacaacaggagcatgatcagattccctaatggagaggacattaacaccagccttaggaaaggccataatccaatctgcactaccaattacccggtccaatctttctttgacaagattatcaaacttcctattgttagtccaagtgaagaaatttcccaccgagccaaggtccacgcctcccgatatcaaaagaaaattagacaagtcagaaacctccctaggagaacaagccatcccaccaaacttttcctgatcgttgaggatggaattaagatccccaaggagagcccacgacccagacaaagaactagtgaccaaggccaaatcctcccaaaaggcccggcgctcacttctaataggcggaccatacacaaagagacccatccaacaagcacaattaagagtattagaaaatttaacagaaatagtgagttgttgaaaactaaccacctcaatatcgattccggctcgccaacatagacataaaccgcccgcggaaccaacaggatcaacaattaccgcatcactaaaaccgagtcgtctccagatactacccattttagagttgtgaactttagtttccatgaggaatagcacatcaggattttccctgacaaccagaccccgaagggcgttaactgcacgggcttgccccaaaccccggcagttccacgacatcaccttcatggggacttggggggcatgataaggcccgcctcctcggccaattgaaaatcctcatttcgaaccaccgtattatgagtgacccttcctttagcgatatttgcatctgaaatcaatgatgttgaccccgacaactcaaccataaactccccagtaggcaaagctgagttagtcaataatttgctatcatttgagattcccacagaaacctcaaaaagaccatcgtcttgttcgagagcaagcagactatcggatttacccatagatttcttttgttttctaggtctactaacctcacaaaacttcagagactcctcctcaccattgagattgtccctcggataggccctagtagcatcagccgccacactaatttcagcgaaaacatcaagaattccatctttagtccccggcttgtgtggcaagttagaattgtccccctggaaaagattgcattctttttggggctgagatttcttccttttattccccacctgctccactgccgaaactgaattatacccgaaaatgggtttcttcgctactccttttggccccgtaagtttagccactttagaattcctatgagtggggttagaaccaatggggcccttacgctttcctcccccctttttatgaataggatcataaccattattaaatcccaacgtactctccagaacattaaaaggcctggcccccaacgggtccccactgatatgattcggagtagtcttggccgtaccctcctcgccttgaatactaaaggaattgtcaccaccatggataaccctcccttccacactaacggagcttttagacgccgccttcggattagtatcacaaggggcatcctcttgttccatttggattcgttcctgaatatcttcagctttcagaaccgcaagcccattttcaagacgagatccaacttttagccatggaccaaatagcggaacgctccttccatcatctaaaaccatcatacgttttctagccgaacaagcgtcttcctcgtgtccgataacaccacatttgtaacagactagagggagccattcacacttgaaatagctccaaactttcttaccatcttcatcatccagaccaaccccagcaaggagaggtttagccaaatcaaggctaacacgaaatctcagaaagttactacggataactccattagaccggaccttatcagccaacacaaaggagcccacccgattagcaattttaattacattgtcatctgaaaaaaacctataaggcactcccaaagcacgaacccagatattgacatgttcaagatcagcaaagctccattttccgtcggacggcatcgttgtcaacaaaagaaaacccccacaaggggaccacggtcctttttccagtaccttaagagcatcggattctttcgagaaccggaagatgaagatttttgggtgaatctcttgcatactccacccaggagacacattccacatttgagaaaggatagaacgaagcttaccatttcccactttccttttcgcaaaaaacttacccaccagcgacctgcttatggtttccttggcaacctcatcattgggtacaaggtcaagagagaaatcatccacagagacattctcgaccaggctcaccatctcctcgatgacttccacgttatcttgaaggctttgattagtattcagagagggagcagaagccatggactccgattgaaaagagggatagaccaatccaccgcagaaacagagaacaatctcaaagcaaggagaattacaggaataacagaggagaattaaatggctatttcctttgctggaaaagggaataagaaatcccagaaccctaagaggattcaaaaggcaaggccttaccggactggggacaccgtacccccgccgtacagacgcaccccgctgcctgatcgtacccatggcagggatgcgcaccaccactacgcacggacagagaaaggaattccactactcgtacggagagtgaggtgcatactatcataaaattttaacagcaatttcttaaaactgtaaaatttttgctatttttatatatttatgaaataatccatctactttcctttaacaacaagaatgggcttaataaggtacaagaaacgacatgtcgtatttttttagtcttgtctgactatataaatgataaaaacgacatgtcgtaattttagtcggttcgagtcactatataagcataaaaacgacatgtcgtatttttgagtcgggctgactatataatggctgaaaacgacagagtttggttgagctgagagtctgaaacttttgagagtgaaagagaagaagcttgctgaagcagaggaaaatttatcaatggcagggtccggtggcgggactggttcgtcgtctcctcttccacccaaaattctcttagcaaaacccggtttagtaaccggagctcctgtatcggctaagttcggccgtaccggcggtggcggagaggacgatacggcgtcgcttcggtcccgtctaccttcaatcggatccctcaatcttctatcagattcttgggacttccacatcgaccgcttccttcctgtaggcatttaaagtgtttcatttcttcaaacatctcacatgcaaaaactttgattgtaatttttctgtgaattttgtagttcttgactgagaataccgattttacggtggttggggtgattggtcctcctggagtgggcaagtccacgattatgaacgagctttatgggtttgacgccacctctcctggtgagtttctcaatttcagtcctattctattccatttatatttgtgtatttgcgattaacgctagtgcacaggaatgctgccgccatatacgatacagtcagaggatgttacagcaatggcgaggcactgtagtatggggattgaacccagagtttctgctgaacgcattattcttcttgatacccaggttttgattttatgctaaaacatatcctatcatagtcatatgtatgtttgtttgtagtattttgtacactttctttacttgacagtattattctccttgagagttgcagcctgtttttagtccttctgttctggctgagatgatgaggcctgatgggtcatcctctgttccagttctaagtggtgaatctttatccgctgagttagctcatgaaattatgagtattcaggtagaattagggagtcaatattgttgttgggtttgtttttggtaatggttagttgaatgaagtttattccatggttgctgcaaggaatatttctagcttggtgttcttctgacttccatttgccacactttgctggttgtatctgatggagttcatgatcacaacgtgtggcgtttgatgtccacggtatctctcccatttgattatttttcagcaatttgttacctttactacattgttgttcttaaaatgtatattttgttaagattctcttacagacgatcactaacataatttgtcaccacaggttgacttactgaaacatggcatacctgatccgtctttgttaacccctgccccttctcagggctctactccagggcctgacaaagaagctaaagataaagataaggttcgtgaagatggagactacatggctgctccaatttttgtgcatacaaagtatgtgttacattccaagtactatcttttcatgagtaagtctcaaaatacaaaaatgagtagataaactcaaactaatgtggttatctttgttctactcccatttgaatagagtacaagatcaagatcttactgaacgtaattacacgcaactgaagaagacaattaagcattattttagctcgacgtctttcatgagaaaaacaccaggaaacattgccaaagatgaatccatttccacttcagctcttagcattcgaaatggagatccagattcaatgatcccgaagttgttcataatcccagttaagtataaagacgactctcgttcaaatcagtatgaaagtcataacaatgtgctatggaagttgcgggatcaggtagatctctattcattttgtaagcttgttcttttttacattaatttgagataatgttgagttgagaccacttgggtattttactaactcaggttttatcaatgagtcatccttcattttcaaagactctgagtgagcgtgattggttgaaaaattctgccaaaatatgggagctggtgaagaactctacaatcattgctgactacagcaaaacacttcaaacttctggtttatttagaaggtaagctgggtttttgtctggctgctgcctttctcaacaattaagattatatgagatttgatttgaaaagaagaataatttcgatttttgaattaaggggtcattttaattaaatttaacgcaaaatcaatctttatattcacgtcttagttgtacgaattcattgtgactagcggggaaaaatatttcgagatgggtcttgaccatttttcacaaagggatgctactataaaaatgtgagatttttacaattttgattaaatttaatgttagttcttgaatattattttttctctcaacgtgtccagtagaaaagtgatgaataacgtttatggtttcgtctttgggaaacttcataatttttcgagatctgtagggtgagattttaaaagaacactaatgagtgtaagagaaaaaaaatttgttaaaattttaagaaaaatattttcaatttttgaattagagggacattttaaccaaatataactcaaaatcaatctttatatttacgtcatagtagtacgaatttattgtgattagtgataaaaaatattccgagataagttcgggccacctttcacgaaggggtaccactattgaaaatgtgaaattttcactagttcgatcaaactgattgtttgtgcttaaaaattattttttctctcaacgtgtctagtagaaaagtgatgcacaacgatcttggtttagtccctgtaaaattttatgattttcgaagagaacactaacgagtgtaagtaaaaaaaacttgttaaaattgaacatgaaaacaataatatttttaatttttgaattaggggttattttgaccaaatttagcgcaaagccaatcgtcatattcacgtcttagtagtacgaattcattgtaactagtgaagaaaaatatttcgagatgggtccgggctaaatttcacaaaggataccactattagaaatgtgagatttttactatttcgattaatatgattgtcagtgtttgaaaattattttttctctcactgtgtccaataaaaaagtgatgcacaacagtcttgcatttgttcctataaatttttacgatttttcgagatgtgtaggatgatattttaagagaacactaatgaatataagagtaccaaaaaaaattgttaaaatttatccttaaaagaaaaatattttaaatttttgaatgagggagttattttaactaaatttaatgcgaaactaatcttcatatacacgttttagtagtacgaattcattgtgactagtggggaagcataatttgagatgagtcctggccatattttacaaagatgtaccactatcacaaatgtgaaattttcattatttccaataaattgattgttagtgcttgaaaattactttttctctcaacgtgtctaatagaaaagtgatgaataacgattttggctttgtccttgtgaaattttataatttttcgagatgtgtagggttaaattttaagagaacactaacaagtgtaagagtaagaaagaaacttgttaaaatttatcataaaaacatgaatcttttcaaatttggaattaaggggctattttaatcaagtttaactcaaaactaatctttatattcatgtcttagtagtacgaacacattatacctagtggggaaaaatattctgagatgagttcgggtcacatttcacaaagggttaccactatcagaaatgttagatttttactattttaatttaaataattgttagtgcttgcaaattactttttcgctaaacgtgtccaataaaaaaattatgaacaactgtcttggcttcgtccatgtggaatttcataatttttcgtgatgtgtagagtgagactttaagagaatagtaacgagtgtaagagtaaataaaaatttcataaaatttaccctgaaaagaagaatattttaaatttttgaattagggggccattttaactaaatataacgcgaaatcaatcttcatgttcacgtcttagtagtactgattcattgtgactagtggagaaaaatatttcgagattggttcgggctacattttacaaaggtataccacacttaaaaatgtgagatttttactatttcgattaaattgattgttagtgtttgaaaactactatttctcttaacatgtccagtagaaaagtgattcacaatagttttggctttgtctttgtgaaatatcacgatttttcaagatgtgtagggtgagattttaagagaacactaacgagtgtaagagtaaggaaaaatattgttaaaatttaccctaaaaataagaatattttcaatttttaaattagagagtcattttaactaaatataacaagaaactaatcttcatgttcacgtcttagtagtactaattcattgtgactagtggtgaaaaatatttcgagataggtccggaccacatttcacaaagggataccgctattaaaaatgtgagattttaactattttaaaatgcttgaaaactattttttctctcaacgtagttaataaaaaagtgatgcacaacggtcttggcttcgttccagtgaaatttcacgatttttcgagatttgttaggttagattttgaaataacactaacgagtataagaataaggaaaaaacttattaaattttaccctgagaagaagaatatttttaacttttgaattaggggtcattttaaccaaatttaacatgaaaccaatcttcatattctcgtcttagtagtacaaattcatcatgattataggtgaaaaatattccaaaataaattcgaaccacatttcacaaaggagtaccactatcatatcatagaaaacatatatttattattattgttaaactctacaagaaaataatagacaactggaaaatcccaagtttaggtaaactctacaagtacaggcacatgtgagatatatctgttttcaactaattttaaactttcaagttgaaggcagcagatcaattcctaaaggcaagtagcctcaatttcctcaagagtaagcccctttgtctcgggcacaacgaagaatatgaaaccaagagatatcacagctataactccaaatacataaaacaagattgcagctcctagcaattcctgaaaatcacacaatgaaacattgtatcgtgttcataagaattctaaaaaaagaaagcaaatgtgttacgaacttcgaatgttctgatatttaagcaccttcaaaggggagaatgcaaatgtcaccaacgcatttgcaccgaaattaacaagcactgctatactcagtccccgtcctcttagtcgcaacgggaaaacctccgatatcattagccaaccaatgggaccaaaggatacctgcaagcagcatcagtgtattcagtcaccaatttgtaaaatcaagtgaaatgaaactcgttatcatatcagagatggtacaaactacaaagaacaaaataaactttcatgacttacctgataactgccaacgtacaaaagcaatgcaataacagccacaatccatagattatccaagaataggtaatatgatcccaaaaggaacaaagagacaacctgtcatttgtcaaacaaaaaaggttcattcttttgttgtggcttcatagaaaactctctacattttcaattccaatatgaaaaacaaaaagagaaaaaagaactcacaattcccgaaacacctccgagcagtaagggtctcctcccaagtctatcaatgacaagaacagccagtccggtcattattagctacaattacaaaaaccaagtcaagacattttttcaactgagaagagagcatgagttaagaacattcagatctcataattaaaaaaagaaagtttaccttcagcacaccaagtagaattgagacccgggttgcatcagatgctgcagagaaccctgcactctaataaattatgttgattaggaaaacagattaataagcctaaaatttatcatctaaagctgctcaagtaattaggttcttcatcaatgcccaatcaagtgttgtaaataaaatattagtgtaatacctgaaatatagatgcagcatagtatagaacactgggttgccctgtgatctgtcatggaatttgtctctcatgtaagccaaaattttcctaattaataacttttgaaggtatagctaaaattagttaaaaatacctgctggaacaagactaatcctgtaccaattataagggctttcaagcattttcctctaaaaagttcgcttattgaaccttctttctcttctccaacaaaagaaagttcagccaacatctcatccacttccgcgggagcacagtcttgatagactggacctctaagccggcgcaaacaaagtattgcattctcttttaaatcctgcatatttcctttcccttgtatggcacgcagaagaatccacctcggtgattcggatagccagcacattccaattcccatcacgatcgccaatggaatactggcagagtaaatgtagcgccaaccagaaaacacatcaacattaaggcttccaattccataacctgcctataattaaaggaatttacttaatgtgaattctaatacccaaaagctctttgttcttgtatttaaattgcataaaggagcgtggaaacaaattcttggtaaccagattcaaagttgaagaacttacaaccattccgagtactataaagaactccttaagagagattagttgaccccgtatctgacatggagctgtttcagcaatgtacattggagcagcatgcattgcctaacaatgaagaaaccaaatgtataacacatttcatttgcagtcaagaacacaaacattaggagtatgaagtgaattatcttacacataagacaagcatgaagcatttcatgatttgtttttcttaaatgcatgtagttagaagttttacatctctaaaggtttgattccgagcagttattttctctttggatgtttatgttcgattactaattcttctactatgataattcaattacatattgaataggattctatattataaccaaaaaaactaagaaaacaatctaaaattcttacacactagtactacttcaataagaaaagttcaaaccccaatgaattaccagtccaattcctataccgaatataatgcgcccaacgaccatgataggcaagttaggagacactgcggttattatagctccaatgagatacaccaaagcagataaaaacaactcctttcttcgcccttcatacaaaatcaatcatcaacactattcaagaaatgaagcatatcataagaacttcagttgtataactacattagatcacaaacctagaaaatcagcaacattaaaagccaacagagagccaagcaaggcaccgtacaatgagccactggtctgcaaaatccaattgatacatatcatttatacaaacagtttcttggtctaaaattcaacatctttgtacacaaactttaaggaaaagaaaatcagctgtaaaaaacttactatgagaccaacatccacagaagacaaattataccatgatactccacttgatgtggctgactgcaaagattaacaaacaaagccaggaaatagaacacatcaagaataaaggattcaaaaaatatgtaatcttatcatatcattcattacctgtatagaaattgtagcacaagaagtggcaccaatatcatatccatagagcagcccacctaaagctgggaacagaaatctgaagagcacaaagccaagccaccataaatgaatataaacattaagagacattaagcaaaggactgtagagagatactcacgggagaattgcagcagtaacagagtagttatctgaatgttgaaccctactgagaagaggctcattttcatttccaatctcacccgaagacttttcccacatacaaaaaaaaaaaaacaataaaaatcatttctttagcaagattaaagaaattccccatttgggtttttccaagaagagaaagaagagcaatttaacatccacacgtattagaattcgattacgaaatctcaaaacagttgactttcacaaacccagaaacagagaaaaagaagataacccaagttgagaatgaggagtcacaaacctttccaatagaagagagagtgtgctgctcaggatcagaggccatagcttggaatttctgaaacagaacaagagaaaaaccaaacccaacccagagatataataaagatcaaaattggtcgttgtgagtgtcaaataatcaaaagttgaattcttgttttgagttttgttttgtatgtgttgtgttatgttcaaaacttagtatgtacgcaggtgagttaatggcaaagagctcaattcagatatattaggtgagattttactttgagattattattattattattattattattattatatatatttgtattttaagaatttgtaaaatgtgcaaccattactataatgtgatattaatatttaacaatactttaaatttcccaaagtttatataatgcatcctaatcctattaaaatcactgatacaatctctaattctttcgacttttataggaattttttagtcttaattttttaataattgtatatgttatagtttttttaatggtatatattatatttatttaagatattatgtaaaattttaaaaaatttaaaataaataaagatcaatgtttaaactatctatttcacacaagtataaaataaatgaatcacgcgtaaaataaattttttaaatcttatttttaacatttttatctctgcacttattttaaaaagatgtagtgtagaatttttatttattatttttctcacaaccaccacattagaaaacattattttgtttttgttttttcatagatatgagtcttaccttaaatcctgtgccaagatatattgcactgtaaaattataaaacctcacattccacgtgctaatattatgtgggtgtaagtaatggtgcattcctaacataattttagtatttttattttctaataaaaaaacatattttagtatttttattaaaaaaatccaatggccttggtgtggtgttgagtgttgaggaattcagatggagtgatggtggccacggcacaacacttggccttttgttctttgcctattttctttgagattgggctttgcgtttgtcttagatacactcgtgttggtggaattcatttgtctcaatgttatacacattaaggaaactaactcttactttggctactccctttatattactatttctattaatgatattatcatgccaactttatttttttttttgaggtttctcccattagctttactcaacagattttaacaaagtacatttttcaaaataataataataataataactcctattatacttttaaatttgaattattatggttcattctcttaaatatctattctatataaagtgtgactatataactaaattcttgatttatgagaaagtgtgcctataactgaattattggtttataagaaattcatgggtaactttttatttatatttaataaaataataaaatattatttatatagatcggaaga

SEQ ID NO: 21756 - DNA, 1534 bp, Cannabis sativa
agctacaatattataatggtgtgatatgtcatttttgtcgtgataaatatggcaaaattgtatttcttatttttattattacaaggagggaaaaaaattgtataacaataaaattattgtaggagaatttcaattaaatattttgttttatttatattcgttgtcaactctcaaatcatataaagatttggtcataaaattttgttaattaacactgtggtgaattgaataatccttccaacaaaaaatagtaataatgcataaatgttatattagataggaatttattaaagtataagtttttttttttttttttaagtacatgaataatatataagaacatatataataatacacctttggtttgttattacatttattcctgtttcaacatgtaataactctttaattcaactttttcataatcatattgtacttaagaccacttgaaatttttattttttttaataatttagaaaataaattttgaataactatttaataaaaaaaatgcagataactataaataaaatatatataataccatttaaagaaaaactgaagtaaaatactagatttcctaacaaatatcaattctacccgaagaacactttaaggataaattgatttaccgcgttgctgccaaaacgaagcctttgagctttgttttcgttccggactctacactgtaacactgtaataaaaacataaaacacaattaaataatttttattatttatataaaagcattaattagtctgtacaaacacattattatgtacggataatatatttattctcttttccactctgctaatcaattattccccttttgcttagtggaagaaaagttgttaagtgttaagtaggaatgatcgagacaactttaaaagctctttgctttgccatatattatatgggtcaaattgaaaagtataataataataactatatatacaataaattaaatacgtcaaaaagtgagtaagaaaaaagaaaaagattaaaattaagaaagtttatccggtattattatgtaaattgtaaattagagagaaaatacctgactaatgatgagagaagcttgggaccaatgaaaagcaaaataagagagaatacatctctcaaactcttccagcaacatcacatacagagaatccacttcctcttctttaccaaagtactcatatatactttgctcacatccttttggttttctcaaatactccatagccaatctgcatagctcttcacactcatttgtattctcaaatcccagctgcctagctacaaacacatgataattatatgaaatgaaaacatttcaagtaatcggaatgtttattaagaagatcataaactaaagcatatattatatatatgtatgtatatataccgacgaaatgggagaatttttcaagttgttgaacacggccagactgggttctctctaagcgaggaatcaagtgttggtcaacgagcaacggtggctgctcagacaactttggccggctgaaacgagcggctggcaccc

SEQ ID NO: 21757 - DNA, 2102 bp, Cannabis sativa
tttcataattaaacataaacaactgttaatttccaaattaactaagcgggctttacagaaaacttcataacttaacacttcaattagacttactataaaggattcaaaagtgttcagttagaagatgcagagttaattcagtgtcgagaagaggtcttagctagtcgacctaaggatttctcaatctcgagcaatgggatgttactttataaggctagggtgtgtgtaccaagtagtggtgaatttaagaaaaaaatactagatgaagctcatactacaccgtattctttgcacttggttactaccaagatgtaccaggatttgaaaccgtattattggtggtgcaaaatgaagagagatgtggtagaatatgagtccaagtatttgacatgtcaataaatcttggcagaacataaaaaattggcagggttactataaccactaacacttcctgagtggaggtgggaagatgttacaatacactttgtggtgtgtttacctagaaccacaggaatgtatgattcagtttaggtcatcagagtggaccatttcacaaagtcaacacccttttttccagtaaagacaacttatacgatagatcagtaagcaaagttgtatgtaaaagagatagtttgtctccataaagctctgaaatctatcattttgaatagagatatgaagttatagcaaagttttgggtatgtcttcagagagctatggcaaaagatgaagtttagtataacttttcaccctcagactgatggacagtctgagaggatgatatagatactagaaattaaatttgttatgagcttgtgtcatgaacattgagggttcatggaataaatatttacctttaatataattttcttacaataattgatataagaatacaatagggatgaatccctatgacatgttgtatggttggaaatatcattcctcagttcattgggacaagactggtggaaggaaatatttgggtccttagttagtttagaggactaatgagacaatggataagatcaagactcggatgcttccttcaaaaagtaagtagaaaagtcattttggtcctaagcacagagacatagagtttcaagtaggagaacatattttcttacaaggttcaccaatgcagaggtgaagcgttttaggaagaagggtaagtaaactctaagttttggggctattggaaccttaagaaggttgagtgagtaatgtactcatgttgagatgctaagaaagtacgtgttagatctgactcatgatttgagttataaagccctgatatgttcaatcaaaatttgtttagatcatcagagttctaccacaacaaaaatgttttatgaatgcaaagcataaggaggagattataatcttacaagcctcacctatcagaggtgtgggacactttgactgaaaagttatatggatttgaagcataggtaggaaattataaacctacaaacctcatttatgaagagtgtggagtgcttcaaaaaggaaaggaaagttaagttaggtgctaagattaaagtaggcaagtaacataccttctaatctatctttagcattaccaaaaatacatagaagttaactgtagaaatattgataagttaatatagaaaatagttacttatttattatttagttaaaataaataaaaaataaataatttacacatttaacttgattttaaaattatattatgagtattgaagtctttagttaactttgcacacgtaagattgaatattaaataaattttattgaataacataaagtgttcaaaataaaattatttaaataaaataaactttaaatgtgaaactaaaatttagaataataaagctaaataaattgtctttaagatttttaattaaagttgacttcttcattgcttttctaaaatcctcttccatcacaaactttgtagaactctcacttcttcgaatcatcttcgacttctgtccacaaatctgtaagagagaaaacaatatcagcagtttagaattgtaacgtccctgcttcaagcctctattgggtccttacacccacggaatcatggctcttatacacgagtacatcactgtggctgc

SEQ ID NO: 21758 - DNA, 4285 bp, Cannabis sativa
  modified_base (2167)..(2170): a, c, t, g, unknown or other
  modified_base (2249)..(2259): a, c, t, g, unknown or other
aaaaaaaaaaaaaaaaaccagacttataaatctttaaaattattaaaatttatatataaatttacatttaatttgatacacgtgctccgcacacgtgtgtctcccactagtagtgatttaataatgagaagtttattataatatatatttttttatttaatttataataataataagttattattattacagacgtgttatatccgttaaatttgatatttttgactttttgactttttgactttttgacgttttttattttttattatgattatcatgtcgtgtcatgcaataactttatagagtaggcccgacacaacttgcaagcttgataatttcgtattgtgctcgaattcgtgtcatattttgtttggatcgatctatttttcttaaataggccaagcaattttcttatatattcttaagtttgtgctttatattttttatttgtattaaaattgatgagataattattaaaatatacgtgatttttataattttaattattcttatatctttgtttaaccatagttacacaaaaattataattattaaaatttacatattactataatttcaattgataaatatataaattaaatatttattattgttattattattattattattaaattatcggacttttgaatgtattattctttcgagctaatctatttgtgtttacgtgctgtatttttggatttgtcgtctcgtatcgtgcctaaacctatatttttcgtgcgtgttgtgccaattcgtaacactgtatcgtatcgtgtctaagtccacatttttcatgttgtgtcgtgcctatatttataatttttcgtgtcaggtcgtgctcgtgccgtgttaaaaagctcgacctatatttacaatactagtttaaaccctactttttacattgtaagttatttcaaatttctcaaaactttaccaaaatattttaaacaactacaatataaactatctcgtacaccataaaaccatccattgttatgcattaatctaaaaaagttttaagtggtgattctaaatctaatccatgacttatgggggaccataggccgcaaaggaaatgatgatcatgaaatagaatcattgaatgttcaaatgttataaaattattgtgttaataacaaataagtaaattaacaaattatggaagaaaaaaataaaataaaatacttatgggtgaaaaattgctataaaattcatataagcataagaataattgaatgacccatttatcatgtatttaacatgtccctatattttaatttattggaatatgattgttaagaaacaataaaaagtagaccatatgtaattaacaatttcttttttttacaatcatactagctagtggtcatagcattgctaaaacaacaaacaacaaataaaataagaaatattccttaaatagcaaatatttaatcatatttaaataacattaatatcctaactctttatgtctacacttgaatttttccatatattgcaagaaaacacaaaattaaaacaaagcaaactaaagtgctctaaagtctaaacctagtactacatttactaatattgcctttatatatttttcaagaagccaaggaaatgaataaaaatgtctctttttctttttttagggaataaagagttaaagaaattgttttcatcaaaaaaaaaaaaaagagttaaagaaattgcctatattataaacacatttttttaggtaggggttctaaaaagtctcatgtagggttctttttctatttatcatacttaacaaaaattataaattaagtttttcatatgtaattataacatgcattttacctgcttttaaaaaattatgaataaatttacaatttttaacgtatataattaattttgttgaattttctttttcaataaaataaaaataatttgattttttttaaaaaaaatcacaagtaataactacaaatcatttagaataaacatagattataatcaatttaagcacctaaaatataagataatggcctaccaatacaaaaaaggaaggcttctctatggtagactcactcatatatataaatctatatacaatacactatagtattattcaaaaaaaaaagtatttttagtcgtaacaaaatttaagagtaaaagtaaaaaaattgtaacnnnntataaattatcattcttatattgtaactaaaggacctgtgactaaaaatattagttataaaaattacaatttgttgtgnnnnnnnnnnnttttagtcacaatatttattatgactaaatctaaattagtgacaatttatacataaatactatattgtagacatacgtaattttttattgtctaaaaatcacatttaattaaaaaatttatattgtgattaaaaaattagcgacacgattttgtctcgtgatgtacttttacggaatgtatttcgtggtacattagataagtctcagggtacattagatgagtgtcagggtacgttactattttttaaccttaattacccctagattaatctcaaccctcagattaaataactccctcatctaacggctgccgtacatcaatacattccgtaaaagtacaatcacatgactcatgtcactaaaaaattatcactaaatataactgttttttttagtgcatgacactatatatattataatgaatagtgatttcaaagggagctagggagctaggaaatttgaaagcttggtttggtttgatgaattattaaagtaagccatacatgtctattccacattgaaaaaggttaatacttcttctcctacaaaaacaaaaagatgaagaatcaaagttgaaaaagaagaacccaactgaattatttcatatggtgtgtgtgtgtgagtgggaccccacagatgggtatggctggcatataatatatctatagatatatatacaaatagggtatagggacatgttaatttgtatcacattaagctaaccacaaaggtccacaactatatattgttattatatacttaattatataattatgtatgaagattggatttaatatctcttatgtgggacttagctagttttataaatttcatttgaattatttgtaaataatcaaaagtataaactacactttttttttttttgaagggatataattacacatatacttattataagtatataattttgtattaaatatatataattttgtatacataaataaaattagagttaatactattttagaatttatatttggcaaaagttattaaattgatatttttttttaaataataaattatctatattttcttaaatagtataaaatagtattctaagactgagctttttgagctttttttttttttttaatataatcaacttataatttttagcacgaccagatacaaaaatatactaagttttatcataacatttttatatcagattattattagttttattttgataaaagaaaattacttaattaagataatattttgtactattttaaaaaatacagggcccaattatttttgtaaaatataaaatctaaaatagtatttacctataaaactatatccaaatttattttatacattatataaatgttatgttaaacaaggcttataatacaatatgaattgaaatgtttcaatattattgtaataatatccatgccttctaaataaatttaaattaaaatatataacaccttattaaattagatcaacataaacattaaatggtattataaaagttttggaacccataaaaatattctaaaatatttgtaagagattagtatagtagtagtagacaacattatagagcaccctaaccccatcacctttttcacaaactagacaaatcaaatatgtatttatgtagcaaaaagctttataaattataatataaacaactccctcacctcttgtgtttttatttttaataaaaataaagcactttaagataaatataacacacatatttctttgaatttctttttactattttttaatagtatagtcaacactataatcaacactcaacactattattatccctaacttactttataccatacatactttcaagtataagtatagtcaaaactttaaactaaaaaaaaaacatatctcaaatcaagccggaaaatgtggataattggaggattaataatttatttatagatatataatgtaatgtaatatagaaccatgaccatgaccatgaccatgtttgggtatatctagctatactagccttagcctatacaagcta

SEQ ID NO: 21759 - DNA, 3634 bp, Cannabis sativa
taataaattaaacgggtcctcgtcggggccgggagtgtcatccccgtccccgccccgtttaacattcggggacaaaatttgatctccgtccctatcccattccccatttagatggggaatccccgccccattaggggcggatccccgtagggccccatccccatgggaaaaatgtgcatccctacacatatttaattagtttattattataaactaatttaaaagtacacacacgtggcatccctaagggttagggcattacagattatttattgttattgttattacaatgacattttttgttgttttgatttttgttttttctagtgtagctttatttatttataacctcttaattataatataatttgcttggtcttaagtgtattcttagatagaggttctactgtatatccattgaagatgtcctcaaacatgggcagacccacatagaggcaaagaggggtacataaatctcaacgcatgagcaagaacaatttcttatgtgatagagatacacacaataaggctccagacatctgttcgcaactatatacaacaccctgacctcatgcctacttaccaacatccaatagctatgttagttcaaaacattgtctgaatgggacacactcctcacacaagagtgtgaaaatatttgcaataagagactcgtgggactcaatttccaagctaccgaaaacatggcaaacccattgcaacgttttacaatcatgctactcaggctacatgttaatccagacttatcatttatgacaagtgtcaaaatacataagtcgagtgagcactaacttgtcgtaataggaagccctaaagcaagacagctggaaaaacacctattttccataaactgattccaaatgccatttggccaaaacctaaagatgacgcaccatgggaatattatttgcccaaatacctctaaaaactagaagaatatatgaatcattgtaaaaaatactatgttgatgaaagcaagttcgactataataatccaattttccaagattcgcaatactcaaacactgtttttaactgcccattctcactcaatgatcttgatgaagaaatatgtagggggctggctatatctcaacctatcaacaacaaacttattgcatcaacaagtggcaacaagagaacaaattcttcatcagtgtggcatgaagatgatagtgacacaaatgagtacatgaacctcagtccctcacatgaacccattagaattagcttctctgagaaactttaatgagtgaattaaagaaactaataacatgaacaacacagttcatgattacttaatatatttttatatcgattgatcatttgttgatatgaattaagtctttatagtaaacaaaatgttagataaagacaactttattcatattggtcattgtcatatatacaacaccttcactttgatttcatgctacatcagtaattcgaaccgatattacttgcatcgaagaacgagcatcattaaaccgtactagcaaccatttattaaatatttcatatctttaatatattgcttactgtagtgatcttaattttctgtataactataagtcacaacttcatatatgaataaaaaaatttctaatatttatatataaattattcaatattaataattaacattcatgtatatatcaaaatattcaagtttttattaataattaaaaaataaatttatacatttttcaaagcataaaccctaatactatatatattgcccctcattcttagttgtggacgcataagttaagataataaaatctcatatttcataacacaatatgtctttctttcctctctgagttctttctctactaggataaataataagaattttatcattaactcaatattaccaattagaagatatatcaagcaatgtctttatggtaagaatcaatttcaatagcataacttacaaaggttaagaagaaaagtcaacgttagaaaaagtataaggttgattctgattaaatggattaacattatatctctttatcagtctatacaagtccaagcgaaccaacattcaaatatgaatatagaatttttttatattcattaattatatttttaaaattaacatattcatttataatatatttatatcctctatttatatttcatatattatctaatatagtatttattgaatactttttttaggacataaatcttaacaattaatatgtaaatgtagggattccacaacatggaaaatagtaaaaactctttgataatttatgttgcaattaaaacatttaatttatttattgttattaatgtataaatcagccaattaatgatcaaatatgtgaaaatgaatatttgctttgtatataaaagcatcatccactaaataataaatttaattactattttttagaaaacaatgaactaatcaaaccaaattttgtagaactactataatccccttatgtatcattgctattcttacatatttattggtcattttgttgagtactcacaattctaaggagtaattgcatttacactgtaaatttctctacaagaagaataattattattattgtttacacaaggagtagtcctgatgacgtggacattaatatttaacacgtgacaagaaagatgacatttcagagttgagtagtcctgagtcatagcaggtcgacctgggaggggtccctaaccctgtgtccaggttgacttcgggaactctaaaatggaagttcagacttcaataacttgaatctaactcactatctttcagtattctataccatgaagacatggagcaacctaatctaagcttagggagctaaaattacacgaacttgcaattcagaagccaacctgggcacttaggatttcacccagcgcctatgtttatattcctaacttgggtttcattttctaggataatcttagtgcaaatgagtcaaaacttgcattgaaacataaactagacataccataaatatatttgaggcatcaaataaaatcggagcaagttgatttttgagcatctgggcatcgggccccgaacacctagtatccaagttgacaatttgtcaatctgggtatctttcaagtgtccgattaaagattcaacttttgtattaaatctgtcttcatcaaaaacgagaaaataggtcattttgggggagaaataacaattcctaggcacaaataatagggcccagcacctaggttgatacttggggttggccttgcatccaggttgacacctggggcttgccctgcacccaggttgacaatttgccaacctaggccacaaaaattggagtttttttaggaattcttttgagcatcatctgtgtcttcataaaatattgagattgaactattttcggggaccaaatagaatttttaaaggggcacaactgggacccagcgcccaggttgacacctggagttgggcctagtgccgaggttgacattctgttaacttgggttgtttccaatcaagttcaccaaaagtgtttcaaatatttttaccgtcctcagaattaacgaagattcaagtaaactcggtaagaaaaaaaaaactcgagtccctagaaatagggcccagcgcccaggttga

SEQ ID NO: 21760 - DNA, 1123 bp, Cannabis sativa
tatatgaagggggaattaaaaaaagagagtcaaagctctgctaagattcctctaagccttcttcttcaagagaaaaaagagagtagagttaagggtttcttgcaaaattattgtaaaaatatacaagcctcttaagaccaataatgctaacacgtggactacggttttttaacatccgaatcacgtaaaaattctcgtcttctttattattacaattataatttcgaaagttcttatttatttaatttctaaaaattcggtaaatagtctaaatatcattatggactgttaatatgattctcaactgtttgtgttaaatcaaactttctttctttatattaatcattctccattagactaaaaataaataaaaaaacattttaaaaaaaaaattacctatctatgacttcaattatttggctattaatcaaagccatataggggttgtatgtttgcatatacaaccccatatggcttcagttattaaccaaatgacctaagctataggatcccttttgccttctgtttttttgacccattttgtttcgcctggaatgcctttagttgtgaatttaatcaaaaccaaagctaaaagatcgaaaaaaactgaagccatagggttattttgccgtagtgtttgcccattaaaaattttccttcaactattgagatttttgtatccatttaattttactaacggttcgttgatatggacaaaaatttcgaaggtaaaatttagtacatgtcaaaatttaatggacacacaatttagttcaaatcatattatttataacatgatgatatttatttattttgatatattattattttcataaataataaaatgtatatttaaaatatgcacaaaaatattactattttctaaaacattagatcagagtttttcttaatgttatttgttaaaatatacatgatattttagggtgtgttataataattttggttttttactttttttttgaaaaaaatatgaatgaaagcattttttttttgttattttctttaaaaaaaaatgtatcatatctatttttgttttttattttaaaaataaaaacttatttagtaatttttttttttcgtttttcttgtttttttttttttt

SEQ ID NO: 21761 - DNA, 3656 bp, Cannabis sativa
gaatccatagactatacaattccttaaggatttaattatccaaaagaggcccgagtttatttttttgtgtgagacacttagcagaaaggataaggtggagtgattgagggtatctatcaattttgaaggttagtttgtggtggatgttcaaggcaatagtggtggtttgactttcttttggcgtaaggaggatgaagctcaggtgctgggtttttctaagtcatacatcgatgtacaaattgatgttgaggggaaggattcttggaggctcaccagtttctaacctgatagaagtcgctgtcgatttacttgggatatgttgcgtaaactctctgtcgattcgcctctgccttggtgtgtcaagggggacatgaataataccctttctcatattataggaaaggaggcaataggtatcccgattggttgatttgtggatttcaacgggctattagtggcagtggcttacaagatttggagctcagtaggtactcttttacttaggaacgagggagaggtacttcgaattgggtaaaggttaggttggatagggcccttgtttcgcaaagctagctgaatttatttcctttggctaagctggtaaattttgatttctctatttcagatcactgcacaattttcttgatttattggttgattgtgcttctttggtgaaaatgaagtttaagtttgaaaattcatgattgagagagccatcgtgtcttcaaactattagggattgttgggagctttgtcattatcaaaatattcaggataagattcattattgtggggaagtattgcattcttgggataaggatttcacaagcaattttaaggctcggagctacaaggatgagatatgtaatattaaaaatggggtcatgatgaggactctatttctttatgcaacgggatttataagattatgtcgaaagttttggctaacaggcttaaggtggttctcccgtctgctatcttagatactcaaagtacttttttgccgggtagacttatttcagacaacattttggcttcttttaagattatgcattatcttaagagaaaaaggaaaagcaagaaaatttttggtctaatttcattcaattttattatttaagtaattgtttatatactaaatcatactccccaaattttaatatttaccaaattaatctcctagactttgacatgtaataaattatgctcttgaatttttatccaaattagatttttttactaaaattggacaatagatcggaaatatttttaacgaccttacaatttcatagggtatgatttagtatatattaaagtttaaagattttggataatataaaagatttgtacgtattaaatataatttagagtaaaaactaataataaaaaagttggtttcaagaagtaaatactataacagacttaaaatattaaaaacaaagaataattagtatttttacactttttatactaccaaattatacctataaaacttgtaagtgagaaaattgtatagtaacgtgagcattacataacactatttaattttattaaataataagattaataagatagacactggttcaccttttctaggttaaagattaaaaccttaaaataaaaaatgctaatcaatcaaaacaaaaatattcatattgagatttagatttgaaccttgttctttttcttctctcctatatctttatacacataatgaaaaataaattgataataaacaggaaaataaagcacatttcaaaaaataaattaagtcccataccacttgtgtcttaaatattattacatatataaatccaattttagtttcaccacatcatatgaatttttggattacaaacaagagtactactataaatatatgaatttggattacagtacatgagtacaagttcgaataaatcataagacactccatgatctgcaaaactaaaataaaaatgactcaagggaaaatggataaatatatatgctcattactctcaagaaaatgctactgaagagaaactctcttcacaacttcaaagtcaactatcttcacaatttcaaaaacaaaacattaataaaatcattcaaattttgtgggtaaaaaatccgtaactaaagatattagttacaaaaaattataatttattgtgactaaatgtatttttaattacaatattatgactaaaattattactgacaacttataactaaagactataaatatagtcttgtgactaaaattggcatttaatatttttaaaaaaaaattatattggaaagtaccaggtttttatagtgaaatttgaaagaaaacatgattaaatataaatagtgtacgttactattaaattttcagcttaatcaacaatagtaataatttctcttaaaaaacagtaataattgactaactatattacaacaaaattgagtaataatctaaaacacaagtagacatagattagactaataacctaacgagtgtcgtaggtgaccggcaactaactcaataatattaaaatagtctttttttttaataaataatattcaaatttagtcacactctgcaaaaatctaacaaaaataatcctggaaactagtatcgtaatctttttttaaaaaataatataatttactttttacaagttccatttaacaagtttaaacaattacaaacaaacaaaggaaaacaaaatgttaaccttgctctttattttcttttctgtttttgtactatatatactggattaaaaagttcatgcactccgaaatctgtgctatatatataactgtaaatacatacattaatgaaaacgaggctttagttggagaaagaactaattactggtgaaaaactttatacaataatcaactatatctatggattaattaattaatctctaaacaaaaagcaaaagaacataaaaaaatagcaagaggactccttttgtcacatggggttgattgcacgaaaagccaagtagtctgcagtaaaataactattaacaaatatggttaatacattttgacttaatgtatctaaatacaggagacaaaactaagatgtaagggagtcagacataatcttaattagattagcgataagaaaaataaatgagcaagggacagaaagaaaagggttattattgtttaatgaaaaaaagaaaaagatacaaagagaagtgatttttaacaaaaagagaggtatatgaaacaaagagaaagagaaagataaaaagaagagcaaagtttttaggaagaatagattactttacttacagaaatcagtacttcaacaacaataataatcataataatagtaataatacctactctcttaattacccttttgcttttgctttttcttctaatgattctcaaacaggaaggagtgaggctgtcacagcatgacctagctaagattagcatttacttatacaacaatatctatgtcatcttttgatttctctactaaacaaagctagatcatgctggcagcttcacttcttcccttgtgaacattcaaattaatatgttatataaaagaaataagacttttaatcataaaaagaaaagaattatacaaggaagaagaggaagttgatagatgtatatcctttgaagctgagtatgtgttatatttatagggggct

SEQ ID NO: 21762 - DNA, 1950 bp, Cannabis sativa
gaaaaacaacaaaacaactataaatgtgaccccccgaaacttaggctaaaaatagcctaacagcaaatcatattgtaaaacttgggaaaaatagtttgtgcttcagctttagttttaagcataaaagtccaagtgaaccgagatgcatcatcaacgattgtgagaaaatatctatagccttctatactagttacatgatatggaccccaaatgttcaaatgaattagatcaaaggcactgtcagcaaaattacggtttgataaaaatggtaatttcctttgttttgcaagatgacaaatgtggcaaaattgaccagctggaatggaaaaaccagagttaattcttttattgaatgtattggaaatatacattgagggatgaccaaggtgtgaatgccattgatctacattattgtgaaaggaaagacaacaactaggctgaataatgggactttgctcttgttgaattgcatagagtttcccaagccgtttagctgtcccaatcaccatgctcggagaaggagtctgtatacagcaagaatcattagaaaagacaaccttattaaggctgttatcaatgaatgcaacaagggaaaaaagattgatggtaaaagttggaacataaagcacattgtgaagagtaatgtgttgatttaaccgaactgttcctatgccttttacaggaatatttgcaccagtaggaagcactacatacttgggaaaaacactgctagaaaaagtatgaaagcaatttcttgtagcacatgtgatgggttgccccgctatcaataatccaagtaaaagtatgggaaaaaggggagttaccagccatgttagaggcaacaggaaggttgttgatgtcctcacgagatgtagcttggttcagctgttggctgagaagagagataaggtgttgacattgagtagtcaagtccgaattggttattgaagagggaatcacatccgtggtggtgctggtgtgatttgcagcaggttttgttttgtcttgcttctttttatcgccataaccgggaggaaagccatgtagaaaataacatttatccacatagtgacccggtttgccacaattggtgcaagaaggtcttggcttcttggatttgggaggtggattgtttgaagaagcacgggcagaggcagcaagtgaagtagttgaagaaccaagagtgcgttgtctctcttcttgaacaatcattgcaaatacccgagagaggttggggatgggttcattgagaaggatttgagcccgaacagatgcataggactcgtttaaaccagtaagaaactgaaaggacctggtttcgattgtaatattccaagaacacttgcatggcaccacaagtgcaagtagtgttaggttggaattcttttagctcatcccaaatggttttgagcttggtgaaataagaggtgacagattgatcaccttgttgaagatttgttaattgggtttgaagctaaaagattcgagggccatttccctcattgaatctttcttgcaaatcatgccacatatcggtagcgtgatcaaagtacataatgctttgtgctattttagacgaaacggaattgacaagccaagacataaccatgttattgcatcgaatccaagaagggagtagagtgttaccagtggctgggcgaggaagagaaccgtcaatgaaggcggatttgttctttgccgtaagagccatcataatgcctcgtttccaagattgataattggtgccattgaggacggtggaaactaaaaccagaccaggatgatctgctgtacttagaaagaaggggctggtaacatcctcgtgagccaatcgatcggttaaggaccggggagcctgaattgggacatcagtaacaggggcaggggaggaattttctggtgcgatgtgttcttgatcgatctgggcacgggttcttgggttggcatttc

SEQ ID NO: 21763 - DNA, 2796 bp, Cannabis sativa
  modified_base (2760)..(2770): a, c, t, g, unknown or other
caacatgtctagaggcgctagacacctacccaataacaatgcttatttttttaaattatatgagactcaatatttaattactccaacatctatataacatagaaaaaataccaaacaccaataatttctcttaacatttctctttccaaaattattacaatatctactaacaacaataatataccatgttacaatgtacaccttatatacatataaaaaaaattctaaatgccaaaaataatttttttttacatgtttccaaaaatatgtataaattatatatttttttagttcttgtcaaaatctagttttatgaatataatttttttctttcttttgcttaaatttctttttcacataggttaaactcttttcattttattttcttttgaaccttatttataaagttcttgatctcaaaaacttatttatatgtattattgtattttattttatttttggcttaattttttaatatttatatgtatttctttagatatataattaatattgaatacatatttgagagagaataaaattgtgtacaattttaaagagtttatttttattttgatttttgatatctagttatgaccatatattttagtctattctaaagtgtgagatattgctgtcatattatatgggggattttgtgatatttacttgtgatcataaagtaaagattttgctataaagtttgaaaagggacctaataatatatatttgcacaaatatgtatattaatcttaatttagtatatctgcaaaatgaacagttaattaatgagacttaaaaaagaatatttcactgtattacaattgtcatgtttctaaatttggatttttttatgagttatatttgatggaatttctatatatatatatatttaatctatttaataacaagaaactttaatcacaaataacaaaaattcaattagaggtgaatcatacatttataaatccaccaaacgaaaaactagcaagttaagacaacaaattaaatgcatcaccaaaatcataaacctatttgtatcattattaatgatgtaattaaatattaaattttatatattttaatttaaaaattattataaaaaaccaaaaataatttacaagacgttcatcattatttaaattattattttaagcactattagtttagtacttaataatattaaataattatttaagtactataattccatttagcccttaacacactcattgtttaaatttaaaggctaaagctttgtcataaaattcatttgctaagcttcgaggaagccactattaatcatatcacttattccaaaattaatgctaattaaataaatatttaaatattgtgtctattagtcatttttttttaattaagtatttagttgcattttgacattatagtgagttatttgatgcacattttcaaagtttgttcaatcctaaagtaggtgatctatatgctatatttgtttattcgtacatgtggaaacatggttagtgattttttaatgcttttgaaaatttgtctctttcgaaaagacttatattaaccaatcactaatgatgaattaatgatgtgcagcttgtgatttggttatcttctcctgtgttttttttttttttggctaatgaagaaattatctaatgataattaagtacaaaataaattaatggtagactataataaggtcatccatatttttccacatttaattttctcttagctaaaaaatttaaaaatgtgtttggaaagccattttataatttagatttgaatgaaatttgagttaattatgtaattttatgtgttttgtaaccatgtaattagacacattaactatgcaattgaagttaatttaaagagtctcaattattactcaccaatcttgtgtgattacattatatattacggaatattattttagataattatttattatatataatattatttatttttttatgtaatttcataaaaaaattatatctttagtaaatatgaaaataaaatttcatatatgttaacgataatatccacacatacctagtttaaaatagtaccataataattgcacaaaaaactgtgtaatagtaccctaactaataaacattttctcaaaaattaaaaaatgttaaataaattaacattgaacaaagttaagcatttttttatgactaaattcaaacgcaaagtaaataataatagatatatatagtttaattttcaattcaaaatttctagcaacaatgatgtagctttgaaatttggtatatatatatatatagttgctaagttggatgcaaaaatttcatttctatgtattcattagtctctttggctaaatgttgacttcttttataatattaaaattatgtatggaggaattcttatactaccacaaattaattaagaaatgttaatgagtattcatagtgtttattgttataggtataatttaatatcgagtctcatttattttttttattaataattataaaaaactgttaactatttaaaaaatattacctgtaagcgaggtattatgttaattagattgattataattaggagaattttctttaatattctttcaatgaaatagtaattaatgattacctaataattaagatagatagatgtgtgaaaatcacaaaatttacatgtatgattcatttcacatgtgagaatagaatagcttagagattaggtaacctcaagtttttatattacatatatttatatatctttatatannnnnnnnnnntatctaacggcatttcttggtttaac

SEQ ID NO: 21764 - DNA, 2542 bp, Cannabis sativa
atacaatattgtgtataatgttcatatataataaccgttattgtataattaattaattgtcttttacgtttacatctatgacattaatacacatatctaagataaaatctcacgtaaatttatatagatagagatcattaaggtgttttttttaatataagttttgaaacagtatattatatagtacctaacaataattaaataaattctttagcaaaagaacaataattaaataaattatatataaagaaaaaagtgcatcctatatagatagtataattagcatttgtgtaacttttattaattttattattttaacttttatatatctattacccctaaaaattatactttttcttaataaatccaacgaagtatattaacggcaaaacataggaacttaggatatataacattcaataaggacggcacaattaattaattaatattaattataaaattaataatcactaattaattttattatttatatagatgtactcgtccttttgctagctagcttggtaacattcagcttataaattttgtaatttagttattatattaaaatattattttaaataaaatattcatattgatgatataatttataatttattaatttattttccttaattaaataattaatcacagttatatactcagcaagccgaccatggacggtttaattaattattattcgaagttttcaatgattttaacacttttgaaaattttcatttaaatagagactcatatggtcatagatcatatgtactactacctagctttgatcaattaatataaatttttcaaagctattattttccaatatttaattaagatttattttgacataatggctttttctaatagatttttgaatgtaattgttgttgtagcaattgttcttccaactattgctattgcaactgattatattgttggagatgacaaaggatggaccaatgataattttgattatcaagcttgggctaaggataaaaattttacagttggtgatgttctaggtaataattaattaaataactttgtttatatatatttttattttacaaaattaatattattttttaattttattttaatatttttttttatatatagagaataataaagttaaagctaattttataatatatatatacataaaaggtagcttaatgggtattactcatgaataggaaatcttaaatttttgttatctaattagaaaaatctcattttttcagctaaaaaaaaaaataggggaaaaagagtttaaaaaaacgaatttgacttaaattatataaacatatttttgatatagtgcaaaaaaaaatgtattttttgatttttttaaataagtagttaaattgaatataaattataaaatttatcttttattattcgtcattaaaatttaaaggtttattaatatttatagttaaatttatttaataatcattaatagataatactcattaaaaaatcttccatatatataaataaatttacatatgttgatcacaatatttataaaaagtatataattttgttcttaacaaaaattaggcaattataaaaaataaataaagtaataaaatttctattgggaactatgaaatgttgaaattaatttgataagaagacactatactaaggaagaaaaaaaaaaaccctaatttttttttatattttgagtctatttttttgaagtcaatttaattgattttttaattagtactaattattgtatttttggttaatatttgatagtgttcaactacaaatctggtagtcacaatgtatacaaagttgatggtgctggcttcatgagttgcaataccacgtccccgaacggtgaaccaccattgacgacaggtaacgaccgagtggagctcaaaacccccggaaacaaatggtacatttgtggaaaacccggacactgtctcaatggcaaccaaaagcttaaaattagtgtgaacaatggtactgctagctcatctgatgctcatgggattgtgtcctccggatttaaagtccttttcggggcacttattgttgtctccatcatataattacgtactaaactatttatgatatgcatgtgctatgcatgcacatacgtaagaattaactagctgttatagctagttaattaagatttagttttttaattattattttaattttattgtatttcaataaggactgcattgttttgtattccatcaactttaatttcaatttgaaataaaggttttttttagttaacattcatattatagtttttgtttttttttttgttattatttttaaggtataattatttacaaaactaattcaaatgaacaatttatatgcagtttacaatattctttgtaaaaaaagtatgaattacctctcataaaaaatatttatttgaagacaaaaatagctataatcatttaaaacattatatgttataattaaaaacaaagctacaatccatataaatcatgaaaaaatataaaggatcattaatattaaatagttttgg

SEQ ID NO: 21765 - DNA, 2671 bp, Cannabis sativa
attcacgtcggtcaacgcaatgaacagtagcgttgaccgacgtgaatagtactttttgtagtagtgaaatttcaagttaatttttgactgtaagtctgtaatgcgttcacttcgagaaaaaatatcatgaataaatctctcttccaactttccaaaacatcttgaatcgtatattttcaagtaatattgaaagagttatagccaaaatattatcactcattgcattaggaagcttgcagcccaaaaatagccttcagaggccgcaacatgaagggtcaatatcacggcttgcctcatttaattagaaaaataaaaataaaaaccctactagaaggctatataaatgactcttttgacacttttcaaggtaacaattattagggacaaaattggaagcaaaaagtggctttggagactatcacaattaattatcgcagtggagtgcccttacttgattggtttgttgacagaagacgagcgcaacaagaaaattagagctcgtcaactctatttttgctattggagagactatcgtgtttttcatgctcattatctgggcctttaaagctagcaactacgtacattttgattgggggaccatcgacatgccaatttgaagacgcctaaccatgccgccatatttcaaagataacttgttcatcctaccaaaggtgggactccaactttgctcaactaatttttcgagtgaggccagcttgttaaatggtatcttctcttccgcagtgtgaataacgtgcatctgctaacttggtactttgatacaggacgaacaaagactgttgtggaagcttgttgctcttcaccttgaggacaaagtgacttttgggcagcttggtattattaaaccttaggatattacataataaaagtaaatgagtcattgtaatgtggtattaaagtagtatatatgagtgtattggaaaggctgattagtgaattatttagttaagtgagcttttactcttaggagagagcattggatctctccaatacgtacctattgttttcttctaatatcaatataatagctattatatcactatttctttatatgttgctactgttcttaccaaagtgttaagaaattcctatcacttttaaaaagatttttatccctataccaaacaaccttacataatattatttgattagaaaaatatttgtacaatagctctaaaaaaatttatttaaacctatacttcaaatagtttacaaccgaatcaatcttaatattttcaactaggggtacacttgctcatattttgtttggtagtaaacttatagtgattcggttgtaaacttgctcatattttgtttacgtacgggtacacttgctcatattttgtttggtagtaaacttatagtgattgattattaaacgaatcttcaatatgatccttaaaaaaaaaaagaaagaaagaaaaatttcttacatctaaatatctaaaacaggtccttcatgatcattttcaactgtgttatggcaaatggcaatacatcacattttcaactctgttttgtcccatacaatttcaggcatgttttttatttttatttttattttttattaatgtttttctctcccctttttttttttattaatgtttttctctttttgacaattagccacctaattctctatatagaaaaccaaatttaatacatatgaaacatgtgtggccataattttatttttcattttaaaataatagtaggacacaaatatacatatatagttttctttctagcaaattacaaatccatataggaccagtttggcacagttatgctgtgggaaaaagcagttgtagctgtgctgtgagaaaaaacagatgcagcagaactgtagaaaaaagccgagctggacgttcggtaaattataaatttcaaagtattgtgagttgttaatatctattataattataatgataatgttataatctagtttattataattacaaaatgtaaaaatttattttatataatattttattttctatagattttaaatttttttacaaatataaatttatatgcatttgataaaaataatttatattatttttatgttatattttatcaaatataaaaaaaaaatagaaactcaagtacataagaaaaattctaggttaatgttgtttcttaatattaaaataaaaatataaattatttaaaaaaaataatagatttaataattatttatttttattataattagtttattttaaatatttttattttttttaatatataataaataagtaaattagttttagtaaaaaaaaattattataatcttttaatcaaaataactttttctaaaagttgggttgaaacagctttagcttttagttgtagcttctctaaaaattcttcaaaaaattattttttaattgcttaccaaacacatttttatcacagttttttcgaaaaatagcttttaattttttcaaatgttatgcaaaacgggcctatagtatattttgaactgaaatatatctatcacatctatataaatggatgttataataaaaaaaaaattatattattttttttaacttttttttttgttttttatataatattttatttggtaaataattttttatacttgctattggcaccttaaagtgttctataccataccgat

SEQ ID NO: 21766 - DNA, 5317 bp, Cannabis sativa
  modified_base (28)..(46): a, c, t, g, unknown or other
  modified_base (3646)..(3646): a, c, t, g, unknown or other
taagatgttaatgaaacatacttggtannnnnnnnnnnnnnnnnnnaaataatttccaacagatacaacatacgaaaagactcaaggataccctgatatgctttgagaggtaaatattcttttcctctatgtactttcagtttaatatatatatacatataatgatattaagcatatggtacaatgataacagtaacaatcatctgttgcgtacctaatttagtaccataaaactaacaagatgtccatcatgtccgggaagtccatgccgtttttgggaatggtcccgtaaagagggataaccatcgtgttcgggaaggtcatgacttaatcggggatggtcccatgaaaagggatgtccaccctatccatgaaggtcatgccttagtcgatgattgtcccatgaagaagtatattcatcctgtccaagaaggtcacgcattagccgacgatggtcccaaggtgcctaagccttggcgggggttaggacttagagtgaagttctttaagcttagaggttgagattattcccaaggtatcttattcgtggcgggcattaggacttagagggaatttttccatgctcagatgtcttgggctaattcccaaagtacctaagacgtggcgggcattaagacatagaggaaatttttccaagcctgaaggccttttgcccattctagatgtgcgtaagccatggcagacgttaggaatcagagacaatttttccaagcgtgaaggccttgggcttattctcaagattcctaagtagcaggcattaggacttgaagagattgtttccagcccggagctcttggactcattctcaatgtgcctaagccgtgtcgggcattaggacttagagagatgtgcatcctgtccgggaaagtcatgtcttcgacaaggatggtcccatgaagagatatgtccaccctgtccgagaaggtcatgccttagccgaaattagtttaataaagaaggttgtccatcatgttcaggaaggtcatttcttcatatgggatagtcgcatgtagaaggatgtccaatctattcatgaaggtcatgcctttgtcggagatggttccatgcagaagggtgtcaatcatgtttggaatggtcatgccttagtcgggaattgtccaaaagtgcctaagccatggcagcgttagaatttagagggttgtccatcatatcttggaaggtcatgtctttatctaggatggtcccttgaagagggatatccttcttgtttgggatgtgcaccttttccaaggaggtcatctcttaaccgggaatgatcccatggaaatggatgttcatcttgtctgtgaaggtatgcttatttggggacagtcccaaaaagagagatgttcgaggagattaactattggattttgtatcttcttactcttctctagtgtcttgaaaggtcatgaagcaacgcacaatgtgcaaatctttagcaaagaggctgagaacaagacaatggcaaacaccttcaaaaattgtggttgttgtctatacgcaaagagttgaaggttgaacataaaggagagttgaaggttgaacataaaggacttgttacacattactaccaaccctatctttcatttaaacatatgggaattgattgccatttattttcaaagaagattcaacagggcattatcaagaaatctcatatagtccattttgaggtggtgtggggggattctaaaagtaatttttttaattattattattttctttgaatcatataagctctataacgaactaatgcgatcacttccatattacatgtatccaagaatgaacctcttgatatctgaaatgaggtcagtgtagtttaaaaactctgtaaactccccgtcgtaaatgtttaacaccaccccacccaaaaaaaaaaaaaatctagtgtttacaaaagaattgcagccttcagttgtgtttttacttctttacttttactgtcaataaccaaagatccatctgtatatgtatcatcttctatttcatgcaattgttattcacataccatcaccagggaactctcagaagtgagagaatggattctcatttactctcattgacttaagtttcccacccaggaatgtttgcagtagcctcattcaccattgtcacaagtcttacctgcataaaaggatcagtgcatgatttcatattttttatttgttagaggaatgaatcatttaattaatgaccaccaactgacataatttaatataacatcgaaacttcacattcttgatgaaaaataaatttcaaatagctaaagatacttgcaagaagtattccacaacaaaagcaaatcaatgagaaacacatttttgactttacttcatactaaaataattaactccaattcaagactcataaatgggtatctatgagggataatatggcaacaaacgaccgtccaaaatggcattgttgagatgtcgtaaatttaatggataatatgagaatcttaaggcatgaggcaacaggcagcaaaaggctgtttgacaaacaaagattaaaaaacaaattgtgggtatttgatgagactgattagtacatattttgttgcttgatagttgggggcatttggtgttgtattatgtgacgcttctagtggaggttgtcattttatcatggtacacgagaagagctttaccgagagaattccttctgtatgtttttctcctagttatttcagtcctatgtgaccttcattaactttttatgtaatacaaatcccactgacttcataaagtcaatgggcattaggcttctgaagtcaacaataactctttaaaaaattaaagcatcagagaatgttcgctagttcaccataaaagctaatcggtaacagttgacaaatgttgaacaatattatgctaaaagacctactttagtccttgaataatttattacatatataacaagtctagtattagactcaaacttgcaatctctaaaagtaagaacaaacaattaaaaagcaaaacccaaacaaagttccaaaagagttgccaaatgtttgtgttaattacatccctagtgattgtattagaattactagtcagcacttcactagtattgtatgggaattatgatcaagagccatgaattgttcttttttctcttacgtataagcattgaaaatacagtcaaatttatgtgactgttttaaaaacagatcaatttcctaaattatccttaagccacctaacatttaatatcataaactaaaaattgatacttaccacactttcaggaactcctggaggaggtaatgaaaggtttttcggtggaggaccacttagataagatctcttatcaaaacgccattctccaattttcccataagtcagctctccctatatattaaaggcatcaaaagattaactttagagactaggtagtaaagtgcataagcatgtaagagaatgtttgtaaccataatactacataaagaaaaggtcttgtcaaagagaagagaaggttatgcaacagaaattttttatttgctaatattatgtaccataattatagattagtacaaccaaaaagaaacttgataatatttgtgcaaatgtcctcgctctctgagcatgtgtatcttagagagagagagagaganagagagagagagagagatagaattacctttaagttgtagtcacatccataggtataatggataataaatctcttaccaacttccaaatcccacggaggctgaaaaggtgcaaattgcaatgatggaccttaatttaacttggaacatatcatcaaaaaataaaacagggggggagagagagagatgtcaggttaaggttggggaaaagagcagaggaggaggaggtatcatcaaacctgcaacatgaagtctttgcgaagaatatgccgcaccccatgtaaagcagatgctacagcatacgcataccttatttaaagaaatattatatttatattagaaaaaataaagatatgctggcagtcacagcaaaactaaaatcaagtactactcacatttcaagcacccatccaaaagccttatcagtctccgggtcatctttcattctcaaggaaactttcacccacgtgggagcaatttcctccagaatggactgaagcagaataatcggttaaatactatattgtaaaacttttgttgatgtgaataaaattgaaaacagcacaactgcaattcatatgttgatgttgtattaattgagaatccaaatttcttcagcaacaagcacaaaaaacgcaatgtctgtatcagaaatttgagtataacacatcattgagttaggaactaccatgtaaatagaatattgtacctttttaatgattacaggagaatttccaataggatcaacattgttcactggaccattctcccaagtccggccctgaaatttagtgggtcataggaaaaaaatatatttttgggccctcatttagaaaaaaatgtggtattttttaaaattaataaaaaaaaatgtgtaattttaaaaggggataaaaattttttgggcccctaaaaactagataaattaaacactagtacaaaaacctaacaagttctcctaacaacaaagaagaacatcatttgtaagaatcctagaattgaccaacacaagaccatggacgacccgaattgtttctttgttattcacatgatatgaagattggcagactattttgcacatattagagagaggatgaaggtggttttgccaaaaaaaaaaggttttggtatttatattgaatctttgagacaaattcattaagagcaatttggcttctcatactactttttgtgattagaacagaataaccacactacaccaaaatatttatttagcttaatcaaagaatatcaaagtctctccaaactaaaaagtgctatccaataagcatatgagtgacgtataaccacgtaatttagagtatctctaatggtatacaatatttattaacggtcaaaatatacacattattttaaaatattttttctttattttttctatcattcacataagatttgtcacatttttttaaaaaatacttcaatagttgacaactctaaaattatccaccatgattccacatcacattaaattaatgactttttaggtaaaaaataatttttttaaaaaaagaaaaaaaatattatatagagcaacaattcacataaacttaggggttgttcggtagtaattttaaaattggattttttttttatttaaaaaagtaaaaacaaaactaaaatgtgtgttgggtaggttgattttgttttttt

SEQ ID NO: 21767 - DNA, 5222 bp, Cannabis sativa
tggtccaatgttgaggccaagccaagatttggggccggggttcaaggtttgatgtcttgggttggagtcattgtttgcgatctgaggcctgagcttgcgatcaaggttggggtcagggtcgaggctggggtctagcagggttaaggtctaagtttaagatctagggtctgaggtcgcaatccgagctgggggtttgaggttggcgtcaaagtcaaggctagagttaatattacatatgataaaataaaaatatatatcttatttatttattaaaaatataatataatacaatattattgtgcgccaagcataatataatttaacatgttacacccaaacaaattatctttgtacaagtacccacaaaagatttggtatttattgatcaaattatatatatgtgtgttatctctatttttaaaagggagacacatggcattccaaattcaagaataattaattaagatttggtcaaaagccctaccaataagacagacccatcatgtacaaaaggatgggaccaaacctatctttggcccaggatatatagtttcgagacctgatctttacagatttggaagggcatcctacccttacaagaaggagtaacaaagaccctctagatgagcatttgggatacacccagaagggcattccaagaggcgttctagagacttggtacatgatgacatgacagccctctaatactaaatcccaccaaattaggggattgtcccttgtgtcagaccctaagagtgcgcgcaccacaaaaaggaaacttcccttttgcgcaccacaaaaaggaaacctcctttttgtctaacgaccactacttttacactagtacaaaaagatggtgcacacatgccatctgtcaaataccgtgtggtccccaagcatacggatcaccttcgccccatgggctgacctcaatctatgggccctttgtcaacatatttcatgtatttaccctattagtgggctaggtttacatgcaaaccctagcgggtcacatagataccctattaactcgaaaacttttcttgctgacatggacatcaatatttgacatttggcatgaaggatgacatcacaaagttgagtagacacgagttatagcagtcgacctgggagggactctagccctgtgcccaagttgactctgggatctctaggatggaagtttaaacttcaataacttgaatccaacccactatccttcattatactgtattgtgaagtcacggagaaacctaatccaaggtttgggagctaaaattacatgaacctgcaacctagaagccaacctgagcacctaggatttccactacccaagttcatatcctcaactagggtttcagtttccaagatcgtcttagtgaaagtggccaaaacttgtattgggacatcaactagacataccacaaacatatttgaggcatcaaaattaaattcagagcgatttgatttttgggcacccaaggtcgtggggcctcgagcacctagcgcctaagttgacaatctgtcaatctgggtgccttttaagtgtctgattgaagattcaaattttgcattgaatccatcttcatcaaaaatggggaaataggtccttacggaggaaaaacaacaattcttgggcgtaaagaatagggcccagtgcccaagttgacacttggggatggccctgcacccaagttgacaattttccaacatagatcacaaaatatagtttttcagaaattctttcgagcatcatctctgtcttcagaaaatattgagattcaactattttaggtgaccaaacagaatttctaaaagggcaaaactgggtccctgcgcccaggttgatattttgtcatcctgggttgtttcttattcaatttcagcaaaacgtgctccaggcattttcactctcataaaaaataatagagattaaagtaaactcagggagaaagccacaaactcgagtccctagaaataggccccagcgctcaagtcgacaatcaacctaggatgctgccttcaattgctcaaataccaaacttgatgtgaccattgattccaacatggtcaaaactaggggagaggaccccgtcctcaagttcagcggccttggaagtattaaaaacaaaatcccaaaacctcagtttaaagggcacgacgcccaggtcaacaattggcctagttcgctcggagcctatcctaatgattgataacactccatcatagatgacccaattgcacagtacttggaatgaggtattcttccaactgaccgggatgaagctaagagattgattagaaaagctcacttcatcatcatagacggagtaatgtatagaagaagcttcttgattaatttctaaggtgtgttacgaaggaagaagttgaattcctcatggtcgaggtacatgagggcttttgtggcaaccatgctaggggtaaagcctctcttagaagattttgagacaagagtatacttttggttgacaatgatagaagactcaatggactatgtcagaaagtgtgtgacaagtgctagagattttctccaaaatacccagagctgccccaaatgaacttaagagtatgcaaacaccatggccattttctatctggggaatcgacctcataggctcattgcctaaggagaaaggagagttcaatatgtcatggtggcagtcgactagttcaccaagtacgccgaagtagagcccttagccaccatcacatcaaagaaggttcttgatttcgtggtcaagaacataatttatcaatttggactcccacataagatagtgtcagataatgaaacacagtttgatagtgatctctttactcatttctacataagacatagaattattaaaagtttctcagcagttgcctatcctcaagaaaatggacaagtggaattagtcagccaaactcttaaggatacgctaaagaagcgtcgggagcaagcgaaagagaattggtctgaacaactgcccaaagtactatgggcctatcacactacaaaaaaaacagtaacaggtcacactcccttcgctctaacctacgagtacgaagccatgatacccgtatatctcacacctccatcccatcaaaggcttacatatgaccagcaaactaatcaccaattgttggctgaatccctagatggaattgaagaaattagagaaaggtataagcttaaaaaggcggtgtatcaacaaagggtcgcaaaacacctacaattccaaggttaaagataggaaaatttaagcctggagacatggtgttacgacaggtattcttgaactcaaaagatgcagtaacaggagtactcgggcctaattgagaaggaacatatgtcgtgattgaaatgcttgaactcagaacttacaagttggcacgctatgactacaacttgaatccaatacgggtaccaaggtattaaaacaaggtgcatctacaatggtactaccaataaaagtagttgtctttaaatcagcctgcttcacagtgagattcaccttacctcgtgcaaatgaatcgattgccccttgattgatgggatgtgatgaagttatcccgtggttaagaggtccatcactaaggtatggctcctatgctaaaagtcaaacatggccttaacatggtgatgataacttcagctaagcttggatgaagaagaaattctacaactaccacataaaagttatttttctttcaacttagctcacaataatgtagttttatttaataagcataagtaaaaaaaaatttggtacttcatctaaattaatcaattaaaactcatagagttgacgatgctctctaagtgatgagtaaagttggtgagttggtcttgagataactttagttgttttttaagtgagttaaacactaccacccacgaatcctaagacaagtggagagtgctcacacgtgtaacaccactcaagagtcatgatcaagaaggctcagtgggatttggggtggaaagtgaccaatgaaggcacttctttgatcacttgagggtacatagtttatgtaatggtatacgagagctgtatgttacacgagcattcaaattttttccacatttatgtatgtactctcatcgtaacgataactttaagaaactctccagtaaccgagtttcttaagacatggtgcactttgcaagtatttaacggtcaagtagtaataaataaagtaaaacaaaaaatataaagcattggaattaatgttttattaagttgaaaataattttttatttaactaaaaaataattctaatcacattctactaaggcttatccatatcgaaaaattgcctgggaatgaccaactaacacactaaagttaaatgctaaaaacaaaaaaagaagaatggactcaaagaaggtcctagaggcctatcacatcaacaagagtttccttcctgccttcactctccctaggaggggcatcaccaacagaaggagggaagttggagcacttaggattgtagccttcaactcttaaagtttcaccgacaactggtttacgaccatatatagtgaagtcagtttccttaagatatgctgcatcaagacactgctcacacggcctgatgaagtgtagcacctctgtgttagggaaacctatctagttgaatgacttggctctaccattagcatcccaagccgtataaatggcattgaagcataggccattatagtaagtaacatcaagaagggcctgatctttgagggaagttactttcttcttcaagactttaactcgatctcttagatcatcatccacaacaacctgcttctctaaggcatcacgagaagatcttcaagatcagaagctttcttctgagcagctaccaagttcttctttaaattactttccctaatcttggcacctttacctcattccttaagcttggtcatctcactctcaagagaaacaaccttctccttcagagcagtcacctggccttcaatagcaatagcacggtctttagtaaccctaagcttcttagaaagctccaccactttcctattctcattatccatggtgtaagcataaccaacacaggcctaaagacaagagaacaatgtcatgtgatgatacaacaaaagaaagttattccagaaggagacaatataaaacacttactccaaagattttggtgaagcatctttgagccattatatgtggaggcttggtgctaaccaaccg

SEQ ID NO: 21768 - DNA, 3619 bp, Cannabis sativa
cttcaagcaaaaatttcttctcatcaaatagtttatgtgcatgcaaaatatatatatatatatataagtcaatttcttaaaaatatatgaaagaactaatatgaaatcaatttatatatgtagtaaaatactattttgtagccaaaataattttttttataaacaacctaattaaattatattataaaatttatttttaaacttatactcaacggtaaactcatgaaattttaccagtgttgatacaaaatttaagtaattaataaatatatatacaagtaaaaattattaaaattatatgaatacttattcataaataagtaataaaatatactataaatgctaaaatataaaaatatgagagagctaaaaatttttcaatgcattttatgagtccgttagtgtttatgttctttttttcttattaataatatacatatgaataaattatatttttggtaaaaaactaaatattatatgaatacttataaataaaaataaataagtaaaatataattaatataattattttatcaaagtattaaaattgaaaaaaaaatgaaattatttgaaattaatacaaaaaattaattaaagtaaataaaataataaaaaataaatatttaaaagtagagacttaatgttgctaataaaataaaaatttggttgcttatttatcaatatactaacacacttattcaacagaaattagatttcaaaatatatattaactttctttttatagtattagtgaatatactcatggagtaatagttactaattaaagaagcatttcaaaatttgaaattatatgtattttttgagagaaatgtaggagatatataggaataataaattagtaagtaattaagctgcatttaatgaggagaataaagtggtgatacaattattataggaataatcatttattaaaagttgaagaattcaaaaataataattatatatatatataaataagaatacgaaaaatatatcccccaaattaatctgatatattagaagtagtatttgtatttaaataaaattaataaaaaccccaagatctattctaaaaagaagggccatttctcacagcaggctcccaccatcactttaaaacctttattattgtgtcggttttaatttttgtatgtcttactaacaaaaacaactttgggctcagatttttatgggaccaaaatttataacatatatatagctcaaatataataaactatattatatatatacatatatatctctcttagtaattaacaagcttccttgaaataaaacaacagtactactcacaattaagcttcttcttcaagcaagagatgttggtccctttctctcactctttgtcttgtcttgagtagtagtctttttttaaagaaaaataataattaataattaagcataattagtataagtatatttgctatactataaaaaatacatgaggatatattcatcataacttccatttctaatttcagtagctctagtaattaattaaaatctcccaaagaaaaaaggtcggcaacatcattcaattcctgttatatatataattcaacccaataaggttaattaatttcaatctatatatatatgacttaattatatatatagcttggttcttagcaaaaatggcatatgcatgcctcttcaggtaatcaaattctaatctatcgatcagatcactcttctttatataaataaaaattatatgataccatacacaatgtatatacatagatcaatcatcaatattagttaaatatatatatatatgtttattacttataatttttttaaatatagtatctatctctacctataatttagaagactctagctataagtatgtgtatatagtctttgactaagcgttatcaacttgctacatatgaatattaattttatatatctaactatatagtaaagtagtatagtatcaaatatcaatatatataaggctttgttatataaaattaagggtgctgatttttttcacagggtatcacatgcatgcctcctcgatattgagtcactcaacaatatatatatatatataatataatgtatatataatatatgtatgtatgtgtgtttcttgttgaagctagagacgtgcgagtatcgtgtgtacgtgcgcttatataatctattctacaactataatgcaaaactcaatacacatctatatatatcatgactttgacttttttttttcgttacgtaagtatacttaattataattaaaaaattcttttaattttctaaaataatttgtttttaaaaaattctttgtttttaagttgatcatcttagtaatatatatatagcttgtttttcttattttctttaaaataaattgggtggaaaaagcatataatatgtcattagatattattgtctcatgctttaaataaatgcaatattaataggtaatgttattaagtactagagctactacggcctaggactaggactatatactacgtcgactaactaactcgtgtacatatattaaagttgccttttccaaatctaattcaaaaataataataattataagtttattatatacttttgttgagtattaatttatacatatattaattatattaatgaaaacccttaaagtcatttttaaaaagaaattaatgtaagatgagcaagttgagaaagctgtgtaattagttcgttggtgttcaaccagtccactgtctattaatacttttagtaataaaaataaataaattaatattaattatttaattaattaattaattagtttatagtgtaagttaataaaaaagtatatctgataatgagaaaaaggttttgggagaaaggaataataataaaaaaataggagctgtatggggctttgtcttgagactgaacgacagtgggtgaccggttcagccagtgggcccccttcactgacaccaccggttcgctaaccggtgaccggcgctgtttacgccttggcggtcacccttgatacgccacgtgtgcttatctctcccatgtgggactgatgtggctccaattgatccaaatcacttatagccttgtaaataatataattaaaattactaaatcattttttattatttactcttgtttattattatggtcaagattttataatattattaattagagagtagtttttttgcagagatatttgtatgggtaattaatggagtttgtaccattgaactttttggtgattaattagttttggaatccaaaaatgctctgaatctgagggaaatgaggggtttgtaataatatgtaaatatttttgtgcctcaaagtgggggatttggtagtggacatgagacatgtctcttattaattacataataataataattattaattataatttttcttaatttctctactatttatatttttttccaaattttattattatataatctttttgatgtggtgatcaaaattatacatgattaattaacgatacattaagggtcagtttggcataacttttagaaaagttaaaaggtattttttaaaaaagttgtgataaaaatgtgtttggtaaacagtgaaaaaatagctttttgaagaattt

SEQ ID NO: 21769 - DNA, 3816 bp, Cannabis sativa
aattattattttcttatttacatactaacttggaactaagatgagccgctacagcatagaagttacattgatgccaaccgatatggtgttctgttgttaatgctagttcctatcattgccaaaattcatttcaatctcagtagttccacttcataacaacacattatttcacaaacacataatttttcacacactccagcttagattaatctgaaaagatgttacgtatctccacagggcgacttttcttgtagcagaggcatgtctaattgcaggtgcaaagacgaacgcttatcacacaaagtaccgagggatgatttatgctcaaaacttctcttgtgaatctttacggaaaggcgtgtttgttgcaggtgcagtatttgtggtagcaacaatgattctaaacgtgtattactacatgtactttaccaaggcaactactaaccagacagctcataaaacaaatcgatcaagctcaactgttgggatgactgggtatgcttagaataaaactatttttatgtgtgttcggaatgcctttctgatgtttttgacttaaaactctggtatccattccgtttatgtagttatataatataggtgacgtttcgttgtatcggttttactttgtagttttttgggaaaggtggaccttttaatgttcaagtaaaatctttccatggaggatcaaagatttaggtggggttttgtcactgaaaaaaataatatatatatttataggagagagtgaggtaggtaaaggcatggtgatgagattggtatggggactttaggaggcagaggaatataattagttgaggttgttgctgtgtttttgtttttgccaacataggatctcaactgttattctaactgtttaggattgaaattggacaaaaattcaaccccatcttatgttgactcagttggaagctgttgcaccctacaatagatctttcttttgcaaatgtttcactgtatctgtcttactaatctcttgttgaaagtaaaagaagtcttttctaatttcttttccttctaatttacaacaaccccatttgagttggagaaacaacatttaggaagtttatagcataattaagtgattaggcaaaggaggcttaaaagtagggatattcataaaatcaatcgaataatttccacatgcggattgtgttgatgtaaaagtaactattccaaatccatatatataatataaaatattatgtatataattagtatttaatgtaaaaaataataacttaaaaattaaaaatttaacatatgatataaatatattttaaaattaaatagatcaaattttatattctatttttatacgaaaatataatttaaaacaattttttttttctttttcctttgaatttgttgtttttattgtaatttattgttggagatataaagtcacaataatttgttatatttaattgttagttaagtgaaaaaagaaatattttctaataaatattaaataattcaatattaaaaagaaataaatctaaattaatctattctgtatatttgtggattgaatttaatttgagctattatgtagattagattcaaaatatgatatttgcaattagtattattgtgtggaatgaattagatgaacactcctactaaaaaagacccaatgttttcattttgctccaataaatagtgattgaaaatataatgatggtttatgttaaaagtgtttgagcctaataattgacattctctttatgtgtctctgttctagtcatgaactctcaatgtaggggggcctggtaatgtgttcattatatagagggaaataagagattttttattgattctctttgggattgcttaagaagttgaatttatgattgggggtgtgattagtaacatatcaatgagttggttaatgaaattcaaataaaattaatgaaaagacatgtcatactgaaatgaagaaaacaaacaattttggaaccatgtctcctataacataaacattcagagctaacttgaaccaacccatctgcttctgtctctcatcactatatttattgtcttttttccatttcttactaaaatgcttttagatacaatcaaaaaaaaaaaatccagtcagtcaaagaaatataaaatatagagtgcttttatggtgagagtgaatctcaattttttttttaatatgatggtatttattgtaactatttaaaagtttaagaaattagaaacaatttatgatataaaaaaaaatagactgtttcaactttgtttttagtaggtattaaattttaccaaaatttgtataatatcttatataatcagatgtcaaaatcatgataaagtatatcagttagtacacatattattctactaattttaaaaaaacaggtaatagtaaaaagaattatttcggttacaatttaaattgttctgttaataatgtatgttgctataaaaataaaaaagtgtaatatatagtaataataaaaagggtggtaagcaggcaccgtgaacaccgcaccatggcattggttgatagttgtttgtcatgtgaggtagggcaacaagtgtgataaaactttcaaaacaacatcatattaatctaaattgtatccccttttttcaactctctttaaattttttcatgcaaaatttactcttcatctcttatttataaatatatatattgtacgacactgagttttggtttcgaaattggtgcaccattccttcttctactacacaaacaagaatttattgagcttggtaaatagcctttgtttgactttaacaagaattttaaatcaaaatttcataaccacacaacatgtagtgtagattttttcactagttatgataattttaaggatcaagtgctacttatagaggtcttatatctcattctctcttaattttgtcgtatatatatacacttcgtgaagattattacaacaaactagccttttaaaagactaaatctaatctctcacaataaaagattgtagtaaaatttgaacctttaatcgaaataaaaaaggatgtcagtaaaaacttcactaccactgcaccatacaacacgtagtttaatcaaatttctctcctttgaataacaaaactaaatccctctaaaaaaatttgaacttttttactaaaatgaaacaatttatttatttattcataatttggcttgaatccattgattgaaactttggaattttcccaattaattttggatgcttttgaacaaaaagttacaatgttgctctattgatctgaaatcatcataattacatacacagcatgggaacaatgtaacataacattaaaaaaaaaccatgagaatgagtgtttttttagaggaaaagaaaaagtaagaaaaaaggccaagaagaaagaggcaaaggtaataaaagtgagccataattggcttaaaaaggggtttgaatcaaaaaagaaaaagagtgaagaaaagagaaaaagaaaagcagagcagaaaggacatttatatatagtgagtgagtacaaaatccaagtataagctttaaaagttttttcaactttattgagagtggcacagagaggatcagattttatatagatatagggcttttgtccttctgattcacttaaaaaatataaaatactctatgagtttttttttttttttttgagataaaatactctatgagttgagttgagacttgagagttgggtttttttttttttttttttgttgaaaagggtttggaacattttttttttttttttttttttttttttttgctgaattggatttagaatatggaacttgtt

SEQ ID NO: 21770 - DNA, 2556 bp, Cannabis sativa
tatatatatataaataataacaaatagagaaagtggccgggtaagagtgatagtgatatggaaaattggaaattatatcaataagacaaatttcgctatagctcattttctttttcaatcaatattaattgtagctattaatgtcatgtacctttttgcactcacaggccaattttatgttaaaccactacttttggtaaatttaagatttttggactattttctctaatttgtgaaatatcaaattgtaagtatttgtatttgtatttagtatttatattattattaattaatattaattgatgaaagttacattatagtttttagcttttaactataaaagcttttccgatgctaaattaagggagtatagctaatatcaaatagagatattatatatgtttatatgttatgaacaagtattaatattgttgttggtaaatttaatatagtattttcacatatttcatttcaatataactaatattgatctaacactataaaaattttctttttggtcacaataaaacttatgctaaaaataaaatagttgtaactaattataaaatatcattcatatattgtgacttaaaaaatcgtgactaaatgtattagtcacaaaaataataatttattgtgactaaatgtgtttttggttacaattcttgttgtgactaaaactaaaatagtgacaacttgtatctaaatattatattttagtcaaaaataaatttttattgattagtcactaaaagtggctatttttaataatgtaattaatcggtaacctattaaattattattcggattatacacgacattcttattattcatattgttggctagtattattagagagtgaaatattaataatgtgtaaaaagataatactatatataagatgtatgagttaattctctcgattagcaattgtctataattttttacagagtcgagtataagcaatcgagaattttcaattttattattattattaaagaaaatgtgaaaatgatatttttaaggcaaaagccaataatgtactaataggaaaaacatcacttaatttgtccatacacaatatgaaaattaaaccaggccaccattaatctttaacttgatccatagctagttttatacccaaaattcgactaacacatcagaggaatacaagtgtcaagctgggaagaatacgaactaaggcacgtaattataataacatttgaggtggaataacttgtaaaaagcataattgacagagtatattaataactcgactgactgaatagtcttatgcgggataaaaatatacaaactgttgccttgtgcatcaacgagaaaccatgtaactttaggtgtacaagacgagacactaatatattgtatacaaactaagtataacaaacgagtgaaccaaagcaagtgacgaagcatctaccttgccataggaagacatactcgcgatattctcacttttcaataagattcgcagctccgacgagccagttctctcagataatggctgacattcaaatgatattgacagttgaagatcacctcgtcaccaaaaactgcgattgtcagatagggtgttatgtttttcagagtaaaagcgacgtgatttacattatcagccttagaaagaaataagaaaagttccatctcgctatcaaggttaccgctgctttattcccagcgagacatcccagaacgatacggtttgcaatgtttttaatacacgtttattttgacctagtaaaagcggactaatcacagctgtgtgatattcaaataataaccgcatttattttacgtgatatgtaatcatatctcatgatttcaggagataatcattgtaaagatatcagtcaactcagtaattaactgcctactatgtaattataaatagagggaagatagactgataaagggacaaaaaattcataagaaaaaaggccctagaacaatatcagaattctaataagattgactcgtggactatgcagaattttaactgtaaaaccacgtaaaaaatcttttgtgttcatacttttttctttactgtctttattttttctgtgcaattttatcactgtttaggctcatatctggttaacgaaaatctacgtaaatattttggtactttcattgagagcctacttgaaaaagctcaaaaaaaaaaccctccctaattacataaaaaaaataagataataatcctctttatgtctgacaacaaagaaaataatcctcacggaggaaccactcatcgtcttggaaaagagccaatcagtctccagggatgtatcgactcatcaaacagcccacaagttcaataaaatcccagaatttgggaaccaaacttgaagggcctaagatgagcaatggtcggtctcttcctaatctagttgatgaggatgacacctatgatccaacaaagtacataccaatcgtcaaattagaaaactgccatctcaagcatcaactagaggaggcaaactggcataatgcttaattagagcgtgaggtaggtgcagccagggcggcacaagggaa

SEQ ID NO: 21771 - DNA, 4940 bp, Cannabis sativa
  modified_base (4632)..(4640): a, c, t, g, unknown or other
ttgatctagatcatgtaaggatctgccccatcccgctagatcaaatactcaacttgaatttgatccgacccgactttttgtaaagaattttaattttatatctattttaattttgtattagtattatttaatacaatactatatctagtattgacttgtattaatagattgtataaagctgtaatatatttttaataaacatgaccccaacaccaactatcagtcgagtccgggttcgggtccgggtctggatcaagatttggctcccattgtgggtctcaatctgggtcccgggttcgggtttgtgttcgggccccgggtccgggtttgtaactgggtctagtttaggtgcctagtccaggtctgggtctggtctcgagttcgagtctcggatctcgggtctgggtcccaggcccgagtttggttctcgagtctcgggtttgggtccggttcgagtcccgagtccgggtccgattccagagtctggggttcggggtttaggtccgggtcccgaatccgggtccaggtggattagatccgatccagaaaaaaattaggcggggtggagcagatatgatccgagatccaataagtatccaaatattttttattagagctccaacctaatctaactaaatggatctttttgacatgcctaatgaaatgcttttacagaaaatgacttctagtttttcttgtgtattgctctggaatgtttggaattgcatgaaccaacttttgcattatgaggttaggcactctcctcctaagatttttgaatggacagcaagcttcctacaagaatacaagattaatcacggtgttgtaaacaacaccccaaagtcttgacagtccacagttgttgcggcctgggaagctcctccaacaagcctcgtcaagttaaatgttgatgtcgcctagtgtacaacatcgagcaaaatgagatttggtttagtcattcacaaatgcgaaggtggtattgttgcagcaaaagctcctccatggcaaggcttatacaaactagtcctcatggaagctcaagcactacttcatgctcttcaatgatgccaaggagaaattgtaaggtgctggtggatcatgtaagagatccccagtgaccaaatgcttttcctgaagacttagtaaaattaatctctccctttccttctcagctttagttccaagggaagctaacacacttgcccatcactttatcttgtatcatgaattgttaatttgatttagcaatgcagggatacaacgttcaaaataaatgaataactaaattattgatgatcatattggaaaatttgcattaaaagacataacaagttcaacatttaatgagtcttgagaacagttcataggatgcctatttttcttgcactctcttattcttctcacaatacatggttatggatagaattgtgagcctctgcttatgcaaacagatctatgccccaaaacttggcgggttgattggttctaagtttcttgtctagagttttaatcagatccatgtcctctttggtaagctcaaagtcgaaaacttggaaattctctttcaatctctcaactttagatgtctttggaatgacaactgtattgcgttgaattccccaccgaagaacgatctgtgccacagttctgttgtatttctttgcaagatcctgacaagaaccaacattgtaacttaaaatcggggaaaaaaaagtttctagtttccgggttatttagaaaatgtgagaacatattcagttttgacagattagcttacctggagaactggatcatctagacatgaaattgaaccaaaccattcagtgttggctgcagcacctcccagaggagtgtgggcagtgacagaaatcccatgcttttgacagaatttcagaagagagtcgcgttggaagtaagggtgagtttcgatctgattcacagcaggcttgattttagagtaagctaagcagtctctggttagaaacacgtcgtagttgctgcgaaattgtttgaacaattggataacaattattaatctcaggagtttgaaactgaagaaaatgtacaaaagttgaaaacaggaaataaagtgcaattgttgtttatattacttatttaaaaatccacatgaaattgtaagcattaaaatctcagtcattacattgcaaaatgaaaagggaaaattcacaacataatgcttactcattctttagtgagttaatagctatatcagacaataattcaggtggcttacataatcaacaaaaaaaatcataatgttgttggctcacctgattccaatgctacggactagacccaaggaaaccagttcttccatagcatgccaggtagtttccaaagagatggttgtatctatctctagcaccccatcttcatctaaagcgctgtcggttgtaccaactcctgcatgaatgtaaaggaaattcagaatgaggaagagaaaaagacaggtgaacatgttccaattcctttgaatggcgaaacagaacattaaatcggttcataaaaagcattaaagatttcgcaaaacacccatacataaagctaaatcactccgtgtttaaagtttcagtgtctaatatctgttagttttttcaattcagtattggttcaaacaccaattttgcttcggatgtaaagaatgtcatatttagaattactacgaatctgtctgtaaggccaatttttctgattaaatgatttgctatttgacatgtaataccgaaactcatgtggcataacaacaaagttgatgcagaaatcctatggaatattcatcggtagcagtttaaaagcagagaaaattgaaaaaatgaccgaaaggaaaaagaagagggaagcaacaccagtatgctttgtggccacagggaagtgaacaaggtataaatccagataatctaactgaagcttcttcagactatccttacaggcctcaaggacatgtccatggtcagaattccaaagctgcaatcaagacaggtaaagaaaaagaataatagtctggctggacatacagaatatacatattatacgatcagttcgaaaataaactaaccttagtggtaacaaagagatcttctctcttaacaagccctgtctgaaatgcctcagaaagtgcctccccaacttctgtttcattcctgtaatcagctgcaagcaacaccagctagtcaaacattacattgtagcaactcaaatgtaccaaaaggtaacattttgtacaaaaaatattcataaattacacaaataatagagcaaaaaagggtaaataaatacaaacaaaggtgactagctgggtaactacagcttctaaattttttagaggagcagtttaaagaactaatgcacttagaagaggcttatcaattaatgtatattattgatattgcaaatgagcaattcttcatttccctactatttctcatactttcctatttgaaaataaattaagtcatttaatccttttggtattcttttattttcttactcttatctactaaggatcttttttccactaccatagacaacttgtttttcttatttaacaacagttaatttttttattgatcaaaaaggtcaaaaagattatttttttattgatcactataattaagtttattttttatttaaaaggtcaaaagtttagttaacaaagtctatttgacaataagacataaatttgaccttagcctaaaaccaatagatcacaggaggtaatacatatatgataatacatacaaaccagagtgaaaatgtaatatggctcttaacggtcaaaatgaatcaaatctcccaagtaaggattctaaagtttattctattctagctaatgaagaagttatttaactcttatctagtagaagtaataactacacatatacttcttctactgtaacttttaagaataagaacctataaatgagttcaatatgtaatctaatctcaaccccaccaattattttagaataatttcctccaaaagttaaaacttttaagagcacaacagtcctaatcacagtactactggatcttttctaattaagtctataaacgagttgaaaatcttcaaacctaccaataatgggttaagtgatagtaaatttgacaccccttttaaacttaaagaaaatcagaatcaaaacccaaatgaaaatgacatgaagaagaaggaaaaaggttaccagcacaatcaagatggcgataaccaagtttgatggagttgatgatgaggtctctgatagcttttccttccatacgccaaacaccgagacccacaatcggcatcttgaagccactgttgagcgttattgccatttttgttttcttgttcttcttgttcttgttcttgttgtatgaagctcaactatcacagtgtgagtattttggagatattattttatgtcggagctcccgaaatggaagtgaagactaatgctttgcttcattgttgggcttagaggcccatttacaaatgggattttcacaaaaatttataattttacgaaattttttgatatttttttttaattaagtatctaaattaagcatacaaatttaaatttttcttttattattcgttattggattaaaatctaatagtttaatattttnnnnnnnnntatttatagttaaatttatttaccaactatcagtgagtaatacttattgagaagtatttcatatatattttttaagtaattgatttatctttttattattttaggtgacatttagttagttgattgtattataaaattagtgtatgtaattaatgtttttgttattttaggtaattggttcttagatttagtttttaatgaggaaattacactatatatgctttctatattgttctcttttatttttacactctttcttaaagtctatcatttttacctctttttttaaacattgtacca

SEQ ID NO: 21772 - DNA, 3372 bp, Cannabis sativa
attagaaaaaatgagagaagaaaggttaagataactaaactataatattgattgatatgttttaaaccttcctttatgttaatattgattgatatgtatattataactaaactataatgcatgtttttttttttgggaattacctttatattatttttaacttttttttttctttaaatttacagtttgaattgtactggtagtttcttcagtagtttttatgtgaattactatgtagattttaattacgatttaagttgatccgttaattactataaaaaaatttgtgtgaaattttgtaaaaaaaaaactattttaaagtaaaaaaataataaaaaaaatccttatttttgtccatattttttttttaatgcaaactcactgcctcactggcaccatatataatttccttttcttttatttattttttattctcattgtacatcaaacacatgaaaaacaaggaatatataagagaaaagagaaggataattagcgaagtgaaaatctcacataaccaaataacaaaacagaactctctcaaacgccgtagtccgtactaacaatggcagccttaatcttggaaccctcatcgtcatctttcctaaaccccaacttcccttctaattccaccaatacacaccgtccttatcttccacttacaaagaaatcgactcttcttcaccgcatccactcgccccccgcccctccactctcactccgttgttcagcaactcctgcttcgacttcgcttcccggagaccaagacccacttcccgattcctcctcggagcggacaagggatcgccgcagagcagtccggttggcgtgggagaagctggtccgctggtctcgttcatggcgcaacaaggccaaaactgacgttcttgagcgaactaacaaggtctatttttcttttttttttttaatgttccccaatcttttgcacaggagggcatctttttcttttgtgtttacataataagctgccattgttttgccttacattcattatgagaggttcacaattatagtaaccttatcggatatttgatattattatgtttcggtagtagctatcattattaaaatatagttaattttcttcagttctttgattaagtcaccaaaactttggatgtcttattctttagttcatgttttggccctttagattgttgtgcttggaggtggatcttttggtacagcaatggctgctcatgttgctgaaagaaagtcccaactggaagttaacatgcttgtacgtgatcctcaagtttgtcaatcaatcaatgagaatcattataattggtacacccaaatcttatgtcacagtaatgttaagctatactatcagtgcatatacatttatatttaatgtgtgttaaatctttttctatgctcatctttcttagtaaatacttcccaaaacacaagcttccagaaaatttaattgcaacgactgatgctaaagttgctttgcttggtgctgactattgcttccatgctgtgcctgtgcaggtttctcacttcccttatactaataatttcaattaatttctgcttcaaattttcgaataagtttatagcaaaccctcaattcaagctaagataaaattaaaatttagtttacttaaggtagtgctgtttcagtcactgcaaaagtactcatagcctgtttttcatattacaacatcttgcataaaatatgggcagatacctgaatctgtctatggttagtgcagttcagctcgtcttttctagccggaattgctgattatgtcgatccaggcttgccgttcatatccctcagcaagggcttagagctcaatacactaaggatgatgtctcagattattccccacgcactgaagaatcagcgtcaacctttcattgcattgtcaggaccttctttctctttggaacttatgaataaattaccaacaggtgaggtggggcattaagatttattgatttcgcttatcatcttgaggattaatagattgcctaaacatttgttgaacaaacgttgcttaggccatgtttaaagatgttcatcctacccttgtgtaattcttttcagcaatggtggtggcatcaaaagacaagaaattggcaaatgccgttcagcagctactagcttctgatcatctaagaatcagcacttcaaggtattgcctcacatgagataccttatgttgtgtatcatatcctattaactaagttggttgggataagccaagttagctagcacaattgcatactccaattcctccatatttcatgactcccgcgttaaataatgccagaagaattatgtatgcatttgagtggacgggcccagctcataacctctgataactccagtgatgtcacaggggtggaaattgcaggtgctcttaaaaatgtgctcgcaatagctgcaggaatggtggaggggatgaatcttgggaataattctatggcagctcttgttgcacaaggttgttctgagatacgatggctggcaacaaaggtatcccacttccctaatgaatggtttgaaaatttcttctttttaattaaagtttcattataagaaagaacatactcccactgcagtgtaccattatattgttacttaattctcattttctgcataagctttgtttactttgtccatggttattggctttagttctattattgctctgctatggccttttgctttctcaattcattttctcggttctcacaactttttctgtaactaattcttgaagatgggtgcaaagccgactacaataactggtctgtcaggaacaggagacatcatgcttacttgttttgtgaatctttctagaaacagaactgtaggagttcgtcttggatctggagagagactggatgatatattgagttccatgaatcaagtatgtattttgatttgaggtgtacaaaacatattattgattattataaagtacgataaaaattgtgaattgtaacttaaatgattcatattgagtaggtggcagaaggtgtatcaacggctggagctgtggtcgcactagcccagaaatataatgtgaagatgccagttttaacagcagttgctcggattattgataatgaattgacaccaaaaaaagctgtttttgagttgatgagccttcctcaggtcaatcttcaacccctttggtgatatacactttaatttgtttattttgtctatcctttgtttttgaattctacctgaattgttaggatatcatattccactgtaggttgaagaagtataaaccaccggcaataagataaatggggtggaagcattgaagtcatataccagtgacagtgtgttaccatacattcttcttctttttttttttt

SEQ ID NO: 21773 - DNA, 3237 bp, Cannabis sativa
  modified_base (26)..(34): a, c, t, g, unknown or other
  modified_base (3178)..(3178): a, c, t, g, unknown or other
tcttaagtcaatacaaataacgaggnnnnnnnnnttaccgaactgctcggggctgaatattactactatttagccttaaagctttgtattatcgattgtttgaccaaccagacagtctttaatcctagctatctttatattgcctcgacgtgtaagtatacatatttacttgttttatgccaagctaaagtatgcttgcagctaacttagaggcaggtttagtagattatactaagcgttaaaatttctctgcataagttctttgtgctagttaatgtgttgtacagtgtgggtgcaccccaagtgagcatgtagacttacagtctattgctcacttgcaattcaccgaattttatagaccttgcttgggtattttcttagtgtgctacctattgtacgcatgtggaattgaaaaaagaataactttaagaatcttgttagcaagttgtttagacacaacatattggaacataaacatcattttttattcattaatcgatatttgtagattcgcttgtagatatcaaatggctacccctactagacttgcaaagcagagccaccatagaagaacgatgggcggccacgccaaaaggtcatgagtactagctcttttttactcttatgatgagttggtagaaccactactgcaaaatatcattttgtaagaagcgtactgatagtatttgcgaaggtgctctccattccagtatcttggtaggagtacgagcttcatattctcgttgtaccttcctagcttgtaggttcccttactagttatttatataacttgataggggccttccaaattgggtctgaacactcctgctactagatctttggtgtttaggaacactctttggagcaccagatctcctatgaagaatttcctatccttgacttgtttgttgaagtaccatgtgaccttttggttgtaggcgtggagctttagattggcttggtctcttctttcttctattttgttaaaggattctaccaacaagatgttgtttgtatcctggtcataggttgtccttttgtgagacagtggcactagctctacaagaaacattgcctcatagccataagctagagcgaatggaatttgcctagtggttgtcttgtcggtagtactgtgtgaccatatgacctctgggagtaattcacaccagtttccttttgtctcctcaaggcgcttctttagtgtgtcattgagggtcttgttaacagcttctacctacccattggcttcaggatgggcaatggcaaagaagcttttaatgatgtcatgtttgttgtagaaataagtgaacatgtcattgtcaaattgcgttcaattatctaacacaatcttctgtggaagtccaaatcaacatatgatgttcttgataaaaaaaactcaaggactttcttaaaggtgattgttgccaggggtttagcttctgcctgcttagtaaagtagtctataatggctacggtgaactgcacacgtcctttccctttaggagttgatcaatcaattctatcccccatactgtaaagggctaaggagactgtcatcgtgagctcattgggtggagctctagggatttttcagaatctctagcacttgtcacattttttgacatagtccattgaatcctcaatcattgttggcccaaagtaccccatctttttcgatcggctttgcccccaagcatgattgtcgcagaagccttcatgcccttctataatcagttgcttggcctcagccttggtgacacaccttaagatcagcattgagaagccccgtctgtacattactccatatagaattagatacctaattataacgccttaagttgtaagggcgccttgtgtgtgcttttattaattattttataattataaactaacggtttaagaaaatgtggttcaattaaaatgtttaataaaacaattgaatttcataattaatttttttttttacaaaataccacttgtttgggaatccccttgtttataaacttctacaacatattgcaaaacaactattacaaaataaggttacattttcaaaatacaatcaaaagatggatcctatccactaagagccaagacacgcgactgatatgtacactgtctggagacctcttactcatggctggtctaggtttttttttcccttacctgcaccacaaagcactcatgagtgataaagactcagcaagaaaagtagataaaacataaacattgcataaaacgtaatattataacattgtacaacatatgaaagcatcacacagaataagtaattatttaatacgtaatcaaacttcacatatacattatttgtcttatacgaaaaatcgactttgatgcttcataaagcatccttaccactctttaccaatgagcttcatatgtcactatcgttgcttaatgaagcgactgataagtaaggaacctatcagtggtttctagaagttagtaataaatcctttttaaaaacggtgattaccgtatcattacctcgattataatcgagtcgtaaataataataatcaaatcttatttgacatgctaagtagtgcaatttacttttcttacctgagtccaataataaggtgtgttggctgacctgagtggaatgatgctcgacaatcccgggtcctatgtcacaacaatgaaaacttggtaaacaacttaaccaatcctgaagtagtccataacttcacaaccgaacaaaccctaatcattataggtttagaaatagcctaaacatcaataaaacactctaaactatgttctaaaaaacaccccaaacaaaaactagtttcgagaaaaactagggtttcccctgctggccaaccggttgaccggttccacagtaccctgtagaaccggttaactggttctcgcaacaaaaatggaaaactctggttcttcgaaccaaaacccaaccaatatcctctgaacctattgaaactatccaaaacagtttaataccaaaaaatcaacatacccaaatgttatcccaatttttgcactctaacgtggcatcacgtgaatggtgacacgtggagtccacttggaacatctgctcgagaagtatagtccgagtaggataccttgctggcatgcttaaagtaggatattcagtaatccacgctgaacgaccaacacttagcgaattcanctttcgcatcgtgagtcatcagcacaatccctataactcagggatcaatttacgtggat

SEQ ID NO: 21774 - DNA, 4446 bp, Cannabis sativa
  modified_base (51)..(56): a, c, t, g, unknown or other
atagttcaggggaatttttaacggctataaaagttcagggggcatgatttnnnnnntgtcaaagttcgggagaaaaattattaattagcctaaataaataaagaatatataaaaacgacgtagtttttgcttcaagagcgatagaatcatccaaccgttcatttatttatattgctgacacaaatcaatcgagtggatgccacgtgtaaatgaaagaatgacttaaaagtcgacgtatttaaaaggcaaagcaaagcaaagcaccttcgctctccacttcttcttcttctcctctcccaacgcaacacgcctaagaaatcccaaattaacccaacacacagagggaccaaacctaatcgacctgcactctctctccctctccctctcatacttcatagatccaatcccttcttttctccaaaccctaaattccctttctctcccctctgataatttctgccatttatttgaggtacggataacctataatttgtaatttattttgtttgattttgtgaagattatgatcgctgatcagcggatcgattgtggatttgtttaggtatttttgggggataagattttttctattgaagattgaataagcgtaaagaatcaatcaaccatgttgaatcgcctttttggaaagcctaaacaggaaaccaatgctctaaccacgttagacaagttaaacgaggtataattgatgtttgttccttgagtttggttgtatgattagagttattggtattgttcttatatgactgaaattttcgggcgtgtctttatctgttatgtccttttgattgggttgcgtgtggggtagcttcggaattcagggatggaagaatgaaatgatcggtgtttattttcttgtgcggttgtgcctttctttgagtagttaatgagattactggactatttaaagaagtaacttgtatcttagactgcaaaacatataaacaattaagtgtttttttctggcatagtgaagtagagtagagttttttttttccaccttgatttcgggaatcgttttatttactttaattctcaatgtcttttttttaatcacgcagacacttgaaatgcttgagaaaaaagagaaagtactactaaaaaaggctggtgcagaagttgaaagggctaaagaattcaccagagcaaagaacaaaagaggtaatgtggtggttgtttagcacttgaaacgagcatgattctcatggttaatggactattggttttaagtcaacttgtgctagtgtttacttactaatccatctttactctgtgattgttattagatttacacgactagacttttattattgtgttatgttcattagtcatttgtactgtaagttgaaaaaatatctgttttcttttctgtatcttgcattttatattatttttggggtaaggtacttctattctaccttagtgttaatacagtattctccacctctgatttcaccaccaattgatttaccaacacattaaaccatatgtttgttattgtaatgagctaatgaatatatatatatattgcatatgtacttaaattatctctcttttttctctttattaattttttcttttgagaggaatctttaccgttttgacttggatattattcctttaaacttttgactctggtgcaacttttagttgtttgtggttggactgattcatgtttctgtttgcagcggccatacaatgtttaaaaaggaagaggctctatgaacagcaaatagagcaacttggaaatttccagttgcgtatccatgatcaggtgattcttggggttttaagagcctgatggttctgactactctggatgatctcttagttatgttttgcttttttgattcgtatttaatgtcattgttgccaattgatttgtatttgcagatgataatgttagaaggtgcgaaagccacaactgaaacagttgatgctttgagaactggtgctgctgcaatgaaagcaatgcagaaagcaacgtatgtagcacatttgctttatttggtacttttaattttagaaacccactctagtgatatatattatgatgtatcttctgtacaggaacatcgatgatgtcgacaagaccatggatgagattaatgagcagactgagaacatgaaacagatccaggatgcattgtcagctccatttggtgcagcagctgatttcgatgaggtcatgattttctcaatgatttctttactcagcacaacttgtctgttggttaaattttcattttctgtaggtaggttttgtttatttggatgctgaaaagtgttactgttattattgcaggatgaactggaagctgagcttgaagagcttgaaggtgctgagttggaagagcaacttctccagcctgctacaacagctcctgctgctccagtgcacgtccctgctggccggcaacctgctcgccctgttcctcagaaacgcactgctgaagaagatgaattggctgccttgcaggctgaaatggctctttaatcaggtcattcatcagctgtatatgatttctccattttcttatctacatgtgtagtgggctttatctgcttgggaaactactttctttgtcaattgattatcatcattatatttcttttaaatgagattcagatccttgaaggttcaaagtttgtatgtgacaacataacatgaatctacaacgaattcctcttatatttagttgacattaatttttagtggcaatagtttttgatcgtagttggttagagtgttgcaggtattgctgggcacaattgaaaaaaggctatgtaaagaagtggcctgattgtataagatttctgcgcgtttcaggaaaacatctagatttccgtattgggtcggggctattgttgaacatatttttacacttattagttattatatatatatatggagattgtttagttgtttctacatacatggttgactttagctatagaccaagccaatctgccttattttgtgtttctgtctcatatctaccccattttttttctttttctttttctttgtcttttggcctgcgttgtcaatatcaataagatataaatttttcactgcttttgtcatcgaacatatatttaagctagtctgcttattttaagtttgaccagctatataaagaggattaatgtatagttgaatatgtttccttaatttataatgtcagatttatctatattttctcataattgaattaataaatggaagtagcttacgaataagaagtttatcttcatgtgcttatttagggagaacgaagaactccacaattctattatgatgttctaatgtttttcttattcaagattattctccttagtccttatgaaggaaaattagaactagttttagctaggtattcgaggatataaaagtgcaggtttttgtacctacatcaaatgaaactttagatacttgcacctatgaatatgataatgacaaatttgcatgttctagctcatgctcttatgtgtccttgttcaagagcttcaagagaaaacatcattattcaatcagatgttccaagatatttacaatagctgtttaattttacgcgttagtttgtattttatatgcttgttttctttgagtttttagcaaagtccatttcaaaaggaaaaagttcttagcaaagaacaatgttatggtcttccattcctgtctctttctctctctctcttaaaaaagtgcttatttttcttcattgcaatatgtatccttcctacctttgattgatacttgtatggagtcatggaccattctcgagaatggttcttagaatttattaacattggtccaaaacgcaaaaaactatacaaaatatttcccaaattaactcggtacatcaaattgattatgtaaatcattgttattaattaatattttagacatcatcaaaagaaagaatgaactctgtttccacgacttgaaaaaattccttactactacaaattttaaattaatctctagaaatctgaatgcttttttaaaaaagtctctagaaatctgaatcaattaggcaaatgtagggttctattaacatatggtaacctaaatctgcataagtggccattctcaaacatatacaatcaatttagttgttgattttatgtttgtaatcgtttacattttaaatgacattaatagttgcgagtagcgctatatataggagccaattttttttaccccacgtaaaattgacattagtacaacatgacacagaaatataggtttgggcacgaagccgaaagacacaacacgtaacaaactagcccaaaagtggatcacgcttaaaaattctataataagaaatatggatttatcaattataaataaattaaaatgataataaaactcaaatgtaatatcgagttttataattcataattaaaattattagaaaatgt

SEQ ID NO: 21775 - DNA, 4129 bp, Cannabis sativa
aaagttatttaattcagataaaaaaaatacatgttattaatatatatttatataaagaaagactagactaaagaaagactagactttttttatggaacaaagaaagactaaaataaatttattttatattaataagaatttaattaaaatatgatcatagaaagtataaacacaaattatttactatgtataaaaaggaaaggatttttttttatttatgtgagaacaaagaaagactaaacttatcaataatatataaataaattaattaaggagtatttttattgccatatatatttatttaaaatgtaataaagaaagactaaaataaatttatttaatattaataataatttaattcaaacatgatatatagtagacttttttttatggaacaaagaaagactaaattaacttatcaataaaagagtatatttatttctatatattattgatttagaatataatataataagtataaggcatgtacttgaaagacacgtacacaaaaactttgtagcaaaatcacttgttgttttcttcattggcgagacatgatttattcaagtgtattgatgattttactaggcaaatttactttctaggtattccataattgtgttatattttcacaacatgattaaaccacaagttactcataattaattgatgtattgataaatatatttgcatgcattatcaatgtcactcttttaatttactcagtccatgaattaatgcttttatcagcttgtattgataatttattttttaatcaaagggttaattagtaaagatcgtacgtatttaatcaaaaatttcaagagaggagatgaagtaaaggttaccttgatctttctttcaattcatccttaaattcaagctgaattccctgctggaaaggtgggttaattatgaaaattgggttgggtttttctttgggtcgagagagataaagagagaaagagttaggtttttgggcttatgttgtttctatctaacttatcgaattaattcagcatagtgcacttaatgtttctacaatatctactaaggttggatattatcaaacttatatactaaaattaccatagtgcccctttatttagtttctaaacaatttttaaactaggggtaattaattaaaatggttataaccaattactagtactccgcataatttcaacattctaaatgttcataaatcttgtcccgctaattttgagataatcaactgtatctaagtgacgctaattttaacattgcattttaattttgtggtcaaattaataaatgagtttgttaaaataaaaaaattaattaatttgaatcattgtgattttttctgaaaccgaaggagaaattccattaaaaggtaaaaagccaaaaaaaaaaaaaatgcacaatacataatagtcaaagattaaaggcaacacggtaaaccaagccaccaaacccgaaaaaattcaaaaagaaaattcattatttaatttgcaataagctaattaataatatgctcattcagtctctatcaagctaataatatgctctttctcattctttaactagatctgctctttctttagacgattctcgagtttagtggtcgagtctttcgctcaacttactttaaatgatttatgcttatactaatttgagaacctttgtggcttttgtcaaaaggaataccttttaaatgttttgtacccttaatgagtaaatgcacagtaaatactttatagattacaagagaatgaaccaaaataaaggatgaccaagaaatgagattcaagcaaggaaatataccgtatgtggtggtggtgcaatgaatttacacatttcgtgacactgcataatgacatgtacaaaaagtgtgggtcactaaatgttttaattaattttaagtgaccagcattgctagaccgtaaaaattcaacatatatgttctatgatgtgggtcactaatatgaagggtcactaaaaatttaatcatttcaaaaatataaatatatgtgctattatatttggagttgtgcatggggagaatggagatggatggagagtttttaccgtatatataatatatatatatatttatatataataattcattaaagcaatatataataaatgagaaagagtttattaatatataagaaaataagatggatgatgaagtaaatgattaacaataacacaataaaataaaatgtaaaacacacattaataattaaggccttaggtgatgatgagtacgtaggcacgtagtgtcatcaataagaggagaagatggagtacatatatatatggaaataaatggaatcaatcaatattaattaatggtctgctgcagcaatctaggtgttgcatatacataaacagacattaattattaattaatagaggagactccttattttgggaaacaaattaagagaaatacataaaaatataaatatacaaaccacagtaggcatgcatgggaagaatgcaccggaagaagatatatatatatatatatatatatataatcagctggtggtgcaagctgcatgcagctggtttgtcatatttataattaactaatgaccttaattaaacgtcgatcacatccaccgcaacaccatcgtcgacggtagttgctctggcattgagacagtcctgcactgagcctatgctataagccttacaatacttgtcgtttccgacacaatagaataccttttcattggtgcttggcttatgcttaagagtgaacaacgagtcattggtgtgagctagatcatcgtctaccaatatccagttattgttgcgctcaagcctccagtatttgttaatcgcaacgctttgtatgcgtatctgattctcttggccagcgaccgtgatgaaatcaaattgtgcatcttcttttttcgcagggagtgggttgccgaactgcagatacgtcttcttatcatcatcattaacgtgcaggctgagataactactatcctccactcgaatgatatacacgcgtctcttgctcccttggacggtagaagtactcattttgataattttatatataaatttatttaattactctccagtacgtagtagtagtatatagctagctagctagtactttgatgaaaatattagtgcattctcatctttactttcctacctatttatacactaaatattctactcctttaatcattattttaatcatcacacataatgcccacaactactcaatatcaacaaattaattaaaatacctagctacccacgacttttatatcttatggcttattaaaatcaaaatatagtatgtatcttacatttatataatatataactacgtacccaaattattatttcactaaactacctaatatataattaatacaacacttttccttatatagtatattctacatactaaatgactatattcatatttccatacagtttaattagtagcggtagcggtgtttgtattcggtagcggtgggacgcgatgttggcccactagagagtgacgtttttatatgattgagaatttaattagtagtggggcaatattattgttttggtagtatcgggaatttgtcgggatttgaaatttacccaattacctttggttattattcaacacttgaattttgtggagggcaaaatggtcaatttgtttgacttctcttattttgtcttttgtgataataaatctaaaaattagattattttaacattataattattagattacattaactagagataatcatactcttctcttgaaaagtctagaaacattctctcttgctatcaaacctctctctctctttcgaagccctaaacaaacaagctaagaacatgtttttctcagcaaaaaattagtgatttccagcagagttaggtaattcaattcaaggtaacactccctagctccttcccatttgatttctttgagtatgagtttcaagtacgtaatgcatgagttttggtatttagattgttgtatgctttgggtggtttaattttgaattctagggttaagttgttattatttagattgattggagctgagttaggttattattctgatgttcggttgacgttggagtttatgagctcaagttgg

SEQ ID NO: 21776 - DNA, 2285 bp, Cannabis sativa
  modified_base (1980)..(1986): a, c, t, g, unknown or other
ttcttatttgacattaatagtgtctaacaatttttacagtgatgctttataattagtaagttatatttttttaaatttcttttaccaaataatagtaaaatatcgaaaaaaaaagtgacgctttttagtaattcttcttaataaagtattacaatctagtatttttagacatgtcactttgctattgtttagtaatattttttaaaaaattattatgagttaaatcagatattgacatataagaaaaagtattatacactacttatacctgtttaataaatttgtatctgcatatattcacgagaaagcagtatgtttaagataattttatacaaaggcttctctgaaataatttgtcaaaaaacaaaaaagttgcatatgacacatcataatccaataattaattattgaacttaaattaaatgtagagactctaaaagaggaaaaaaataagggaaaatgggcaatatagcccaaactgaaaatggattcttttcttattcaacaaatatcataattcataaagacattgtcaccaacttacattctagggaatttcagtacaactaagactatatttggtatagttttttgttttttttgttttcaaaaaagcattattagaaattataacaaaaaatagtttttgaagttaacacaaatcgcttttgttagtgttttctaacaataatactaatcaaaagtaaattgttttttaaaaaattcatattttttgtaattttattttctgaaaattattttcaaaaaaggccaaacagtttttaaaaaacaatcatgtattacaagttttcccatcggtttttcagatcttaaaattttgtggatcttttgtatatatttttcataacataaagagataactaaaattaacaaactaatctaattatgaaaagaatcataaagttcaaattttagttactatgaagatctaaaagtttacctgaaagtaaaccataaaataccataaaagtctgttaggtcattcaaaaagttgttactgtttaatgaccgtttctgaaaaataccataaaattgaactaaatattggaaaatgctatcttgttctattatcaaaaaagtcgaaaatgtcatgaatgtgttgcaaaaatcggctcatgtatatatacttttttttcttattctctaatttgtttgtttgttaaggccatgaaatgatggtttggttattatgactttcattttatctaaataaatagctataaaatattttggtttgccgacgataaactataattttgcataaaaatatgtgagcttacaccgtacgtacgcgtagagatcgaaagttgtcaaatttctggaatttgtgtcaaattttaatcaaaaattgacttatgagagcaaataatgtagaaagttgttatataagctttcggtctcacaaaagcccagcaatatggcccatctcacaccgtctctacagcttgtcagattggattttaaattcaacattgggtggctataaaaccataataaccattataaaaaaaataaataaataaataaaaaaaattaagatttattttttgagtttattttaatatttatttttatttatcataattttttaaatcatgtataatttttattttttatataacaaaatttcatataatatttttattttatttttttgttataatatttaaaatataatttattttctttaatatgtatattttactataaaaatcttacttttaatcacaagttttataaagtaaaaaaattataatttaattataaattatcatttatacgttttgactaaaagattcgtgtctaaaattattagttacaaaaatcaaaatttattgtgactaagtgtgtctttagtcataatacttgttgttactactaaaactaaattagtaacatctaaatattatgttttatttataagtaattttttgttgtaactaaaagttacatttagtnnnnnnnaaattatgttgtgactaaaaaaattgttactaaaaatgacattttttatatatagtttttttaaaaaatatgaattagaacaaaaagaatttaaaaaaactaatattattaaagatataaatattagtttgaaaaataataaaaataattagttaaataaataaaaaacctatatcacatatgtcattgtaatattatcctcttatatgggagaattgtattgagacatagtcatacctagctgtgatttgtcagaatcaaatattcctccaattttaatttttagcaattcgtgattt

SEQ ID NO: 21777 - DNA, 3424 bp, Cannabis sativa
gcctaagactctcgaaataattgagacagttgtgtcatgtcttgtctttatttaaattataaagagttaaaaataataatttaatccaagggaatagtttctgcctattctttttaagttttctctctagaagttcttagctgccataatttttttgcctcactagggctcgccgaccattttttggctttatggcatgactttgatcgggtcttgttgattcccacactatttttttattttgatgagattgttcttatccttctgcctgagtgttcctttcttcttcatcttctttcttcataagcatgtctcgaagttttgagttgcctattggctctggattggatctttgcgggtgttaattctcttagtgtgttatttttatttgttatgttttgtttttttttatgttcatttttattttcaataatgatgttgctacaccaccatagtattattatggtagtaggactttgttcattcatggcatgtagggctgacaatatggaccacgacgagacaacataactcaaaaatgacacaaaataaataggtttgagtgagacgtttaataatcgtatcgtttgtgtttaagtttttgacatgtttaataattgtgtcgtgtttgtatttgagtttctgacacatttactagtcgtgtcatgtttaccataaccgtttcgtgttatagtcgtgtccacacatttaacaatcgtatcgtgtcataatcgtgttaacacgataacacgaattaaattccatatattttataaaagaaattcaaaattttcatatttataatgacaatcgtgtcataatcgtgttattgtgtcgtgttcgtgttgtgtgacctactaattaattgtgtcgtgttcgtgtttgatgttttgacacttttaataaacatgtcgtgttcgtgttcaaggttttgacacgtttaataaatgtgtcgtgttcgtgtttaaggttttgacacgtttaataaacgtatcatgttcgtgtttaccttaattgtgtcatgccataaacgtgttgacatgaacatgacacgataatatagaatattgtcagtcctaatggtaggggattttagtcttgtttctttttgggacattgaaaaaatctaaattggctcaaagtatgtttgtgttagtttcatgactatccttgtccatgtttagatctaggaggttctcaaatttttattggccccatagtttatattgcaattgtttgttatggttgttatagctatggttggtcattttgttatttccttttattcattgaataataaaattgttattatcaagtttttattggaaaatttttggctaatagtcattagtatgtttgatttatcacctgtttatttcaatttgagatcagatatttttcgtgcttctttgatgcttcaatattggtggaatattattggtatttagttgaaggcatgttattagggttttcattcatatttttataaaccacataattttactattttgttaattatatgagtgatatatcttgttgatttttctattaatatagatttctattttttttcaaaaaaaaaataataatttaatcaattacaaaataatcatgttcgtttttaaaactttaagtgatgatgaatttataattaaatgtgtattatctcattactcttttctattcttgtgggcttttcccttttatcagtgattttttttaaataatgaccttatcatttaaataataattcgagagtacaaaggtgataaaaaaaaattatcaaatcgagttttttagctatcatgaatgtatgtacaactaatttatgagatattaaagaataaagatacttcaagaaaattagtaagtaaacgtgtaaaatcatataatgatcgtacattggtgtaaagcattaaaaaaacaaagttcaatgtattacaatcaatcttaaagtataaatgtagactaaacaacaagcagctactccaaattcgcatccataaaatctacttgaataattgtaagagtccctaaaaatatattatagaaaaaataagagttcaacaaaataaaatatatattataaattaataaatctaaattgtaatatatatatatatactaacaaaacttatatctctattataaaattcaaatagaatatgtcattaaataaggtcaaggaatagaacattattataaatagttagattcaaataagtaatttttgaaaagtaatatataataatttttaaaaatatatataacattaattataaacttactgaattaacacatattattaaaataatataacatatagaataattttgttgtatataaatacttaaatttaataattattaataatctatagattctgggattgtaaaatgtttttacgaggttggcagagagtgatttgtgatggtggatggtacttcctctaatcatgttcattgctggtaagacaaattttactctttggttgatatgctttttgatttggtttatttgtttatttattttttctagtgaagaacctctggttttcactaaaagatcttgttctttgagcagttttataaaatcttatagcaaaaaaataaaaaataaataaattttgaaatccatggactccataaatcgttctcaatattctttatttaagttattttataaaaaataaatttcaaataaatcattccagcttgcttattaaagaattggtccaaactttgactctttttaatttttttaataaactttgacttatttatggtatgtctatccaaaatttaattttgaactatttccttattaataaattttattttttagacaaaaaaaatctattaatagacaaatcaaataagagaataataatagtcatgctactaatggtcaatttgacataactatgttgtaggaaagagagttatgctgtgagaaaaaacagttatagtaaaattgtaaaatagagttaaattggcgtttggttgagaaaaataaaaatataggagtaggaatgggaaaagaaataggaatgaaatggaataaaatttaaaatgtataaaaaaaaattgataaaattatgcattggaatagtctttcctttcatttcaaaatgaaatagtcattccaccaaaatggtggaaaggctattccattggaatgacattccaatactattatatgcaaccaaacaaaggaatggaatgaaaattgtttcatttccattctattctatttcattatctccaaccaaacgccacctaaatgtttgttaaattataaattttaaaatgccgccaattattaagattttttataataatattattataatttaatttattataatcataaatatatgtataaatatattatataaaaatattattttttatatatttttaat

SEQ ID NO: 21778 - DNA, 1809 bp, Cannabis sativa
  modified_base (26)..(33): a, c, t, g, unknown or other
ataaaatggattacattgaaatggannnnnnnntagggcataaaacccaatagatatatcatcaagtcgattaataagtgcccaagtattcttcttattaattaaatctgggaagccataaacagcagagaaatgccatataaggccatcataaaatacatgtaacattcgaaatagtttgtattcattgagagaagagttacatcaatattgtctgtccataataacataattccaccacttaagctcacccaaggaacctctaacccattattgaaatgtaaagactgtttaaaatgagaaatagcaccagcaatagccttagtttccataagaaataacaagtgaggagttagcttacaaacaagcaaacgcaaacgatagaatgcactcagattacccaaaccccgtgcattccaacttatgatattcatggttgtgaacggggttgtttaataacaacacccgttgaaaagtcagccatcaaggtagcataatcttgtgttgaagaagaaacttgttgtattgaggagccatcagtaattgtggtatcatgtgtgttatttttgcatcttttcaaaacatttctgaggattctaggatcaacttgacgcttatacatgtggtcatttgctcgatcatcatgtatagctagggtgaacattcaaactgaaaaaccgacactgaccagtaaactgattgttaaaaaaccgaaaaaatggcgccacgtcataatcgaaaccgtttaaaaaaaaaaatcaaccacaccgttgtaactggcagtcggttacgatttttccaataagctggcagttataaccgtaaccgaccgtttaatgattaatctaacatttacatttaatatattatataatatatattaaacgttttttcatttatatatataaataatgttactttatttttgtgtcaagaaggagggtagggaatctttactttacattgttcacatttcaaaataataattgataattttttcaaaaaaaatattaaattattaagatcactcctctcacctacctcacctcactccacgcctcaccaattaccactcacaataattaatatttctctctctcactctcagcctctccttaacatttatctttctctctctactagggttaccaccaactaaactcaaaatcaaaagaaggaaggaaagaggagcggctggagcgctggtggcttgctgcctgctgcgactggagtgggaacgaaaattataaaaaaaaaaaagggtttgagctaaaaaattttagcgaaccgtcaaactggtatgtctatgatctatcaaatctaatgtattttttttctataaatttttttccttatttttaaatttaaattagagtatgatatgtattattctctttatttccttgtatatttttttttttgaaagatttaatcaaaaagattaatggtgttcatatgagtaaatagttgaatatcaaatatcttaggcagtcactcacactagtgttttgctatttttcagatcagtcaataaactcatatctccctcacttcgtcgctcattgttcagtgttcactagatcaattagtctctttatttttgctagtaagtatatctatatatatacatgtacattgttaataaatttaaaaaatatttgatattttatttcttgtaaattatcatatatgtccaaatatatttgactaacgcaatatattatgggaatgtggatcaaatatttgagagagatctctccaaaatactttcagatatcctattttaatattcccagtttgattatttaa

SEQ ID NO: 21779 - DNA, 1323 bp, Cannabis sativa
attaccaattttatcatcaaaaattatgataacaaaaacaaggcttaataattaaaattagagattacataggtagttagacagtgtaaaacacaaaaaattaggacaagaatagttaagatagtatctgattaaacacatcatcaaaagatgtgtctttattattgtagtgtttataataacactctcaagaacaatgatcaaagaattttatcaaaaaaataaataaaatgatcaaagaaatgaatgcaagataatgagaatcaaaacttaagaaaattaataacaaaaacagaacaatttacttggtttagtagacaaaagcaatgggcttttgcgactactatcatccaaggggtagaacagcctcagattgatatttatacagagatcaacaaagtctttcaaaacagtagaaaataagagactaaaatctctcagcacctcactcaccaacttttccatgaaaaatgagtctgagtttctcttttataagcctcttaatcaaactgattccccaaattaaccaacttctatgacacaaaagctagctgtcaaactgtcatacgaagactaaaaattctaaagcactacaattaaaaatctgaaaatggtaatgatacctcttatcttagcaatatccctcactcaaatttgattgctgggagaaacatcgctgatttgtatatatttattgaaaattaacgatataataaagagaacaagatgccaaaccagtatgatagagtttcatgcttcataaccaaagtcctgtctagtatgcataaaatttcatgacaatagctagagttaacaataaatttggtcattacttaaaacttgtaataatctgatgtaaataacatgatcttatatgataaactataccatacaaaaagaaatataactaacaaaatgatcttataagttatatatatgagaaattatgcatacaaaacgaacacaaaccaattgggcttttcaaaagtaaaataaaatggtatatcaataatagtagctcaaaacaagtcacattcccattccaatttataggacacaaaatcctgatttacaggggaaaaagaaaacagctgttaaaacttttttttagtcttgaaagggaaacatataccttatgaatagcacaaaaatgatggctaaagttctaacgtcgaacgctcaagcaaacacgagaagaaaaagcctatgaatagccttccaacagtcgtgaaagagaagagccctctcaaaatcgattttgtcctactgttttttcaagcctctgaatattgagatcgaacaattggagaaacgggaaggaac

SEQ ID NO: 21780 - DNA, 3988 bp, Cannabis sativa
ggtttgtcttaaaaattatattcactctggaagaaaatgaattataatattttattctggtaaatttatatttctctgtttgcattcattagtatgtaaaaacaaaaggtacaactctttactccagcaccgtgtaaattcaagcattttttgttagtcatgagatattgtttttttctctttaatacaaggcatttgtcgcagattgaagcagggcaggtgcaaaagcagtatgttgccagagttattggggtatttcctgaacatgaggtcagtaaagatgtgtaatttatgcatgcaaacatatatattatatatatatatatgtaaatattgtcctcttccaactggctgtaacacaggtgttggcttacctttgattatcagtttgttgtttatcatagaatacaaactaaattttataattcttagagtttaaaacgctattaacttcgttgttggtgtcttactaccacaatctaaaggttgtgaaaaataaagtaaatgtgtaggaaaagctatcaatctcactcaccaaagatagttcgaagaacaagcaagaactaataaatagaacacaagtaaatccattgcatgcacaatctaaacaaatctgtttgaatagccctttagtgtattcaatagtaattacgagtatgaatcaaagaggtatttgtagacaaagtacatagtatagctaaaaagacagcacaggacataactaccaatatggtagttagaactaaaccgagttacaaccaaataggagtggcacctcagcagaatactaagacatagaaaataacaattctccaccttgacttgtatagttgtattctccattacatgcatgtaatataggtcgagtcattggaaatattttcgagcttgaggcagtggtagaactttgcaggaggcttagtgagtgcatcaacgacactgtctttagtgaggattttgagaagcttgacttttccttcaaagataatgtatctgataaagtgttacctcacatctatgtgcctggtcctttcatggaatacatgattcttgactgtcacagtcacacatttctgatctaagccctgctcccttatgattcttccataaggtttctttgatagtatctacgcaagctatatatttttcctttgtggtggaaagagctacaatggattcgcaaatttgactttcagctgattgtgcatccagtagattggaatgtataaccttattgtgattttcttgaatcaacatctccagcatagtcaaagtctacacccaatcacgcctacttttgctgaattttctcaatagatcaatccaactttcgaggtaccatttagatacctcaatatccattatgttgccttctagttctggctgtccatgaacttgcttaccaaactcacaccttaacatagatcaagcctggtacatatcataaggtacatgatactaccaattaggctggtataagatattttctccatataactgacatcttcctcggttgatggacattgagtttttgaaagcttgaagagctgactaaatggggtagaaattgatttcacattattgaaaccaaatttatttagtatttggagatataacgactttgtaacatctcaagcttccttaattctctgtttctagtgatctctatccccaaaattcttctaggtggaccaaggtcactcatatgaccaagcttcctgtgccatatcatagttgagctttcagcatctgttgaaactacaatgatctgttctttaaggtgactccatgcaacacataaattccatgcacaatagcaattttcatgataatcaaagaaccttttatcacctataacaagcctttctcaacctcaacagtacaatcatttcgatctaacatggctatagaaatcaaatttctctttatatcaggtacatgtcgaacctgttccaactcaataatacctttatcctttaatttcaatttgacagtcccaataccaataatggaacaagaaagattgtccccaagctttatagtaccattatgcacagttttatactttcatgaggacaaatatgaaaggaacaacttgagtcgattatccaatctccttttgttctgttcttttatattgccaagacactagcactatcacatccatcactatcttatattctcttataacagaacaatcattcttcaagtgtaaggttttaatgataataataataataaaaaagtgtaaggttttattacagatgaaacatctcttctcgaactttgaatttgactttcttttacttgcattgttctgcactttgttctcctccttcgaacatcttcttcgaaccagtaagccatctccaacaccttcttcttgcctttctgacttttatgttaaactcttttggcattactgcattctaaacttcttctaatgttaatgagtccttaccatacaatatggtgttcacaaaatgtttagaaccaattacagctaaaacgacagaacgggacataactaccaatttggtagttaaaaccaaaccgagttacaaccaataggagtgacacttaagcagaatactaagaacaaaattaacaaaatgcattttaagcttcaaattcatgattcacaacttagaatatataactgcatggtccttttaaatattgatatggttatttaattaatttgtctttttcttctctcagaaagtagtagaagccaatataaactataatgcccgggaaggaaagagcacggcagaggttagtttgatgcgacattttcatagctttcaagagtataagctcctctaatttctcttgaataagtaattatgggctcatatgtaaacaaaactaacatttgaaatgcttaattgtttgtggttttcatatgaaaacagtcctttattagtttgttttgatgtttgctgagaattaatatgccatcttttgtaaaatccgacctctttgttttgcaggtactcaattctggtgacactaaaataaaagggaaaactgcttgtaccaagttcactagaattagtactaacggaattcatagcattgtctcgtgccaaccaatcactggtagaactcatcaagtaagtattttatttaccataattcaaaatcctagttgcttcttagcattttgtccatttaactgtaatatatttggcgattatttgattcgcctattctcgtcataatttatttactttataagtttagtattaaggtgtttcctactatgcatatttttctctcacactctacaattcttttatgtagatacgtgttcatttgcaacatgcaggccatccaatagccaatgacatactttacctatccgatgaagttgttgatcgttcgaccgaaggaatgagtgtcgatagaactactgcttgttcagactgttcatgtaaaaatgaagagaactccactgatgatttcagcattgatcccatgtgtacaaattgtccaaatttggctcccaaagggtaagattagatttttctttcaatgcatttatgacatgaactataatatagtgtctttttctttcatttggttagttgttataaatgatgagtgggatatttacatcacaatgtgtggtcctcgcatacacaatggaattggaatcttatttattaattagttacaagactttgttgccttttgtcataattgcagatatggtggacatgaagagggtctttggctacactgtgttagatattctgggccagattgggcttatgaatgtccatatccagattgggcttcacttaattaaacatattatttttatttatttattttttaattattatttgttttgggtaactgtttttattttcattctagatattgtggagaaacatgtgaagaggaattggaccatttctttttccacattgggcttctcttagcttagtcatccttccatttttaattattttttttt

SEQ ID NO: 21781 - DNA, 2955 bp, Cannabis sativa
tctatgtggcccggttactggacgaccctgcccaggatcccccccattttcacctcctcctccttttgtcccaccacccccaatttcagtcccaggtgatgattttgttgctgcttttactgaagtccataaaagaaatgtgtaacaggaatttttattagctcaaaaaattctgataagcatatttactcttcataataccgttttaggtggaaatagtgcgactggggctattgctggtggagttgctgctggtgctgctttattatttgctgctcctgctattgcatttgcttggtggcgtcgaaggaagccacaagaatttttctttgatgtacccggtaagtcgccataaatttggtacttttggtgatttattagctcagttcacttatttattcttcgttgcagctgaggaggatcctgaagttcatcttgggcagcttaaaaggttttcattgcgagaattacaagtggcaactgatagttttagcaacaaaaatattctgggacggggtggatttggtaaggtctacaaaggtcgccttgcagatggttctttggttgctgtaaagagactgaaagaagagcgtacacctggtggcgagttgcagtttcaaacagaagtagagatgatcagtatggctgtgcatcggaatcttcttcgattacgtgggttctgtatgacaccaactgaacgattacttgtttatccttatatggctaatgggagtgttgcctcatgcttaagaggtagaagttcgcattttatagggaaatgcttgctatttcttttggcctttgctatttactatccccatgaaactagtttcacagtgtactgaaattatttattgattcttgcagaacggccgccacaccaactgcctcttgattggcctactaggaaacgaatagcattgggttctgcaaggggtctttcgtatttgcatgatcattgcgatccaaaaattattcatcgtgatgtgaaagctgctaatattttgttggatgaggagtttgaagcagttgttggagatttcggtttggctaaacttatggactacaaggacactcatgttactacagctgtacgaggcacaatcgggcatattgctccagagtacctctctaccgggaagtcttctgagaaaaccgatgtgtttggctatggaatcatgcttttggaattaattactggacagagagcttttgatcttgctcggcttgcaaatgatgatgatgtcatgttgctcgactgggtgagtacatttttataaataatcaatagcgagaacagcttaaagggtgtcgtgtttgccttaagttgacacgaatgagcgcttttttcaggtgaaaggactactgaaagagaagaagttggaaatgctggtggaccccgatcttcaaaagaactacatagaatccgaagtagagcagcttattcaggttgcactgctctgcacacaaggttctcccatggaccgaccaaagatgtcagaggtggtgagaatgctcgaaggtgatggcttggccgagagatgggatgaatggcaaaaagtggaagtactacgacaagaagtcgaactagcccctcatccaaactcagactggatagtagactcaaccgaaaacttgcatgcggtcgagttatctggtccgaggtaaccctggcacaatagaaagtggaagaaaaagggaatttacttacaacttaattttttttaattaattataatagcttttttttcttcttattaatgaccataatctgattaatgtctctttgtaagtccattctgcattgtattcgttacatttgtgcatatgagagtcgcattggtaaggtgcaaatttgtattgtctgctgcagtgtgacaaaagccatagatgtttttataatatatgaagctgtggcagtttttatcttttgtgcactgcatattttcttagtccatttctctttttctttctctaatatagattatattatatatatatataaagttgtactttgtacatacagcaactatagtgagcacacaaccaaacatgcctatcattttattttcttatacagttttgaaacaggtaaagttgagtgtgtcgagtgtgttcggaagatcatattctattgggtcatttcgatcatcctcgcaactattttggacggtattcattatcttaaaataaagagagtaatttgtggtgtaaacactaagtttaattatcggttgcagataaatacttaagttatatttttagaattgtagggacttcaccattaagtttttagttaatgaccaatacgacactctctaattggttaagttattaaattttttatttaaaaattcatttaaatatacgtactcaaattttaaaaatataatttagttgttaatatacttaaaagtaaaatttaagtatgaagtgattttgtactctaaaaggattttcaaatttcaatggtaataaaatatagtgaagttggtttggttttcttctctattggaactctttagtgtcacaatttttttagtgtttttgaaaccgaattggtaggggaattaggttaaaaggtaactaaattgatagttttaagttatttccttttgaagtcaaaaataaatcattctacatgattagtttttataatgttgctttagaaattgctaagcatgattacattgattagcaaactttggcacaattgcacaactcatcaaaacaaatgacacaaaacgtgaccaagttctcaatgtatttcacgtgtgtttgaatttacaaatgttttcacattgtcacaacatataatacttttttaaatgtccagataaagaatttatgaaataactttttataaggtgtactacaaatatttttaatattattttggatattgtattttgcaaaagttattaatcaaacttttaattttgttaaataacaatc

SEQ ID NO: 21782 - DNA, 1327 bp, Cannabis sativa
ccttcttctccatgtcttcaaatatttgacaataaatctcatgatgtacacgtggactctgcatggtgcagtcaataattgtttggacaaaattttccacatcattctcgtacactttacgaatcccacaaatttcaatctcaaattgattatctgagatggcaaacaaagcactaacatacccaccaccattcttactcaacatttctatgaaatgtacacgtggcacattgagtacaacaagaccatgttgttgttgttgttgttgtactaaataatcttgtttgatgagaaattgagtcttgtgttgcatcccacttggctccatacgtaaatgaacaacaagtgaagaagaagatgatgattttgtgaccaaattattattaatgtttttagtacgaaacataacatagagaccgaatcctaaccatttcttgttctccaataagtttggagaaagacaacaaaagatttggcgtccaacacattgatacgcgaaccaaggcaaaatagcttctagagggaaaatgcatccgaaatcgaacttagctgcattgtttttctgtattaatgttgcatcatcacaaaaagaaaaagaagtaagttttcaattaaaattacattatctattatgtataatgtatcatgctattataaagtaatcgattactataagttttcgggattcaatttaatgtgacttttgtttggcaaacttctggccttccttttattgctaaaatgaaaatagaatttcttttcgaagtgttaaagaataataaaaattagtctaatttagagctagaaatccaaaaataaaatagggttgatcctgaattttagtggtatgccccagtattttcaaaatcagtaaaaacaatatgtgtatatttcaaaggtgaattttttggacccttagactaggtgggccttaagtacaaacttagcctacctattacctaaacactctccatagtaatttttcattctataatgtacaattagcttagctaaacaagaggttattccctcattgagagaatacttgttcaatatccaactatggatttaaattagtgtttttgctcttaacattatgatctttcttatttgatttgacaaaaatctatggaaacatatcttaagttttctcattcatgtactcatataacaagatttggttatgaatttatgtattaaaataccattgtttatgcatgtcgcttgtattaaaaatccaaagtacaaagacaaaaaaattatgcatatagtactaatttatttacctgaaaaagtctcgaaagcaatgaatgaagtttcattctca

SEQ ID NO: 21783 - DNA, 3081 bp, Cannabis sativa
tttattatttgccattagatcaaaatctaataatttaatatttttaaaattaatatttataattaaattgtttagtaaccatcaatgggtaatatactaatacccattgagaattgttttattttattttgattgaaagcaagtgaaaattaagggaaaaaataaaaaattataaaagaggttgattcttatccttcttttttctttcttttaatcacagaatctttcttttaaacagtgaatctctatcatagtattcccagttgtaatagggttaaatatgaggtgaaacgtgaaagtatttaagaaatgaaaaaaggtgatttgcataagaaattattttccttagtttggtagaatagtagtccactaatatttctattattattctattcattttttttttcaatagtttctattaaccacagttatagaaatggtccaaaagtcgttggaataaagataacaatcttgaattagacaaggacttggatattacttaatgcttcaatcattgagcttaagcaaaatgaaacatctataatctattcagataagatttctaatcagaacaagatttagatttcgattgttttgcaaaaaaaaattattattatttagaaaaaaacttgtttgaatgagctggtgtttccaaatctcattggttcgaattaactaatgattaagttggtagcaaaactgttagccttgtgaatatgtcaccaacatatttttgagatgaagccatctgaataggacaaaatactaatagtaacaattaattatagaacaattaataagagtaaacaaaaattgtaccaatactaaattactaaacacatacatagtacaataccaaaattgactttgataaagtgaaagtaactgatgcttaatataacattaaataagacaagtcactctttaaacagttctttattttcttttttccaacacataaaaacattattacatcataagaaaagagggaacagattaagctttactctgaggcctctaaaacactggacaaattacaaactattgaaacaaaggctttaactcttttttacacccaaaagagaaaaccatcttttctttttctcccttgtcaaacactttttaaggtaaggaaaagtgatgggaacaaaaggtttcagctgtattttacaacattccctcaaaaaagatcagccaagctgtgagattattctataagagcaaggtgtgaatagaacatggttaagatgttgaccatgcaaaaaagggaaactgaaaaaaaagcttgcaaaaatgaataatctcacaggaaaacaaaagcttgaaatgaaatggttttaacttggtggtgggagcaattgagttcaggccttgaaaacacagtttgaaataacatggcaagttgtatatacatatataaggaattattctttagttatgggttttccttcatgtttgtgaagttagaaactttttcacatgaacaagctgaaagccaagcgtagattcttgactagatccttcattgtaagggagaactccatgttcatctgtcaaaaggaataataatgattatagttcaaaatttctatacaacttttaattgtttaaataatatgctggtatatatatatggcacacaatacctgagctataatggtcaaatcaagagaagaagttccaaatgtcatgcaactggtgttgataattgttaggtgatgcttttcaatctcaacaattgttttctccataacccctttctttttctcacagtgaattcttattagtacattcttatcacaaactcttgcttcaatttctggtagtggctcatcgaaggaggaataattctcatctgaagaataaggtggtgaattgctatctttatctgcaatgagcttgaatttccttacaaagactactgcttccatgtttctctttctcatctcttcctctagtattttcactctctcttgtaactgcttcatgtacttgatagcatccccaagaacagaagccttgtccatctgtatcaataatatacaagttcacaactttattagatttgaaaatactccaaattctccgagcttgaaaagattagactcacaagctcagtaatccccaacatatttcataaaagaaaatcagtgaaatcttgttattgatatgttgagtcctatgttgacatatcaataacatgaattcatagaatcacatttatatagaaactggtcgctactgagcttgaaacttagactccatcatccaaagtagctcaagctcagtattgaccggccagtgtagaaagatttgacctcttgatctttcattaaataaagatgaaatctttctccaacatgtcttaagaggaatcagtggaagttgatttgatcataccttctttaggccaggaactatggcagataaagctatgaatctttggctgagcttctccctccttttcctttcagctagaatatgatcttttgtttgagaaagtttggtgcttgtgctgttgatgagcctcttattacaattagcaccttgatgattagcaaccttgactacacaatcagaaggtaaaaaagtactagtagtgttgttgttcttcaaaccatctagtgcttccgccttaggcttgacataacccatttcgtctataacatagtcataagaaccagctgcaaaggaataaaggttattgggagaagaagcaacttgttgttgatgaggtactgggttattaatctcgtttgagctccaaccatttggtttgtgatgtttcatcgtcatcatgcttctatagtctatgcccatgtgagaattgttatcaaaagaggaagctttgacattgttgaagtttaagtgagagtgagagtgaggatgaggatgatgatggagattctcaccaagtgagctgaactcatcaagagagttcatatgccaatggggattaatcagattggggtcattcattccctgaaatatgtcaaaaaccttcatctgtcatgaactatatatacttgagcaactttttatgaaactgattcaaacaattaaacaaacagttcccaatca

SEQ ID NO: 21784 - DNA, 1654 bp, Cannabis sativa
  modified_base (65)..(96): a, c, t, g, unknown or other
taaggttttctaactttatatgtgtttattttcattgttttaaaattcatattaggttgttaatnnnnnnnnnnnnnnnnnnnnnnnnnnnnnnnntaaaataatttccaacaagagggaggtggaaactcagagaagggagggaagaggtggaaaggagacaaaaggtcaccagactttgggaagaggaaaggattgaaatgaaggtgaggctaaaggaggaaagcacgtgcaacagccaccaaaagttatgagacacgataatcaaggagacatgagtacgggaattaaaatggggttggcggctaatcatcagttggccaaagagagtacaagaacagatatgggggataggaaccaaattaattttattcatggttaggaaataggagtgaagaatgtggggtaggggaagagattaataaaggagaagaaaaggatgaggtggcattgaatgtcaaaaagaaaaagcatgatgaggtggctcaaaattgggaaagaattaacaatgatgagatggcaaatacgtgtacaaaagctgatattatggcgtgtgatactaacaaagaagattaaaaaaaaacaacaaaatctaaccactgcgccgactgaaactttagagaagaaattggattttcggaagaaaaaaaaaattaataaaagaaattcaagaagaagaatcaaaaaggaggggctgcgatcgattgaagaagataaacccaatgatgagcttaccaatctcttcaacattggtagtttagagggaaggagaatggctaacagagaaaaggatacaagaacgaagaaaaggatttcaatcaagaagatggccagagttgaaggtcaaaagaggagaagagaagtggaaaatatcaccattgttgacgacaaaaaggcaactggggttctgcttgggaaagaaatgtcggctaagggtgttgaagaggttaaaagagttgttggggtgggtctttttggcagtttggattgctcatccctttcttattttgaagcagcaagccttgatgagcaaggctgccgagagcaaagaagatcataagttggaatgtccagggattggggaattcctggacattcaaatctttgcgatcccatgttagggagattaaacccgatttggtgtttgtgatggagagtaagcctaataattgtcaagctaagaaggtggtccggcgattgggctttgatgatttctggtcagtagaaagaagaggtaatagtggcagtttaattctcatgtggaaagagactatcacgatgcaaatctgtgattcgtctccaggacatattttggctaacatagctgggaatggcttattaccttttacttggttctatggtaatccaaaccagtctctaagggaggattcatggaagctaatgagattgatcaataattctatgattggagcatggctttgtatagaagactttaatgagataattggaaaccatgaaaagaatggagggaaggagagatgttgggcagctatggaaagatttaggaggtgtatagatgactacggcttaattgattttagtaatgtaaaggaggagctcacttggagtaatggtgtaataccctagaattatgaaatggattagccaaaaccctaactagataattatgtat

SEQ ID NO: 21785 - DNA, 2987 bp, Cannabis sativa
taaattttgtaaatataatcaatcaaactttctaaattattaaataataattttgattctatatttttttttaaatgaaacataataatattttgagatcaacataataatacaacgagcttgaggtgttatatatgaacaaattaattatattttttacacctctttatgttagaaattagctttatattagttatgttttagtcatattaaaaaaattgactaaatttagggtcatagtattattatgttttattttgaaatattataaggtctaaattattaatttataaaattgagagtcggtccaataatttttacaaaacacgaagtataaaataatatttattgttcatttattaaaaaggaaaaaataaagaagtagaaaaataaggttataaataaatatacaaaatgatattgcgcaataaaaaaaaataatagatacatatgttgaaaatttcctcattacaagagagatgtggagaattttataatcaaattatatataaatgtattacatcgatattacaaaataattagcgaagaagaagaagaaaattggccaagcgacatgtcacatgtagtgtaaaatctcaaaaaccctaataactagtaaccaattactaatttattcagcattttgaaaaatactctaaagtccaaacggcccaaaacttcccagattgactttatattatttaaacaccctataaatgatagaataagttcccaacaattatattttcataactaccatttaattacatttaaacacaattagtaactcaatttagtaatttaagagtgatgaataatgatcatggagatgagttacaaattttaagattatcaattaaaggatttataactccttttagattatcattcatacatttgtaacttcatatttatatgttacaatttgacaaatattatttgtcacactaaattatttattacccaattatttaataacttaatattacgtatatcgtaaaataatataatatttcccactaaattaaatgatatctcattagtaacacaactttttatttaatcaaccaaatattatgttatagagtaatataatatttccccacttaactaaataaccccactctaatagaaagtattgcataaatgcataccgtaaaatatctttcaacttgaattttatcttagtgtaattaccacaaagtttgtcaaaattttggttatcataaattgaaccactattccttgataacaaacaagtgataatacacacacatttgccatgctcacttgaaaactttatagattgcttttgcaccattaatggccatgtgcataaatccaattcatagactttccagagaataattcacaattctcataagagacaacactactttttagacacttcttaagcttaaataagttttcttaagcttaagctccattaaataatccttttcgttgtaaccctctagtttcttctcaaatattcatttcttagatgggacaatttaagtactatattttcactctattgacttattattacctgttattcatgtttccgattaggttacacgtggcataaaaaggaagtgataacctcatagtctcactaattaaaatcccccattaaagcctagtcacgaataagcttcacagaactaagaacgagtcaagactgagaaataagtgcaaatcaacctcatcttatcatagcttcctgaacacggaagacatattgtttctttaggacctagagcggtctaaacttagagtctgtctaactaatactcgaagggcctgacgcggacactgatcgcccaagagtatcatggatgtctacctttgatgcaatctagattgcccaacgatagttatgcattttctaacataaaagcagatcttgtcccctgtgtcagaatatggtaatgcgcacacctcagacacttttttgccagacagttattataggcttgtacttttaaaggttaaacattttggcggcaagtgtccatggcgtacaatggtccccaattgtctagctgctgcaacacacaagcacaattcttctcaagggtcccaatagtcagctctctttttgcatgtattttaccccattagtggactttttgaagaaaccctaggcgggtcatgggcatgtccataaccatccttagcctataaatactagtctatttccatacgaagtggggcatcacaacctaaagggttaaaactatgctaatattgttccaacctttcttcttcttcaagagaaactaagactatagagttgggtttcctacaaaatattgtaatcacatcaaacatgcctttagaggctaaaagaccgactcatggagtaaggttaattaacacctgaatcacgtaaaaatttccatctcatttatctctgcattttatcatttctttagttctaaaatatttagtttcaaaaaatcttggtaaacattttggtgcttttattgagagctgaagaaatacttaaacccatagtgttgctactaccatgacttttacacaaaaaaagttcccaaaaatactcctccaggtgacctcgacattgtcatggaggaagtaaaccctctatcgctagagcacacccaacctagtgatgcgagaggtggggatacatccaaccttaacaatcgagaggataatttgatcaaccagcacgataacatcaatgaagagagagatgttgaaaattaggaggaagacgacaatggagaatacgttaaagatgggtactacaaagatggctaccactatcagcaagacctttaattgtctaaagagttgctcgagactagacagaatttagcccattaagtgaagtttcacaaagaatcaagaaaattatggctcgcctctgagctaagttcagagatctagacgagggagattcgaatgaggacccctcaggggaatgggtcgaaggaaataacaaggaacaccct

SEQ ID NO: 21786 - DNA, 2203 bp, Cannabis sativa
  modified_base (510)..(513): a, c, t, g, unknown or other
taattcttcaaaaagtttactttaggctatgtttgttaggaaggatggagaatagggaggatggagagttggtggaggatgtagaataagagggagggagaggagagtagcaaaccttttaaattgtttggtggaagtctggaagggatgaaatgatagaaggatggagagtatttatttatgaaattattatattatccttagatgtaactttttaataatatatttgagggtatatttgtaattttaaataattaaagaggaagagtgtgaatccttccatttatggaagaattttaaattaaggatttgacaagatttactctccatccaactatcccttccctctcccaatcccgcttaccaaacaagtggatttgttgtctcctcccatttccctccctcctctcctctccatccacccacctctccgtcctaccaaacataatgttagggacctattgttgtgacatattatcttagtttgaaactataagttccttctagacnnnntcatcaacatagcattctagtatagacattaatgtaaaatacttgcttaaaattaaataatcatattagataccataaaatatttcataaggattaagtattttacctaagtcattcgaatagatcactactacaaaattaacttctagcaacacttttttctatctaaagaaaattaaaagacaacacttataaaagtgttgtctcctagactgttgctaaaaagttagtatataacatgacacttatataagtgttgccttatgataataattaatgctttaaaaatgatatattgtaaaaaccacttttaaaagtgttgctaaatcttttttatgtatataatcattggcaacaattttattaagaatgttgccatacttaactttttaaaactcatgtatagcaacatttttattttaagtgttgctttattaatttttctagttagacttctaggaagacttatatgactagtgttgttatatgagtatttttttttttttatcaataaatatcataattaattaaaaaccacaaaaccagaagaaagaacaaaaaaatatagcatgcattaaaagtttacaaactcaagagtaatactaattagtacaaataacaattacaaatctctttgaagaaactcaattacaacaatatagctcaaaatgtgcatatataaacttaaaatcttgatttagcaccttaattctctaaattttaaagttctttaaatgcgtcgcccactcacgtcgaaccacattcagttgatcctttgagtaaaattgctgattattacactataagaaaaaaaaaactataagtactaagagatctaatataccataaatactaaggaattttacatacttagaatcataaaatttttaatctctatataaaacaacaaatatacctttaattttatataactacttggttgaggttcaaacataagatctctcatcatggaacagacataaaagctacatgttttaaaatcttgttgttgagggcactacatgaatatcaaagaaatggctaaatattattaagttaataatgaacttaaataataataaaaaaaaagataaaatatgtaaattttaccttaacattataccattgtaatgaatcttgtttcattcttttgccctttgttaaattatgtaattgaaatgcactatatcaaataataaaagttgaatgaatattaatttaatcattatgacgataaattcaaaacttataattcatatacttacattcctacaacatttttacaaacttcaggaatatagcctcgaaggggatcaaaaaagtatactatctctttagataagtcaatcaacaagaacattcaatgtctcctaagtataaaacatttagtttacaaaaaaaaaaaaaaattacatagtgatattaattgatatatataagtcgagaatacatttccttacccatcatttaaggctgccatgagtagttgtcctagtataatttctccaagtctttttgcaagatctctagctctatcatcaggtgttctccctaatattgcagctaaaagttgaggttccaagaatgtaaataaatacagtctttcattctccacaagtattgtatataaaacctacatgtacatgatttacaattactacaaggtttttaaaaatattgaataagaaag

SEQ ID NO: 21787 - DNA, 7979 bp, Cannabis sativa
  modified_base (7945)..(7945): a, c, t, g, unknown or other
actttgcagtgacagcagataaaaccagaagaaaatatgaataagttgtagaatgctatataaggaaaagtaaaattgaacctagattgtaactgctttgacttaccaatagtattaaaggacaacaaaaaagaacgtatctcccaggcgtctctgaatgtgcatttaatagacaattataaaaggcttcaaaaacaaaatcaagatatctctatctggctactggacataaatcctttggtagattttgattaaacagcaaaacaagaaaatttgatcatcaaaaggtaaaaagactcggaatctaagattgaccttctattctgctaaaaaatggacttcaatagaaattgttcaaacccccaaagaaaactaggaaaggaaaggaatttacaacaacagtgacagctggaaggtacccttgccattctgaggagaataggacataacaatacaaatacagaacagtttaaaactgttgtcttatctatattgtgatgtgattacctcggctgctcagacaaattctatatgcccaagcagccagataaaaagttatgttgaaaatcagttaccaagtaaatgcttatacatccatgtccaaaaaccatgactacgcatttgccaagtcataactaaactggttctttaattgttgatccaatgtgccaagtatactataaataaagcttctctcagggtgagaagaatctccagctatgaaagcattcctagtcccctcaatttcaatccaactgcatccagccggttttttaacatctctggtcctcatcagtcttcttacctccatcaccttatcccatctagcctctgctgcatataagtttgacatcacaacatagttccctatattatcagcttcaagttcaaacaagcgatccgctgcaatgcgtcctaatactaccttctgatgggtcttgcaggccccaagcagtgttccccatagttttgcattagcatcaaaaggcatgctgttcacaaaagagaaggcctcatcaactcggccacctcgagcaagtaggtcgatcacacaagcatattgttccattgttggtttcatcccatgaacatcctcgatagaataaaatatctctaatccttcactcaccagtcctgcatgactgcacgcggacaaaacagtagtaatgataacatgatctggtttcgcacctatatctaacatatcggagaagatactgagtgcctcctttcccataccatgcattgcaaacccaccaatcatagctgtaaacatgaccaaatctttcttagggtttgactgataaatcgtataagcagagtctatcccaccacattttgcatacacatctagcagagctcccgttaagtgcaaatcatcgaaacaacatctcacaatatatccatgacactgcctcacaaagtgaactgaggccatctgagcacataccggaataaggctcatgatagatatggcatcaggtctcattccttgagcttgcaactcggagaacaaataaagagcttgatcaggacaatcattttcagcataaactcgaaccatcagattccaagttgtgagatctgtttcagacatctttttaaatatcatatacgcgtcgtcatgtgatccacagtttacataacttgatatcattgaattgtatgataccaaattcgttttgtctgataaactcttgaaaaccttagaagcatactctacattaccacatttagcatatgcatcaagtatagcatttcctacagtaggctgaatattatctagaaaataaccagccctaattgaatatccatgagattctttaatattttctattttcgaaacattaatgctgtaacgaataacagtcaaaatggtaatggagtctggcctcattccttctgaaaacatctttgctaatagtttaagaaactcatcacaacatttattctcagcaaaagcgtcaagcatggtattccacgatatcaaatctctccttgacatcatcgaaaatattcgtgatgccacaactacttcattgcattttgcatataagtttatcatggcattttccactgatatgtcctcgtcaggtatgattaaatgtcgaaaaatatatccatggattgctttcgtaatctgtgtgtttcggaagtgtgcgcatgcaggaataatgctgacaatagttactgaatctggcttgattaaatccgaatttagtaacctacgaaacgaatccagtgctttcaaccactcaccatttgaagtatagcctgcaataattgaattccatgaaaccaaatctcttgatttcatctgttggaacaaatactcagcttctttcatctttccaagtcttaaataaaagcttaccaaggaattgcaaacgaaaacatctcctactaattcagttcgctgcagcacataacaatggatttctctccctaaaagagaagcaacccttttatctaaaaaagcaaatgcaggcaagatagtagcgatcgttacataatttggttcgatcggtcctttgagcatccaactaaacaatttgacggaatcatgcataaatccattgtcagaaaaccctgctatcatggcattccaagaaataacatctttttgactaatacttttaaatgcagcataggcatcataacaaactagtccacatttcgagtacatagatacaagaacatttcctacaaggttattcgattcaaatcccgatttgatcacataacaatgcaaactctttccagccaccacatctcctaagcgagcacatatcggtaaaacagtagcaattgtaataggattaggcttatcctcaccacctaaacgagtgaatgcacagaataacttcataacctcattgctatgcctttgagaccctgagaatccagaaatgacaatattccaaacaacaggatcacggtaagtcatcaaaccgaatagcctcttgcaatcatcaagcttgccacacttagcatacatattaagcagtcctttatacacaaactggcaagatacatacccctgcttgacaacataaccatgaagagcctccccaaatccgacagcaaaaagagcagtacacgatttaagaacagcagcaagcgcgaggtgattaggtttattacatccaattcgtaaattcccaatgaaatgggataaagcatcacgatcaacgacagaaaagctcctgattttactagcccccatttcttaaaacctaaacctagtgaaatcacatccaaaatcatacattttcttctcttacagaacaagcacaacaacaacaacaataataacacagcaatactctattcaacaataacttctagtttattataacaaaattaagtttcaatttggttcaattataaattgtaataagttatatatttttaaatgtattatattataataattttattacgatatagtagtaagaattgtttattgttattgttgttacatttgatacttttctgtgttattatttctttttcggtctcaagtgtatttttagatagaatctaaaggttctactgaagtagtaagagtttactaaccagatatcgtgggagaagagaaagaaccaggagatatcgagaagaagagacgataggagaagtacagcgtaggtacgaccaagagactgactgctgctttcaatggcgacgagagcgaagagagaaatggcgaggttgatgaggagaactccggtgtataatgctccgagagaaccaatcaaggaacaaccaatctaaaaaaagaaaaacacaataattgatttagagtgaggaattgaattgaaatgattatatgatatgatatgaaccctaattgtacagatatagagatgtagattgatacctgaatgtagatgaggataagagcggaggattgaaggcggtcgtaatcacgaagccatggctgtaatcgatcagtgagagaatgacaaagcattgtctaatctctcatctgtttctttctttctttctttcttttttgttttgtctttcaaatttaatttacaaactaaataccatttatatatatataattttcgaatattgttgttattactagtagagcttttacattattatttataattattatttatatgagtgtcattttaggaaccatattttttttaaattattaaattaaattatatgaaattcattagtatcttttaagtattgttattggatactagtgtgtagtaatttctatagacgacgtattagttattagttagtaatattttctaaaaattatttttaggaccaatacttaattacaccagcgatataataccgacaagagtactagacatcaataatactttttaacaattctctattatttaatacatcttctaaaaatgatctactgatacactttttatctgtttcgttatttaggaaaaactttaatccaattttttttttaaacatataattatgtatattatagttatttaagacattaaaattttgaaagatttataataagtcacaatataaaaaaaaatagtttttaaacaatttattttatatgcatataaaataaaaaaattattggtgcaatcaaaattttaaaaaatattttaaataattacaatatacacaattataaaaaaaaaaaaatagactaaaatattcttctaaaaatagatattgatatagtattgtaaaatttttcattattattattattattatataactccataaccataactagcagtctatcacaaacccatcaccaaatttatggatcttttattgaagaaatttattattgtttttggataaaattgatttatttatttattttttgactggttggtccttttttatatattatatatatttgttttgacttggaaatatggatggacagtgatcaactactctatatttgttttatatttatttatattatgtatatgtgaataataagacaaaaattgtcatattaaaaaatcaactactaaataaacgattgtttggtctttatatgtagtgatattttgattgtatttatttcttcttgtttttctgtctacataccattactttgtttttgaaggtaacactacaatttctcaatattattatatttaattaattaaataaatatttatatatttatttaaaaataaatacataaattttaagaaatttctgcaataagctcttaaaaaaaaatgatctaatagcattctttaaatttttaaagaattacagtgctaaaattaaaattaaagttcaaataccactcacataactatttcacacatctccaaaatatctctataactcttggaagtgtaataaaattcctttgttttattcaattacaatttatctaattcattgataaatcattccttctctaaataacatttgcaagcttgttataaaattttaaggcccaaagcaaccaaataaataaataaataaagtaacttaattaagcttttatatgtatagcaaagtgaccatagtaatagtataaacagatacataaccaaacaaacagggaaatataatgtctataagaaacatcatattataagataaccagtaaattaaatagtaaatactagtaatctttttcttttatttagtgtctcaaactccaaattcgaattcaagcagcagccacagccgaataccttgcaactttctcaacaagctcatctttcttagctcccacaatcttgtcgacaattttcccttctttcaggaacaaaatggttggcatggcctcgatttcccactcggtagcaacatcctgcaactcatcgacatcaactttcaggaataccacgttcggtgtcttcttagccaggtcggccaggattgggccgataacacggcagggtccgcaccatgttgctgtgaaatcaaccactacaagtttcttcgactcctttcccttctcgaaatgatccttccactcgtttttgttgtggcaaccgataagttgattctcctctgccatagctttaggtttcttcaaataaaaaaaaaaaacaaatctaagttcacaacatcacatgttttgttatcaccaaaacaaaacagaatgcatacttacggattccaaagagcgagttaaagatcaaacatacagaatatccattagactttgtgatacatgttttcttagaatcaaaacagaactgaattacacatattgtgattcaaagtgtgaataacatcaaacatacacaaaacaaacattcccaccatagcaaaagcttaaagttaggatcaaccaaccacaaaacaaattcacccaaagcatggtcaaggggagtataagcatgttggtctatctctatacattaatgcaatggttggatattcaagactttctttcaatttatgataacttgccaacattgtttctcacatctagttatttttcttaaagctttcaaatctgtttaatttcttcctttggccaacctctaaaaccaatttaatctatttaaccctacagtatttcaagagcaggaaactacagcaattgttatgtaggtaccgagtaaggactcaaacctcaaaccacatgcctgaccatttaagctaccccatacaaaacgaccaccatagcaaaagcttttaataaagaacaaacattcccaccatagcaaaagcttaaatttaggatcaaccaaccacaaatcaaatacatccatagaaagaaaaaagaaacacagtgggacaaaatttaacatgaaaagcatggtcaagtgagagtacaagcatgttggtctacctctatacattaatgcaatggttggatattcaagactttctctttgtacttatgataacttgccaacaatgtttctttttcttaatcttttcaaatctacattaaaccttcttttgatcaacctctaaaatcattgagcattgctaccactatgaggtagcgccctatagataggttagcagttttctatgacattaaagtaaaataagtaagacccaaaagtgatattaggcaccatggggcaagatcttcacctaaccctataatagttggggaccaaaaaactataacaatttctatgtaagtacccaggagggactccaacaacgatttgaactattcctattgggtcattttttggtactatgatgaacaccatcatcatataagcaatcaaacatttatttcacttggaatcctaatcagtcatcatcaatctagctcaatcttaattccatatctgcgcagagtacactaagatttctaaaataaattcctcaagcagattaattagaaaaaaccccacttaacaaatgataaaatgattcattttcataccttaagcaaggggcttttcatttcaccgacaagaatcagatatgaatcacaataattaatcataaacaacaacaaaaacaaacccagatccaacatagaaaagaaagaaaaagttggaaatttctacataaaaagtgattgaagcatttctacaaacagaaagaaaattagtagcgtaaaatatgaaatcaaataacgaaagatgggggttttagttcaattagaaatcaaaaacgaacagtgattaatcgaatagctatacccaaaagaagaagaaaaagaaaaagtaccttagggtttgacgatgggagaaagaagagatgaacgagaatgactgaatgggaatatttgttatttattttgtttggaagaatctagaacacaagactcaatttcaccacacgtgtttatatctataggcctcacacatgtgaatggaaataaactaggtactaggtgtggtatatattattgggtgattctataatgtatcccttaaaaaggatgtattaatgtacttttgacttgtttcggctcagaagaattttttagtctaatttttttttcatattcatntacgttatagctatttaagataacttacaaaatt

SEQ ID NO: 21788 - DNA, 7474 bp, Cannabis sativa
  modified_base (27)..(34): a, c, t, g, unknown or other
agcatactgcagtatgaaacttataannnnnnnnagtaaaaaagtaaaaaatactgcttgacaatatttttgtaaaaaaatagcaaaaattagtataccatgtaaatttctcaattaatattatacatcaaactttatgtatgctatatatatatgggaaatttataccctcccatttttctgtcatttgtcgttgagaaaattacattatatatttattttattttatttatttttatttttcatattctttaaactatacccacttttataaatgatattctcattagatctcttaaattaatgtaaagtatatgctaaacttaaatagaaagtaaaaatattttggacagcctacttaaaaaggtgagtatattttaataaaatataatataagagtatttttaattaatggatacaaaaaaaaaaatatttttcaatttatctctttgtcgtttttatcccaaaattatattgatccatctaatttacatatttaagtgcacctttattcttattctttttctttttttagatagttgtactcaaatttcatatatatatatatatatatatataaatatatatactagtcgaggagcacataacagaggcatgtaccgctcgttaaaatctgtgaattataatcatatctcttacttttatcaattatatttaaaaaattattaaaaatttatatttaaacaatgacatagtatgttatagattcgcttgttgaaggtaaaatcatccgttattgtcctgtctaaatataagctcatctaattttttccgctattatctattaataaacaaagtttattagaaaaataaaataacaactaacaaaaatttataaaagaaaaacagaatagtaacaaaaagattattatcatatgtatagttatataattttttacactatcatatatttactaataaacaaataagaaaaaaaataaagataaaaataagtaagtaaaattcaataaaaaaaaatataggagaaaaaagatggtaaaaaaatatacaaagacttaaaaaaatagtattttaaaaaaataaacggattaaaaaataaaataagattttttaagaaaaaagcaaaaaaaaaaatggcatttttcataaatactgtattttgggataagttttatatatatatatatactgccacacaacaaatattacaaaattactgccctggcttttttttttttcttttaccgaaaatcactaacgacacctccatctttcacacatactgacaaaattaccacaacacgagaacacttggaaaataaccattaatttcagcgagataaagtaaaaacagtgaaatcgacgtcatataaacacctaacagcttcatcaagaccaaaaatcaacgaataaaaaaagttagacacttaaacccatccaaattcttttgaatgcgaaattaaaaataatggtcaaacatagatctcgaattcaatattaaaaactatatgtaacttctgaagttgtatttatatacatgcgtaattgaaataaatgttgattaatatacattattcctgagaaaaaaaatcgattagtaatttgcattgaattttaaaatatctaacgttattttagagtcgttctttgttaattacatgtattttattggaaattagggatatatataaaaattggacacccaaataatagttggaccaccgaaacaaaaagaagaaacgtcgatggttttttatactgttgttttactattgttgtatgtttgttaaaatgttaaattgttaaaatactgtcaaaatattgcaggttatgaaatctataccaattctcttgaagagtaatggacgatgagaagaagaaaaaaattatatcaattattaagctagtggagaattcatactaaaatattgtaagtatgaagagctcgtaatctttatcgtgcgaccccacaaaaataaccgtacaaattcagtactaagcaaaagatggaatatcacctattaaaatattcaacaatgtgtgcctcttcttttacttacaactgaagatcaaagaaactgatttcaccacatatccatgatgcatcaacacactaaacaacagcacaacaactactccaacaccaatgttcacataaaaaataatacgagatcaacaaaatgtgggatgcttgagaataacgcgccaacaaccgaatcatacccactggaacaactagcatagaaagaaggagatcaaaacagaagaaggtgactacaaccaattcaacatagttgactatacaaattttgttgttcaagaaatggtagaaaattggaaaacaacagtaaaaaatagatccaaaggttgacatcaacaacgcaaagctcataacagataaattccaccctgaagttgaaaaaggacaggtatacaaagacaaagaaacactcaagagggtactaagctaccatgcaatcaaaaataacttccaattcaaggtatggaggtcgtgctctcaataatacagtctgaagtgtgtttatgaaagatgtaattggtctctacgagcattaaaaaataggccaacaaatacattcataatcaggaggttctcaaacatccacattcgcccaataaatgttagatgaagatcaaaggcaagcaacaacaaaatttgtagaagaatgcatgaaacttaagtttctaaacaaaaagacaaaagcaacaccattagatataaaaggagaattgaaacacagacacaaaattaagatgaactacacgaaagcttggagaagtaaatagcatgttgaaaatgacttaagaggaaatgctaatgaatcatacaacgtgataccaagtttcttgcacatggtgtaaaaaataactgtggatcagttgtggatttgaaaacagcaaaagacaatagtttgctatttgattttatagctttggatgcttcgacaaaagggtggaaaacatataggctgataatagtggtcgacggtacattcctgaaagcagcttacgaaggaaacattgacgtgttgcttatgtgttgcttattccaaaaatgataaatgttggaaatggcctttaacaaaaaataaaagaagcatatggtgtgacagaaaaattgtgtgtaatgtcatacagaaacgagagcctgatcaaagcagcaagagaaatatacacacaaattacacacacatactatggatatcacctgctgaacaaccttaaaacaacctttaaaacacatgttgctaagtacaactagccattctttagagcagtgaaagcgtgcacagaaagacaatttgagtaccacatggcagaactatatggcttggacaaacgcataagaccgtacttgaaaaaattcagttatgagaaatggtcaaggattcaccgtgaaaaataagagatattccaccatgacatcaaacatagtaaaatcactaaactcgacaaatttagcagcaagggagcttccaattacaatattattggaatgcttgagatcattagtgcaacaatggatacatagtaacaggacaaaagtacaaaacacatttactatagtgacaccgcctggaggacaaatacttctgaaaaagctacacatactcattgaacctagaggtgagatttagattatgcaatttgaattgttaaacaaaattattctagagctatcctggtttttctagcatttttttagagttgtcccactattgttctctatgtataattaatgttggtttcaaataacacaggtaaaatcaaccactgattatttgtttgaggtaaccagaataaaggaatcatggacaaaagacctcaaatagagaacatgcacgtgcaacatgttccaaatcgatgaaatgccctgtggacatgttgtggttgtattgaaggagatgaacatggacacatacaagtactgctcacattactacacaaagaaaaattggttagcaacttatgaaggaacagtgtacccaataagataccaaagtgagtgagatgcaccacaaaatgtgaaaagacgtaatagtcttgcctcacattgaaagggtctaatctagaagaccataaaaaaagaggatggaagctggcttgaaaaagaaacaacataacaagtgcaacaaatatggggagctagggcacaacaagagaacatgcagtagaagacataaaaaataaagagaacaagaacaacttaagaacagcagtggaacaatggtgggaaaacaaaaagtacatttgagcatagaatactaaagaaaagaatttgcatatgagtttcattattattctattactattaaaagggatgccaatgatttatttacgtactttgtagaatttttaaactacttggatactacatggaattgagatatgaatgatatgataaattgtgattggtttttttttttattaaatgatactgtcaatgtttaaaaattgagtagattaaggatgttgaagaacatcataaattgatatgggtaaacaacggtaaaataaccttaaaacaatcataaaacaatgacaaaaaaaaaataagaaacaaaaatatataaaattaagcgtaaataatctaacagaaacatgatttaacatgaagtacaagaaaatagaaataacaatactagagaaataggataaaagacaacaaacatctataatcaaatatgagaaacaagataagtcataggctgatgagactcgcagtgcatcagtttcaactcgagtgattggaaaatttaactgggcaacccagttgaggccatgaaagagggccttagcttccatttcgtccgatctaaaacatccttggactggtttagaaaaaatagcaatcacttgaccttcatgattccgaacaattgtaccaactccaaaaaccttcgtgactgtgtcaacgacatcatcaacattaagcttaaggccatggagatcagttgatttccacgggataccatccatcgatcaagaaatatagattggagttgagatttgtgcaggttgaggtttagaaagattattggctttgtgataattatccaaatagttgatcgcaaaagtagctaggtatgacacatctcaacctaaactaccatggagtactttgtttcactcagtacaaatcacccacatgatgtagattattaattccatctctgcctgagtgtggacaatggagagataaaataaataatcaccatttaccatttgtcgagcttccctgaaatcatgatgtaaatgaaaatacttccacacctatttagcataccgacaattgaacaaagtgtgcccaatcgattcccaaccatggacacatctggaacaagtagtcaaatcaataagttatttcttgtataagtttgtagccactagaagggctccttggatggctttccacacaaatattttaattttggaaggtaagtttaaattctaaaaaaaattccaccaattgttgtacaaatttgaggtcgcttcttgatcagattcttccaaggtggtggccaaatggaacctcgacttcactgtgtagattccaatagtggtgaaattccatattagtcagtcaggggttgagaagaaactcaaaaggatagtaaggatacgatccccatcaattggtttgaaatagtcgtttaagagcatgatatttccattcccttttatcagtaataaggtgcctcaatgtaagtgatggaggtcttgtatatgagagaggacaaaattcactatggtccgggatccatagatttttaacaatgttaattcggtaaccattcccaactttgaatcggagacctttgagtagcagttctcgtccccaacaaatgttatgccatgtaagtgagggagagtggccaatacatgcttccaaaaaagtgttatttggagaagtagttattctttaataatcgacttagtagtcagtcaagcgcttcaaagattctccaagattttttggccaataaagcttgattataatgcataaaagaacagacccccttcaaatttttatatgcataaaagtttccagtacttctaatgtattttagacccattttggtttgattcccaccaaaagttttccatcatcgcctctagttggttacactgatattttgaaaatcgaaaacaactcattacatatgtaggaatcgattgtaccaccgcttttaaaagaactttgttacctccaatcgcgaaaagtttttcattctaagcaataagctgtttccaaatatgctctttgatattgctgaaaagttcttttttgtccctgccagatcaagaaggaagtctaagatattgttcatggcactcatttattggcatacccaaagcctggtaaaaaaattcttgacagtcaacatcgtatttggaaggaaggacatgactgatttttgagtgttaaaaaattgacccaaagctttgtggtaaatatcaagaaccctctaaatagcaagtgctgaattgttagttgcatgactaaagaaaatgttgtcatccgcaaaaagaaggtgtgacactgatggtgcatgacgagtgaggcacaatcctttaagattggcaattgcttcctcgtgttgcagcatccttgagaggccttctaaacaaattagaaataaatatggcgataacgaatcaccttgacgtagtcctctctttggtgtaacatcccgaactacctcaccattaagggagaaagagaaactggtaggtgataagcacttcaaaatcaagtcgatccatcgagcatcaaaacctttttttttctattacaactacaatgtatacccactccactcaatcaaaaaatttactcatatccagttttagagtaaaaaaacctattttttccttttgtcttgtgtttgagatgatgaaccaattcaaaagcaatgaggatgttgtccataatgagtttgtttgtgaggaagtcactttgagtttctgagatagcaaaaggaagtacttctttgaaccgaatgactagcactttggagattagtttgtaaaggttattacacaaactaactgatcacccattccactttctttttttttttaacttttggaataaaagtgactatagacttgttaagcctttccatgtcgtgaccattattaaggactcccgaaaccacctgtgtaactgaagaaccaacagtctctcaataatgttgatagaacatatcaacataccatcacttcatgggcctttgtttggactaatagactatagagcagaataaactttaacacttgtaaatagttgtgtgatagttgaatttatttcagcagtgatcgttgttgggattgtagagatagtatgagatagagctggaatatttataggaaaggcagtaaacatgtaacgccctaacatttaggcacgctacccaatatgattaagaaaccctaatcctcaaaaccggattactaataaaataag

SEQ ID NO: 21789 - DNA, 5117 bp, Cannabis sativa
  modified_base (30)..(46): a, c, t, g, unknown or other
  modified_base (2441)..(2445): a, c, t, g, unknown or other
tctcatttctaaaaacaattttttgaaaannnnnnnnnnnnnnnnntaccaaacatgctctaagtttcttcttattattattattgaattttagttacctgtattccacctgatcggtttgtctttgttctgattctattatgttcatccacaaagaactcgtcattatgttcacttccagtcaaatatgtccctgtgttatgaaaaccatttccaaacaattaaccactctcaatacttaaaaacaaaaaggcaaacccatatgacaaaacatccttaattgttctcaaaaaaataattttttaattataatgtcaaacatgcactaacacttcttaataatcttaataattacccgcaaagccgcttccaatttcaaatccctttgttgatggtatggacatgagagctttagcaagctcagcttcaagtttgtcaaaaacaggtgacccaagcccctaaatattacaaaatttaacacatttaaattaaggttttcaaagttatcaaactataatctatatcatttagtaagattttttatattcaatcacaaaatcaattatgagaaatttagaagtaattttgtaaataattgtcataatgtaaaattaataatacatagtatgtttaaaacaaataataatcatatgtatggacgcaattatagtaattctacccatctaaagtgtttaaaataaattgaaacattagtactagttttaaagagaaataaaactaataatttaacatgttaacatagtacaatgtattaaattagctaaacaaacatatttaacttgtaattcttattggtagttagttacaacaaattccaaatgtcatcaattaccaagtagttaatgaccttaacatagaaatacactaatttcaattaatgtttacgaaacactctgtaacattacatcaaaatagattatcgtcaaagccatttggctaaaatttgtgaataagttggcaagaaaagaaaattcaaattgaaatttcttgcccgaattaggcctcgagcctaattgacctctagacgtgagtctagtttgtcttagccgagacctataatgtcccataaacaatgcccgaaaaacaaatgagggaaaaaagtgtcttacttgtggacaattcctaacaaagcacgaaaccacacctccaattgaatcccctctctctcgaacatattcaatggcagaaatcatcttctcagcatattcagaattgggacaccgagcaatattgctctctatctgcttatataatttacaattttatttattaacattaatttcataaggatatagtttaaaagagaagcatgtacaaaataattataataaaaatattaaaatcatactatttatgtgttcataatattttttgagagttacacatgaaaaaacatgttttacttaagagtttttatatgtaacatgttagtaacttttctaaaatatttattttttattttagataatcgtccataattaaattaataacgtaatatatatatatatatattttttttgcaaatatgcgaggatggagaccgaaataggaggattaaactaattacaacagaaggagcactcctcgcttattacccgtaccaataaatttatttttagagagtgaactaggcaatgttaatgtgttcttattaattgtcataatattactcaatagtactaacctgatcaagtgtcatagtctggtgatcaaccaattccattggaagcacaatgttgccaacttgtgaaacataaccaagaacctaataataaccatgccaattaaaaaattaaatatgataattaatgatgagtttacttggtcaaaatattataatgtagcaatctttatcattattttatgtttaattcaaaaatctattttatattttagaaatattgtttaagaaaaaaagaaataataattgtatttcatgaaattaacatatacctcaattcctgaaaattccttgagaattttcttggcaactgctcctgcagcaactctccccacagtttctcttcctgaagctctgccaccccccttcaaattcatttacattttgttgttaaaatggtaaatattaaatacataaaaagtatatataatatttatgttcaagttatttacaataaaaatgtttaaattgtgtttgcttatttttgataacaaaaatatctaagattatattttaattacattgttatttgcctttaattttttgtgtaatataataacaaataaatattgtagcaaaaatatttaaattgtgctaaaagttatacttaagtacctaagtatggttcagggctagtcttagactaaggtgggctagagtacttagagctcacctatcttaagagcttaaataaaccaaaaaaaaaaaaatatcttctaaaaaatatacatattttttnnnnnatttttaaaaatatcatttattcttataataaggattattttttttctaaggcacatttaatctcagggtcagtcttgatatggttattaatcgagacgagctcaaatggtatgaaaggggttgtatcatcatatcataagtataaagtacctaagagtacatttagatgctaaaaaaagtatttaaatgcaattttgagcacaatttaagtatctttgccacaaatgtattttgtatggatttgccacatcaatacttagctacaaagtttcttttgatattgggggaggaggattcgaatttgaaatcttctcattgtgagaagaagtatgaaatcactagactatgcatatcatcacataaagttgatgacaagtaattacaatgtaattaaaagttaatgttggatactttgtctctaacaaattaacatagagtaactttagtattttatccattataacatatcttgatatttatttacctgaacagatctaattccatacttcatatcatatgttgcatctgcatgtgaaggcctataagctaccatcatctcagtgtaatcctgagtaagtacacataatattaattaagattaaaaatattctttaataagcaacatcctaattaaatggattatccatttcaaatcaattatcaatcctaatctaaggaaaaatagttcttaacgtgtgaacaaataataaataacgatcgcaaacatgaaagaacacaaagatttatactgattcagatagcttcattttacatgtctatttttgagttgttcaaaaaagaaaaacatgtccatctccgagcaccatgtgcaactttatttgatcaccaaaacaagaacattcaaacacttctaccattttgagaagaaccaagttttcaatatttagcttttcttttaaagaaagataattaaatgttataataaatgaattagacacatttattcttataagttgatagctggtttaaggcttaattagtactaataactaaaagggaaatttacataattactatttttgataaattttttacacttttactttaatttttattttacatttttatagtgttcgtaaaaacaacaccaaaataacaagcaaatcacatgaaaataacatccaaacaacataaaaaaataatgtacaaataacgaaaaaaccaacaacaaaataacaaaaaatacaacataaaaatatattaaaagattataatttatgtaaataaaatctaaaagactataaaaaaaaaaaaattaaaatttcgttcaactatatttttatcattttttattatttttgtgttattttaaattaatccctaactaaaaatggaggcaaaaaataataaaacttgaaggaataggcaccacattttacttacttgttctcttggatcaatgttaggtatgaatatattaatgggtgttccagtagtcattcctgcattattgcattatataaaatatcacaattatattattagtttcattatttagatcattaagctatatagctaattaattatatattaaaattgatctctaaccttcataaactccggaaagtattttgcacttgtcagtttctttcctaggagatacaacttgactttgatctggcctcctaaaacaaattaatacatatacatgttaagaaaaaaaatcataattagtaaattattttatgagttagtgttaaatgttaatgtaacgtttagagagtttcaggttttttcgttagagtatttatgcaactattatacctcctagttattaggtgtgtagatggatggcgttttggatctgatccagctatgatctgacctgatccagatcatgtaatgatccgtcgtcccaccccactagattagatactcacatcagatcaaatctgacttgacttattcagatcggatcattttcgacctgacttattcggattagatcattttcgacccgacttattcagattggatctgatttgacccctttttttttttaagaattactttaatttatatcatttgtaatagtattatttaatacaatattatgtttggtattgacttgtattaataaattgtgtaaagttataatatattcaataaactcaaccctaacacctactacgggtcgggttcgggtctggggttcgatcccgggtctaggtcagagtttggctctcgggtccaagtccggtctgggtccctaacaccgggtcgtgttcgggtccctaacatcaactacgggttcgggtccaagtctaggctcgggtctgggtctagatctgggtcccgcttttgggtcctgggtctgggtccagattcgggtcttgggtccgagttcgggtgtgggtcctggttccgagtttgggtttagggtctaggtctgggtctgggtttggattcaggtctgggttcgggtgttcggatctaggcctaggtcttgggtttgggtctgggttcggtccgggtccgaggtaagagtcttgatttaagttttttggatcatatcggatccaatccgaaaaaattaggcgggacagaacgaatttgatccaagatccaataagtatctgaatatttcagatcagagctccgacccactccaactaaatagatcttcttaacatgcttacctcctatcaag

SEQ ID NO: 21790 - DNA, 2107 bp, Cannabis sativa
gaatttcttcccccatttttctacagatctctgtctatatataaatactttgtctgaaaatattggaatgtggagtttttggggggtctgattctgactctgacactctctctcagaaaattcttacattttcacaatcaattctcgattccgatcaaacagttcgccgccggcaataatcggcgacggtatagtgaaactcggcggcagtttatccctcggagtagaaattatctcaagatctggttcgtaaatttcctaaacttgacttgtttttttcttcgataattctctctacattgcttcgtaaatttgatgaaatcgtttttcgaaattgaagaattagattctataataaaggcgtaagccggaaattaacgaaggagagagctggagaccgtacaggaagggaagcagaagggtccgcctgcggccacaaacggtcagatccggtatcgatcgccgtcatctgctgagcttctagaaggtcagacgaattctccgccgtcagatcaagatcatcatcttcataatcatcatagtcagggcttttttgaatcggagaaaatgtcgaagcgtcctggtggaggtcggcctctgggtcatgattctataggggataagatccagaggtacagagggattttgttgctcatttctgtgcctttgcttctcgttacgtttattgtttacgtgatgcctacgcgttctgaatactccattgctaatcgcaaggtttcgcctacagcacttagatccaaggcttcttatgccgttatttttgatgctggtagctcaggtagtcgcgttcacgtatttaattttgatggaaaccttgatctggtccccattggtggcaatctcgagcttttcttacaggtctttctttgttagtattattattgttgtttggaaattagaatttatgtttttaaaatattcatatagtaaatttctctaatgcagattaaaccaggactaagtgcatatgctgataatcctcgttctgctgccgaatctttgattggtcttcttgataaagcacaagaggcagttcccaaaaagctgcgttcttccactccagttcgagttggggtaagttctatgactactaatccataatggaatttgtgttttgttttccacatttgaatacttatgagattttttactgtaatgcaggcaactgctggcttgagatctttgcctggagatacgtctgaacgcattttgcaagaagtaatttctgctccttggtcttatgtatctgcatatctttattgattgtgtagcttactatgtgttctagtggtttttccattgctaatacatcaaccttgttttctaaggttagggatttactgagagagagaagcagtttcaaacttgagccaaatgcagtgtctgttattgatggaactcaagaaggatcctatcaatgggtacgatttatccatttcctatatggttgacttatggatttttttcaccaacacttgtgttatttgcatgagtttgacatgtacatgtacacttatttctttctttggttttatatgcattaagaaaaaaagagagaggcaattctttttctttctttttttaacaaggtgaggattagacattactggaacttaaattatagtacaatggtttttttttttgggatgaaggtagaactctgttttggtacttggcattatggcatttaccgttaagaaagtgccaatgagtttggagaagggaataaaagatccatgttttttaaaacattttttgcctcttgcccccaagattgggttagtgactagttagttggtataaggtaatactggtgaattgttgatgtgatttatgtgaacagttaccgtatgtaaataattaaaaaagatgctaatcaagaatcagctgatttataatcctctatttcattgttactgtatcgaatgtatctgcttaaccagagactaactttcactttaggtgcttgaatctcaaaagaatattatccattggctgaaaacaaatataggctttaacaaaaatgaaagcaaaagtaatagatatagaaaaaatggtctcttgagataccaaaatcttgattaat

SEQ ID NO: 21791 - DNA, 1464 bp, Cannabis sativa
ccacttgtcatcttctcattggtccaaatttttaattttaattttttaataaaataatatttaaatgttgttaaaaaatcaaaagccatataaatatataaaaattaaagaaaactaaaaaaaaaatcaattttttttttttgaaagtaatataatgtttaaaaataattaaagtataaaaatcattaaaataatatagtaaaattaattaaaactttttcaataaaataaaaacatagctccatcttcaccaaactaaaaaacccagaaatcaatcaaaccaaactccattgtcgaacctctacgaacatcgcagacgaagctccatcacatttgctgatctccacgaaccctgcttctcattgtctttccgcgaacccaaatctcgatctcatccctatcaatctagaataacaaaagggaaggggaaaaatacatatctcattttaatcatctcgagagtgcggcggtgagaaattttaaggttaggctcgcgaggggtcaaagatggtttgtacaggcaaaagacgggatagaggaggtggccagaatttgggtgcttcagatctggtttgcaattttgaaaaatcttttgtttgagatttcttattgtttctgtcagatctaatggctttaatatctaaaatatatttcttatctttcgaggcttcatctcgcacttcaattcatcccctgaatcagatttggtgctacgaagagaacacttgaaacttccttagagatccaacgactgtgtggatcactcctctgagggcattctgaaactacagtaaacgatcagagccaatagtataccaacgatcggagctctaatatgaactactttatttaatttgtggtatacccagttactcatttgtgttgtgttatgcacatgaactgctaggtatggatttgagtaatgttagaattttgtttatgaatttttttcttctggttatttgtttatgttattatttattaatgtggtttctgtaagttagtatttttttgttttctactgcatattgaaaaaagaaagaagaagagatgataatggtggaatgagaagaagatgagatacctttagtaatttaggtttttcattttaattaaataattagcaatttagtatttaagaaaactttagttttaacttacttttttaaaaaaaatattaaattatatatatatttttttaaaaaatttaaagtatattttatatgcttttatattaattttaaatatttacatactattttattaaaaaaaattaaaattaaatgatttggacaaatgagaaaatgacaagtgggcacttacctgacacttaacgatcaggtatgtcagaaccctagcagaaagtattttcattgcaaaaaatttaacttaggtggtgtttggttcacatgatattcattggaatagatttgctattccttaagagagctcaatcaagtaggg

SEQ ID NO: 21792 - DNA, 3741 bp, Cannabis sativa
tagtagagttttatttagggcacaaaggccaacaaaatcaaggggggaaattaagtagaggtatgccctagtgtttatttcttagttattcaagctcaagtttagtttttctatgctaattggtaatttagtggttgttatggtttgagtgaagtgtaattcaatttctaagtttaatttgagttggttttgatgtttggttgctggtttggggttttggtgtgatggatgcacaagtttgagcttgaaaactcaagcttggttcatccatggcactttttgatttgatgtgtttttctgggttctgttgcttggaatatgttggttgatgtattacaggtgttctggaaagtttggtgagatttggacatgttttgagcaggttttggattgtttgaggaaacctggtgcaaaccgattaaccggtttgccaagtcctgtaaaactggttcggttctgggactggtttcccaaacaatccatttcatcgattcgtgtccattttagagccttggttgggtgattccctgtttcttaaggtattgtagtttcagttgtctatggcagaacttttagttgaaggttgggtttcccggaataggattttggacgtgttatttacccaattatgttatgtgattaaggcatccatctagcatgaaattctccgttgaggtcggccaactcacttgaatttgaaaacgaggtaagaacaacgtagaatataatttatatatatacatatgtgcggatgtatgtatgtgtgaaatatatatccatgcttgtattgcttaatacatttttaacacttgtacggaagtagtatagagtgtattggtttagtgtgtaatgtttaagagtacactacggtgttaccagcacaagtacgagaaagtacaaggtgtgtgtggtatatcacttagtggtactgagggtacgaaacaaatcctaccaaccctcgtacaatgtcagtatgtagtgtatgtggtacagtggctgtaccctagtaaagaacgttcttacttatttgttaagccttgtaaataggtgtatgtgcacctagatacaagtaagtattatattatttgttatatgcttttcttattgagtttgtcgactcatagttctactttcatgtgtaggtaaaggaaaggcgaaggttgaacaagagtgagcttcgagctagggtgatgttgtacatgtcaaggcggtgcgacctggagtgttcgatctcgggacatcgggggttttattttgtagtcgctgtgcaacctaactaaataaattttgaattttttgtaaatgtttaaatacgggatcccgacttttgtaaataatgtataaaagtttataaattttagtaatttaaatctaaaggttttaatttgatacgatttttaagaaattttatttgattagcaaagatgacactataattgaaaaatcactgtatcgtgcttaaaaattagggcgttacaggacatctctttcatggcctactccgggaatgctcttctcgcggggacctgttcagcgaggttcacgctgttatctttccgggacggaaagtgaggcacttaggcagcttaatgattcctttgccctcttttattagtatccatgtgtcgccctggaagaaatgcggataacattgaccctccaggctttcaggacataccatgttctgggagcttgcagcgtcttttcttaaaaagtttttgcacacgttgcatttatgatgagtcctttaatatattacattatcagccgtcaaaccaaagtgtcattatgtgggaggcatgatttctcccgttttcttgtcagagtgttaaatgctgacttttggattttcgcgcacgtgtcgggcgcgtgtccctgggtagcttaaaacaacaacgattggacttaggcatttttctcatttgctgagtgttctttacgatgcatgcaatgatgggagctatccgttgggaggtgaggtaccctttcaacttttcacatccaatcatcggacatctcttagggcgaattgaagcgttggcttcttatgaaaggtgcccctcccatgcatcccataaataccttcagcggccattccattttcactcttcttgcccatcaagtcaaaacctttgagttctctccttcctagtcgcattttattgttactatcgtcgaacaccgatcctcccgtcgtggacactacaccgaaatcttcaattccaacctcctctcttcaaccggtaagttcttcgtttatttgagagttttttagggaatcatgaatggtgcacctgcttctgggataccagtttcagtggtgtcactcttgggagttttagggtcaaagaatgacccttttcttttttctattgtgccgacttttgacatgtacattatttctactccagatctcaccggcccttctgagacggtaggcagtagctcttctgcaaggaaaaggcagaagctcgtggtgtctaccctcaaaatgggggaccacccttggcctccttattcccaactgaggtaaggccagccaagagctctccctttggctttgttaagaacgccttcgggttcgccttccccaggagggcggttccttttgatcctctcgagacgcagagagaaaaggaagtgagtagggccttgaaagggcgtctagaggtgaaaaggctctaagtttgtcggtgggtcactgtgatgtcagcggtttgcaaggcggagatcgtggacgacctgcacgtggtgcctccgacggataaaatcgtggagattgaagccttggagaatcggctgacctataggttggggcgagaggccactccttttgttgcagatttcttggaccaagtggctgggagtgcctaggaattgcccacagagacttgggcgtcttgtaacagcgcggacgcttttgtgctggcccattctacaaaatggcaggccatcggggtaagacttcgagatgtttgctttttattattctctctgtttgcacctatttgctctatcccctgttctggtacttcagccttctaacttggccttatttttttgacaggcggtcttgctggtagaaagggccaccgtggaagtgggtgcgatggtgatagagttacagcgggacagggcgacaaaccatgacatgtgcagtgccaacgagaccctccgagctaagcttaccgacgccaagtttcaaatggagggtctgctacaggccaaccaatagctagaggaggaaagtgcccgcttagcctgcttcattcggaatatgaaggctattcacgaccattatatggagactatgagcggatgttcggcataggtctgtcctctctgtcaggcggcgtccaaccgtgaacctctggcccttttttaaatctgtttgttttgtttgttttttgtgtatcccctgttttaattacacttttttatccgcagagacagttaatactttgccttggctgcggggttttttagtagtggaataggatctttcttttttaatgttcctttcttggagacttgttgtgatagactgtctagggactagttacattactgaagcacctggttccaacggccagtgtttcaaccctttttcttttagtcttgattatctccaagttgatccacaaactgcctttagtatgaccctcactttcctaggggtgcgatgcttttttggttcgccacccaaaaggttttttgcttggccagaagatggcccttctc

SEQ ID NO: 21793 - DNA, 2074 bp, Cannabis sativa
atatttaccaattaccgctttgattcctttctttaattcttctaaaccccaaacctccttcttcctttgttttacacacatttcatcccaagctaccagcctcggtcggggtactggaactactcaatcatttccataagaaacctttccagagctccacacttttacgcataatttattctctacaccattttctcaatcaagattcacaatcagaagcaagaaagattttacacaacaattttaggaaaaataaaaacatatacagtaatactataagttcaattttaattaattaaaatgaaacataatagtagtatgagttagagacttagttgattagatctttttgaacctttttgtgttagattctaggttcaggttagttattcatattaaaaagagtaagtaaatctcattttgtttcaatttttagatacttaacccgtgatttatttatttttatagcaatactctctaatttaaggcgaacccagtctgactgttatatgccagcttgaatagaccacacattttattgattagttacttaaatatattaaaattttttaagtaaaaataatattttcatatccaatttgcaagtatacacgaaaaaagtcaatctggaaggataaatgcgcttctatagtcaacgaaaaagtgttgtatttcgtcaactattacggaatatgatatgaaaacttactgaatcttattctaaaaaataaaaagaaagaaagaaaaaacttattctaaatacccactattttaccataacatcaactttgttgtcctgttttgttttgtgtcatgtgtcactaattgaaatattaataaattcccaattttataattcccacgaatcccaccatttattaaactatgactcttgttttttattttatatgttcgagattttctcattatatagttgtgtggctgaaatgttatgtattgcaaactatatatatatatattagttggattttttttggtaacatattttagttggattttgattacaacacttttattcatgattatttatttttttaatgtatatataattttttattattattttagaaaattgggagctagactatattttttgttctgccattttcctttctctttcactattgttttaatatttctcattcacatttgaaacaaataaataaaagaaattaagaaatactcttattaatttatagttacgtttgataatatttttatttttcaatttatattacaaaaataaaagtgaaatttgtgtttttaaaaaacaaaaaagcgttttatatatagttacttttattttttaattttaaaaatagaaaataaaattgtgttctacaacttttatttttattttattttttgattttatttaagtcggatttagatccgggtctagggccgggactgtgggtccgagtccgagactaggatcgaggtggagtccgaatctcaaaatttaggttggagtcggagtccaaagtattaattaaaaaaaactgtttaaaaaaattttgaaaataattttgttttgttttcgaaatttttaaaattttaattcacaattaaaaatttaaaaagtgaaaattttatagaatttatttttagaatatatttttacctttttaattaaaaaaatagaaatttaatcaaaaagaaatatcactaaacataccctatgttattttttgattattagtgaggatgatctttggataatataaaacgtgtttatatattatgtcccctcatttttttttttttcaaacaacgtatcatatggtagagattattgtttgaaataatttattttttaaatttgtatgacattataattaattttaataaagtaggtttaaataaacatatatttaaataatacaatgaaaattaatattggtatatattatagaattcactatatatatgcaaaagaattaaataagataacgtgtcatcgatcatatgtatttggcgctacaaaattatccactgttcatttattatgattgtaatatatatattttcaagggagaactatatatataca

SEQ ID NO: 21794 - DNA, 3098 bp, Cannabis sativa
ctaatcgtggcgatggccaagtcgaagttccaaatcaacatcatcttcacagctagtactcctctgatcatcttccaaataggatgaaccagaattcatccttaggctcaaatttccaagatcatcttcatgattcaaacccaaattagagggatcatgaccattaatacccctcaaaccaaactcatgattaatgttataatgaccataattaacaggaccaccatatatatcatgacttggctgataatacataccatgatgatgagaaggtggctgctgcggatgagtactactactcgtccaagccgcagctgatctgttggctgaaaacgtcgtcgtaaagggagaattacccgccaaccccatttcagcttggtaattattagaacaagtagttgtaaaagtagggttttgctgcttggctttggctcggtctttacggtggatattcatatgtccacctagggcttgagcgttcgtgaaaccacgcttgcaatacgtgcactcgtagctccgcttgccgccaccgccgccgttgccggattcatccactgatcggctgaccactccgctgttgtcgttttcttcacttgatgtcgttgtatccgaaccttgtttattaggttccataataaagttatgtagtactacttccgatgatatatatgatctcaagattttttgaataaactttgactcttcaattttcacagagagagatggagagattaaattattagggttttaagagggaagtttagaaaggtatatgaatgagttaatatatagacaattgtatacaagacatatatgaatataacaattgtggcatgtagtgaatagttgtaagtatattataaacaattaattagttttggattatgtagacagactctttcgtttagccggctttaattctcctatataaatatttatttaatttttgtcaagtaataacctaatgagttttaactcacattctctcatctctcactaaaaaaaattattgttattaatttccttagtttgaataattttttgttttttataaagaaatccttaaggtggaccattgtagatggttgtgtagctttcctaggattggttttttttatttttttttttattttttttacttagacgcgttaatttgttacatgtcatatatatgacctccttgtggtacatatatgtgtatatatagatacctaaactaagctacagctactctagttcatgtgcctttcaaggaaatgattttatgatatatacattatattatatttatatagctcctattatactaggaaaatgaatctcaatattccacatgctagctaataataattttgatgttcacactaattataatcacgatttcatccccgctagctagtgaaatatatgtttataaaaatgtatacatatgtaattttagtacacattttatgtatatatatacccatatatattgctagcaaactctagtatcatcatatgctctatattaagatgggaactctgatcacgaattaaggagagagtgatagttttatttaagaggaaattacatttgattttttaaattttattacaaaaatatgacatttttaggtttggccatttttatggtatatttatgttttaaaattattttataatattttttttatgacatatatgtgtaaattcaaattttaaaacccacatgtttagatacattattttaatatatatatatataaaatctcaaaactacttattcttctccattaaagtacctgcctatacctatctcactcctcaatacctcacctactagcgacacatttagcaatcggcaaccgacgactcaaacgaactctgaatccgagatctccaccaccaaaacattaaaggatcgaatggattttaccgcagttggagatctagaaaccttaaattgaaaaacctatttcataataaacaaatcactactacaaaaatattttttttagacacttttaaatagtcgtttaaagtattcccgtcggtttcaataaccgtcgcgtatacgaccgtcgcaaaccggacagaataggtgactgttcaaaaccgtcgctaatgtagacttcccaacggttttaaactgatgcctataacagggttaggcgacggtttaaccgtcgcctatagtatagggcatggtttaaaatcgtcaactataccctgttataggcgacagttttaaaccgtgccttataggcctagttacgtttttaaagttttttcagcaacaatttttttcagtcattacattggaaaatatggaaaaaatagatttgctgtaattttttcccctacattaatttttaaattttttacaaatctgtatagtcattatgtcttttatacactcatcacttctatacatgccagctactgtagagacgtcacacctctctgttgtaatctctcaagcgatttaagcagatcttgtacactccgtggttgtggagcggtgtatagttcgacaagaactgctctgtggcggtgggtgtacggtgatgcgatatcacattggtagatcggtgttcaaggcacctctgatggtggcacatgggttttcaacgaggcacccacaggttcaagctttgacatggtttgtgttccgatcagtggttcaagacatcttcataaactattttttttgtaataatattttttatttttagtagatatttgcatataattttttcttaattattatttgtatataatttacgtgtatatactttcaatatttgttgtatggcatacaatttgttgaataaataaatctttatatcaaatttttcaaattcatataaataacacattatattatataattttatttttataaatatattgaaaaataatatatattatatatttgtttttatatataatatatattatatatttgtttttatatataatatatattaatattttttttatttaaaaattactatgaggcgtgacaattaaatgtggtgccaatagactccttttaggcacgaatctataggcacgacagaataagtacgacatgtcacgtctaaaaatatatt

SEQ ID NO: 21795 - DNA, 3042 bp, Cannabis sativa
gaaaaagcataacaatacaatagaaaagaagataacccaatattcttgcaacctcaagcatcacaaagaaaataagtttggcattacaatacagtaagcacaaagataacccattattcttgtaacctcaaactataccaataaataactttgacatcacaacaacatagccactatgacattgcatacaaaattactttccagtctagctcaacaaaatttcaaaactatccaaaatgaacgaataacacagtgattgtctaggggcagagctacgaagactatcacactggattttgtctaaattgttataatattacatgtaaggatgggtgtttacaggcacatatactttcaacagccaaagcattttgatttaataacaaatttgagaacaaacagacaaacttatcatttctttggaaaatcaactccaccgaaaattgagttcattttgcctatagagaatgagttcattttcactgacaagagtctaaactgtgaagtgggttaggcggaggttccaactgaagccacagcagagagaaatcagggttaatggtgttaaatcttaaacttatatatagataaaattccaatattacaagtaaatcaaagtgtaaaataaatataaacagaaacacaaatgctaagatcagagatcaacattaaaaatttacaaatattcaaccagctaactcaacaaagaaaaatggaagaaaaacaatttgccaatccaacaatgttagaacagaaatacacaaccagcccagaacaagaattcttcaagtctataattctactctttcactccaacacaaacatttaaacatattaagcagaaaaattataagttacagaaaaaaaaagagtacaatcattatagtactcaacaacaggaagcaaggccagtaaaattaactaaataaatttgaaatctcatcacaaaaaagaacaaacatacaaaacagtaaacaaaatcatcccaaatgaaccaattagaacctgaaatttcatcaattagacataccaaacagcaaacaacatacaaataatcacattacacccaaataaattttactgggaaagaagcgcctagtgtatagccatatatatatatatatatatattgatttcaggaagaaagttaaatggattaacctgactattatggttcgtatactcattgtcagttgaataactatcctacataacatactctaatggttcaaatgagtatctgggtttcaaaattagtgttcgaagaaggccaccatcttccacaattattgaaaatagggtgcaacaaaagattttaacaagagattaatagaaaattttttaaacccagttaatatataattgcaaaagagaaaatgaaaaggatgagaagacatatgtatatgtttatgtatatgcatatttgctgttctaacttagagaaatgaaaagccaccgaagccaaaattagctagctactagtaagtctaagttagagagacagagacttactacttgagaggagaccagctgaggagagagaccaccggaggcggagaagagagataccaccggcgacaggaaatggaatttaggaagttggaatgagcaaagaaaaaggtaatgaaagataaggaaagaaaaattttgtaagttttgaatttttttatttttttttatttaagcgtttatatattgcaactataccttcaacatttctcttttgataagtaaagtaaaatttgcatagaaaatgattgatatatttccttttctttttgataattttgtagtgtaaaaataaaaattaagttgtagactctatctgttttgtttgatacctaaattatttaggatcttttaaaaatttacaagaggttataaataaagaattagactaaaaactatttttaatgctaaaatagataagaatgtagcaaaatactttttttttttgaagagtatacttttaaggtggacttttgttaactaataaatgagctttaatttaataaatatatttcataatataaataatagtagtagtagcaataataatactaaacaagaagatttttatatgggtttgaagttaatccacgagtccatcatattcttaaaatttgatgagtttatagaatattaatagtataatgctcttgtatttttgcttaagattcccaatttggctgtccccgaatttaggacttctttccctatttataggtgtttagggtgacagttattatcctttgatcttatcttcataattgttcataaaatgtagatgattctcacatttcatatttacaacatatagaataaatagatataagtgctataattgcttttgtctttatccaaaacagttatgttgactaagtttctatgcctcacagcatttactggcaaccgctttttgtgtttatcttgaaggtagtttcttttaccgaggtatatattatatgtaagatgctcctctcgttctttcataatgctaggactgattaggcgtgttttgcgagatactatcctctcgtgtcattcatgaatatcttgaagtaaatcgtcttttcttcacatcccttagtctttcaacatactcataatgtagatcaatgagcgtaagcttttaaaaaattcattatctaccctttctagcaacttgttcctacttagacaaaatggggctcatgggaaatgataaataacattttaaattagttttttaaaagataaaaaaataaatttttattggttgttaattttttttaattgagtgttaatttattttaattgggtgtcaaatttttttttttttaatttttttttataacctacaaacatatacatcttatacaatcttgacttttaaaaatcatataaatcaatggctaaaaagatatgtgcatagtataggaacaaaactatagtcactaccatcaaatttctctataatacctttaccttatatgtttctcaaacaccaacaacatcttcaattatttgtgtttatacaatagttaaaaccaaaaccattgg

SEQ ID NO: 21796 - DNA, 1488 bp, Cannabis sativa
agtgaatcaacatatatgctttctataaaggtgaataaaatatgacatcatgctcaagattactataaaatgatataacacagtagcaaaaagtatagtcaacttggaaaaagaataagcagaaagcaaagtttggtgcaggcagtacaaattagtgttatctcacatggctgccaatcaaggaattgtatatatatttataatttaactaaagtcataaatgcttaatttatgttaatataattcctacgcatgtaattaattggcttaaacaatttcacaggaaaattaccccactacagaattcaaaagcatatgtctcttgtctctcctttttcaatattaaaagaaaaaaaaatgtatgtgagtttgagagtagaacaaaatcaaatatttaaagtttctataaaataaaagttgagctctttcttagctttatatttcacattaagcaaagtaaggctttaattaagaattaagacacgaaaaagataatcaataaatgtgtggaaagtacgtgtgttgtttccaattactagtgatctgatcactatgtcttttcctcttctattatgtgtaatgttcaatcaatgatcatgttcaccatgtggcatggcaattaaacaaattaaaatccttggattggattattttttaagcattggaagctatatttatttttaagatgaacactactttcatctgttaataaagtaattaattatacatgcggatggataacagagttttttttttcaaacataattagcaattttcattatatttaattttataaatataatcataatttataaatgaacattgcttgtaggtactactaatttagcactatcacagaatgacacttcataaataattagcagtgtattataatgattattaaataaaaatatttgagatccattattttaattatataaatagtaatataactctcctagtagtacttatgatgtcatttagcatttatctttataattgtatctcaaccattgttcttattgttatgtcacttacattgtggcaaaatttctattctaataatcaaaattacaactttctaaatgaaattaatatatatttcaaaatatatggaattggtatgtcaaatatacatacaagtgctagtggagtactaaatttgaaatatttattaagatacaaggagaaatatgtcatatcttgtttttaattaagaataattagtaattatgaaaaatgttaaaaagtattagtggtacgtggtattacttaaagtattttattattattagtataattaagtattgaatcacataattcaatttaataactattacaaatatcgctaacatttataaggatagtgttcgacattggacatactaggtactactcgtacctaaaagcatctccaatgatgacactcttaaagggtgtcaaaaatctctaaattacctaaagatatataatattttattttatttt

SEQ ID NO: 21797 - DNA, 3186 bp, Cannabis sativa
tgttgcaggtaaggtgtttgattgagtatcttcaaatagaaagctttctgggttttgatcaaggtaagcaaattggctttgaaaaagaatcctttatctataaatcttactatactccaatttgtggaaactttgaaccttactcttcttctttctgttgggttattcggcgttgtcaattatgagttttgaattattatataaatatatatatgtatatacacgtgaaaatttgaatcttacttttagtctttcttcttgtctgttgggttagtcggcgatttcaataatgagtattggtagtctttcgttttgtgctttgaaactacttttgatgttgttttagaaagctttagttttatcaaaaagctgcttttgcttcaagaagcgataaagatattacttttcatatatcagcacataccatgtctcactttttgagtctcttaaacaatattttagaggcacttttttctaagatcgtcggtcttccactcttcccttcctaactagaatatttatttgtttggttgaataaagctgttgactgttgagtcctcaattttagtattctaacttttgctgtcaattgttgtcacaggaaaagtcaaagcttattggtcgaccttgttctttataaaagagcatacttgagttacagaacatttgaatcaatccatctatttattttggttgaaatagaacaattgaaggaagagtctgtctgtgaaagaacacaatactaagaaatgagtggaagttattcttcagttttgaggactacttccttacaagggttaatgagtttggaggaaaatgaggatctgcaaacagcttcatctatgcctacaataactcagccaaaaacaccccatgaacctatggagttcttatcaaggtcatggagtatttcggcctcggaaattaccaaggctcttgctcagaaacagaagcaattttctattgacaagaatcctgatacaatcagggaatcaggtcttccaccaatagtaagatatccttattctttgtcaactttttttgatgtgcataatagtttcatatccttattctaagtgaatctgtttgtatttgcagccaggcaagggtggaaagtctgcttacacaaagagcatggagtcaattggaaaatggttccaaactaaggagactagccctagcatactgaagaagaaagacaaagctcggatagaaaatgcaagagtacattctgccctatctattgctggacttgctgcagccttggctgcagtggctgcagaggaaaactctggtttccatggatcgaaaatgagggtggcattggcatcagcaacagaacttttggcttcgcattgcattgaaatggctgaggcggctggagctgattatgaccgtgtggcttcagttgttagatcagcagtggacattcaaagtccaggtgatctcgtgactcttacagcagctgctgcaactggtatgtgctgtttcatcataatactgcattccaagctgtaaggccaatacatctgcagcctttcaatacttaatctaaactgttcttttgttttgttttaaagctttacggggtgaagctgctctgagagcaagattgccaaaagagtcgagaaagaatgctgcaataagtcctttcgaaaaaggaatgactgaaagtaagccacaagctgtttcttgtagtccaatggaggatgaaagttctctgtttgtaggagatttgttacaagttctacccaaaggtacactcaaaacattttttaactcttttgatacaaaagaatttggtcccctttacataaaacaaattactcttttcaattcacaggaggtttacaatggaagcgtgtcactatccacatcaatgagaattctcatgtcataatcaaactaagaagtaaacatgttggaggagctttctccaagaacatcaaatgtaagcattttcaatactccttgccttgtaacctgtgtattttcttcttaaatgcataagagtaacatgttaacaatcaatttaaatataccctatgaataggcattgtttatggagtctgtgatgagaaatcggcatggccatacaaaagagtaagggatagttcagaagaagttagttttgggctcaaaactggtcaaggtcttatggagttcaaatgcaaaagcaagactcataagcagagatgggttgatgggatacaaagtcttcttcgtaaaatcagctccaatgaagagagtgatttctctctgggatttagttacagtatgtgatttcacttgtgtatatataaatatatgtgtgtagaacaaaaaagttaacacacaagagaaagaaaacaaaaaaccacattcatgtcatacttcctttacaaggagagaagagtctgatcattctacagcaacaaatacaattggaaatcacacaaatttttgcagattcttataatgttgagtcacttgaaaatgatgattctgtgttttttctctttggcttgataaatgccttagctttgccaacgattgaatctggctaagctttttggaatagatgaataataaggccaagttgtaccagaatcagataaaaatattcaattgactcgtgtatgcaacatcgttatcctttttctaatgtagaataattagtaaaaatagattatttatagagtctattttgcaattttacaattcacattagagatacttaaatagataagcattgatataaacattgttattaggcaccaataatgtttaatatcttttaaatatatgaaactaacaatataatattttgcggtggtgcccctcacgtgtctaatctttacatttttgcatgtaataattacgataaatgctaagagtcatgcaccataagagattaattatcaccattagtgtaatttaatatcagttattatctattttggtttaataaataacatatgaaaattattaatcacttataatgtgccacattagtatagtgttatgttcgagaccttaattatggaaatttcttaccttgtttttctctctccttttttatttcgaataggagagaggagagaggcccgaatagaagccataggtctcaagccaattggggggtcttgggctaaaaaatttaattggacttttttagtatgaaaaaatttatggtttttttttttt

SEQ ID NO: 21798 - DNA, 8122 bp, Cannabis sativa
taacttaattctatgtttcggcttgtttcagaatccgattcgagggtttattaatgatagccctgaccaatctgaggtaatagtgtgtgtacatgttatcagtgtgttgtttatccactaatctagaagagcaaactgaacctttacttatagtcactagtcttgaaactgtgtatgcttagatttatttatttatttttcagggtgatcagtctcgtcatgtggatgatcttgtgagaagactggcaccaagtctttctcaggttcattacttagaactctgttggccaatgcttacttttctatcactgtcaaaccatagctagtgcattgctatcttgctatttgcatagagcatttttttctatcaaattggataaacttcctaattcccaattatataacttatgcttctgtctaatcatgtggtgttacttgtacttcatgccaaatataatataaatgtccccgataatctcaagctcaaacttcaaatgacccgattattgatttctgaatgggacaacagacacggttataattatttaatctaattcttgcagggataaatctagtactgcgtgtaatatctatatactgtggctagaaattgtttatctaagaaatcagttagcaaattagatgtaggtttatagctttgaaaccggttttactttaataaaactgtcacaccttttggtgaaaactggtgtttacatgaatctagtgcctctggcttgttgaaaatttagggcaaggatattatcaaactttctgtgactcttaaattatagtatggagtaagctaccactaagttatgcgaagtttatggaattgagttccaacaaaaaggaaagaaaaaaaggttatgggattaatcagtagagcagggaatctgtatttcaataggtcaaaataacaaatatctgtctgcagaggtactaaatttgtgtcctcatcccttgatagacatgttgattttgatataactatcgcagatgtactcttctgtttctctccagggacattattatgcatttgatcttactcttggagtacatcaaatacttgagttatagcaaggcaataagtaatgcagtgctgctttttgtcaatatctgttgcttgctttctagtcatctattctctttccttccactgattcttttttagcaatttctactctagttcggaggtctttgtatagtcaacagtttatctttgctataggtagctccacatgaacctcagatcttaacttatttttttcaattatcctcaccaactgccactgctaggctagacagctccatgagttcaaaattttatggtaatgcttgttagggtgccaaaagggtgtgttgttataacttattgttgtacttgacacttatcattcatagagctatgctatcatcttgccataataaattattttggattgataagtttttttcagctcaaccttcctttgttttgttggagaaccactcccgtaattaattgcttaagaccatcctttattgtaaataatatatggtttgtttttctgtttattgtttgactaatatttgtggcacatttgcttcattactctattaatgtataattggttttgtacttaaacaattgtcttcaatttgtgcaaatttgtttgccttagtaccacactcaacataagtttgatgcattttatggaaggcttctcatttcatgttttgaatttacacaattgttttgaatctgattatagatataccttttctattttgatcacagtacatgtgtaggatttaatgttgacaagagagtatttttctagtcaaatcttgtgtgtttgttagagaagccatggatttttagcaaggatgaaaaaaatcaatattattggcatatttttgttgaaaatatctgaatttataaggttctgatatttttttagtaatctttgtagagaatcttgtaaccacattaatgattctcgtaactatagaatgggacctaatgatagttattaatcaactatctgcaatatttatactttaaattattcatctacttgatttggttggtttaatattctaatttacatgtacatatactcaaagtttatatcataatataattagtattgattgatcaagaccatatgaaagttacttttgaacctctaagagtttgttttggtattgatatcttattaaatgtgtaaaatattattatatttgtatggttatgtaatttccaatatttttaaccctgattcctagtggcttgttgttggttatggaacggtgcttctataataaaattgtttgtgttaatcagatttgtagcttatggatgtctcattatcttctcattctgcatgccaggatatatttaagaaatctatacatgaatctgagaaggaaaccattcacagtggcactaagcaagatgatattcttaaaaaaggttccattaaactctgcatttttaagtactaagacactcctccttcccacttatagttatgcattaacgtgaattattttcgaatcaatttgtaggagtcacaacaccagctaagaaagttccacagtcttctcccaatccaagtgtatgaatgttcagtcttttgcttaaaattgttgtaacttgctattcattttcgtgtgttttatttgctttaatgaatttgaaatttgtaacagatggttggtgctggtggcccaactcacataacaaaagatatgaaaaatgttgatgaaagtggcaagcaatgtgaactaaaatatgggagctactgcatttggagtcgtgagcacaaagaagagatgaaggattcaatggtgaagaaattgaaggaccgattatttgtcgcacgagcatattttcctactattgcgaaacttcccgcacaagacaagttgtctcgggagttgaaacaaaatattcaggaattggagaaaatttttagtgaatcaaccactgatgctgatcttccaccacagtaagtttctaaaaacattttatataatttcactattgaccatctgagttaacagctacccatactaccaattgtcacgtatatttttcagttgacttttaatttttcaatgttttgccattaattattcttaggtgcatagtttgctgccagtttcttattttttctgcttggacatttatttgagcaaggatttctaaaatttctttcatggtatatagagatgattaaacatgagcataatactaactgacgaccctgatacggaatatacataaacagattcaataatagcctccagctgaattattcttttacttctccttgatccataatgtcaactatccttcaagtatgaaggagccaacaacttgctccttttctgaatatatttgttgcaatgtacaatgatcaggctgggcatggtgggtgtgaaatcttgtattgattaagggtggtgtattaacatgtcattgtatatatttgatgttggctttctctagtagtaactaaagaaatagatgaaacacaaccttaaattctgatctctttttagagattttaattaatttggttagtttgtgatcctgattgcatttttttttttaatgatttgcataagtagatccatttaaatttgtttgatgattgtctagacaagatcaatctatttaaaaattcccttgaccctagtgatcgagctctagctcttatgacaagttagctttagatgatttgcaatacactaatagttatttttttcatgttccagctttttatgtttgtatggtttttgaatgttgattagggtggagaagaagctaaagaggatagaagctgtaatagcaaaagctaaaacattccctgtggactgtaataatgttgataagaaattaagacaaatatatgatatgacagaggatgaagctaactttcatatgaaacaaagtgcattcctctaccagctggctgtccagaccatgccgaagagtcttcactgcctgtccatgagattaactgtagaatattttaaatcatcaagagagacggagctctcctccactgagaaatacagggatcctgctttgcagcattatgtcattttctccaataatttacttgcatcatcagttgtgataaactcaactgtaatgcatgccaaagtatgttcagatagtctctctaccttctcttgctgtgcaattctttttcacttttctcattatggcactgataattctttttccttttttcaggatagtgtgaatcaggtttttcatgttctaactaatgctcagaattattatgcaatgaagttatggttcatcagaaacacttataaagaagcaacagttgaagtgttaaacattgaacagctttatccggacaacaaaaacatacatgtgtcgttgcctgtggaattccgtgtttccttccatagcattgacagttcttcacccattgcccaaagtagaacagaatacttgtcaactttctctaattcacactatcttctacctcaaattttccagaatttgaggaaagttgttgttttagatgatgatgttgttgtccagaaggatttatcagccctctggggcctcaacttgggaggaaaagttaatggagcagtgcaattgtgttctgtgaaattggatattctgaaaagctatctgggtgagaaaagttttcacaataactcttgtgtttggatgtctggcttgaatgttattgatctcgacaagtggagagaactagatcttactgaaaagcaccgcacattggtgaaggaggtacgcaagcaacaagcatctttgcttgacaaatcttattagttcatttgtgcaataatataggctcacaatttaatcatatttatttaaggttgctttggcctttcccttggcaagagtctactaactcaatttctctgaatttcttctgtgttgattttgttttctaaatctactgtaagctacttacatgtttttgacttttatcttattctttttaaaatctatgtacagttgagaatgcaaggaccaagtgaagctgtagcattgcgtgctagtttgctcatctttcaggatttgatacatgttcttgatgactcgtgggcattgtgtggattaggtcatgactacatgcttaatatgaaagccataaaaggagcagccgttttgcactataatggaaacatgaaaccgtggcttgaattgggaattccaaaatataagcattactggaggaactttcggaaccaagatgaacaattcttgagtgattgcaatgtgagtttatgacaagcttgactgtgttggttttctggtagagattcctggagacagtgctcggaagaaatttgtggatgttgattttgcagttgctgaccttattcatcaaaaaaccccaaagggtttatgatttggaagtggagattgccatcttgagtttgacgaacagtaaattctaatttttttggtaaatataattttattcacttttggggagagcacaagggacaaagctctctgatggcaaccaaagtgtcaagtcaagagtattagaggaattgaaatgagaatggcaattcatctagaaagtgatttaagtagccttttggcttattttgtcaactgactgggagtggagaagcatacaaataattatgtacacgggaagttgccctggatgtttggttcatagatattcaacatgccatttcacaatataattcactattggctgtaaagcctgactagtattgtatgccttaaaaggaaatcattcttctaccagggtttgtattttatttatttttaacctttttcctttataatgtgaactagttttggtcactcacgtgtgtgttttcttttcttcttattactatccattgtcgagatgagagaaactacattttcatttagtctaaatcagtattagattgtggcatttgtagaatgaactcttgatcaaatacagcaacttgggttattgttaattaaatattgacacgatgagatccagaaaaaccaaaaatactggcagtggtattacaacatcttcagataaagcacttgtccatttcttattgcagacttataaccacgcggggccctcgcccagagtgtgttaataattatttgaacctttggcttggaagtattttccttgacgaatacaaaatcaaagaaagacgaaacatcaatttagtacagacaaagattagcgtacaccgtggcaagcatttctatttctagaaacgaccacttgataaaccctctaaactccaaaaagtaatgagtacagaaagaaagacttaaatttttgctgactttcataaacaagatgatcattctgcagattatacattatatatccttaccttccacattgctcagactggaaagtatttctcatagtaactgtaagaacatctcttcaactaaattttaaaaaataataataaaaggagagattaatgacaagtgtagaagggatagtacttttaagctctcttgggatttttcttttctttttaaacaagaaagttatctaatagtgaagagttgtgggcgtggcatggtatggtggcctccaagccgaagctgtaagcaagcaaaggtccttccagccaagtttaagggttccattgtcctccaccaaggtgtagccatctgaagggaacatgccgagaagtagagtggcctgcgtggcagcattgcctgcaagagagatgccgcgaaagcctgactgctgaagcttttcccgccagttgtggaacttgacgtccctgcttcttgacggccctcccacggccaacacgttccttatctccctcgatagcagctgctgctcaaccacgtgccgctcctcactctcttcgtcgtagcttgctcctagtgagtcgaacagcgctgagtagtagtgaatcgcttccacaaaccttcctaaaaacgatcctgcgtggctcaggtcctgctccaccactgttaccacttttggcgccaatctgatgtaacataccatataataagaatagtgtaaaaataaccatgatcaataaggtttaattaatgaaaaaatttaacatgttttttttttacttttgttcttttagcatggaacttgaagcttcttttattttatttttttcggtagtttgaattggcttgcatggtgatatatatatgcattcacgagaaatgacaaattgcattatttgtaaagccgaaaaggagtggacataattagcgctgattgtctttcaaagtacctttcccttttatacataaaggagaaatggcaccactgaaatattgtttaggccttattacacaaatctctttgtatatattaagacccatagtcgaaaacgtccaaactatattactcaaaaagcattggtcttccgttactggggagagagtggaagatgataacaaaaaggcaaagagaaaaagaaacaaggtaccgtaaaaagaacaaataactttgatgatcgagttgtatctttttcaagtatgagtttgtaaaagtgaacaattgatatgtatatatatatggagagagataaagagagagaaacaaaggagagagagagagattgttattagttacctctgcaaaagccacaacgtgttggtatccgaacccgtaacatcgtaaagtgaatgttgcaaccaatggacagcaacggcctcccgcttgctaacattcagcctctcagggtccaaattcccgaccttatcggccaccggaaagaattcaaaaggaagacccaacttgtcggcgaaatcagtcaaccttttaccggtggcctcgagtgcctccatcgagttgcctaggccagtcagtctaacgtaagggggtccacctggtctagacgccaatatgtggaaaaggcctggccattgcaaaccctgcatgatatcaagatcgattatgtgaaccctttcctctctttcaaacgcctcctggatcgcttgattggctgtgaaatgagagaacttcacgaacggacttatcccattgaacacctggaaagccgaagccatcctctggctatggttttgcggaaccccaaccgaaggcatagccgcgtatatccccaaacacgagct

SEQ ID NO: 21799 - DNA, 3219 bp, Cannabis sativa
tttctaaataaccatcaacctgaataggttctcacaatgcaagcccctcactcgtggttcactatacctactgctgctacttctcactcaaaccagtccctgccttctggtgattcatccttacagcagcaagaacatctctcagaatcaccaactctggagtctccttcatcacatgttagtaattcacccagtattgaacttgatttctcaactaaagtgcctcacactcctactgctagtgtagatgctactgtccaaatttcccctgtacaggaactaaatgtccctcctgctaactcaccacaaggacatcctatgattaccagagccaaggccggcatctttaaaccaaaaatttacattggtgaagccaaatttgattttacagatcatgaaccaactcgtgttgaagatgcccttcgccatcttagctggtcaagagtaatggacgtggaaatcattgctttgaaaaagaataagacatggattctggtaccattctcagcagcatacaacattgtggggtgtaaatgggtctatcaaattaaatacaatgcggatggtagtcatcaaaggtacaaagccaagcttgtatcgaagggttttcatcaaagaccagggttggatttcaaagagacattcaacccagttgtaaaagcaccaacagtgagagtggtccttacattggatgtatcaaagaattgggtgattaaacagcttgacatcaacaatgcattcttgaaaggcactttgaaggaggatgtatacatgatgcagcctccaggttatgagtcaaccgcctttcccaaccatgtttgcaagttaaccaaggcgatgtacggtctgaaacaggcacctcgtgcctggtatgatcagttcaaaagcactctcaaactatggggttttgaaaattccagggccgacacttccttctttattctgaagaaaccaaagtttgtcatcatgcttcttatttacgttgatgatattatcttaacaggcaatgacactactgaattggaagccttcaccaatcgtcttgacaaatgcttctcacttaaagatctcgggcttctcaattacttccttggaatagaagtattcagagactcaactggagtttatctatctcagggaaaatacattagtaagttgctgcaaaaagtcgagatggctaatgtgaaacctacaccaacacctatgattgctggcaagccactgcccatcactgatggagaaattctaaattcaccaaccaactacagaagcttaattggtgcactacaatacttaagtcacacaagacccgacattacttatgtcgtcaacaagcttagtcaattccttaaagctccgacaaccacccactggaatgctacaaaaagagtcctcgagtatttaaaaggaacaatgtatcatggcatacatatctctcccagtgatcatctttcattaacaggttattcggataccgattgagcatgttgccccgatgatagaaaatccataggcggatattgtgtgttcatgggagacagcctcatcttttggtcatctaagaaacaatccgtcgttgctcgctcaagtacaaaatcggaatatagggctcttgctcacctagtggctgagataacatggttgcagggactacttggagaaatgaagttcaattcaccaaatcgccctgtcatttggtgtgataatatgggggttgcagcacttgctacaaatccagtataccatgcgagaaccaaacatgttgagttggatgttcatttcataagggacaaagtcttgcaaagacaagttgacatcaggttcattccctcacacgattaggtgactgactgtctaaccaagggtctctcaccatctagatttaattttttgataaacaaactccagttggctgaattcccctgtcgtttgaggggtggtatcaagaaatgatggtgaattggcagtgacatggaaggtgatctggaatgccaatgtagctctgctggtgtaaaaaaaaatcttttcagaatattctctccgtacaagccgttagcataagattcctcaatttgttagtcttgttttctgtgccttattctattgtaatcttgtgccatctggccctattgtaaacggctgagatcagcctgtttaagtattaaatagcaatgaattcctctcagcaaattgagctgagattttacctaatactgtatgtgtgcaaactctgttttcttcactttgcaattcatttaacattttataagattataataaagagaaccagttacaatattaacagctaattatatggatagatggagcaaaataagacaagatatatggaagcaagcaaggcatgagttggtggtggtccaattagtgccttagttgtagtcgaacccacccctgttatataagtatatatatttatatcgattcattgagtgcgtgttgtggacttgtagtatagtacttgtcattccgtacgtacaataatcttcgatcattgacacagacccctaccactcgtaccatgcataatatatgattatgacacgtacctattggattagagatatatgccatgcatgcacccatgactcatctattcttatttattcattttattaattatactacgtacataccctaccatgtactatactccacatcaaaattcactcgtccattacaataattgttcaataaaatttataaacggcccaaccaaaatcaacttcctaaatcaaactaaataatttgacaaaaaatacaatttaaataataacctaactgttaaacccgtttattactaaaatatatgacaaacatacagaacttctattcatggaaagattaacatttttcgtaaaattactccgcacccggactccctatgtaaatgagcatccgggagtaggtctcccatgtcaagataaatgatcaaacatatctttagccatctgagaggtactaagcttctgaattacaagttcgccaggactctatcattttcctaagatttcaaatatagatacgttattaattatctattgttataatttgaataattaaagatcatccatagatgatttacattgaatatgaacaaatttactgttttacccatcaatgtatgttatccttaaaacacttagtttcctataaatgatatttcagtaaactaatataaaaactgaaataagagctctt

SEQ ID NO: 21800 - DNA, 2771 bp, Cannabis sativa
  modified_base (1306)..(1307): a, c, t, g, unknown or other
actttcaaaggtaaatactatttttggatatatactctattttataaaagttattaattagattttttgttttgttaaatgataaaaaatagacttagtattttctaaaattatacaaatagaaccatgaactgattttttgtcaaaataaaacttaacaataatctgatctaaagatgtaataacaaactgattacattttctgtatctgttcatgttaaaaattattttaaagtttattatatattaaaaaataaaattgttaaaaattaagctcatatcctatttttatcattttgaaaaatatatagtctattttatcatttaacaaaacaaagtgtacaattaataatttttgcagaatatagggtctaaaatagtattaattattcagaacataaataaataaatataataccatgcattatgtatataatataccacacacatatacataaatattctaaacaacttttcaccctgcatgtgcatgtgttctgtgaatttgactataaatacgagctcatccgattacaagagtctctcactatagaaaaatactatatatatatatatagagagagagagagatggggttggtttctaacagtattaataagagaaagctcaaaccaggagaccatatttactgttataggactttgcacctttactcccatcacggtttgtatttatatatatatagagatattatttagaaatttttaccattactaaatctatttttttatttgtcacaccaaattctatgatcaaaacttagaaataattagagatacttttttcttggaattatttcacaaatacaaaaaaaaatataaaaaaaaaaatcaaaaattatagttgtaggaatttttaaatatttttataattttatttacaaaaaatattttgatgtatttttatattgtacttttattaatgtgttgttatttatatattattttcatgttgttattttaatgttgtttgaatatttttttttttgtttttatagaatactttaaaaatacaagaaaaaaaattaataattttgaactctaatatataaattaatgaatatttttttattataaatttgttgtaaacttaatataactatgataaacaccaaaaaaaaaaatcatgattattaacacaaaacttccttatatgttatcatctaatttagttattacattattaataacaattatattttgttgataaatgcaggaatatatgtaggagataatatggtaatccactatcaacaaacatatgatgataatgatgatgatgatgnngatgatgatgatgatgattgttgcgaagtgtgtggtttcaacagaaaaaaacatcgaggagtgatcaaaacatgcttagattgcttcctcaatggtcaccatagagtgtttcgattcgaataccaagtgtcaccagcccatttcttcgcgaaaaggagtggcacgtgcagcgtcgcgccacgtgacccgcccaatgtggtcatccaaagagccacagaagagaataataataataagtttggacaatatgatcttatgaagaacaattgtgagtcctttgcaacttattgcatgactgggaaacgatcaagtgaacaagcttcgtcggttcaaacaacagctaaggttgtttacaaaagtttggctaacaaacctatcagtgttgaaaatttagcaaaaactgctgttgaggcttattgtgctagaaaacttaaaaaactagaacatatacaacaacatcagaaaacaaaataaatattcatattattatattatattatatgtactcttagtgtttttaaaaatatgtgtttgtgtgtctaatcaactagaataaaagagtacttatgtttgtgtgtttaattttatccaagaaagtcgaatatatatgtatgctcttgtattgtttgaaaatattatgtgaaataaaagttatattgttgaatatattatgtactgattttggtaggaaaaaaattgataattttgtacttattaataaaaaatatttttatattatttcattaaaatgtactcacttttgtgagtgggttgtccaatcaaatgtcacttttgccagtgcacattatctataaaagtatgtatataaagaatataaaaataaaaataaaaatttaatgacttcaccaattaaggattgccacatggcaatttacttaatacttaacagtcaggtacttatagaagttccagaattataacttaagtattattgccgctaaaaattaaacttagatatttatttgtaagtaagagttaaacttaagtatgtatgccgcaaattactatatttcataataattattgaattaaattatgtgaaacccaaatataatattggaaattcatattattacatacacattattaagaattgctaaaaagtattattggtgtgatatcttcctcggtgtaataccgatattggtttaattaagtatcgagtctcatataacgtaataaaataactttcagaaaatatgatcactaactaattgtgaggcgccatctgcagaagatgttaggcaccactagagctcaataacatttatcttcaatcatgtgtattaattatttaaaatatttgattagtttgtcaatagaggttttattgacaaccgacactacaaaaaatagttacctttagtgatatttttaatcacaacataaatttttttgtaactaaataagatttttagctacaacaaaaagttacttgtgact

SEQ ID NO: 21801 - DNA, 3284 bp, Cannabis sativa
tatttgttataattacagtatcatccttgtaaatttttaaaaaattccgaatagtttacaatatcgaaaatagagtttttgatattcaaatttaccacgcgcatttaaaaaatttcaaacgtattttcggtactgtaaactattcgaattttttcaaaaatttacagagatgatgttgtaagcataacgaatacccctgtaaaaaaatttgaaaaaaaatattccgacatatgtttttgaacgtagaaattgactaagagattgtaacaagaggttgacggtagcactcctctaatctcattttctattccttttctcattttatagaaaaaaataccaatctcatcatttagaaaatagaaattagttcaaaacatttataaaccaaaagactacacaaacattctgttttaattatatgtggttggctaaaatgccctactagtactatacctacatcacttaatataatattttaggattgagtaactaatttaactgcatcactacaacaaaaatacatagaaaaactacaactaaagtacttttattgaagcctataaataaaaatacaacaataagattaaaatttgcataaattaactgctattcacagtagaaaagactgaagaaaaacatgcatgcatgaaaaataaaatcctaatttcatgctctttaataataataataatagtaatagtgcgtggattggagaccataatacgtgtaatgtgtatattaattaataatgactattttccaaagagggatttgatccaccaaatacccttgttgtcattgggtccttctccttctggtggaggatcactctgtggagtcttgtgaagtttggtcacatcatatccttcttctttggctttctcaacaactaaattgtatatctcatcatctatatgtgtctttctcgccaatatctacaaaataaaaatatgcccccaaacacaattaattgaatttgtggtatttatttaacagttaactacataataacctattaattaaaaataattaggtgtcccaattacactatatcaaaattttacagccaattacaagatattattatgatggcactagaaaaaagtgtgttgtataaaaaacgaaagaaagaaagagactaaaacaccatcttattggaacttctccacaaacttctaaaccctaagcctccaaattaagtgtgctcctatctatgtttaacattttaaagtgttcaacagtcaataatagtgagtatagtttctaatttcttttataacttattaaacaaagtataattaatgattcaatattaaataactcaatactacttttatagttttattagtctcaactctatgttttgttaatgatgctaaaataggtgtcctatactattataagccatattattagtataattaagtatataattaattcatatgttgatttaataattattataaaaaaaacgttaattattcaaaaaaaatactaacgttaattaatagcaatggtcattactatttactattaaacacaatatgtaagactattactataaagtatcttaatttgagtagttagagatttttaacaacatgttactacttagaaaatgaaaaagagaagagaatagtaataagtaataagcatacccaaagagacttcctggtgggttcgccaacgagagcaacttggtaatcaggatcaacatagagaacccagtaattaccaacaacagggattatgggcaagaatggaggcacatagaatttgactttgagctttgcctcatcactttttgggtcagccttgtaagcaataccctctatagaatctctcttaccaccactccaagtctcattcaatacatgaactgttgccttatcttccttaagagtgtaagtagcccttgtattagctccatctctgggctgaaaaaatgatgggaatgaagctatctcataccaccttcccatgtacctctctacgtcaagaccctttaccactctcatttctttattattcgccatttggggtttcacaaaatcacacaaagtttcaatctttttctctattgatgagaaaatggagatggggttatggctttttatatatgtgcaccattcttgtcctgacacgtgtacggtcaagaaggttgaagctacgagcaagttctggtgggactgggattcttgtttttattcattgttgatatattttccttatgtttgttttgtttgttttcaggttttttattttttattttgtgttgattttgttatgtgtttaattaaagaccccaagaaggaagaggccctttattgcttagagaggaaggaaaaagcatataaggtgggtgttgtaatcaaaattgagaagttttggctaacttagtgaagaagtagaagaattagtacactttcatgtgaaaccaaccaaattatgtgtcatactcatgatgggaaaagaggaaagatttatgagtgcactcttcaagtccttataataagaaccaatcaatttaatcttatacgatatatgatgtatattatcaaaattatttgtctgtgaaattgaactctctaaatcttgaaatgccaaagttagttatagacttaagaagttatatataataagaaacatttaatatatatttggttaatactaatttgtatcactactacaaataaaaactactaaaaaaaaaagtttgagaggcatttttttgttagcatataaggtatcggatttgacaaaatttgcgaccgacgttgttctatgggtgactaaagggggtgtgggataattgtagccataagatccctatagcgtcggttattatgaaataaccgtagccctatagtccttataacgtcgattattatcaaataactgatgccatgagatcccctatggtgttattacataaccgttgttataggggtctcatatgactttaatttagtttcaccatttcatgtaatatctgatttttattaaaaaaaaacattatttaaaatctaatttttttttttcatatatatgttttcgtatctaaattttatatatgtgtgctcttaatgggtattacccataaatggatagtattaaaaaaatataagtttttatacttaattttttttatttaattaaaaaaatctctcatttatgggttgtgtttattccatcggttgaaaaaaaaaattaagaaaaaagttttttagcaaaaaaaaaaaaatgttgatatgacttaagtattttgtacataaatatatttt

SEQ ID NO: 21802 - DNA, 8305 bp, Cannabis sativa
  modified_base (7293)..(7294): a, c, t, g, unknown or other
  modified_base (7342)..(7345): a, c, t, g, unknown or other
  modified_base (7542)..(7554): a, c, t, g, unknown or other
cacaagagtcatatgcagatatacctgcaattttgtacatgatgcagcaaaaaaacccaggtatttcatatttttatgtatatctgaaaatttcaatagtataagtgcaattaagttgccctagcaactattaagcatgcttactaaaataaaatactccacaaaatagttgttgcaaaccttatattgtcaataatcatacttgcaactgttatttacaatttccaagttatattataaatttttgtgtcattataatatataaaaagttatggattaagcacataaaaaaaaagcttcaatctttttatattattatgttttttttttccaatactatatagataatggtggttctttcattaaagtgtccttcaacttttactgtaactataaccttattttttgtgttattatatagagcaatatattaattgtaaaatatttacatcacaggaactgttacagacttggtaacagatgaaaaaggaaggttcaagtacttattctttgttataggagctttaataagaggatagaatcattgtacaccaatacttgtaacagatggcactttcttaaaatatccacatagagggacattactaattgataatgcacataatgcaaatagacatatatttccacttgcatttgcaattgtagactctgaaaatgatgaatcatggcaatggttctttcagaaattacaagaatcctatggggaacgagatggacaatgcattatttccgacagacatgaaagcattgcaaaggcagcaaaaaaaaatttcccaaatttaatgcatggtgtatgttgctaccacttgaacaaaaacataaagtctaaattcagaaagggaggagatgggctaaaaagcattcaatggtgcttccagagcatacacagaaactgaatttgaagactttatgagagacttggacagtattgatgagaggataaaaccatacctgtttcataaaattggtattggcaaatggacaagaatatatagctccaacaaacaatatgcaaccatgacaagtaacatggctgaatcagttaatgtagcaatcaaggaaatctgagaattaccagttgcaaaattaatagaatgtctctacagtcttgtacaaaagtggtattagaacaacaagaatagagcattgagaacattcacaaatctggcaaaaatacctgaagaaacactaatgcagcaaagacaaatgagcctcaaatataaggtatgttgccttgtataataaatttaatcatgtatttgccattttatttgccttgtatttgccatttaatcatgtataatataagtaggacagccatcactgctgttttaaagcagcttgtttggtatcatgtttgaatgttagtttcatacaagtattgtttgaatagggtgttagtttaattgttgtaatctttatgcatgttcaattaaaaaattaacacaacaaacttttctaaacaaatgcaggttgaaacgttaaatctaatgatatacctagtccatgacgtgaacaagtcttatatagtagacatggagaaaaaaacatgcacatgtcaacgctttcaatttgatgaaatgccttgttcacatgcaatggctgtaataacaaagaggcatggttcttgctgtgactactgctcctactactacacaaaacaatcatttctgtcaacgtatgaagaaacaatattaccattaggtgatccaacaagttgggatatactagatgaaatcaaggaaagaattgtgttgccaccaaagcataagagacctgttggccgtcctaagaaagacagatacaaaaatagaactgagttgcaattagaaatcagatgtggaaattgcaaccaaaaaggacacaacaaacgatcttgcaagaatgaagcagtattgaagcctaaaaagaaacaaaagataacacaacaacattccttttcttttgcttatattgcataacaacagtttgcattcatttacaaaatgatttacaaccatacgtaagacaacaaaaaaactatttagttctttaaaatttcaaatctcgtaatatgattagaattttttactttgttgttcttaatgttagaataatattgttatgatttccaaagccaaacatacatgtacaaaaaaaaaaaaaaaactaacctctatctaacagcaacttgaactcccccacaaagaccctgaaaaaataaataacaaaaaaaaaagtcaaatactgaaaaatataaaaatggtgcagaaagaaaatataaaaacaaaaattgaattcaatttctattaaaatactaacatgttgctaaatgtataacttaagttgttattccaatcataatttgaacattagttaaaaaaaaattaaacatatacaaaataatccaaacagatttaaaaaaaaaaacctatattaatataatccaaacatatacaaaagaaatatatttccataacaaattctaaaatattataaaatcttaacactttgttttcaatagtctccaacaagttcaaacctataacataaacttcaaacaaacaacaaactctaaaaagagtttgcctatcaaaaaactccagcacaatatctttacatatcaataaactcttaaaaaaggtttgaaccataaaatgtttgttcttaatcagttacatgtaaactgttttgaaccattacatacaaaagctagtacttcaaaaaaagacactactatcaacaatctactcctccccaccatcgtccttaactggcgctcttccacgatgttcggatgaagaaatgtatccatttacttgttttgccatgccatgcacaaacaactcgacgcaaactttgttccggacaaacttcacatcgaaaggatttggaatatcttcaatcaaaccatgtgcaaagtattcagagtacttgaaaatgaatataccacaatcactgcaataaaacataaacaatgaataaataaaaagacaaaagatgttataaaaacaaaataaaaggacaattgatacaaaacaaaaacaactataataaaaaaaaaaaaacaagataaacaattacctaagagtttgttgtggcagaccttgaactataaagatatcaaggggatcatactcacgcttcctcttgaacaatcctttagacatgtcaatatccttcctgcgaccataaaaaccaacttgtgccagcagaattgggatcatcacagcaaaagccttcacaaagttgttcaagtttttaaatttgccaacagacagtgagttgcatacttttaaacatctattcttaatgtcaaatatgatcacaataaaatgtgccaatgaagcaacattcactggaatcaaaacataatcaagcaacaaccatagctttgaaacaagcatgcggaatccctcaatgtagctagaagccctagaattcttgggaatagaaaagcgattctcccccttgcaaagatagtttccatacaactcaaaaatttgagttgcaaaataacaatcagttgtattgactttcagcttgatagattgatcatacttaatcttcttcctcaaatagtaaaataacacatcaatatgctgcaaatgaaaaaaaaaatatcaaccaaaaagaataattgctttacaaaagttacttattcttttacaaaaagattcaatcaaaaccccaaccaagtatattatgtttagttcctttttatattatgttgctctcagctttgtacagaaaatgaaaataactagacaaataacagaataatatgttaaaaatgattaataataaatgcaatttgttcaaatatttagaggacagtagtaggttaaattcctactgcattatcatataatgctaatctatctttaagtagtagggttttctatattgataaagatttgtaattcccattcaaggctaactgccaaagcgttagccaaaactagagacggtgccagagcctcaaatcaagatggaccaaagtgtaatgtgaaatataacttttaaaggtggcagtaagttattcgtacaagttactatgtttactttagtggtgttaataagactaggagcacaaataagattatgtgctttataatttaaaaggaaaatatgttagggaagccacccgcctctcattatggaagttcactcactccagcacaattttagttttattaataatattttttatattgtagtattttttttttaagttgtttcttacatgcaggttgcaaaaagctgcaaaactatacaagtttgaacttcctgcaaagattaaattgttgccagatccatggacaccagagtctggattggttactactgctctaaagataaagagggaacagctgaaagccaatttcaaatatgagctaaagaatctatatgcataaaccaatggggatctgttcctccaatgttgaattggatggattttgtggtatattttcttttgtgttgttaatggcatacaagttctaattgctcattttctgacaacatgaaactggatattttcaaacaaatttgttgcaatagaattgagctttatttttgtctgctaatttttgtttaaatttctctctgagctcaagttaaattattggtctgcacctcggcataaatttatggcccatcattttctattctaatacttaataaaataaaaaaactaattcctaatatacaactaacaaacaacaaattaacatttaacaaaaaaataacagcatgacatattcaaacatgactaaccgagcatgacatatattattccttcccagtgttaataaatcgtagaaccacatcttgtgatcgattttagcaacaacaaaatcgaatggcttatcagtataatgatatctcttcaagaacttgttattcctgaaattaacacatataaaacacattaaaacttaacttaattacataaacaaataatatatacaaaaaaaaaaaaaaaaaaaaaagacttacacattgccaggcctataaccaatagaaaaccattcatcaaacgcatcttgatgcacacacaaaggcacatccatcaaaccagaagaaaaaacaaactgccccttcatttcacgtaactccttactaacaccaacagaagggctaccaaaagatcgaataggctgaacatccaaaaccttatcttttgcattacttttctcttgaaaaattaaagaaagcaatacaacaaaatggtaaaaaaatgaaaatccattcaaccatgaaacttataacaacaaatatgtgaataaaacaagctgaaaaaaaaaacattgaatgaaattaccttctgattacttttctcctgcaaaaatgaaaaaaaaaattgcaacaaaaaaacaaaagaaaaggaaatcaaaaatcaaataaacaatgataaacataaacaaataataaaatagtactctaaaaaaaacaatacacaccttttctatatcatccattttctcatttataatacccatcacaaaagacgtaatgttatcgtcagtagcctggctacccatagccttcttatctgcaacaccgacatcatctccacccttgtcaccaacttgcccaccatcatcaaactccacgggagcatcatcattaaacaactgaggctcattaataagcttcattaagttgaaacttggacagtaatcattcgaattctacaaaaaatgtatttataaaaaaataacattaaaaaattacaaaaaaaaaaacaatatcagaatataagaaaaaaaagtatagatataccatttgaactaaatcgtcttcagcattaacttgatccacatcctaaaaaaaataaaaaaaatcaaacaaaaaaaaaataactaattggttattattgttgtaaaaaatttatacaaccaaacaaaacaacacataaataactaaacagatctacatcaccactagtttataagttcatagatttttttgttgattaaataaaaaaatgcaactaaacagctaaaaaaaataaagttctaaaaacactaaaaatgaccaaaccactaacaaataaacagatatacaaaaattttacaacaaataataataaaaaattacagcacctgagctatattgctgtcaacaacaactccaacattttcctttccaatcaaactactctcaccaccacaagcttcatcgccctgcttatttatacaacaccaaaacaaccaaacaaaccaagacattataaaaacaacaaaaaaaaaaaaaaaacaactaaacagttatacttccccactagtgataaagtcacatctttttttaatgatcaaataaaaaagtgcaaccaaacagcaaaaaaacaaaaacattttgtaataagtgaaaatttttaggagaatgatttaaaaacgatattagttatcaggaaaaatcattatcataaattctacaaagtgtttttctttttattatattgttaaaatgtatagcatatatatgcattgcatggagtactctggctagctattatagctaattatatcaaaaattaaaaatccaaacatagggttgatgaaaatgcaaagaaagaaaaaagttagataaataaaaaagtgaagtaccaaaaataaaatttttgctttggagaaacttttggcttcaaatgatggaaggagtttcataaatttcttattctattttgtcaaattttagaataatatacttttttgaaggaggtgatggggtgcagtattattctattattacttatatggaaactttatcctagatttaaagtcagattattaaaacaaaagctgtatatattcctaaaaaatactaaaatgacccaaatacactaataaataaaataaatatacaattactttagaacaataataacaaataattgcatcacctgaactatatttttgtcaacatctccaataatttcttgaaattttaaaaaacaaaaataaaataaaaaaaactatcaaacacaaaaacaccaaaacaaatacaacaaacatacacatatattaaaaaattttgatgtaccttttcaatcatactactctcaccaccacaacctccatcgcccaactgattcttcacaagtgaatccaaatttccactcttaaataaagaaaaaataaataaaacatgttaataataaaatcaaaggtatttatggaggcatctttgaatttattgcaaacagaaacaaggtttgtaaaaaaaaaataaggtttatttcacaaatacacaaaaacaataaaaaaaaaacaacaaaaatacggnntcacggaattttaaacatttttaattttttttttgattttatttacannnnatacggtctttttatgttgaaattttgttcatttgctgttaattttttgttatatgtatgttgttttttgtttttttgttgttattttgatgttattttcatattacttttatgttgttttcttgttgattttattgttttggtgttattttttagaaaaccgtaaaaaagcaaaaaaaacattctttgaacgtaannnnnnnnnnnnnttacaaaaaatagtgccttatgtaattattccaaaaaaatttgttgaaataaataaaaagactcatgaatgtacaacaaaaaagactacctatgtattttcactcacaataaagactatacgagagttaaaattgcatatctgttaatttaactaagcttcttagtttgcattttactagctgattatttctaagtttataatttacacttttttatttgtacataatatatatatatataaaaaaaattatatatatatataaataccttctcaattacaccagtatcaccaccaaaacctccaccacttttattgaaattaacaacagaatccatattttcaccttacaaaataaaaaacaaaaaatggaagcatagaacttaaaatacaaaacagaggcaaaactaacacacaaaacataaacaaataataaacactaatataccttctctaaattattattttcatccccaacaacttcacccgctacaccaacatttgcatccacattttcactctgaacaacaatatcttcagtcactgctgtatcttgctctttaacctacaaaaaaaaaggttttagaataaataaaaaaaaatagataatttttgttaaagataaagcatataacaaaaaaattaaataataaccttctcatcatctttggactcaggatcaaagtcttcatcagtatcatcaccactaaaatcatcataagccacactctcacttctaccagcaataagat

SEQ ID NO: 21803 - DNA, 3189 bp, Cannabis sativa
  modified_base (424)..(425): a, c, t, g, unknown or other
tattatatagtagtagtgtttttaaaaatggtgaagataagaagagattcaattttagtattttgggtccacctgcattttatccggttgattggagtagaattgaaagcttgttttcaagtccaaatgatgagtttcaatacaaatgggttttgggaaagttgaagcatataaggacaaagagttttgtggttcatttgtggaatagacaaagtaagaagttgaagattgaaaagggaagtattattgattatattatgaaagatagttgtgttttctcttgtaattctttgttaatctcttctctctaattttatgagtgagtgagtgaatttttttttgtttagctataaatggggtcatataaagaataagacttttgaaaaaggtgtaaattgtctttatactatatacatatatatanntatatagagagagagaaagagagaagaaatgtaagagattgtttaaagttttgatgttttatagattaattcaatagccaaacccttttcatcttttgtctttatttttcttgtaaagatctttattaaaggcatgttgtataatattccataattatagttaagcttataataatgaaaagaagaagaagaatatgtataggaggttgttcatgtttagtttattgtttaattcataatttaatcacttgtatagatttcaatagccaaaccctttttccctttttcttctttctttcccaaaagatcttgaaaagcatatgtatatatagtctttataagcttataatgaaaaggaaaaaaaaggagaagatgaagaatatagcatatatgaagttgtttagttttatatgttaattcatatcttgggatcactattatagatctcaatggctaaagcaatttgattctatgaaaataataataataaaggactaagtttcattacattaaaacaatctaaagaaataacaatgggaacatatggaatgtgtgaaaaagtgaaagtaatgtgtcaaactttaatgatgttcttaatcctttaaatattttagataaaatttattagagtaattttgacgtttgttattaaatcgttatcagaagaatgtgtcgacttcaatcttcagtgatatttaattattggatcgttactaaagtaatgtgtgagttcttaatcctttagtgacgtactccttaatttctataattagaatcattgttggtattaaacaacattgtcaacttcaaatttttttattgcaacttgtttgaagtggagaactcttataaatcctaattttttatattcttaacttcttattatttacttatttgaacttcatgaatctaaaacacaaattaccaatatcccaccaaaggaaaaaaaaatcaattggttgtggtagagtttagttgattcattttatttctcactatgaatctatgatgaagatttaaatcatcatgtaaaatatattggttttgagaagtttaggatgacatcaagaaattttagtcacttatctatacctagaattgttttagtagttaagaaacacaaattagcatgaggcttgttgcatttacatgctttccttaatgttgatatataattatttattaatttttttttaaaaaaaatatgttggtatgagagatgccttctacctaatttaatggcttacctcatgttttattaatttgaaattagtgggatcatattaacaataacaataatgcaattaataattataaattagttatttataaaattataatatggaaaaagtacaacataaccttgatttattaataactttagttaaattatacttttgtaaagtccctacttaaaaaaaaatagatgcaattaaataattataaattagtaatttataaaattataatatggaaaaagtacaatttaaccttgatttattaataactttaattaaattatacttttgtaaagtcccaacttacaaaaatagtgtaaattaatactagattaataactttaataaaattatacttttttttatatagaaattacaaatcaagtttgaccatttttcttttgattatagggctcatatattgttatgtgaataatttgtttagaaaattataaataataaaaacaaatacaatttgtgaccaaatacatacaaattggtatggactacatgtacatatagggttgacaaaatccaaaatgttgattatttttatttttatatttatatataattgcctaaaataatattattgttgcatgatggtgatgtaaatcaagagcttaagcattaattggttccaatctttgtaacatggctaacatgtaatgtgcttcatttatttatatataatataataggatatttttagtaaaattcttttaacatttataattattacacgtataattttaataaaaaaatagagacaaaagtacctgctattttttagttgttaagtattaattaagtctgttaagtaccaactcaaaaacatgtgatgatatatttctttagcttatttaatacagtctaataatgtgtcgccacgtatttctgagttgatacttaatggccaaaaaatagtacgactgcaacaaaatcgtaaaataaagtatttttgttgttacttttttttattaaaatcgtatgtgtaataattataaatattaatgaaatttcaccacaaatattcctataatatataagaaaatatttttgggtaataaataaaataatatataatgtagccctttctagggtttcatgattttttgttttgactagtgaagatgaccaccattaatattatgtgatgttaatacttaatagtggtgattagttaaggagttataataattaatatgtttataagacaacaaaaatcaaacattgaaataagtgttgaatcaattcttatctaattgttgtcttctgattatgtaatgtttaagcaaacaaagcttttaagaagggttcattaaatgtcctaccaaaaccaatccctcataatctgtctcatatttttattttattattagtattactatgattattagtgtatgtttcttaatgatgtgttattgggcttttgtacttcgggccattatctaccaagaaattggaggaaattacactctatacctattttatgttgtcctcttttatttttgggtaaatactat

SEQ ID NO: 21804 - DNA, 1537 bp, Cannabis sativa
agaaatattggaaaatgtagtatctagcaagctcaccaaaacaatcacttaagattaaatgacaaaaactgatcgcatcaacaagcatttgatcaacaacaaataagaaaaggcactcgatccacttactcgtgtacgcgattttgaacagcctcttcttgttcaaatttcaaaagccatcaagctgaggctagcttgactctgccaatgcgaaatcataagtgtagacaatgtaacctcattcaaatggaggaaaaattacccagaataacaagcctaaaagcatttgacattactaataattatgagatttaccaatggatccttcttttttgtcccggcatggattttcctttcgatgatatcctactcacaatagatgtatcatcaagctcatgattggacattgatgctggagccttttggggaggtgatttactaacttcctcgtcaaatggttgagagcacgcgacagctacttcagaggattcaccaaaaacagcagcagcaaatgcaaatctcataacacaacctctattgaccattttagcatataattttgccctctcgtcatcaagaatgcagccttgaaaaggaaaaattcataacgggcaatagacaaacatggatcaaacactcaatctgagcagaaaattttgcatgaaacaccataaacaagaaagtactgaccttctttccgataagattctaatattttaagtagcaactctggcacgacagggtcaccaataggtggtaaatcaatcaagtacttccatttgggtatatgataggcccacacatgacgaacatcttcagtatgccgggtatatgatagcgagaggaaatttattcttcttcttctctttctctcatcaacattccaaaatcgaaattaaatccaatacatcgaacagaactccaattcaattcaattcactactattagcccctttcgattcaaaagaagcttcgatttctttgtcgtcgtcttctttacctctgcttattaggaaaggagaagaagtgaggggaacctgagtggagactgtcaattcgatttgcaaaatttgctatttttggtcaattattttttccactttagttctattaatgtgcattgcacgaagtgagaatttgaatacttacctcatgcacgaagagtaataaaagtcgagacaaagattttgcgagagaactaaaaacattcaagccaactgaaagtcgcaccgagagggttgctgatgttcaaaaacctccgactgttgagtcacaccacgaggggtgctgcatgattgggctcgccttctcgctcgaactggatcgaaagccgatctaaatgggtgtcacgagtaatagggttccattggggaaagtgagacgcaagggagagagggaaaagtgaaaggaagctttggttcgtcgagctattggttttccgagacttcttcatcacaaagctcaccttagagtcgttcagattgggattgggagagtgaaatggaagaattgattagtttttttaattttttttaac

SEQ ID NO: 21805 - DNA, 5151 bp, Cannabis sativa
attacaatttttttttttaatttacgtgtgtaatgtgtgtatatttattataaaataaaataattttttttataatattcaaaatattattattttttttaatataatagatattcatgtcgagtattgttggacataaaagaaataataataaataatcatattttacattctgattcaacaatgtatacataaaagtagttttcattgtgggtctcgttttcacatctagcacggttgaatatgtaagaaaaaaaaaacttatttcatgtccttgtatatcatatccagaacaagaatgagcatgaaagctttattaatggttatggaagaaatttttggtagtagtggattaatactttaactattttttaaataatgtgctaatacataattttaaactgaacaaaattcatctcctcataggacaaaatccctgttcatgagatgaaatccaaaaaaaacacactttgtgctcattgtgttttgtatggttttgcttactgaaaaagccctcatttatgaatgactacaagacaatctagcagtacagtaaggacgattagaaagagtaccaaagtagacctaatataatatattaataaatgtcattgtactcttgtaagatactgaaatatttaccccccctaagctctgtagttttctcttgtttcgactgttattgacacattgatatattaatgtaggtgctccaaaaatcagatttttctccagcagaagaaaagactgaacctctgagacattcatcaatgtactgggccattgggccagtgcaagtggcccaataagtattggtctttagacactgacacggtagggtgtcccttttgtttggtcttttctcaagtgtgtcgtagggtataaatcctttggagaaagtcatgtagtcaccactcgataataatatattttcatctctctgattaaccttttttttaacataaaaaagaaaaaggaaaagagagagaatatatatattgtattactcttctaattcatttctttcataacttttaaccctatagaaaacgtgaaaataaattagtttaattatataataggtcaaaagggatgatcatcgaaataggctgacttttcagcttgaaaaaggataagttcagtgaaagaaaagaaaacaaatgtggcgtataagtgggttgaccaattgcagcctcacgacatgcatagtaggatatatatatatatattaaagaacagtaaagaattagtattttttttagtcgaacgtaaggaaataattagtatttaacagtatagaagaaccaaattttaattagatagtattatattaattaggttattcaacctcttactcaagtgattttctagacaaatgtcacacaaagtaaaagatacctttcaggtccaaaggatttgatgccattaccttaccctaccttttaattggtaataaaatcccgtacaactttttaagtaattacatatctcttaagataatgttattggtactggtatacattatatatatattttttattttactatatagtaattatatataatatagacatataataataattatatatttggaatgtttcaataatagagccacaagttctctaaatatatatatgacatttgacaaggatatggcaacaatactatccaggaacccacaaataaaaggtattatttcataaatacataaaaataataaaaaaatcacaaaaattacaattttaaatattttacaatttttagttaagaaaaaaacggttttataatatttttatgttattttgttgtgttttgtatattatttagatttttttttattacttttatgttttttttttattattatatatttttgtgttattgattttataaattacacataaaatatttaaaagtaaaattgtagaaattttaccaaatatagtattttgtaccaattttataaataaaaagcatagaaaaatgctttatccacgattgatttataataaaataaaagaattaattgacaaatgagtagaaatgcaagacaaattgctagtatatatggtgggttacaaaaaacgaaaagaatgtcaacaattttgatgtcactatatttggtaagtcaagcaaaaatagctttcgatgttttcatggatatatatataaatataagtatatatatatatatatatgcgtgtggccccatgattgatcttgaatcttgatcattttcaattatcatcatgatcttccattaaatgatcagtactgtaatttcatgattatgatcaccagctccccccttctgaaaaaataaatgaagaaataataataattaaactttttccactacctagctaagataattgaaaactttgggctagaaaataaattcacattcatttcgatcattactgtaattaacaaaaactggttattatatggaatgagaaagtaacaataaatataaagtggaggctgtaaaagggcattagtggcttttgtggttggtaatggacctaatggtctgtcctccatatatatataactatatatgttgtgaatgacggtagtggaatagtactcattatatatgaaattcatatattctctattaatatcattcttcaatatatctaaatgcaaagtgtttggtttgagagaaataagaaaaataataactaattaatttattactaggattacctacaaacctcatcaatacattattattatacgaacaacacttgcatatgcatagttggcttcgtgatatgttgacacctgtacctaactcccagaaaatccaaaatatataattatgcctataaatgtatgtgctataataaaaatcaatatttcatttgattgtaactcagaattgatcagttaataattaagtgggggttgtaatgactatatattgagatgacaaccacccaaatagatagagatatatgcatggtccatgcaattgcaaaatgatcaaacgatcgaaacaaagggctatgatgcaaattaattattatgataataaataccatatatgtattattaacaagagctaattaattagagaacactcattagcattattggttgtgtcatcgatcgtataattaagtcggtgttaccataattaattgaatatttatataaaaataaatgattatttttgggtaaataatgaacacggctttgaattaatgtttgaatgtgtttatatgtgtgtgaggttgggacagccgaaaattatgtaccaacaacttcgtttctttagggaaaaataatatagttttcaggttgggatgagaaaataataataatctccttgcgttccgtacggactagaaaacgagtacctccttcaccttgaccagttctattatattcttttttggttaattttttttttccttttctcaatgcaagttgaatacagcattatttatcatatagttacttatacataaagcacaattaagaaaaacacacatatatagacatagtatatatagtaggtagatgccatgatttattaaagatttcccactttttgtttagtttcttagttgatcttttttaatgggtttctctgtcaataaagatttctttttttgcttattctaaaactaaacaagaatacatgtttgtttttaatcttttttttatgggtttctgtcaaagatttcttctcttaattctaaacaagaattcaactttttcaaccccctctctctctcctctcatttctttggacatgttgaccttttttttttcttttctttctttcttgttttttattttttattttttatggaaccaaagttctatatgttgacccctattcgatatggtcatggtcattttggattatatatatatttatatatatttttgctggaacattttggattatatataatttgaacggcatatataggatatatagctcgagatccaaaggggccattcttacattattttttgctcaaaaataatgaaaatgaaagtaagtgggtctcaatttaagttgcaacatacaaaacataacacataacaatcacaagtactaagaatatacacatgaagagaatttaagaaaaaagtaggagatgaacctttagttccccgtgctccaaagtgtttttttttttacatatatattagcatacttaaaaagttttacaagaaagtcatacatgtctctcttttctatataatataattaaattaaacatatatcatttttattcaacgttataacaattaggttttgaatatcaccaacaacattacaggaataataaagatcagttatcattaaatatattaaaattgttttggcatgaaaattattaattattttaacagcaatttgcttaactttgaaattaagaagaaaaatctttcggaatatatatgtatattattttatttgttgggcgactggtatgtgtagaaaattggccaatgttcaagctccacgtgtactaaaatatggtacaagctaacttacaatttacgtagccgacctatcaatataatttttccccgtagacatgaattatatggtatgattattatctctataaaatcttgtcctttgattaaataataattattattgatttttgaaaggattaaataataattatggaaaattaaaacccaccttagcccttctttatttaaccctttctccctagtttccacacgactaatcaattgcgtcggcgatcggaccttttgacttttattaaacaattgtaacgaaaatgccctcagttcgttcagataattacatatcaagtcttgaaattataaaattcaacgtgtatggagtaggggcattttggtcatttagtagactcaaagtcacgtagcacaaaaataataagggaacagtagtgccccctttaacctctatgatttcacatacaattcaatacaataccccgtttgtattaatgctcttttgggtcactgtccccaattgaattttgctccccaccaccaccatcccaactgtcattcttcaacacttcatccctaaaagaaaaaaatttaatattcatatgaaaattacatcaccgtctgatcaaaaccagagggtgctgatgtaattaactatgattatat

SEQ ID NO: 21806 - DNA, 3727 bp, Cannabis sativa
  modified_base (58)..(78): a, c, t, g, unknown or other
aagggtaaggctaaagctgaggagtcgtgagagcaagcaggtgaagattgtacatgtnnnnnnnnnnnnnnnnnnnnngtacgatcctcgggacatcaggacttctgttatttagtcgctgagcgaaaaatcttttgtaaatgaatagcaaacttttgtaattgtattttgtaaacgggatcttagaattttataagtataatatgttatgttttaattaaaacaaaaaattttaattcttcacgtttttctaataacctcgttgattagcaacgagctacacaatacgttaaaaatcacgctaacacgcctatgccagttagggtgttacaatatactacggtctttgagcatatttttgatttagtaatgacaaaagtatgaaatactcaaatttaaatgataatatcattgttttttggaggctaaaaacattagtttttggatgacaaatgtatataatactcaaatttggaggctagaaacattaatttttggatgacaaaagtatgaaatactcaaaattggaggctagaaacattgatttttgggaggcaatgatgtatactatacaagtaattgtaaatatagagttattaaagtgaaattctaggtatatatcatgtataataaactcagctcaatagagactgaggcagagcatttcatttatagaaagagtcaattatagggcaagaggaaagagccaatacaaagattacagatggcagcatacaattgcataaagaataacggaaagatttcctgaaagatagggacagctggtgaatcttgtactgcaatgaaaacgtgttgaattgtgccaatgattaggtgagctctgaatattcaggaatagggtatgactcagcagatgacatggcaattggttttactattcctttacactccccctcaaactgaagggtgagatacgaatacccagtttgtcaacaaggaaagtaaaacgtgatggtgacagacccttggtgaggcaatcagcaatttgatcatgagatggaacctatctcacttctaattgcttttgtaggaccttgtcacgaacgtagtgagcatcaatttcgatgtgcttggtgggtgcgtgatagacgggatttgaagcaagagctcctgcaccgatgttatcgcaccaagtgatcgaagaagcagagaagggtacacttaattcactgagtagagactcaatccacgatatttcttctgctacatgtgtcagagcacggtatttggattctgtacttgatctcgacaccaccagttgcttctttgaagaccaagatactagtgaatctcccaggtaattacaatatctagcaatcgaacgcctatcatctgggtagcgggcccaatcggcatcagaatagcctatgatttgcagtctattgttgcagctgatatggaggtcgtgtgttcttgttccttttaaatatcttagtactctcttagatccgctccaatgtgttgttgtcggtgtttggaggaattggcttagcttgttaaccacatatgctatatcaggacgagtgtgacacaagtactataatgcaccaatcatgcttcgatagatagtgggattgtgcactggctccccatcagatacagacatcggttttcctgcaactacaggtgtgggacacagctttatgtttgtcatgttgtatttctgcagtagatcctcaatatatttagtttgggtgagatacaaactcgagtcatccctgtgtacttcaattccaagaaagaagtgtagagcaccgagatctttgagggaaaacaacctgttcagttgagtgataaagctattgacttcactgatcttgtttcctgtgacaattataccatcgacgtaaataagtacaaggatgatggccctggatgttttcaagaaaaacagtgagttgtccgcctttgattgtctgaaattccatgtcacaagggtggctttgagtttgtcgaaccatgctctaggagcctgacgaagaccatataaagatttattcaatttgcacacataatcttcctttccaggttcttcaaagcccggtggttgaaccatgaaaacatcttcctcaatttctccatttaggaaggcgttgtttatatctagctgccttatttcccagcctttagttacaaccaaggttaggacaattcaaactgttgagaccttgataactgagctgaatgtttcaccaaaatcaatcccgggcctttgatgaaatccttttgctaccaatctcgctttgagtctttggagagatccatcaacatttctttttattttataaacccacttgtttcccacaagattttgtccaggtgctgcacgaaccaggtaccatgtattgttggctttgagggctatgatttctgagttcatagccttgttccacccagcatggttgatggctttttttaggctacttggttctctaggaagagactcccacttcgattgtccaaagaaaactcgtggtttgaagatgctgaccttggcacgagttaccattggatgggtagcttatggagcaacaggtgttgtgacagccggttcagatggttgatcactcacagatgcagcagtggaagatgagttcataggagaggcagtaatggcaggatcatggtcattaacgcggggtattactgttgctgtctccccctcaatatttgaagcaacaggctgttctgaaggaggaaaaacaacagagttagaacgagtgccaggagctccagggggtgcattgacctgtgacatagtaggagtggggataggcaggtaagaccattgagagctatggatcacaagaggtgttttagactggtagttgttaaggaaaccagttttaaatgggaattccaattcgttaaagacaacatcacgagaaatgtagatacgagcggtggagctaagacacttatatcctttgtgggaagccgagtagcctaaatttacacatttggtggagtggaattgaaatttatgtgtttgatatggacgtaggcaaggaaaacacgcacaaccgaaggtttttaggaagtggtagtcaagtttatggttgtacaagacttcataaggagattggtgagagaggagtggtgtgggtagcctattaattaagtaaacagccgtgtgaaaggcatcacaccaatacttcaagggcatactggcttggcaaggagggtaagtcccatctcgacaatatgtcgatgttttctttcggctcgtccattttgagcagaagtgtggggacaagagtgatgaaattcaatgacatgattttgaactaacgaagagaaggcttgatactctcctccactatcagttctaagggccttgattttacgttcaaacttgttttcaacaagagttttgaactgttgaaaggcaagaagtgcctctgatttgtgtttcagaggatacaaccatgtgtatcgactgaaatcgtcaacaaaatggatatagtagtaatggttaatgctcgatgctaggggtgtagggccccgtagatcggtgtggattaaatcaagaaccgcttcagcacggttttgagatggtttaaagggaagagaatgtgactttccatattgacaagcatcacaaaagtttgtcacttcatttttggaaacttgtacatttgttgactctgaaacatgttgtaaaactttcgtggatgggtggcctagtcgcctatgccacacatcg

SEQ ID NO: 21807 - DNA, 2004 bp, Cannabis sativa
  modified_base (1907)..(1908): a, c, t, g, unknown or other
gaatactcgcacttgtctttccacgtaaattgcttcttgtcactaataatatcatataatttggtgttgcgaaattcactcgacaacataagtattaatttacaatcgggaattatttatgtatttacgttgcaaattaataaaaaaattcaataaataaaatagtgtcatttttataagagaaatgctaaagggcaaccatgatgcgtaacacccttatgaagtgtaatattattattggtgcaattcaatatcgggtcttacttaatttaatttaataacattacaaaaagaatattgtgagtggacaccagtagtgcccatcactttctataagtaaggccctaccattaattagcaatatttcctaaaattattttcttaaattatatgggacttgatacttaattacactaataatagtatgacacgaggagggtactaggcaccaataatgtcttttaacatttctcttataaaaagtcactaatcaattatagaaaattatctcataatagtaccagacaccttaatacacatagcaataaatcacaataattcaccaaaggagtacatttgtagaaatcatttcttttttttccttgcaaaaaaaaaaaaatagtgaaaagaagtgatttctacatatttcacttaagaaatgaggatacaatgagagctaaattacaattttaacctcaatgccatctatgctagctaagggatctctatcatgaccaaccaaccttaaatagctaataaaagacactagttccaaaaattaaaaaagggttcaataaatgaaggcaaaaacataatgttggtgtttggaaatcactcaaagtatacatagtttataaattatagagtaatttgcggtataaatatctaaatttaacttctaattgtaaataaatacttaagtttaatttttagcgataataatacttaaattatatttctgaaattttgtaagtacttaaccgttaaatgttaagttattattcacgtgtcattttcttattggtatatatatagtaattttttaaaaaatataaaaatttaaagacttgaaccaattacggattgccacgtgacaatttacttcatacttaacagtcaagtacttacagaagtttcagaattataacttaagtattattactctcaaatattaaacttaggtattttttacaactggaaattaaacttaagtttataccgcaaattactctaaattataatgtatattttaaaataccaagtggtacttacatatgatttaataatttttttgttaaatataattactattttagacattgtgttttacaaaaattactaattaaacttgatgtttttgttaaatggcaaatcaaatcatgtatttttcaaaattataaaaaaactagtacacttagctcaatttttatcaaaataaaatttaataataacttgaaggtgttgttgggaaaaacgataaacttcaagtgcagcgaaataacaaagaaacaaagcaaagcaatttacttagtttggtaaaactaccaaacccacaaagagagatatatttcacttatcacttcaaaattacatacactctctactcaaatttcaatacaccctttgcttcttactcactctcaccacataacaaactcacacacttctctttttcacaactcaccaattttttttctcacacacacctctcacacaaaacacatatttatagagttacaaaacttgggcatcaagacaacttggaggccaagacattccaaagcttccttgagaagacttttcaaaacttgacaaccaaaactttcctttttttcataattaataattacccaaaaaaaaattgcaactttatgtatattattaaataaataatttgagtcaaactnnaacaatctccaccttgactcaaattctctaaactcacaactcaaaccatcaataagagtatatatgcatcgaattcatactctcattgaacttcac

SEQ ID NO: 21808 - DNA, 2669 bp, Cannabis sativa
taatagtgttttattggtgagatggcttctactcaatatggtgaaactgagatggaggcagagtatcagaatatgaatatgggtgaggatgatggccatattatgtatgaaggtggggcggaggaattggaggaatttgatgatcgctggtgtttagttggtagatttcttacagagaggacaatcgatttccaagcaatgcaacataaaatggcctccttatggagaccagtgaggggtttatttgtgaaggagcttgatccgaactgtttcttgttccaattttaccatgaaatggatattgacagagtgattgaaggcagtccttggacatttgatagagtccctttagtgtttgtttgagaggctaaaaagtggagataaccccaggatggtggtgcttaatcatctggatttctgggtccaattgcacgatatcacatcgggttttaaatcagtatcggtggctaaggacattggcaattatataggaaagtttctaaaaactgatcctaatgatttcaagggtgtttggagggaatatcttagaatcagagtgtctatttgtgtggatgttccactgaagaaaagtatgaagctacaaatgagaaatgggccgatttgctatgtgaagttcagatatgaagacttaaccacgttctgttttgtgtgcggaatccttggccattctaaaagattttctgagaaagcttttgatacaccaacacacttgctaaccaagccatatgacatcgagttgaaagcggcgcctcgtcgacggaatcataccattggtgcgaaatggttgaaaccaactatgccgaagagaacggataactcaacaccgattgttggaaatccggtcagtatgctccgaccatcaacagctggcaatcacagctctttaaatggaggaaatctggggggaaatcctataatatctgatggtgatagagaggattttgtggaagaagttataaggggtaataatgctagttatgagggtcaactggggggtcctaaaaaaggaaaggctattactgaagattatatggggggagatatggaggaggaggctgttttaattgttattgattcaaaaaggagaagatttgagtgtgaggaaataattgggccgaacaatgatataagcagaatgggccaaagtagtacagtagctgagatggaggaaagaattatgatggagaaacaagatggtatttttcaaaaaaacttgaatggggcgggtactggtttacaggcccgccaagagttatgattgtgctaagctggaattgtcgtgggcttgggaacctatggacatttcaattcctaaaggagattatttctcaaaagaaacccaatgtcgtttttttaagtgaaacagaatgtgaaaaaagtagagtagaatgggtagggagaagcttgggctttgaaggtattttttgtgtggaggtccaaggtagaagaggtgggcttgcattgttgtggagaaaccaggataatggaagtatcaagggatattctcattctcacattgattttactgtcacaaatgattcccagcagaattggaggcttacaggcatctacggagaaccacgaagacacctgcgaacgaacacttgaaacatgctacgaactctccatgattcaactaatataccgtggtgtgttattggtgatttcaagaacatcatgtgtcaagaggagaagaagggaggtaatccataccccagaaatcttattgaaggattcaacaacatcacagctgagtgtgagcttgttgatattgagctgcttggacatccgtatacatgggagatgcatcgtggggaaccaaattggatggagattagacttgatcgagcaatggcaaatccatcttggaatcaggtatttcctatggcttcattgtataatcttcttcactcaacttcggatcatagcccaattttattggagtgtgttagacgtcctagtgttgtggagaataagcgttttcgatttgaaaatgcttggcttaaagaaccaatgtgctaccagattattagtgattgttggaatcattcggttgaggccgacatttttaggaagatcacgtattgctttgaacagatggtaggttggggaaaaataattactgggaattttaagcagaggattgcaatatgcagaagagagcttgatcaattaaagtcgaaaagagatgagatctctattcaaaagtataaagaagtgaaaggaaagttacttgtgattttagatcaaagggaggcattttagaaacaaggttcgaagcaacattggctaaaagatggggatcaaaatagtaaatatttccatgcggcggctagtactagaagaagaccgaatactatccagaaattgcagaatgaccaagggacttgggtggattggaattcggggttgagtgatgtggtcaatagttatttcaacaatttgttcacagccggccaagtgaatgttgaggttattgcttgtgttcaaaataaggttactacagagatgaatgataatttacaagctcaagtgagtgaagacgaagtgagaaaagccgtatttgatatgcatcctgataaaagccctggaccggatggaatgactccggcattttaccaaagatgttggagtatagtggggacaga

SEQ ID NO: 21809 - DNA, 2017 bp, Cannabis sativa
  modified_base (194)..(196): a, c, t, g, unknown or other
aattgagaatcaaaattttgaaatccaaaaattcactttcaatattttttaaaatagttttttttttcttaattaatattttggactccgaccagacttgaacccaaatctcccgcgaccctggcgccaaacccaacctctgacgcaaacccgaatttgatcccgaacttagacccaacttaaataaaatcaannnataaaaataaaaataaactttatagaacacactttcattttctgtttttaaattgaaaaacaaaagtgattacaaaacacatttttatttttcaaaaacaaaaattttactttcattttgtaattaaaaaattagaaagcaaaagtgttaccaaacggtaccataatatatagtataaattttttaaaactttttcttttagataaatagtgcagatttcgtgcaatccgcgagtgacagcgcgtgacaaatcagtgagttctattactgtatggcttcccacaccaaaagccttctgtaaaaaatcacaattgtcatgattaaaaaaattatatatatatagaaaatgatttcatgtggtctttccactttctgttcttctattcaatcttctctaccgccttttcttattcattgatttcagaaataatattttgttttttgctcattgatattttctgctactgatcggagtttcggtttaaatctaaaactataaaatcaaaatctgattgtttatgaaatgcctaacctctttgatttggtataaatgcctaaatttttccctttacattaggatgactaaattttttgaaaaatagaatctgaatagtggatttaagtttcaacatcgttgggagaatctgggcagcacgacaagtttgttaataagattttgttttttcattatactattatatccataattcgagtaagcaatatggttacgacaagtatgaagaagctaaacaataaactagctcagcttgtgaaaaaataaatacgcacgattactcactcaggaaatacaattggtagaaatatttgagcttctccttttaaagataagagcaagttgtaaataacaattatcattttgtaagaccagcgaggtgaagaatcaatacaaaatgtccatctcgggatacatagagtatacaatagaataatagtaagttggaaagggtaaataatgacttctttaaaagcttggaactcattgacccctcatacttgtgagtatgttgaaagattaaggggtttacacaaaatgtgatttatttcaaaataattacatgatgatagtatctcgcgtaggtatactcggtctccctcaacattacagaagagcacgagaaatatttttgaagatcgtacttaggcacgaaaattatcttcaaagtaaagcatcagaagatgatcattcatattgcgaggtgaagaagcgtagttagcataaccgtgtatagatagagacaagatcagttataacaattatttatttttattccatgtattgtaaatataaaacgtgaggattatccacgtttcatgaacggttatgaggataagatcctaagagaataattgtcatcccaaaatacctgaagatctccttgaatgagggatgaccaaattaaggattacaaagaataatttaaatattatattttgtatcctataaacacttcatcaataaaaataagatagactcgtggactatgaagaattaaattcaaactacataaaaaaccttcttgttatatatatatatatatatatatatatatatttgtaggatatgtctatgataagaactattgttttgtctatatggtaggaacgtttttataaccattgataatagatctaacgataataaatagatgagtgtataaaatagtaaatatatagagtacactagattatttattagacataaataataatttattaaattaataaaataacatattttctctctcctctctttttctttaaccattatttattggagaaattttaatattgtatacatta

SEQ ID NO: 21810 - DNA, 2321 bp, Cannabis sativa
tgggctttcctgattagacaatgtgatatgtgggctcgcctgattaggcaatgtgatatatggatgtcaggttatggcatgggcttgcttgattaagcaatgcaatatatgtgagtgccaggttatggcacgtctgattaggcaatataatatatggatactagatttaagcatcgacttgcctgattaagcaatgtgatgtaataaagatggttacttctcattcttacacatatggttgattatattataaaagctttgaaattttattatttattattttatgatggtaaaatagataattaattactatatgtattccttttattacttttcttgttgagtcattgtgattcacgagtgttctgtgatacaggtaagggcaaggaaaagttagagcaaccatgaggcgatggtcttctccaatgaatgtacatattgatccttccggtttgtgtaccgagttgccaaaaattgttttggattgtatctgttgtgtattttgacttattaccgtatatagtatatagtctttttgtaaaacttttattgcagggatctccagaacaaagttttagtgttgttatattgttcattactaggattttactttggtaaagtttttaatatgttcacagattttacaaattaattaatctattattactaaactattttataaaaccacatacatggtgtccctttagattaggacgttacagttgaaactaaatgttgatacgagactttgaggtgcaaatcggcatgtggggtatggggctgtgttgcatgatcagtgggtaattgtttggcttttgcagctattccagctttgggatccctttcaacgtgttatctatatcttacagaagagaggcttggttttaactgagtttgacctgatttttaaagacatttatctatttataatcatgtcaatgtttttaagtttctcttttatcgttatgcgaactgtttagctcacaattttgttacacttgccttatccttagatatggcaaaagtatagtgccttatctttcgctttgtgtctttaatgagaaatcattctattaaaaaaaacatgatagatctaattaaagatagcccagaacaaccttcttaagtgatttttagtttggaatttttatatcattcattacttgttaaataaatgatataaaattttaatagtattatttgtcaaatgataagaataaaaccagaaaaaccaagagaagcagtccaccagaaataaaagatactacataacttctttaaggagggacaggcgcaccactaactttggagagataagaataaagtcaacaattcgcacactgaaaaaaaatcaaaatctcccactctaccagccccatgttgtaggctccataagtagttcttaacataaattaggtaaaataaatcagaacagcaataataatagcattaattataggttaaggcctcctatttaggtttcgaaagaagccttgatgaattcttgttttcgagtccaatatcaaaaagagaattgaaaagcaaactttttcttattggcaacttgttactaattcattatcaaaaagtgaattgaaaatcagacaacttttcttattggcaaccttttactaatccattatcaaggcattgccctgagttcaccttaaggaattgaatccagtcaaataaaatgattataagtctattttcaaaggagcaaaattaacaatttggcccgaacatagaaatattgagtaaaaggggaagaggaaaaaaaattgcttcaagagtcggtgctggtcttgacgatgaaattctgacgactgatggggttcatgaccactggtggaccggctgtacgaggccatgcctggaacttcttgtcagtttcctcccaccattccttgttagaaacggtacctggggtactccctgatcaaaaaagaacatgagaaaatcagataaatgaaacaaaacaactgccgaaatctttgaaacgatgccaatttcactcgcctccaaatatcttcttgtcggaaatgtagtagtcacagatccaagccactgcacacgttcctagagaagcagataagatgtacttggttgccatgtcaaaactgcaataacaaaaaaatgaagtatttgctaaatgaaataagaagaaattatactgaaacaaaaaatccttgagagacaatcaaactgctaaagattgttttatgaaatccaaggctggaatgtgcatacaaataaatattctaacgtataagatggtgaaaaattaagaggacttgtggagaaaaatgaaaaaaaaaaaa

SEQ ID NO: 21811 - DNA, 2483 bp, Cannabis sativa
aatgtctttcgcatatctatatctatattgagagtacgtgtcagattcgatatatatgttttgagttacgatgatattgagctccagacttatcttaggaggaacaacctatccaaattttagaccgaaaggataaagtactctagaataaaatgatccctctggttaaagtactgtggagaaacagtgaaattgaggaagcaacttaggaattagagtcacagatgagggagttgtatcctgaattatttaggtaaattttgaggacaaaatttctataaggatgggatcgttgtaatacttgataagcctaatggttagtaattagattttaatacatattatgggttaatcaggtaatgagtgggattatgatcctactaatctattttattataatcgtaattttgtcataagtggataaatatgcgtaatttattaattacggaaaattatttagcatgtatgaatatgatatgaactatttatggaataaaagtattttcagatttgacgaccttggagactcaatcgggggccaaaatataagttaaattagcaattttgatggggatatcatgatgagctaatagtataagtattggagtaattagaagtatttaggatttgacctagtaccctagaagtagagatttcttagtggctaaaaaatagtgaaataacttttattaataaagtttattattattattagttgataagttttacacttatcagtttaatatatataatacattttaaacaaaaggttatagaacgaaactctctcctctccttcgttcagcaaaatcctcttctctctctatctattttcatcaattttcattcgaaacctaataattcaagctctggtagtagcaagatagtaaactattgaagagggaaagcttaaggtaagtattggttttgttttaagttgaaaatgattggttttatatgttgactttgtgatttagagtagttatggagattttgacttcataaaattatgtatgggttgccatttgagctttttaaaatttaaagcctgagctttaatggcgttttccatttaagagctcatttttaatttctatttcattgggactgttgtatgtttggtatatatgtcccctgtaaagtttagaatgatttggataggtttcggtagtatttcagagagtgcaaaattttaaatttttgtcattgcagaaaacggcctactattttgaagaaaacaattagccgtttcttgccaaaaatggttagccgtttttccaaaacggcagacctcatctgttggtgtttttcaagcctgttttttttgtattttcttggattttgaggtagggataccctagagacttataagggatccttggaatgaattgttggacatggaataaggctaaattacttggttaactgttcttttattgttatggcatagggtccaggatcattgatcgttctccaaataggtcggccaacatacctgaactgagacttgaagtaagaaaagtataatgtcccatatggcatggcaagtgacatgattatcgattgtctaattaggcaatgaaaatatgatatacgggctcacttgcttaggtgacgcaacatgtgagtgccatgtcatgggatgggctcacctgtttaggtgatgcgatatgtgagtgccaagtcatggaacgcacttgcctgattagacaatgtgatgtaagaaaaatgattatttctcattcctatatttatggttattgaagtaaagcatcggcttgcctaattaggtaatgtgatgtaataaagatggttatttgtcatttttatatatatggttggttatattacgtaactcttgaaatgttattgtttaatgacaataaagtggatatttaattattataggtatttcctttattacttttcttgttgagtcctcataactcacgagtgctttatggtgcaggtaaggactatgtgaagttagagcagccatgaggcgatggtcttctttggcaaatgtacatattgaccctaccggcctgtgtgccgagttgtcaagtcaagagttgttttaggctgtatcagtgatgtgatagtcaaaatcccgtgatctaaaggggaaagatcgggagctgtacaataccacatcgcctggggaaggtcatgtgtgatgattctgagactgtgtaggtatggggctacatagttaaagaggacttaaatggattgattggtaccacctatatcaacaaggtgcatcttgttttttggtagcgcatcatgaaagaactctacggttaagcatgcttaacctggggtaatttcaggaagggtgacctcctgagaagttttcccagaatatgtgcatgtgaggacaaagcaccctgtaaatactcgttttagtttgtagggtcagtcgtcattccatgaagcagccagagtgatgtacttgcgtataagagccatcatttcgtggg

SEQ ID NO: 21812 - DNA, 3181 bp, Cannabis sativa
aattcttccaaaaaatcgaaacaggcaactgtaatggcagcgaggcgcactgaagtagcattctcgtgttgacgagataaggcatcagcagctgagttctcccttcctgccttatattctattgtaaaattgaagccaattaattttcgtaaaaactgctgctgatctggagtctgaagaacttgagagagtaattctttaaggcttttatggtctgtgcgaatgatgaagtgacgacccagtaaatattgacgccatttggttacagcttccactatcgcccgcatttctcgaaaataggccgatgtgccagcaaatttaggccctaatttcttgctgaaaaatgcaataggatgaccattctgcatgagtaccgctccaataccagtgctggacgtatctgtttcaagaataaatgtctgagaaaagtcgggtagagctagaactggcgtgttagtcattgctttcttgagcagctgaaaagctatttctgcttttgtattccacagaaatttatccttttttaacagatcagtaaggggggccgctatggatgcgtattgagcaacgaatcgacggtaataaccagttaatcccagaaaacctcgtagctgtttgattgtttcaggtttaggccagtcaagcatagttgatatcttggctggatcggcttggaccccttgagcgaataccaagtggcctaaataatcgattgatgactgaaaaaatttgcatttcgaaactttggcataaaatctgtgtttgcgaagcagctgcaaaacgacccgtaggtgctgtccatggtcctcccaggatttgctatataccaaaatgtcatcaaaaaagacaattacacaatgtcgcagaagaggcttaaatacctgattcatagtagattggaaggttgatggtgcgtttgttagtccaaacggcatcaccgtgaactcatagtggccctcatgcgttctaaacgctgtcttgtgaatatcttgttgtgccatacgaatctgatggtaccctgctctcaaatccagctttgaaaacacttgtgccccgcctaattcatccaacaactcgtcgatggtgggtatgggaaaacgatctttgattgtaatgttattcaaggcccgaaagtctacacaaaatctccaagagccatccttcttcttgaccagtagtacaggtgatgcgtaagggcttgtactaggttgtatgaatccgtaactcaacatttcttgcaccatcttctcaataacgtctttctgaaagtatgggtaacgataaggtcgaactttaactggctgtgatcccgggtttaaacagatgcgatggtcagtaccccggtgcggaggtagttgccgcggttcggtaaatacatccacaaacgaagtcagaactcccttggctactgtcggcaatttactctccatttcagatatctctactgcaatgttctctgtcacaggtgggtcggctgccaacataaacatttcccgaatgtctccttccctcaccatggaacgaagctgagtaaacgagagttggtgcgaggcggtacccgaagatccagctaacttcaccactgctccttgccactgaaactccattgttaatgctttatggtcgtgaatacaaggccctaaggtctgaagccattgcattcctaaaaccacatctaaaccccaaataggcagtataaacagatcaaccaaaaaaatatgaccctgtaaaattaattccacccttttgcaaacttgagagcaccataatgaattcccattacccatgtacactttgaatctctttgtctcttcacagttcaaacccaagcgagcagctaaggcttcttgtataaaattattattacttccagtatcaatcaatacctccaatggttccttaccgtggtaagctgtgatccgaaaaatccgcggattagcggcgttggacagggaattaaggctgacttcttcagcgaggctctcctcctggtctgtcacaatatctcctcccatgactgtttcatcatcctcctcttcgtctccttgagcacacaaaatgagtaccctgttcttacatttgtgacccgggttgtatttctcatcacaggtgaaacataagcccttttctcttttgtctttcaattctgcaggagataagcgtttaactggtaaagaaggcgaactgggtaatggcaccttggaatatgatggagtggttgtattagtggtaattgaattaggtgtcgatacttttggggaagctggcgaagatggattcatgaagcgaggagaccatgtggaacgtccattatcacctcttgtacgacccaacagatcctcattgcggtcttcaaacaactgagctttggccattgcatccgccaagtcaactggtctggccaagagcaattctctgcgaatttcgttcttcaatccccacacgaagaagttcaagaaatattgttccgaaactcctgagatttgagtcattagtgtctcaaattcattccgaaaatttgctacactgcccgtctgaaccaactttgcaattcttcccaatggatcatcgtaaatggacactccgaagcgtaatcgtaaggctcttagaaaggattcccaatctggaaacccgccacccttctccatccattgaaaccaagttgaagagattccttccaaatgaaatggcaccatagccaatctgagttctggccgtacaccgtgtagatcaaagaactttgtaattttgtaaatccaatcttctacattcgagccgtcgaaaccatggaccttgactcgcagcaccttgagaagtgaattgatatcccttgagtcaacatttgctggttgtttgggtctcgatggtgaacccaacccactggttgcagttccattgccttcttgttgtttggatgaaggggattgtaattggtcgactctctcatccaatcttgcaacctgttcgtccaatctcgttgagaatctagcaaactgttcagctgagtgtttctggaaatttgattccagagcttgaatcatagctgccaattcctcgttcttcatcctgaaatgaagaatcaatgaaagcaccaatgttagagtctaaaattgatacgtattgtttgagtcaatacaaaactcccaacaaaagctcaaaaaaagcttaagaacaatcaaca

SEQ ID NO: 21813 - DNA, 2931 bp, Cannabis sativa
tattatccacccacccacctgaaatagtaattaagctctttaatattatttactattgatataataattaattaattttatatatatcttagcttattgtttttgcattgaatgacttatccatatggtttgactagatcattgtgatcaaagtttttatatatgtgggacattattaatgggcgtgcatgttatgggagactacatctacaatatatcttaccaattattttcttaataatctttgtttctttaaggcaaatctctatatatatataaccaacatgccattttaaaaagtactagaagagaaagaaaagaaaaaaaaaagtacaattgggtctcctaagatagacaaaattaatgagaaagaatcacatttcacttaatcaaatttactatagtatacttcaacttttttttgttcctcctcaataagaatgtaataattatatatatagagaggccgatttggttgaacttttttgaaatgttggagatatcatgtgcgattatataaagcccagaacagtttattatttcagatcttgattatagatttgatcacaattgttgaataattgtcttttttttttctttacctttggcatacagatttattagctaatgattttattacctttatgttttaagtattatataataggctacatcatgatcattatagtatatgtattaaaagttgccaaaagtctttttgtttctttctcataattatttattgggcaaattaaggaaagaataaaacgagtttaataagatcttttagaagatcaacatcaaggaaaagcagtaaaaagagtaattaagagtaccttaagtcatctttctgaggccacataattggaacaaattacagagttcaacatcttccactaactctcccattatatagttcgaaaaaggaaaagggtaattattattttagttttggttttatataattttttttttaaaaaaatgtacataccttgcacgtaaccaaaaaaaatccatttcacaaagccctatagaatcatatgctgtcgaattcaatttatataaatgtgccacattgatgatgatgatgatgatcatgatgagtttctcactcatcacttgatccctttataactcattcttatccattccatgatgcccacttctgtttataaataggaaaattcatattccttgttttatgccacgtcgtagacttaatttgcttacatctaagtgtgtatatttttagtttgtattgtatattggtcttattaattaggaataaatatcaaaataaagaaagattctatttactcgtttcataacaagatgataaagcattaaactgatttttgtactcgactgaatattttagctttgattgggtagtgaatggttgctgactaatattttagttgaaagcaatagagcagcaaataatccatcgaagtcgaactatttggttgaaatatgcacttgactgtcttgcagtacaatgtctacggacagcccaagagttaagaccaaataatggcagaattgatgaagtcatgaagaatggctatttacagaaatttggaaaaaaagaaaaagaaagttttgatatacatatatatttatatatatcttagttgcactaaatatgttatttaaaaaaaaaataggagataaatcatcataaataattatttataagaagaaatattataaaaacttaaaaactcatatatatatatataaattttacttctatataatcaaaaccaattttaaaaaaattagtttcttgatgaagatattagttttttaacaaaaaaatcagttaaaaatagttttattaaggcaataaattaagaaaatagcttatgcactttcatataagatttgtttattataaaaccaattttttagtttaagaaattggtttcaagattcccaactgcaacaaaattcgttcgttcctttgaggttttggtgatggaaatctcatatctaagtcagtttgagccgtcggttgccgaatgtgtgggttgctgattgtcggatgtgtcgttggtgaacggaggtcgataggtggactattgaaggatgaggcatgtagggtacttgaatggaatggagaaatttttttttttgagattttttatttttttaaaaaattaagcttacacatatatggtataaaaaatgccataaaatgatttaaaaattaaaatatgccataaaaagtggtcaaatttaaaaaagccatatatttgtaacaaagtttcaaaaaaaccatatactgtaatttcctcattgaaaaaaagaggcccattatttgtcactgctagacaggccggccctaaaaaattataggcctaaggaaagtttaaaaaaatgggtctgttcttttgtctctctcttcttttttttttaccttactttcataaaataatgcttttttctatagtcaatgcctcaatagtatagtttttctttttcttttttaatctggtatggataaatgggaggaaattatactctatactctttttatattgtcatcttttatttttaccctcttttttaaattctatcattttacttctttttataaatactttgtcaattctgctcctgtcacttcaatatactctatgtgactcttttatgttagggtattttgagtataatacatataaaaagaaatatgtttcaattaaatataaattaaaagtaaatttggttaattgataaataaaagaaatatttttcaatatgttatatataagatttttgggtcttaaagtgccggtgggccctaagacgggcctagctcaccttagctcagaccgggcctgctggtaggtgacccttaagactatgaattcaaaagtcaacaaaaattaattttgcatgctttaatatggctgtgctgtacctgga

SEQ ID NO: 21814 - DNA, 2403 bp, Cannabis sativa
aaattcactaggcaatcaatagcactagtttcaccaatcgaacatactcatcaacgtaatcagcaggtactccgtatgccaacattcgcatagcagcagtacacttctgtagtggagacaaccctcttttactggttgtatcaaacctcatttggaaataacttgaatgactttctagagcttgcactatgcttagaaaaacgtgcttacgcattctaaatcttcttcaaaattgatattctgtatagaccagatgatcagaaaagtagtcatcaaacaaacgttggtgtccttcttcacaactcctgtctatgtgatttctctttcgtccttgccttgtagagctacttccaacaaagaattcattgtaatatttttcatcagaatcgtcaattaattttgaaattaagatatcattcaaactcatattttcatacggatttggagaatttggtgaatccatgatcaaacttatagtaaattaaatttgataaatataagaagtaggttatatttgataagtataatgttgataaatataagtagattacagtgaaagattgattaaaatgggaactaaaatttgatatttatagatgttaaattgctcaactaatttagaagtaattaaaattctaagtgctcaactaacctaattaaatttacaagtacccaactaacttaataattaaaagttagctgcctacttcctaactaactactgcaatcgtatattaaataaaatatatgaaagaacatcaaaaaaattcattaccaataacttttttttagctctctttaattaccgatgtctctaccactggataattagaactttttttatgccttcacattgatgatattatcaaaagaattcaatctcaaaaaataatatatttttagagcattgaaaaacaaaatcatttcaaaccaaaactcaatcatatttatttatattacattatttaagttaatatatatctattacctattataaaagagtgaagtttggtattgaaatttgggttaaataattttgtcttttgctaattaaatttttatctttttgtttagttttttttattttatttcaagttttttaagagattatatttgtttttttttcttttttaattatatttggcatgcatgtcatatttgttataaattttaaattaaacttctaaatatgaatgcatagatatgttttctataatgatattattggcatggagtaataataaataataatagatattgttggcaaccattagaaattcttaaatataaaaaattaaagttgcactagtgtaaataaaattaaaaaatattaactaaataaaataataaatattaataaaaatagtacaaatacataatattacaactttaaaatattagtcttaatatgactacataaatttttatgatcttttctttgctcggccgtcatatgtgatgtgtccatgataagataatccatatattttatcatcatattatgttccgtcttttttttttattgccgctatttttttcaaagcaacttgttttcgtgcattaacatctataaatgcagtatgtgtttctttttttcctttcccttccacttagccgccttttggctagtaggacgcacttcatgaacttcatgctcactcattttcacattggacgatgaagtatatgcccctgattcggacaactttattctcttaccaccttcttgtggttaaaaagttgtattctatttcggctcatcctttagcaatctccaaagtgtacatacaaaaaattagaattattattttcaaatttatacattacatgtgcatttttaataatttgctcttcagaccaaccactatgatgggcttgttgtactcgtttataacacccattgaaacgcatcaccttttgattcatcttgccccaatgatcttttgattgttttccagttcttcgttcttcacctttgtggttggtattgaagtattctgtgattcgatcccagaattcagtagaagtttggtcatttcctaccacaacatcctcagatgtattaagccatccactttttagtagtatgtttgcttctttgcttcatttgagtttacttctctgacttgatagatttttattgtcaataatcacatttttcagccttacataatctatataaagggtttcaaatgccgataccgatgaagtttctacatttaaattaattgtactcttttccatacttgatctataaaaatcatatggtagcgaatttcgtattgtgaataatggaatatgttgagaagtctcaaaagggttaaaattttggtgagagaatgaggatatgggaaaattttgattgagttgagaatactgaaaatttggattgcaggggttaga

SEQ ID NO: 21815 - DNA, 4543 bp, Cannabis sativa
  modified_base (4325)..(4326): a, c, t, g, unknown or other
tatataggatatattattttatttaattttatatatatatatttttttttctgtgaatcattcattttttatttgtttattattacatattttagtttttatttactattatatatttttattttaattaaagtttttttttttaaaaaagaaataaataaaatagtccaatctattcttaaactaaatacaggattactttcagcataattcaatcttgtccagtttagtccaatcctcttcagtccaatccagtctaaccctgcgtaccaaacggaccctatagttattaatgatatattttgtgcaatattagaaataagatttattattaaaaaaaaaataggtaaatatgatatagtttttttaattatagagattttattgagttataaaagtgtcatgtattacatttttttttttttttttatgcatgtttgccacattgatatagtttaacaatttagaggtactaagaatttttttgggcatttaaaaaatgtgagattaagtgaattatttagaaaataacccgtttaccctttgagtattataactttttgaaagaaattataactacttatgttttagtggtaagggtaatatataggtcaagggatacaagattagtatgaactttattcatattaattaaataatagttttaatatatgtttttggtagaaatctctagaaaggaaatacataaaaccaaaactagttttctctctgccaaactcaagaacaaaggagattataatttctcctcaaattcttgcagaaattaagtgtttttgaaagcttctaagtgaggggaaactgtagcaaaactcaaggtatccctctaagtcctttttcttttgaattttatgaagtaaacaataggtttatatgtgctttttgggtaattggttttgtattgaatttttaagttagaaagtacgtactttctgtgagtttttaagttaaattcttgcttgttttagtgagttagatcaattaaaattggtttgaatcaaagtgtgagtttttaagctcaaagcttgatcttcaatggtataatttagttctatgaatgtttttgtgtttttgcatatcatatgtccaacctcgggttctatttgtattttctttgtaacatccaacactaactgcttaaccaatatgttcgtcttgtagtaaatttttcaccttaaacgcgaataacattggatttttgaaatccatagtacacctttctaaaaagacaactaaagtttcatccttctggtataacatctctattttcttcttgtagtcactagtaattgtatacttatctaaccaatttcattctcaatatcacactcagttataacttgttgcctaataagacaactaatcaaactatattcacctaaataaggtaatcaataatcactgttacttaattaagtaatccattaatatctcctattgtttaataattaagaaaactatattaaccctacaatgggtttatagagtaatagttgtatcatttatatggtaataactataacgcctggtatatatactcataaggaaattaatctcatctagtgaaaacaactagtcctttagtagataacaacgtaccatacccacttaatgacacgtcacctgatctactattccattatagcatcgaatcaaactcaactttcctcgagtgatgttctcatgcaatttggacatctcaaataaatttgccactactcattcctgcccaacaataatcttgaccaacttgctaaaacccatatctaaaatttacttaaattccctctttcgatcattaaggcccaaccctaattaaccctaatcggcactaattagtggctttcgagaatctcttctaatgttactttctttgttataattcatgatcctctctcccttatacgtaaagtgtcaactcgactacataaacatataatcatataacccctaaatgattaattatcacaatcacataattaacttttcatgctcttctaaacctcaattaaaaacttgcattccttaaggcttccgtagtcactccattgaagacaactaagtccaaacagcaaacttggtggcatgctcactctttgacatattgccctaattaccggccagttgttcacgctcactgcttttactacataggtagattcattacaatatctcttgtaaacattaactgagatgatcatgatgtccagttcatgaccctgagattcaaactcccataataagtaaatatcctgcatgcatggagatagcgcaattcagtcactcatttccctcgacccatgataaagctcaaatgaaagtaataattttacttttccactgtcccacctttagtggatcccaaaccaccctcaaaacaagaaggttttgctttccgacccactcatacaacatttccacgtggtcttgcacatttctgcgacacaacccaagatttactgacgagacaagcctactacttcgttgatttccctttctcgttacagtactactagatagtcttccaagtgatagcgtacctcacttccctatttcatcgtaacgatgattatcgttctcctaaccattcctaaacatagagattctcatttatgtctatttgattacttcagaggtattgctaaatacccttacggtccataacttacaatgatcgaaatttctgaccaaaataataatgttaataagcattttctcttatacactattaatctcatatctattatacttcttaataaagatacaatcatagcatgttacaaataaaacttatctcatgcttctctaatattacatgtaacatgtaaaaaatcacatataacaagtaaacagatatacttactataccatgagtcgagcttatcttcatagtaaatatatatatccagtcagttttcaacacctttaaaattgtgttttctctgatactatgttgtaatatcctaactcatggggacaccacacgtgtgtttttataaattagtttataataataaactaatgatttaaatttaatgacaattgtgatttaaattaaaactcaataattagttataacataaaaaggatgttgacactacaaaatatttagggttagggatcccctttctaaactggctgcatcggactggccatcgggccctatcgggtcctatatcagacctttgtcttcaacccatatctaatttttttcatcacgatgcattgcatcagggatacatcagacctgcgtcgggccttcctaaaaaatgtattatggaggtgttgaggttattgtgaaaaaattagatattctaaggtcatccgagctggacatctagcaccattaattaggcatcaagctttattaagcaaattaaaagttaatttttttctttataaaattataatttgcggatggggaataatggatgagctttttatggatgaagagatctccagacacattctttaatttaaataggctttatttttattatatgccaattacctcttcccctcatgccatgtttgctccaccgtgccattaagctactaagtacgcatctattatagaccacttattcactgatgtggccaatgtttacttggaaggaaaccaatagtaaaaggaaaataatgttcaccttgttgtattgtaagggtataagaacctcacatttgtgataaaaatataaaataaaatagaacctggcatttgtgacaacatgtaccgcaaatgcaaacttattagtaaagatggacctaaaatctaaatgggctttattaacaatatacataggggaattttatttaataaatatgggaattgaggttatagtttacttttttatatggtataaataaataacactatggggttatggtttttatttttttattattttttttttacatttatatgaatttttttatgctatattttttttaaaaaaagtggaaatcttatatttgtaaaacaacaataagattaacatgttgagataaagtatcatttcattaacttttatttgttctatttttgtttatatttgagacatctatttctggtgactttttcagtaacttttttcggcgacgataacttttctgatgactttttccgcgacttttctggcaccgatgacttttccggcgactttttcgacaccagtgacttttcttgtgacttttccggcgccgctgacttttctgacaaaatttatcattgtttacaaatatagaatttccatatttttttacaaaaatatggcataaaaaaaacctatataaatgtaaaaaaaaannaaaaacacacacacacacacataaccccttaatattatttatttatgcattgtatatttattttattctacctattttaagatatacttatttttatagatgatgtctctattatacccttaggttaatataaattatgtactaagtgaaggatgagggtagacaactcactcacaaaagtggatactttttaataaaatataatatgagagtattt

SEQ ID NO: 21816 - DNA, 2828 bp, Cannabis sativa
tataaatatatagcatagtaaatttgtaaaattagtaatattttataataattgttaaatgaaattttgtaggttaagatttaatacttaattagatcaatattgatgtaaatttctggtctttttttttttttttaatttctcctatttatctataaaatatgatgcacgtggatgagtatatatacaacatataataatgcagataattgcatgacatgtacgattacccttttatgcataagaaaacaattctacgggacagcaataagctatttatatgatgctgcaccatgcgattaactaattaatgcaattatgaacaataatcaagaaactctaccctatttaccatagcattaatatccatatcttattaaaaccaagataaaacacatttggggcaaccattaatgactccaattcctgttttatctacagaaagaaaaagaaaaatgaaatgatgatacaagattgaaagactatggagaaattgattagctaggattgatcaatatatagaccattaacttttatcttcatatatagacatgaaaagaggtcatcgaagctcagagtattagctagctctgatgaataaatagtatggaaaaacatcatttttttttattgaattaataacttacaattcttatttccaaataataatgctcaatctctataaacctaataatgcacacacatgagaattaaacatggattattgatcattaatcaagataatgaaagtaatattctcatatatacatatggagagagccaaacaagtcttcataccgtatatatatataactgatgaggggttaaattcaaaaggcaaaggaattcatatatatatatacaagaagcatatactaattaatctccctgaagatttgatattcctttagctagttccctaataacaaaattggatttgcagtttagaaagaaaaaataaattagaaaagaaattgatgacattgatcagaataaaacaaagcataatatatatttgtgataaatacatactacatacttactcttactggcccacaaaaaattatcttggatatatagctcgtaaagaaattaaacgcatgttaactctaattacactaccctccatcatatataattttagaataatgaatgtaacacacttaatatatacacacacacaacaatatgtaattaataaaattaagaagcatgcgatcccaatttaaatctatatctatggttaaaattttggtatatatatttgtgcgaaaaattgtataagtgtgtttcaagcagactcataattatatataactataaatataatatttatatgtctcttataaaatcgagattcagaatgatgagatcttcaacaatcataataaatatactccattaatagtaacgaaagcacaggaaagctagcgaaagtagaataaaatattatccattaaaaaccttaaacacctttcgttaatgatcaattgcctaattttctcaattattcgccctttttttaataaattaatcgatcaaatatagattacatacttgcttgacccacagaatctagaaaatctttgtaaagacaaattttggggaaaaggtatcataaaaacaacaaaaacaaattttgtagaatatatgttgaatttaaccaaccaaatcttgtcaattaaaagaatatatatatatacgtacctgatcaatcgtgagaaagagaatgaaagaagttgagaagctttaatttatgtgttatgaatattaattaaaaataaaaaaacaaggagaggtagagaggctacatgagttgataacatataattagttcaagtagaattaataaatatacttaccaaagaagacaatgtacttaaaatatgtgccctgatggtcgtcctattcaaaagtgagttggccaaattagggtttttggtatgtatcttgggattgtataattgttctagtttagcatttatgtaaagaagaaaaaaaaaagtgtgtaagccatgtacaatcttctatccaggcgatccttaacttattgtgtaatatataataatattctgtataattttattttttacttaatatattttagtagttaatgcaatcacatatagataaatcaatcaattaatccatcaaataaatcagtgtggcagtaaagagatctgatgagaatatatctataatagtaaaaaagaataatcaatgagatcagatcggtatatatatatagtaataataatcaataaaagagaagtaattatatatttagatttaccatatcagaaaaggacaaaaggattaagaagagtgaagaagatctactaaaactgcattccagtagaagaattagttgcttcatcactcatccctttatcctgatctgctttcttattcttcttcttcttataaggaatccctctagccttagcttggcactccctcacctccctcagataaactcttattgcaccgctcgcaaaagggtttgtctctgggaaccctccattctcttcataggctgctctgaggcggcctatgagagcatccagactcccccacgcttgcctcagcgggcaagtgcaaggggctgggggctcgggttggccatagaacatgcagccttggtggtggaccttcgtcttcccgaactgatctaagtacctaagaaaatccaacacatggttacaattgcactgagacagggctaccggaggcctttgatttttcaggtactgcccgaatgtgttccagtcacgcctcttctgagattcataccggctcggagtagtcgctgcgggtgccggctgttc

SEQ ID NO: 21817 - DNA, 3126 bp, Cannabis sativa
ggacatggatgcctatgagtgatgccaaattgttttagatgatcagtaaaagatctaaattcccctccccaatctgtttgaatgcatttgatctttttacctagtacttgtaactcagcatctgttttgaattgcaaaaaggttttcaatgcctcaaacttgtttttgagcatgtaaatccatgtgaatctagaataagcatctatgaaatgaatgtagtatttatagccattaacaaagttggttttggcaggaccccataaatcagcaactatcaattgcaagggttcattgtaaacagtcaatgatgcttttggaaatggtaacttgtgtatttttcctaagcaacatgcagagcaaacagacaagagatttttattgctaatactgatattacaagtttgaagaacaaatttcacaatcttttctgatggatggccaagtcagttgtgcaatagatcatactcagatagttgagatctgttatagtgagtacaaattgaagaaacagattcattatttggggatagagaagcagtaaaaacacatgggacagcaactggtgtgttggattgtacatgaaactgacattgtttaaaaatatagaggccattctggtgtatcccagtgagaaggatggcttgtgtttcctggtccttgataaaacacttatcagaatgaaactcaaaaagacatgattatcatgagcaaatttagagacactgagtaagtttttggtaatttcaggaacatgtaagagattatttagcaaaagaggatgagagttatttgtatgaataaaagattggccaatgtgtttgattgacagacctgtacatctccaacataaagctgatctgctccttcatacttagtgccgatgttgaggttttggacattaggcgtgcagtggtttgatgcaacataatcgggataccagttgctgtcatcaacaagagttgtttgagccacattcacttgagcattgggagaactggatgtggaaaatactcctgtaaagcttttatcaaatctataaaagcagtcgagaacagtgtgtccaagcttgtggcaaagctgacactaaactcgacttgatgaggtggaaaatctgcatcctctactgaaaccagaaacaccagaagtaccatgaccattagcatagttaggattaggagaaggattagtgtagttacctccattgttgctaacacgattgttgaagccacttccatttatcctagctgatccagaataggatgagggtgggaatttgccttgatttgggaactgttgccacgatttgcataattttgataggcgatattagctttagacaattgatccatcttagtagtggcaacattaacactcagatcactttcttgatcaagatctgtcttttcgattcgagactcggaggcgagtaggagagcctcaatttcagcgactgagtattcttcgattctggtgttggttgatatgatgaaagtatcatattcaagtggtaggcctttaaagattgtagtaatgtgatctctgagttcaaaacttctccaaccgaggcaagaagatccacatgttgtttgacttttagcaagtagtcatttagtgacattgatccttttcttaatttctgcaatttttttctgaactccagaatcttggaagagacttgcagagtgaagtgtttctcaagagcactccagatttgtctcgctgtgttggatccgaccatgcgtgtaagaagactctccgtcattgaagagagtagccaggaaacaagaatttgatcttgaacctcccattcaagaaaagctggattataagtgtttgaggcttgatctgcatcatttaggaactgaggaggaggagcacgatcttggatgaacattagcaatcagtttccacgaattgcagcaaggacttgctgtttccacaaaagaaaattgtgatcgtttaatctaatggacatattgtgattaaagtataccgaattgaacacatcggagttgtttcttgatcgactgagattagaagctccattaggttgcacgactggtctgttagaattcgaattgttctgagtgttgtaggtgttagctccaacgtttgccatgttagccgagagtgaggggaaaagctctgataccatgttgaatctcttcgccattgatgaacactcaagcaaacaacaattaccagaaaacagaggaaaaacagagacgaagagaaagatgaagaaagagagagaaaggcaagaaaagagaagattgaaacaaagggcaatcttgtcattgaatgaaaatgagtgttggcattatatagccaatgattatatgaaggagaacaagatagtaatgcgcaaataaataatatggcatattatatatatcttaattaatttagcgattgtagtacttaaattactgaagttatgtttttagcaccgaaaatatataaattattatatttgcaaaagttaagtatttaaattatcagtatataaactgttatgtttgtagtacttaagtgtacttaattttttttaatatttaagtttacttataatttgcacccttgcgctgcatatatacttaactaataatctctatttgaatgctatttaactgaattgtatacactttattgttccaaaaagctatatacacaattaatttggaattaatgttcaatatattaatatattcataaaattttgaataagcctaaattataatcagaagaaaattatcactacaataaactgctacttttagtaacaactttttagtatcacaacattaattttttgtaactaaatgtgatttttagtcataataaaagattatttgtgactaaaatatagcatttagacacaaattgtcactaatttatcacaataagtattgtgactaaaaatacatttagtcacaacaaattgtagtttttgtgatgaatacattaagccacggatcttttagtcagaacatacactactacaaaaaaggctttttgcttcagtttttaagcgacatataaagaatttgcttcagttggtgtaaccgacgctataaccgtagacgcaaatagtgatattttttgcttcagttatgaaccgacgct

SEQ ID NO: 21818 - DNA, 2874 bp, Cannabis sativa
atttgttgagttaagtatttatatattatatgtttttatatgtatatatattaattttaatttttttgggcctccaaaattatgaggctggccaagcccggaacaaaatcatatcccttctagtgactgtgtttagtatttttttagtttttactttttacatttgtgtatcttttgtaaaagaaaataaaatttgaaaaagtgcgcccaccgtggggctcgaacccacgaccacaaggttaagagccttgcgctctaccaactgagctagacgggcttatataacgttatattgagaaaataaatattgaacaaaaatgtaattatcccgtaagataattttatgaaaagagctccacgtaatgtgaaatcaatcacatatttctttcttcttttttgttttgggtggaatcacatctttctttttgctcactctttcaaccttaaaaataataataatgtgaatatgatgtgagagaaatctgaattaaggctgatggttcctccatctctaattatacattgtcctatatgtggatgtgctggttctccttgtttgtcatttgcggtggtgtatacagtgtcgtgcccgtaggggtggggcaaatggggcagtgataagaacaccttctttactaagtgatttgggagtcttggccaaaaaaaaaaaattgacagtttattaacaaataaatatttgaattagcaatcagtcttagaatcgtgtatttggaccataaattttataattaatcagtttttttacatgattcctggttactttatcctttagacccgtatgtctattccaaccatcttggtttgaaagacaataatgtttatagtctcttttgtttggacgttaaggagtgggacttgaaaatcatcaatgacttgttgtcagcctgtgactgtgatcttataatatctattcagctgagttcaaattatcatatggattgctagtcttaaaaacttgaaagtttcggcttattttctgtaaaaaagtgcgtaccaattcttggaaaatctcaaaagagattagttggaagatgctacctcaaatttttagaggaaaatttggaagttaaagatttctctaaattaggttagcaactttatttggagaggtattcttccaacttgtttgcaacttctcaagcgtcatgtggttattagccccatttgtctcatttgtcacgaggacgaggaatctatttttcatgctctagtgggttgttcttttgctagagcctcttagaatagatctatggttagtatttctagttggtcagatgcaagttttggctgctggtttcaatctctttcgacaacgatcaatcttcaagcattggaggaagcagcaatggtcgcttggggtatttggaaggcctgtaacgaggttgtttgacaacaaaaatctcctactgttgcattagttgttttgtcaacaagatcactccttaaccaatttctttttgcacaatcacggacgacggcttcgttgtctaacagttcggtgggacagctttcacgtgtgcattggattacaccagtcgctgatcagatcaaggtcaatattgacggagctttgtttaatgatgtcagctgttttgagatgggttgtttggcccgtaatcacacaggtcaagttcttcaggctttcactaaaagcaaaaggggaattgttagaccagagatattgtagaaatcatcagtataaaggaagctttaagttgtattcagtgacataattggccaaatgttttattgaaaacagatagcttggtctgtgtttaggctattcagagtaagttgcatatgccatatgagtttggtttgttagtgaatgattgtcggattattttatcttctttgagtcatgttgttattcagtttgttgaacgatctgtgaacaaagccgactattgtttggcacgcagctcttctttttccccaggtcgtacttttcatgatcatcagttaattcctgaattacgtaatattgtaatggtggactattctggttaactttatttttattcaaaaacaacatttattatatatacattataaaaataattattataaaaaaaaaatcaatatagagaattgctaaaaggtaccactagtacctaacatttttctcggtctcatactgttattggtgtaattaagtattgggcctcatataacttaaaaaaataacttttagtgaatatcgctaaccaatcatggagcgccacctgtagaaggtgttgggtaccactggtgcccaataacagtgctcttttaatataagagtgtgaggtttagaacacttaatcaaccaactaaactgtcttgacagttggcagttatttcagttaaatggacattaacctactgcgctatatataaaggcattcaacaacagagtaagagagagaaagagagaaatcgagttagtaagagattgcacaagagtgaaacatgagagctgaacagagatgaattctcttcaagattgagggtattgcaagactatttctagttcaaagaattcgacagttttgaagctcattttgtaactggtgtgaaacaccattagttctgttttgtgcacttgattctccattgatgtaagttgtaatctttgtcattaatcaataaagtaatcacagcctatcgagttgtttctaccctgggattaggtccaagttttatccaaaacttgtgactgaacctcgttatttcttgttgtcttttatttatttggtttgatacattttttggtttatcattctaagccattttattcttgcattgtgttcttgttggtgcttgagtgcacaacaaatggtatcagagcactagggagatcagggattagtt

SEQ ID NO: 21819 - DNA, 5017 bp, Cannabis sativa
  modified_base (4832)..(4832): a, c, t, g, unknown or other
caatgtaaggatttcttatcttaatctctcaagtgtttgtttattatttatttcatttcatcgtattaggaaattcatatttagggcattagattatagaattttaatcaacctacatgttagtaaatctagatcctagtaaaataagttccaacataagtaaccaggtaatttcaaatacgaagcttcacgtgtaccctaaactaggtgtagtgcgttctctttgcacttccaagcctttccataactaattggtatcacgtaattattgtggatatgttttcttatattagaggcataatgaatcagagtcgtcacttgcaaatttcttcctttaattaggtgggcaattatcaaaggtgatgcttgacggtttagggttgtaggcatgctataaactccaaacaattattagttctatggttcttaactttcagatcggtttgatttccacttgagttttccaaatcctcaacatttgtatgaattaattcttagttgtcaacagacatgtccaaacacacctactaaaattatcaactatagaaagaaagtatcgcttactagagtaagtaggcactttgtatggcccccaaagattggcatgcacatattcgagtatcttctttgttgtatgcctcgctgttgtgagtttcagctaaagttgttttcctaaaatgcaagcttcacaaaatagtaaggcacaagaatttaaatttttaatgataccttgtttgtaaaattcttcaaggccttattcaatgatatttcgaagtctgtgatgctacagatgcatattcaattcttgtcctttcactaagctagcttcttcggctggaacagtttctccttgaacatacaaaactatttatcttttcacctttcattaatatcaaagaaattttgttgaccatcaagtttcgttcatggacttgtatgtaaccctcatcttcaagtgcacctaaggatacgaggtttcttcttaattcaaaaaatgtgctagcattttttagtactttggttccaccatcatactgtctaatggcaattttcccggtaccaatgaccttgcaagaaaagtcatttcccattagaaatttaccttcataaactgatttataatcaaaagatgattctcaattcggagacaagtgataagtgcatctggaatcaagaattcactcccaattctttaaggattctgagacggaaaataattcttcatttgctgagcaatcatcactgtcttctacgattgcagctgaatctttcttattgtgatgatgctttttgcctttcctatctcaataataagatttgttaaaaaattattgctccttttacttcttgaagtatttttgcaagtgttcaagccttccacaaaagtaattaacactttcatgactccttcccctatacttcgatcttgattgagagatgtggtgtttactctttgaaattactctctttagtgatctccctcttgctaggtacacttcgtccttcttgaattctttctccaattgtaattcaaatattcttcaacttgagtgtggcaagaacattctccaaagaaatcacatctctaccatatttaatgatagtcttgactttgtgatacgtaatcgagagagatctcaataaaattattgtctagcttttttcatcaactctatgatttattttagccaaacctacgataatctctttaaacctatcaatgttattatctaaagaaagagaaaatatcattctaaattttctagaaagtaattcttgctagcaattgatgacttcatatagagttcttccagcttgttccagactcctttttccttcttctctatgaaaatctttcttctgacactattggacaaatacatattgatcgcgtaataggccatctcctccatttcaactttctcttcttactttttcttggccagtaatatctcatctctgatggctttggagtctttatgatgcactaagatgccattcagtcgttctcgccatagtgcaaagtctcttgttcgtgagaacttgtctagttccaaacttacccatgatgacattgaatgttgcagtagaaagaatcttgattctgcgatcttgatcgatgactacgctttgatttgtgggaagttttaactattgtgtagaatcaaactaattatagtttaatcaaccaacaattagcaatgaaaaatcaaccaaacacaattcaagaatggaaaaaaaatacattataatagagatgataaagccagaaataaacaatgcatgaaaaatgtaaaaataacatggaattatactattttaagtctaatagatcgatgtgatttatggctctactccagttttggaacgccactaaattctttttattgattgagcaagatcacatgtacaatacaattgagagcgattctctatttggattttctcacagtgttttcgctttaacactcttctctgagaagctttcccatttacaagacctaaaactcaatcctcagttttctctatacttctcaatcagatttctctctctcaaaaaacttgcgtactctgcttttggtgtttcatatttatcaaatcaagaggatggttgtatttatggattaaggatatgaatcttaaaagacagtgcattcaaacaactaagtagttaatttggttaagacttaaccgatcacttaactagctcctttctatgagatctccaagtcagctcttggcaacgaattttctccggacatgatcacactttttggatggaagtccaaaactagtgaagcacaaactggaaggaagtccctgataggcacaaagcctactgaaacaaactatctagaacaacattctggaggacaactagtttcccggaactcctttctggaggaacaagctagccttccggatatcctttccgaacgacaactctttcggatggataagctagcctttcagaactcctttcgaacgatgattagctttcctgaaagctcgactcgagacatttatatttagaggaactatacaaaggcttacgttaacaaatcctagcgacaagcataatttttgttgtagtggaaaaagtttaaagtatatttatctgcattaacttaattatgaaagttaaaactttttttagcagcataacacattgcataacttaaggtaaaatgtagattttaatagatatcaatcaatccccccaaaaatgggatatggacgattatttttatttacaaatgtacatattaattaattacactagtgtataatgtagtagttaatgaaactatatttggaagacactatttggtttttgaattttggaggatggatgataaagggtcaagtgaagggccacttctagccagtataggccaaaaaagcattgaatttgtagtggtttttagaaaagtttgatatctgggttttattttggcagtttgtgcgtctttgataaagccaatgtagtgcaagagggagacatttggaggacatatatgacaccattgaagacattgtattctcgtgcccccaaaaaactcttctatttcagctttggaccccatgtttatatgtgtagtgctgttatttattacattaatttcatacaaggaattatacttctctttattaattttaataaggtcgaatattgatcatcacaactcataacagacatgtgagatgttcagcctctgtaattgatgatgttgtatagatttaagaagcttctgaaatcaagattttttcttctttatatattaattgctttctagaatatttaattagcaatatatataaatatttatacaagattttcttttttattttaatcattatatatcgatgacaatgaagtaattaatcccttgcattgttattttacatacttttcaagtttgagatttttaacaacttcaaaacttaaagtatttaattgaactgaatataatgatgaatattcaagaagaggaggaacaaaatttaattgggttatttcaatcgtaccacaatatataacacgataatatatatacgacatgatactgtgttatttccaaagctatttttaggattttcgtccttaaaaatgacttatatattattatttgtgctctaaatttgttgtaaatttctcgtgtcaatttttgtcacacgtcaaacataatgataacgatgttgttataaattattaccgcgtggaatttaaaatatttctttcttttttttttaaaaaaaaaataatcattaaactaaattaacataaaaaattaaactaaatttttttaaattatttaaatacttagcactaatatgacaatagtttaactaatggtataattctaaatagcattttttaacgaaattatagtaaatgacgccaaattataagattatattagtatatgtttttatttcaaaacttatagcaaaggagtgatctttgtggattatttattatttatattataaaaaaaattaataattttttttcatattttttttagaattagaagcaaattacttaaatattatgatatacctatattagttctgttattttttttttttttgaaataattatgtcgattttttttttgttaatgtttttatgagttgttgtgtattgttggtatatagattttgttgtataatatatttctatttcgttgtatagtaaattattattcttagatgatatttttttttttattttgctatgtataatagtagtatataattttattagcatactataaatattttaatatatataattttattagcatgctacatatatttaattattntttttatatattttaattgtataaaatatatttagtttaaataatatttaattagtttctattttatacatacaacagtgatatataattttgttgtcatgatacatatattttaattgtggtatgtaatttacttagtgtagtatatatatatatataaattataatttggttagtatagtata

SEQ ID NO: 21820 - DNA, 1111 bp, Cannabis sativa
attagaaaataatttccataaataaaatattctaatatattaagctaaaattacattaatttatgaaaaaaaaatgcattattaataattatcatatcacacatattcatacttcacttagaattgggtgataaataacatctttccaaattaaaatgttttttttttttaattgagtaaaataaatgtttgtgacaaataaatctttctgaagcaaaaactcatttttgtattagtcattcctataagatgaaactctttaaaattgatttcaaatagtgtgtgccaaaccaagtctaagagttatgaaatcatgtattaaaaaaactacaaattctataattatacataataaaaacttaatgcaaactactattcatgattttaagtaacttcatatgattcatggtgaacattgtaatattcaattatctagcataagtttattgctatcgatggaacatttaaaagctagaaaattcatgataattaaaacataaatttgtaaatgttaataatttgtgtctttttttttctcaataattataataataataataatattttgtgtctttaagagtacgagtgtaatgtgtgtcaaaatgtacatcattaattatttcaaacgaaaaaaaaagtacatcattaatcttttcatattctctttttttttttttttcttttttgaaagaaatcttttcatatttttattttagaggataaaatatattttatttttttctatgcttaaagaataataaacaaaaaaaattgatttttaattgttactattattaacgttatggttattattaattattattaatattaacaacaataaaataaatataaaattttaagagtaatattatatattgtctttcatatacttgtattttttaaaaaataaatatatatttctataataaaaaatatatacactataaattcgagtaatgtcctaatcaattataaaaataagtggtattttaaaaaattattaaaatatatattttttaaaaaatatttttttatttgtaccgggtagtgcctagaagtgggcttagcccgccttagccaggtagttagacaaacatgacaatttgttttt

SEQ ID NO: 21821 - DNA, 1540 bp, Cannabis sativa
agcttgcctacggtactttcttccacttgtactccaaaaccaacttgcttatgttcctcttgagcaaaaggaaaaaactttattgtgttcctgttgaggatgatatgatatatttcttagttcttatctgattttgtaatctgcaagtttgtgccttgcaagttacatcaagatagttaaattaaaatgcacctaacatttttttccttgcaagcagaaatttgtgtgtgtttgcatgtttttcttttttaagtcatgttcttgcattgaaagttttatatttggtgatgtattagattccaactaccctcaaactggagaaggcatgtaatccatttcttcgaacttcgagtaaagagatcaggcagatgttaaacattccttccacggcaaatgatgcagaagctttgggtgtcatacgccaagctaaggatagtttttgagaagttgtagataaattcatctgttaaagtccctaagatcctaattgtttatatatatttcaaagtcctttttggtttttggatctacttcaagctgaggcctgagatacaacatctgtctttataggataaaagaatgatattagatttataattttgccaccgaccctttgttaaatttttgttccaatttggaaagccttgagattctatatgcaagtattttcttcatatgatatttatagtgaataaatatatatttatttatattggtgtaaggtatgcaattattcattgatgtggtgcttttggagctgtgctctgtcatgcttcccctgtggccaaaggaatatggaaaacacgcaactttattttggataattgtgtttagctggttggaaggcagtcgtaggtgaagatttagttttgtaattggacgtgttctgatgggactctgttgggttgggacccaaagatttgaaccctggtatcatcactaatctggaagtggtgaatttcttggctgataatggggtttcttgggatgaggcgttgatcatgagatcttttcgacctgaggctgctaagaagatattggcttgtaatctcgtagaatgccaaagtgaagactcgctggtgtggatgtcaagtacggattgggtgtttttctcttaaggcgtcttacctcgatttgcataagaggacatttataacagatgagatatgttcctctttatggaagtcgcacattcatgaaaggttgaagttgttcttgtggaaactatctaaagattgtctcccttttggctcgaggttgggaggtatttttggaaatcaagttggccagtgctttttctgtggcaatgcagctggtgacactgctgcccacttcttatgttaatgtcctatcactattcgtctttggttctcaagcaaatggggtattcgaattgaagatttccctctattctctggtgcagaggtggttaaatcgatgttcaaatcaatagccttttttcagcaacatgtctcagtttgacggagctgaattcgtaacctttgctgctattctgaacctttttaagcaaatgatcggg

SEQ ID NO: 21822 - DNA, 1605 bp, Cannabis sativa
taaagtaggcatatttttcatagtataaaatgtattggttcaaaaaaaaaatttgaaaacttttaagtatagaaaatcaaatttccctattaaaatttaggtacttaattatactataatttaccctatttataaaatgtactaggaacaaaattttatatcgcaacccatctatatatttatgtaatattgttgtattgtttgagaaaaaaacaatccataatgcaccatatgtagtatggattaaaattaaaattgcatggagcgtgggacaatttaagtaggttagtattttccttcacaccaattatagtgagtgaaaaatgaaaagatgagaaaaatatgaattgtagtttactgtataaaaagaaaaaagaaataaaaggtgggaagagcttcctagttgggagataaacttttaaataatcattttctgatgattcttatttaaatagctccatttgtgatacatttgatgagtatgcatggcttccatgcttgacacaattacacagtttatctcctccgtacaagcaacaacgaattttctataaaccaaaataaatgtagaattttgtatcaaaataagtaaaatagagttagttaggattgtgagctgcattagttagttagagtttgttatgtgcagttttcatgtaattatttttcagttattacatcttatcaactcagttgatatataaagtataattcttttggttttgaattgtgtgttttccattttttttcttaatatggtatcagagccactgtagttgtgtgttgttcttctcttcgtctttatctcgattgttttgtgttcatagccaagaaaggtgttggtacttaaagtcaagcagctcgagatagatacagtgagaatgcgaatccattctctgttcttgatacgatcttggtcctcgacattttgatcaaagcagagatccttattacattgcaaatggagatcatacaataacaagcttggttcctaagataaatgtgtggagaaaatctatgattgttgctttgtcagtacaaaacaaattacactttgtcaatatcaatattgagtttttaacggctaaaccctcctaactattgtttcacttgtacttaactcttcaatatcaaattttagcgataaaacgctttcaaaccactaaactgttagcaaatataaggtgtcatctggttactgtcatcatggactgtttatgtgtatactcttatacacatgacatatatatattggtacacctaatatatattatttcaaaattaaataaaattataaaaataaaaaatagaatattaaaaaataaaaaatatcataaattttgaaataattttttattatttttaaataataaaattagatgtaccactataaacgtgtcacgtgtacaaaaatatacacataagccgtctatgttagcagttaacggtaaaaaatagatatcaccttaaatttattaacagttcaataatttgaagagttttaccaccaaaatttaaacttaaatatttaagtgtaagtagattaataattaagagaatttagccacaaaaaactctcaaatatttaataactttgatgaagac

SEQ ID NO: 21823 - DNA, 3877 bp, Cannabis sativa
tcttctctaactttttctaacaaaaatgcaatcaaagaatacgtgctgatgagactctcggcttcacaaactgaggagcaggtagacgagagctccataaatctactaagatggtctcgggtgaggagttggttgttcaacgcttgctacgtaataaactagtgtttctggacgcatatcttgtgccaaatagttgctgcataattcactctacaagcattgacaaaagagttgtagaagttcttggccctgaatttcccttttgaaatagctctaaaaagagcatctctgtcaatggaacttctaagcttgattagcttcctaaagtaccaacttgagtgactcttcaaagctgctaaccaaaaattctgacctttcaaataaatagaatcaatctatttaacccaaagattttcttgtttggttgagactggccaaatatagtttaccatcatcataaagatccatttacggccttcacagaactcaataccacttgtaagaaaagcacatcagagtaaatatccagtgataattttattgaatgaataaaattgattacactagaaatacttagctttatatacacagctaagctgaagagagagttagttacaacaaaaaggagttagttataaccgtagtctaactaacataacagaaaagtacatgagctgtaactaactctaacacagtaagaacctattctctaacagccgtcctcaaactcagtgaggttgatgaaacaacactgagtttgtctttaagaattgcaaatctagagctggacacaacttcggtgagagaatcagcaagttgatcaagagcaggaacatgttgaacttgcaattcaaatcgtagtaccttatccttgacatagtatagatcgatatctatgtgctaagtgtgagcatggagaataggattagcagcaagcatcaatgtgctgagattatcacactagattttttggagtggatattgaagttgtcggaagtcctaactcatggaggagagacgtaagccaagtgacttcagtaacagtagcagccaagcttcaaaattcatcttctgttgatgacttggaaattgtttgttgctttttagacttccaagcaactaagttcgatctaagaaacatacaatattcactggttgagcgtctatcatcaggatcggacgcccaatcaacatcacaaaatgcctcgatatgaaaatcattgcactttgttagatgaattccatagtcaagagtgccaggaaggtatctgaaaattctttttacaacaatccaatgagcttccaaaggggattgcatgaactgtgaaactttgttgactgaaaatgcaatttctggtctagttatagtggcatactgcaatgctcctacaacggatttgtactgtgttggatcttgaacaggatcactaccaaacttggagagtgtcaaaccatattgcataggagtaatgatgcttttagcttcttgcattttagttcaaacaaggagatcctgtaggtatttcttttgagagagatgaactcgagaagtggtgtgatgaatttgaattccaatgaaataattgagatctccaagatctttaagagcaaattgagaatttagattagatatgacagtagcaactcaagtttcattggatcctgtgacaataatgtcatcaacatagacaagtatgtaagtgagatcagttggtgtgatgctgataaacagagaagtatctgttttggctgattgaaaccctagattatttaaggcagtagaaagctttgagaaccatgctcgaggttctctgataccatgtaagagaagcacaccaaagtaaataaccaatgatgattttattgaatgaattgaattgattacactgggaataacttagctttatatacacagctaagatgaagagagagttagttacaacaagaaggagttagttataataccgtagtctaactaacataacagaaaagtacatgagctgtaactaactctaacacagtaagaacctattctctaacaccactaaacttcttgggaaggcaaagttttttccaagaaggaagatgatacttacttttattttcattataaccccaaaggaaatctctagaacacttatcaatgtcagctacaattttttgaggaagaataaagatactcatccataaattcctgatgtccaacaacacggaatggataagttgagctctccctacaaacgacacgttcttactggaccaattatggagatttctctgaaatttttcaagaatttcaccacaatccccagctttccatttcgtaggcctcaagtgcaccctaaggtacttaagaggaaaggacacctcttccatattcataatactcaaaagctgatttttatagtccgctgagattccactgaagtatacctaagatttagatttatttataggaagactagtggaattactgaacctcctaatagtcaattgaataatctgaatggacttagcattacctttacaaaaaaataacgagatcattagcaaaacaaagattgacaagcttcaagggcttacacaaaggatgaaaaccaaaccctttgatattggagtcttgaagaagtaactgggttagtaatccatgacaagaacaaaaagaaaaggagaaattagatctccttgatgaagacctttttcccctttaaaagaactatgcaaccgaatgttgagcattagagagtaagatgttcctctcaagcagaccaaatccaatttataaacctcaaaggaaaacaaagacccttagaagctctgaaacaaagtgccagtcaacaatgtcttaagctttgctaaggtcgattttcatgatatttctagtcaaaatattttttcttgtataacccttgagcaagtcttgaaatattagaatgttgtgcgcaaaaaaatgattattaacaaaagctccttgattattatggacaagagaaggcagtagttcataaagtctaccacatagcattttagatatacatttatagagagtattgcaacatgctataggcctgtaatcaatccctgtagaggggttattaatcttggggataagagaaataatagttttattaagatctcttgggagcaaactatcttgaaagaagttgagagtagtgcccttggtaatttcatctccaatctcacaccataattccttgaagaacctagcttaataaccatcaagtgcaggacttttattagagtggattccaaagatagcatccttgacctcagcttttgaaaaagatctgatcagtctgacttgttcagacttgttgctggatgctaagaaccttactgaatttcaaacaatccaagtcaatgtcgctcaagacatcacttttttttaccaaaaatttctaaaatgggtgatataggggtggataatagtattgtactcatcaataacctcaccattttgaacaaaagtggtgattctattctctattttcctttttttatggcgtaaaaaatgagagtttccatccctaaattgtaatcgattaaccttacttaattgttgcataacttgcatacctcagttgagcaagtttatactcatgaagcttttcttttagctcgcattgcaaaagcatgttagcaggatcattggatagagcgccttgagctgagttgaatatctcagcttaattctcaattacatcttcatcttggatcgaaggaagttcaatctccatttagtttgttctatcattagtcaccaccgccgccgactttagggccaccttcttcttcctacgtatggggagaagaaacgggagcaccacacgctctagtgttaaaagttatttctgtt

SEQ ID NO: 21824 - DNA, 2298 bp, Cannabis sativa
  modified_base (43)..(56): a, c, t, g, unknown or other
ttttagaaattcatattaggttgttaaaaacatacttgttagnnnnnnnnnnnnnnggtaaaatatattccaacaagatctcgaattcactagctccaatctggggataaaaacactcgttttttttttcacaagttcgcttctaatagaaaaaaaagccaatcgaattaattctctcactcttgatgatggctcataagtggaagacactgaaagtattctaagcaccatcgaaacctactttactgagctctttacttctcaaaattcgcaagatggtgctattggaaatgcgctaactagagcctttccccaactcgattataacctttatcaaattttggaagagactttttctcctgtagaagtaaaaaaaagccttattccaaatggcccttgacaaatctacaagaattgatggtttcaacaatcaattttatcaaaagaactggcatgttgtggggaaaactgtgattgaggatgttctcaactttctcaaaaaccaatctaatatatcccacttcaataccactcttgtcactcttattctcaaagttagaaaaccctcaactctgaaagactatcgccctattagcctttgcacaactgtttataaaatcatttccaaggttttggctaatagaaacaagttaattatagaccctctcattttccctaaccaaagtgcatttctcaagggtcgtctcatttctgacaatatccttatggcccaagaaattctccactctatcaaatgtaggaaaaagggtaagattggatggatggctgtcaagttggacatggcaaaggcttttgacagagtcgaatggtgcttcctgaataacattatgcaaaattttgggttttcctccaaatttatctccttaatcatgacttgcctgtccactacaaccataggttcaatatcaatggtcatgcccttagaaatttcattccatcgagagggtttcgccaaggggatcccctctcaccatacctctttctcctttgctctgagggtctttcctccattcttaagcattccgaaatcaattaaatagctttaggtctaaagattgctcgtactgccccaaaaatttcacatctcctttttgtagacggtagcactttattcagccattctaacatccaggcttgtaatgccatcatagagggtctggccaagtatgaaagtatctcaggacaattggtaaatttcaagaaatcttctatctttttttctcccctaataccaacctcacctactaaactatcatccaggattatatgcaaatccgctccactaaccatcttgacaagtactttggattaccccaatgttttagcagatccaaaaaccactcttttaatcctcttaaggatagaatttggtattatctttctaaatggtaaggaaaatttctctccaaaggaggtaaagaaatcctgcttaaagttgttatctaggctatccctacctatgccatgtatgtcttcaaacttccaacctctttctataattttgttcaaaaagaaatggccaaattttggtggggatcgaataatggtgatcgtaaaattcactggaagaattggcgggccctttgcaactcaaagaattctgggggtttaggttttagatccctcaaatctttcaaccaggccatgcttgccaaataagcttggagaatccaaactaaccaagcttctctcctagcctcgctttttaaatccgaatgcttaatttggacttcgttggagaattggtaatggtgctaccactcgaatcctcaatgacaattggatccctaactgccactttcttcccatctccctacctaatcacctcacccatgtctctgacctactcctctatcagaacatctccctcttaaaaaaccactttcctaacaatattgttcaagatatcctgtctctacccccagacactaatcaccttaacactctcttctggaagcataccacttttggccactatactatcaaaactgggtatcatcttgccaaatcccttgctaatatatccaagctctcaacctcaaacactgacatcctcaagtcttggtggaagtccttttgggcacaaatattccccccaagattaagcattttatcttccgtctttgtcataacactcttcccactgctgagaatttgtatcacaaaaaagtcacccctcccccacttgcccccgttgtgacctgcatcttgagtctatccagcatgatttatttgactgtaagggtattaagaggttgtggtcaggtacagttttta

SEQ ID NO: 21825 - DNA, 3697 bp, Cannabis sativa
aaatcatacaacataatatatatatataaaaaactaaaaaatgaaaataaaaaagctaagatgaaagaaaaataacctttgctccattgaaggttaacgttgggaagatgatgacgtgtcacgtcattatgttcccatttcaaaaataacgttatttttgtaaaaagttacctaatttagtatatttctaaaaaaatccctatattttacattaatttagggatataatagggacatcatctattaatagtgggtatatcttaagaaaaatgaaaatagaggttaagatcaaaataaataaaataaagtgaatatataatgtaatttcttcaattttcaataagttttggcccatacaaagtaacgggcctaagtaaggctcagggcccaagagcaaaagggacaatattgggtgtggtgatttgaatcgaagcgatagatgatgaagatgagaggattgaggtgggcccacaagagagggttgagttatattgttagtacggtgtacaataatacatacaaattcatgggttattttttaggatttttataccacatattcaaattttttacttttttactataagtgaattttttttttcaaaagtactatgtaatttttatacttgtactgtgttaagttttcattattgttctacaattacttttttagtattctactattgttttaattattctattttattattttacggttattttataaaaagacagtatttttataaaaaaattcatgtgacagtaaaattgtaaacttttatctttttataaaattacaccattttcttactttttttttttggcaaacttaccttatatttacttttttttttggagaaaatgaagaataccatcttttttaatacattaacaaaatttacctctaaataaaatttaattaaaatatactttttttatgagtattatacccaaattattctcgcactctcacataactaagatataatttcaaacataataggtttatattatttgtagatagatgtgtaagtttgtgaaaaagttaggacaaaatttcgattaaagaataatgaaaattatcgtgaagtgatgagaataaaattagtagaataattaaaaaaaaataaacataacagactttaaaagaaagggtaaaaattaaagaagtatcaagttaaaagaagtatctaatctagtgtaatttcctttttatttaatttaaagtgtcagttaaatatcacccttaaatattaactaaattattattatattaactttaaaattttactttcacgtatacacaagtacaagatcggtctaaacattagacaatttgatccattatgcaagacccttattttctaaatagaaaagacctatttcttttttttatttattattattattatatatatacataaataaaaaatttataattgcatctaaaaaaaactagtaataaaaattgtagtcttaatatattttgttttcttaagggtttaattttaaaaattttcaatagactttgcacagtaattattcagttaatatttaattcacccttaaatattttcttaaaaaaaattttacaaaaaaaaaaaaagaagattcaatatataaaaattaaaacataaaggagtttcgacgtaaattattctacagttataatatacatgagtattgttattggacacagtgctgtcgaataccttccaacaccgtgtggcctcataattggctcgcaatattctaaaaaagttattttcttaaattacatgaaacacgacatttaattacaccactaatattaccagttaaaaatggtgaataataggttttagtaattctttatatacataatatatacatagatagatacaatcggtggtggtgatgaggtgaagccaagagtgtgtgagtgaatcgataataaacaagccaaacccaccacataccatatccgaacacaaacacacacacaggtcttaagcttaatctcttctccattactccactaggtttttgaatctgaatctcccctttgcgtgtttcatttctcatctccaaaggatcaggttccaattttctcttttctcttttttcaatatgtttttaatcgctttaatgcttcaattgtttttatttcaaactatagagatctttgattcgatactataattcggttgcagcttcggatttttgtaacaagttttttgggttttgatttaggtattatcatggcgtcgaattcgcagaaggattcacctgctggtgagtgagagagaacaattttcttttcttttgtttttggatattgtgtattgattttgtataattgtcggtattgttgttagatattgattttgttttagctttggatggatttgataattgattgatgtagacagggatagggttaatggtttcaaatggaaacccccttttggatggtgggttggtgattgtaaaagctagtttttctttttcctttttttctgtgaagtgattcagttgtttagaaaatctggctatttagattgaattagtagagattgcgtttgaaatcagtaatgggtgtaatgggaatggaaatgacattctttcggtgatggaaaatggtttattgagatttataacactagctagagattggcatatctttgaatttctgacatttgtagcggaaactcctatgttggggaatatactccaataagaaatagggatagaatattttgggagtatagttacttctagtgccttaaaccttcattcaatatttttaattaatggggtttcgtttttgcatcatagatactttctctcacttcaaattatgattctgggctactttatttttctgattataagataattttatttgtgaaatctcacgtgtatcatatgttcttcagatgaaaagccagcttcaccacagagcactgtacccaaatccgaaacttcagctggagagtcacagacaggagaaagtagagccagccctattccaggagttgatgctcctccaaatccttttgatttctctgccatgaccggcttgcttaatgtattacttatttctcttatttcctctctcaaattcaatttccttttttttctagtcaaattttagcttagaggagcttaattctaatgtttaaagcaatttgcctgtgttttctcacatgtttatcatttgttgtatctttaggatccaagcatcaaggagctagctgaacaaattgcaaaagatcctgcttttaaccagatggcagagcagctccagaagacttttcaaggcgtgcaagttgaagaagaaattcctcagtttgattctcagcagtattattccaccatgcagcaggttatgcagaatcctcagtttatgaccatggctgagcgccttggtaatgcattaatgcaggtatgcggatctttctccggttacaagttctgcttgtgttgtcagtctttgtttggtgaatacttggaagtcatttatggtttatttatttttgcttaggatccatccatgtctaccatgcttgagagtttgcaaaatccagcaaacaaggaccagcttgatgaacgaatggcacgcattaaggaggatccatctttgaagcctatcttagaagagatagagagtggtggtcctgctgcgatgatgaggtcatttttaatatttttatat

SEQ ID NO: 21826 - DNA, 1350 bp, Cannabis sativa
ataattaaatgtgtacatatatttctttatagcatcacacataatatatgtgtaactaaattttttttttttttgaaatcaactaaactaaccatttcttgcctattttttatcttcttcgtgagatctaatttttcttgattaattaatagatgatcctttttttttaaaaaaaaaaacgaaaccaaccatttaaactatatactgtatatccaactaaaaaatattttgtatattctaaatcaattaaatgtaattatacgagctttaatctactttttcattctgtttcaaaaaaaaaaaaaaaaatctactttttcattatgttgatatacaaattaatattggagtgtaatagtttctaattttaagataatttatatagcctataggtatacctactcccactattaagtatatagatatacaaagaaaaaaagtttatccaatagccactcattgagtcattgcacccaaatgattccttttgtctatgtatgtatacattgcctttttatttaatctctaatcataatataccttagcacacaatgtgacaatgaacttcaaattatttttcttttgtaatatataataaactataacatgtattataaaataataattatatcgtataatatagaaacttctggaatgaacatatctaaatggtgcctcgtctgggtagattagaaaaaaatttacaaaatttattttacagaatttattttacatgtgtataaaaaaaattaatacgcttgccaaaaaatatttaaactctaattttcagcattttaattatttaaaatgttttttaaaattttaaaaaatattttaaataattacaaaaatattattataaaacaaattaagttataattatctaggtaccaaaaatataagataatatatatatatatattataaactctttataaaaattttgtaggaaaattctccggctagaattttcaatattaaaagtgtatctattacagggacaaaatcaatgtctctaatatagatattttcaatatttatatagaatattttctttgaccaaaacataataattatttattttactgaaataattaatatgtgaaaactcattttatcccaaaataagaaaaaataataataattagaagtgagactgagatactataactttttataagtaataaattttgacttatatcattagtactttttatcaaatctcaccaattatatcttaattaattaattaatgatatatatgtagacaacacgaaaaaaatgtaaaaatgtagatgaataattttgaataggacaattgtctataaacaatttaattttgtaagtaga

SEQ ID NO: 21827 - DNA, 3371 bp, Cannabis sativa
aatggggttggctgccatcaagactgtgctttgattatcacaccacatagttggtggttgtgataattggaccccaatctcagaaagtaaagcttgaaccgagataacctttgctgtagtttgtgccaaacttcgatactcggcttctatactggacctagaaacagtttgttgtttcttggagggccaggagacaatattgggaccgagatagacacaaaaacctgaagttgagcgcctgtcatctgggcctgaagcccaatcggcatcacaaaaaccaattgaattgagtgatgcagagggtttcatgtgcagacaatttctcaccccctattttctagtgtgattctagaggtgtttgcatgagctgagacactctattgacagcatatgatatctctggcctggtgatagtggcatactacaaagcacccacaatgcttctgtagtaagttggatcaacaaagggatcactgccttgtgcaaacaatttctcaccccctgtcataggtgttggtaaaggattaacattgtccatcttagttttggtaagcaagtccataatgtacttcttttgagacaagtgctgctcctctgtggtgtgagacacttgaataccaagaaagtaattgatggagcccaagtcttttaatgcaaacatgtgattgagactggagatgagatctgtaacagcagtttgagaactaccagtcaccaaaataccgtctacatagaccagaagaaaggttgtgtgagaagtcgtgtgtctatggaagagagaattgttagctttagcacaagagaaaccaaaggagtgtaaggcatctttaagcttgttaaaccaagccccaggagcttgtttcagtccataaatggctttggttaatttgcagactagatggggagcttctggatcaacaaaacccggaggttgagccataaacacctcttcttgtagctccccatttagaaaggcactatttacatctagttgtctgatagactagttgtaagataatgcaattgtaagagcaattttgactgtggcagtcttcacaactggactataagtctatgtaaaatcaaatccacattgttagaggaaccctttggccactaaccttgctttgtattgagtgacacttccctctgcatttttcttctctttgtaaacccacttacaaacgattgcttttcttccaagaggtaagggaaccttgacccaaggtttcttttgtgtaagcactttgagttcagtttgcatagcagcaaaccacttgggatctttgagtgctgtagctaaggtgagtggttccttggttgctactaaaactttaggcttggacacccctgccttaacccttgttaccatagggtgtttattttgaggagcagtaggggctggtgcaggtgattcagcagcaggtgctgtgacaggggtagtgtctgaagctccagaacttggttctggtatggagttggagctagagatgggagattgaggattaatggtggggagagtgggagtggaagatggtgaagtgggaggaacatgggtggagaggctaatagctagggacattagcagatgtattagaggtagggacatgtggagtggtgtgaggggaaaacagagtagaatatggaaaatgatgttcattaaaaatgacatttctagagatgtatattttacctgtttgggaaaggcacttataccttttgtgttttagactgtatcctaaaaacacacactgaactgacctgaattccaacttatttttcttgtagggccttgtgttagggtagcaagcacacccaaacactttgagttggctgtagtcaggatctttatgaaaaaaagccttgaatggggtagagttcttaagaacagaagttgggagtcgatttatgatataagcagaggctctaacagcctcatccgaaaaggataggggcatagaagcttgagcaagaagtgtaaggactgactcgactaaatgtctgtgttttcgttcagcaacaccattttgttggtgtgttgtagggcatgagactttgtgagctataccatgagtcaacaagtaaggttcaagggcttggtattcaccgccctagtcagattgaagggctttaatagaaaattcaaactgtttttccacttgaattttgaaattaatgaaagtgggaagtgccttagactttgttttgagtaaaaatacccaagtatattggctataggtatcaatgaaatgaacataatacctatagccagatgaggaaaattctggggaaggaccccagagatcactgtgtattagctcaagtggttttgtgtacacggtttgggagctagggaaaggaaatttgtgcatcttacctttgcagcaagcatcacaaatgtcattgacaattttattagaattggaaatattacaaagagacattacatgttggacagttctagcagcagatgtgctagtttcttgtgccacaaagaaaaattagaacattgatcatcattacagttgctcttttgagcattatttacagagtaggagacagttggtaggacagactgactggtggaagtgccttgaaattgcatatgtgaagaaggaatgacatagaggccatgtttaagatgtccctccatcaacacaaccgtggaatcttgatcttcgacaaagcaatgattaggatagaattcaaaaaaggcattgttatcaaatgcaaattgggagacactaataagattgttggtgatttgagggacatgaagaagttgatttagaactaaagtctaggaagtgtagggtgtgtggaaaaaggtcttaccaacattttggatctacagacctacaccatcgcccatatgtctctgatctgttccaaaataaggctcctcatgagtgaaattagtagcattggcagtacagtggcttgtggcacctgaatcagggtaccacgaagcatctgcaactgtgtcagcagttgctaaattagcagaaaaatgttacacattagctgctctactcctggaaaatccatgttaaatcgttgatagcagcaagaagcaatgtgccctggtttggagcatagttgacaaacaattcgagatctaggggcaccattggagtaggtgttgggagcagattggcctagtagagaagcagagactccacgaccttaaggtgtggacattaagttagatagagagccaccaacaacacgaggtgggacaacatagggattccaagattctcgtcctcttccatttaaggcagaggaaggagtaacctgttatctgcattggaataagaataaccagatccacgacctctagatggtcgattagtggcaagattaataga

SEQ ID NO: 21828 - DNA, 1339 bp, Cannabis sativa
gcgatgtattagacacccttcttcgttgagtactaaagtgttgcaagtaagttattttgcgatgggagtgtattgcatgctaaatgtggaaatcatgcttcttttgtttggagaagcttagtctggggaaagaaagtcattttaaacggttatagatggtgaatagagaatggcaatagtgtgaagattcttcaagatccatggcttcctcgacctattacttttaagattttcgataggccaaatttattgggggagctttttgtggttgatcttaagttacgaaatggaatgtgggatgaagattttatacgtgctaattttaatgatgatgacattgatatgattctcaagataccatgtgggggtgggagttagaagataaaattctttggcactataacaaaaatagagactattaagtgaaaagtgggtatcaaatggcagctgagctaaggtgagagaaacaccaatcagatgataatcaattggtggcatgatggagaaaattatggaagcttaaaattccttcgaaagtaaaacattttgctaagaagatggcacattcatggttgcctgctcaatcagtcttagcctctagaaaacttcaagtggatacaacatgcagtagatgctctacaggtgctaaggagacaatttttcatgctttatgggagtgcaactcaaccaaattggtatggaagttatgtaactgaccgcaacaagtgaaaaggcgtggtggtaaagatgtattagaattcttaatgagattatcaaggacatggcagcaagatgaatttaaattatttattgtactgtcataatacaaagcaatttctcatggttcctccaaagccgactgagattgttgaatggtgttaccaatttctcatggaatatcaagaatccacagggatgaaacaaaaaggaaatcaaagacaagatgctcgctgggatccacctgttgaaggaatgttgaagctgaatattgatgcgagtgtgcggtagggaaggagatgctcgggaatcaattgtgtggctagaaattaagatggccatgtggtgtttgcggtaaccactgctctccaacaagactacaacccattatagtaggaacttatggctgtttagattgggttgcagtttggtattcagatacgtttacaaaggtttagcatagaatctgagtgcctaaaagttgtccaattgattcaaaaaaaaaaaacacagctataggaatgtcgataatatacttgtgcatattaagagtttattattaaatataaatgttgttcgaatttcttttatttttagaaaagctagtagggtagcacatgta

SEQ ID NO: 21829 - DNA, 2874 bp, Cannabis sativa
attactgattattttgctaatttatttagctcttcatatacaaatacacaacctgttattgactgtgtggaaagcaaggttacacccgaaatgaatgagtcattcatgcttactgttacggaggatgaagtgcgtcaagcgatctttggaatgcaccccgacaagagcccaggtccggacgggttaaccccgactttttaccaaaaaaactggacaacagtttggatgtagtaaatgttgtacagcgtttcttcactactgggcagtttgagaatgatgttaacaaggccaatgtggtactcataccgaagacaagaaattcggaacgaatgacggacttaaggcctattgctttgtgtaatgttttatacaaaactattaccaaagtaatggctaaccgactaaaaccagtcatggataatattgtctctcactatcaaagtgcgttcatcccggggagactcattacggataacattatggtgtcattcgaagtgcttcattatttgaaacgaaagaggcaaggaaaggaaggctttatggcactaaagttagatatgagtaaggcttatgataggattgaatggtgttatttggaagctattctaatgaggttgggttttgctaacgaatggactaagctgttaatggagtgtgttcggtcagcctcttatcacattgttcatggtggtaaaaagatgggtcctattttccctcaaagaggcattcgacaaggagaccctttatcgccatacatcttcatcttgtgtgcggaaggcttctcggctttgattaggaaatatgaattgaggggttggcttcatggatgcaaagtggcaaatggcgctcctcgggtgtcacacatgctttttgcggatgatagctatctctattgtaaagccacaatggaggaagcttccaaggttcgggaattgcttactatatttgaacatgcttcaggacaacaagtcaattttgggaagtcctcaatttttttcagcaacaacaccaataggactactcaaaatcgaatctgtgcttttcttcgtatggtgatggcggatgaaaatagcaagtatcttgggttgccaagcactatgggaaggaacaaaaatgctgtgttgggttatctcaaggaaagagtccgaaagagagttcagaactgggattccaagttcttgtctaaagcgggaaaagaagtgttaattaaaacggtggctcaagctttgccaagctacgcaatgagtgtcttcttgcttccggtagatatcagtcatgatatggagcaacatatggcgaagttttggtggaaaacttcaaatactaaagacaaggggatccattggatgtcatgggataagctatgtcaacataaaagtgtaggaggaatgagctttcgaaacttaagagaccataacattgctttgttgggaaagcaaggttggaggttactttccaatccgaactctttggtctcaagaattttcaaagctcgctactacccgaatggtaattatctcacgtcaactattggtaataatccgagctttatttggcgtagtatcttcgaagctcagaatgtagttcggatggggactcgatggaaggttgctgtagatagtaatgtgcctgtcaagggtgagccgtggttgataggagaagagaacccgtacgttacttcaacgcatccagctttggacacagcagtggtgagtaacttaatggagattgagggaggaatttgggacatggaactgctgcacgacttgtgtaacagcagagacgttgcagcaatcattgctgtaccaattctgcaaaatattgcagcagacgcactggtgtggcaccacgaattgagtggttcttactccgtcaaaagcgcgtacaacctgatccaaaaaacaaaaggggcctggaatgaagtcgaagcttcagccttttggaatgaactttggcggttaaaaatacctcccaaagttaaaaatttaatttggagagggggtaccaattgtctctcaacaaaagtccaattgattactaaaagagttgatatcaatagcctctgtccagtgtgtggtatgcacaacgaaacaattatgcatgcccttgcttattgtcctattgcggcacaatgttgggaaaaggctaatatagcgacaccagttcagcaggaaaccagttttagggactggtgtgtggctgtttttcgcacagcagggactgaaaaaaggcgcctcttttgtgttttatgttgggctatatggggtgcaaggaatgacaaagtttggaagactaaaaactctaatgcctcatatatttttgcattctccacatgctatcttgatcaatggaattcggctcaagctccttatttggagacatcacggacaagtttaatggccggggatggtttagaccgatggtgtgcacctaatgctaatgaaatcaaggttaacgtggatgcatcgatatttgagagtagtagtgactttggttatggaatggtggctagagatgaacatggttttttggttgaaggtgtctcaaggctttgtcatggacatgtacggccggagttagctgaggctattggattccgtgaggctctaagctggatcaaaaataagcaatggactcaggtgacccttgagacagactgtttggtggtgggtacaagcaattcgtaatccaacttgtatgatctctttatttggtgatgtaattagagagtgtcaaaacttgcttgtagatttaaggggtgtttctatttcttttgtgaaacggtcagcaaatttagtagctcataagattgctagagctgctatttcttaccctgatcgtgttttcagtatgggggatgtcccaactgatttg

SEQ ID NO: 21830 - DNA, 4294 bp, Cannabis sativa
  modified_base (1662)..(1663): a, c, t, g, unknown or other
  modified_base (1879)..(1885): a, c, t, g, unknown or other
gatgaagaagattcttgggtaaaaagtgtgagagttaaaacactttgtgaggacttaacaaagaatctcgtctcaactgtattgtacttatttttgcccaatcaataaagaagattgcggtggtgttccgacattggagtagagccataaatcacatcgatatattgaacttgaaccagtatatatcttggtgttgatttctttattttctccattttgctgtttctagtttttacatactctgtttgcccctattttcttgtcgattgttgtttacgatttgataatcttgtcattgataattgtttgattgtttaaagtttagataatttgttttcgcacatttagacataattttcccacaccttcttgctcctagatttaccctcaagaagtgaggagcgcaacacccccaactaggttctgcaatgtggttatttgcacctaatatgtaaatcttggacaagtaagactcgtgacctatagaaaaatgcatgtttcgacctatatcctgttagactttttatttggacttacattaaattttattagttttattaaaatttgagttaattggatagttctttgttgtgttagttcatattattggttattaatagttaatgggcttagcatatatgtgtgtaaagtctaagtgaagcagtatgtgcttttttatttaactgaagtctttgatgagcaggaacaatccaactagagttatgtagctaagtcccctttctaattttataaatacatattgtttcattacaattgtatatttttgataatgccaattccagtgacttttcaagacttcaatgacttttttggcactagcgacaattctgatgactttctagtcgccgatagcaactctaacgatcacggtactatgtttctaattttttttttacaaaaaatatgaaggagattttaataattttttatgataatacaagtggcatatcctatatatgttatgtttttcattttaaatgacatatttcgttctattaaatttttttactaaatatatgcaaactaaccttccatttacatatttatgtaaaaaaaaacttttcaaattacgagaaaattacactacatacctcttttaaatttaagtctttaatttttactctaattttaaaatctattatgtttacctctttttttaattattttactaattttatccttatcagctcacaatagtcttcattattctctaaccaacattttgccccaactttcctacaaatctacacatttatcttcaaagaacacaatctattatgtttaaaattgtgtcttggttatgtgagggtgtgagaataatttgagtacaatactcataaaatgatgtatatttgaattaaattttaggctaattaagatttttgtccccccaaatttcgacatgtgcaaaatcatgccccctgaacttttctggtcgttaaaaattctccctgaactattgagattgctggatttaagaacttttgtctaattttttgtaagaaaagtctaacatggatgaaagttcaggaggcataatttggcacatgtcaaagtacgagagacatgatttggtagatattaaagtctgaggagtatgatttagtacataaataatcactaaattagtaaaattgaatnnaattagacaaaaatccttaaattcgataatcacaatagttcagggggaatttttaactgttagaaaaattcaggggcatgatttagtacatgtcaaaatttaggagacaaaaatcctaattagctttatatgtaaatttagttaatttatatatatatataaatattcttcaacttttcccttaaattagggataattacaccacatactaaaatnnnnnnnttttttacttttatactgtggagcggtattttttttcaaaaatactgtgtaagttttatacagtatactgtgttaagtttttactgttattttactgttgttttttagttgttctactgttgtttttagttgttctgttttgtgttccactgttgttttataaaaatacagtatttttgaaaagatttctgtgtgacagtatttttgtaaaaattaaccataatttgtttttttgtaagtttcctcttaaattactgtatcttttcttgtaattactgtaactctagcatgatggacagggaagcccaaaaaggggtttaggccttttcaacagcctagggtgagcaggcccaagtagagggtgttatcgaggttttgtaaataatagaagggtattttcgtaataacaatgggtagctctggataacaaacaggctaattggctaaccaggcctccagttctttcttttactttggatatgataaaaaccaggaacctttatacagtgctatcaagctcttaacaatggcttcctcaatcacctcatctttccacacctggtaacacccatataactttttcttattatcttactgcacctgctttagtttttctttttcatttctgatatgaaacctgcgttttccatttctcgctttttgggtttatttattttcgaataaatatgaaaattaataataataataaaaaaaatgaatcctcaaaggaatagcctttaatttgtgtaatgtaggtagtagatttaagctatgtaactctgcaccttaatgttttattccaattggctttactatgattttactatcatatttgcttagaaatttaactatgtttttgttattctagttttaaatatgaagaatttatctggctttaacaaaacagtataattacattatttgtaagtgtcagtggaaaagttgttactgttgtttttatcattatcccaaatattttgatttctgtaacatgtgctattgttcctacttacaaattatattctgaatacattggctgctaaaagtgatacttcacaaaaatctaaattcaaaagaagaatctgtgcgatagcttggaatttgaatttatgtgaagttaacactaacggtccgtttggttgagagtatgggaaacatatgattcatgactaggaatgaaaatgggaaagagagttggaacggaaatgaatcaattatgagtgaaaaacaaaatgaataaaaaaaattagtaatttatttctgtgttggaattgcgatttaatagccattctactgtttctattggaatatcattccaatactttataaagaaaccaaataaaggaatagaatcaaaataatttccttttcattctattgcccccaaccaaacataccttaaattaagcctgaaatacttctgggtttcttgcctaattacgtgtgcttttataagatgttttgaagtaatcaatgctttttactattttatcagcaatggaggagactattgtttgattttcatgtagtagttaactcattgtttccaaatcatgatggtaaacttgaccaagttgcatttttttattgaggtgcaaagagactctttagtatttcttcaaaattctaaatgtcttttcttgagacaatttcatatcagaagcttattcatagtccattgaatgttcagattttgcattgacgtagttgtggaattatttttatagtaaacttgaaaatgttgaggaagaagttctgaaattttatgaaataacatttccttctgtttcagtaatttgcaatctgtatttttgggagagagaagtggattatctgtttctagtgttcctgtaaaccgcgttgggtttttgaagaagacgatagaatgtaaagaatcacgaatagggaagcaaccaattgaagtgccaaaaaatgtgaccataacattggaaggtcaggatttaaaagtaaagggccctctaggggaactcgctctaaattatcctcgtgaagtgaaggttgagagagaggaagatgggattctaagggtcagaaaagcagtagagactagaagagcaaatcagatgcatggacttttcaggtgagctctccattctctgatacctcataccttactacttactagttttccttggatatgttttgaatggaatttatggggcacaatgattatgatgattcaatcgagaacgttgatcaatttattatcatttttgtatggactatagtacagtttgtagttaattcttttgttttcaaaagtagaagtgttttcattcatatatgtcattcttctttctaccaagaaaaaatgtcattcttcacttcgtttcttttcttatttcgttaacttggacaacagccatagaaccttgtttgtggtaattc

SEQ ID NO: 21831 - DNA, 4551 bp, Cannabis sativa
tagttcacaacacgtgaaaatataattacttttattattacaaaagtaattacattaagacttgaacaatttttactagaccacaataccaaacactcacactcttattttaatactagacacttttacaacactatataactcacacttttgatacactctttggaacacttagattacacttacttgcgcactagagttatcactcaacttacctcacaccaccaaaggaccaactatcctatttatactactcaagagtggtaaattattgtgatagagtattctagcaaattgtcaatttattgtagcctaaaaatttcttgaaatttcttaagaatattaactctatatgattctgtaatattaccaaaataatagaaaattttagatacatagaggaggtgttaatcttttaaaactccccctcaataccgactcatcaactgagttgttctttgagtttctaaaatcttgcagtgttgtgtcctttggtgaccaggtctactacttgatcttcgatctttacttagtgcatctctaactcttctcatagaaatgtctatttgagaaaatggcaatgcactttcacatactttgttcgagcatgaaacactaaactctctgctagacggattgcagactaattatcacaataaagcggcacatcataatttgtaggctggtgttgatccttcatcaactgtatcaaccacatactttcttgatcttccattgctgctactctatactctacttctgtcattaataagaatatcgttgattgccttttactacaccaagatactattccagatccaagcttgaatacatacccaatagttgatcattgagtatcatgatctctagcataatctgcattgcagtatccaacaatcttgcacttatcacctttcttataaaggagaccatagtcaactgcatctttaacatacattagtattcattatactacttccaaatgtagtttctttcgtttctggatatatcggctcactactccaactacataagaaatatctagttgagtcaatataaggtagattagactacctacaagttattgatacatttgcaagtccttcctagcatgagcatatagcttggcattagcttccataggtgttgagatgggcttgcactcaagcatcccaaatctttgcagcaaatctttagcatacttttgctgacaaagatataagccttccttagtttgatcaacttctaatccaaggaagtgtttaattcttcaagctccttcatatgaaaccatactgataggttctactttgtttgacaaatttctacatcattgtctccagtgataatgagatcatcgacatataccagaacaatcacaatctttgcttcccgtactttgaagaataagcttgaatttacatgttccatgaaacatccgatttctactaagaactcaataatcttgccataccatactcatggagcttattttaatccatagagcgcctttttcagtttgcaaacatagtcaggatgtgttcaatcatcaaattctcttagttacaccatgtatatctctcaatcaagttatccatgtagaaaggcattattcacatccatcttatatagcctccagtccttattggttgcatgtgcttatagaacctacaatgttgtaatcttagcgacttggctaaatgtctcgttataatctagcccataccgttgaaaaaatccccaagctactaactgagccttgtatctttcaattgaattgttggaatgagtttttaccttgtagacccatttacacaaaatgggtttcacttcctttggctttggcaccaactcctaagtctgattctttgctagcgcacttatttcttttttcatagctttagccacttggaattctggtatgcctcttcatatgactccagctctctgaacttttcttcttcaattataacagcattatcatatttgggattcggctttcgcgttgttgttgatcttcgaagttgtggacttactacatctagttggtcatcttctactctttgatgcacatttgtttgccatggattctgaggtgcatcatcctcgatgttttcttcttgatctatatctcgagttggaggtaactcaacaatttgctcccctattttttgttgtagtttgtcttccaattctttagaatctggtaatgcttctttttgcaatgaccaccatgatgaagcttcatcaaatatgacatttcttgagatataacactttctagttgtaggctcacaacatttcaaccctttttgtcggctatcgtatcccacaaaaatacatcatattgcattcttgtcaaattggatatgtaggtggcttggcacaaatacatagcacacacagctaaataatcaaaagtggcttactgtaggattatagtctcacagtttctcaaagcatgaaatgaaccctaacttagcttggagaagcctattgattacatgctttgacatgtctttagaaggtggtgattcttcctctcagccactctattttgttgtggcatatttacacatgtgaataatggcgcatgcggcattcttaaagatacacaaaaaattcatctgaggtatattcactacctttgtttgttaggaggaattggattttctttctaacttctccttccgctatttctttgaactctttaaattttgaaatagttttaggtttttctttcataaagaaaacccatacgtaccttgtaaagtcattgatgaatgtaaccatgcaccgcatgtcgctgattgatagttgcttgactcgtccgaacatgtcagaatggaccagcttcaatggtgctttggccttgaactttgaatctttatatggaaattgatgcgcctttctgtattaacagccgacacatacgatctctattctgacctcaagttgaggaagaccttttagcataaacttctttagcatcaccttgagtttgtgatagctgacatgtcctagccttgcatgcctttttttctttcaagtcttgtctacataagctaattttgttgacatcacatagacagactctaaatgtcattatttcatcatcggtgttccagagattttaagatctcggtagatcttgacatcttgaggattgaatacagcatggtggcttgatgttgtaagttgcactactgacagtaaatttttcttcatctcaggttcatgataaacatcctggagtgaaacttctttcagactgaatctcaatgtggttgttgttttaccgatatgaacgattggtaatcttgagttgttagctatcaccactactcgaccatatttatacttgatcatgtcatgcagcttctcttcatctcctgtcatatgatttaagcaaccagagtcaactatccaatcattattgtagtcaattgttctaagaatagtagttgccatagctaattcttcttcctccaccacaaatgacgcttctacatcccattcttcgtcacttgtcttgtttgcatttgacgtggttgcattaccttctacagttttcttaatgaattggcaatttttagccatgtgactatactttccacagttgtagcatttctcatcaaatttattgttattctttgactggccacactggttgtttctctttcgagctctccctatttgggagcttccatgatgaatatccttgtcatcatttttcttaaattttttttttctagcatttggtcgagatcaacctttcttaataccactaaagagtactttatcgtcactctttaatgagactccagatgtttgcttagctaacacttcttggtcagctagtaagttttctaattcaacaagagaaggttggcttagccaaccttgtattacaacaatgaaagttctaaattatagccttaatccatgaataatatttcttctaattcttgtatttgacatgccagcaacagattctaatgtagagattttgcaacaaagacattttaccttggtaaagtattggttgatcgtcatgtcgtgttgcctgattgagagaagctcgttctcttgaagttgcaatcttgtatcattcttcttgtgaaaaatgatacgaaagtatcccacacttcctttggtgtcttcaccgacttgatgtgctctaatatttcatcttcaactttagtccagattgcaaacatggctttgcccgctttcatattccatttccttaaagcggttgtgtcctccagttgtgtgacttcattaccactaacgatctcccacaagtcttggccttggagatatgcctccatgtgcattgaccacatgttgtaattttggttgtcaagtttctcaatttcactgaccactagaaggtcacccatcatgcaatctctatagtactaaaccacacacgaccactctaagaaactcaacaaataactcttggtataaaatgttgaataaagagcgatttgtgatccttttctcaatgaaagcaccaaaatgttgacttcacttttacccaac

SEQ ID NO: 21832 - DNA, 3058 bp, Cannabis sativa
gtaatcaaaacgaaacatatcatttccaatgaatatatcattgaatttatacaagaaaaaccatccaaacaaacaagttgttcatttcttagaaactttcaatctatcaaaacctaaaaaatctatacatgcctaaaaaaatcaatgcaattagaacaatcataaaacaaatttatctatgctagaaactcaaacaacactaagaagagttcaaaatgtaatcaaaacaaaaaaacagagcacaaagacaacacatcaccaaatattcatttccaatgaatatatcatcaatcacccaactaaacaagctgttcatctctttgaaactttcaatctatcaaaacctaaaaaaaaatcaatgcaattagaataatcataaaacaaaaacaacccaatatgcaaaaagatataagcttttcgatctgtaaacacacccaaatatctcaataaacttaaacatgtcttaaatttgcttcataagaaatgattacaacaaaacactataatctccaaacattccattacaacagctgaaagagaagaatcataacccagagagagagaactagggttttagctatacctgagagagaggagagaaggggttgagatcaaagctgaaaggaacgaatacaaacgaagcggctagggtttaacaatatatagagagagaacgagagagagagagccaaaccccaacacaagaaaatatctcagctcaggtttatggagagactataatccagtgcggctgctttttcgtgtgactggtttttttgtgcttcctctcattgtaccttttagactcatttgcctattcactttgagaaatgctggaagtcactagggttgtactataaagggtaaatagcggcataagtactaaagttttgggtttgtaagtgacataaatttaatgattttttttagcggcataagtacctaatgtttataaaactgtaatttttttcagtttcatcagtatagactctgttattgtcttaaacatgacacatataagatccaaattctaaattatttggatttaaaacggagtctgtactgacgaaaatagagaaaaattaccgttttacaaacatttggtacttatgccactaaaaaagtcattaggtttatgccacttacaaactcaaaactttggataccactatttactttactataaaattaccaatcatacttatatgtagactttcaaaattttaaaatttacaataatttgatatgataacacctatagaacaaggacaattgaatattgaagtaaaatgaattagtaccttcgacagtaccccaagtgagtgtggattaaatccatgaatttggacaaaacccaagttacatagctcaatacacctaatggtttgggcctttaagtaggtgctcatgaatctttgatgggcttatttggtctttattgggcatgggcttttgtatttggcctaaacctattaaatttttggttatattatgtaatttctacttgaatatttacaaaaatactatcaaaagatataaatacaaattataattttatataaactaattttacattagattattccaaaaaaaaaaaaaaaaaacgataataagattaaccttttcttcaatttttttttcaaaaaatcatatactattttaatcaatagattcttgaatcattatgttaattgaaaaaaatatattagtcatgattattgttctaaaagtttaattagttttttagcaaaaaattagtcccttaattattatttttttttttgtggcaaattagtcatttgaaacaaaccctttaccttaacaattgtttaaagtggttgttgtaatataacacttgatagtgacaaaacatggcacttattatacatgtgtataaagaacactacattcacatttcttcttactatttttataaatgaaattctctatttccctcaatacaatttgattatttgatccatattttggacaaaagcttagcattcatctcacatttttcatgctttttttacaactcaagtacaaggtccttccttgattcattcatgcttattgaaaacatcaaaagagtgattcacatatcttataaaatttgatgcattaggctaaaatacacacaaaaaaaaatgggaccaataaacatttgaacatcactaaatgtaaatgtgaaggagatccattcaagtgttgtttgatataattacaccaaatgagtctacttaaccaataatgcaatgtaggtgccaaacatctttattctaaaaattaacaagcgaaaactagtgaatctaagccaaagaaccaaacacaaaacctatccaccaagacacacaactcttaggatccctacctctcatcaactaccaccaattttagctagaatggtctcagtcatagatctgatccaaacatactagattcactcgccacgatcacctctcgacccaaccagtgccaccttatgggctaagaccctttgtgttgcctcgctctacaccaagaatgaattcagacgactagatatgcatccctcgacgatgaccatgtgcacaaacacataaggatccaaacaacacccgaaccaaaaaaggtcaacaccccatgaattgtcctccacctcgcattatctttatctatattcacaacactatttccgactagacacatctacatgcataacttgtatcgacactagtgaccctaacaaagagggagagaacgcaaaattattattcgcttgtaataatttgactaatttaacttttgactaattaatgaccacgtgtgtgttcgaaaagttctcattacaagagagaatatgaggattacaatcaaaatactcaaaatacaaatagaattatttcatcaagattacaagaaagctagagaagaataagaagaataataacacacagaaagtttgaggacctttgtcctaaaagtcatttcctccctcatatggacacttagggaaactctagaaatgctcttaaggatttatcaagcctcatacgcttagcctagtgtctaaggatga

SEQ ID NO: 21833 - DNA, 3911 bp, Cannabis sativa
  modified_base (1964)..(1966): a, c, t, g, unknown or other
tttgtggagaaaacagtgtagtagaagagactgtcaaaatgaaaaaattggggttgggagaatacctttccctgaatgagacttgagacgaatttcatttgctaacaattcagtaattactgattcaaccaaaggaagcaaagaatgatgcaatctcaaaatcactacgaagagccattaaaaactcaattaatctttgttcctctctaccagcaatataatgtgcaaaagcacatagctctactaattcggtgagtgccaattgatcccaaagatctttcattacaaaatagaactcttgaatgtttatatttttatgttcaatagctctaaaatcagttttcaactgaaactgcttagcaaaataagatgtgtatacaatctcggaagatggtcccaaactttttttgttgtctcgtactatgctaattgggtaccaatagattgtttgacagcgttatttgtccaagtgagaatatttgaattggttactccctgattttctaatagatttacataaccatctgctggtttcctttttgttccaaaatacaactccacatctttttttttctttctgaaaatttttcataacataattccaatacgaataatttccattcgataacattcatcactcgaagggaatcatccttattggtagccaatttagaaaatagagcaaattgcaaatgttttcaaatacaaaattgatgcaaattcaaaattatattgcgaaaatcaatacccaaaaatgctatgcgaatcaagaaaaaactcgaagaaattaatatcgaaaattagaatgtcgaactgtgttgatgttgtacggacaatgattgtatggatgcctgggaaagttggatctgcgaaagttatgattacgcgaaatttgtgattacgcttatgaaattcattctcataaatctagctctgataccatgataattatttggaaagagaaaaataaccaataaaaaataaaaaaagatgcaaagaaattagggtttcatttaattacaaagtcaaaagtaaaagaatacaactaataagaaagttttatataagcaagtaatataaaagaataaaataaaataagaatgaaacaaccgtaaataattatttaacaaattcatgctggcatttgacaaccaaatttgatagaagtattggatttgcaagattaagtgtataacaattgaaacatagggagattcggccgcaaatttttctcctttttatcatataaggggggcctgtttggaactcaagattggattgaacaagattggattatgctgaaagtaatcttgtgttttgtttaagaatagactagagtgtgttattatttattttctttaaaaaacttaaattaaagaaatatataataataaataaataaaaaaaatgaataattcccaacaaaaaaaattaaaaatgactaataaaaataattaattataaagtaaaataaaataatatatcatatataattaaatatatatcataaatatataataaaataatttatcatatttttatttaattaatattaaaatattaaaataacaatacttaactaatataaaattatttatgctaaataataacttaatcagtaatttaaaataaatactaattttttaaaatattgatataaattttctagtaatgtaaaaggaatatctaattttattatcgtattgtttctcttaaaataaatttaagtaactattatttaattaatattattttaaattttaaaaatttatgcatgataatttaaattttttacaattatactaattttaatgaataagtttttgataatttttttctaaataaatttgcagtaattctttcatttaaattcttagtaagtttttgataaggagcttgcgacttattggaggcatatgtggaaattaaaaatcccgccaaaagtcaaaaacttgatgtggagnnntggtatgaattgcttgccaacaatggtacaattgcgcaccaagcatctgcatgtgagctctctatgccctatttgtcaaagtgaagatgagactatcctttatagactggtctcttctcctgaatctacactttgttggaatcgggtgggaataggcactagtagtacgcctgataacacttttcttgactggtgtattatttcgtttaaggctttggatgtggaaaaacgttgtgtcttagccatgatttgttgggctatttgggaagctaggaatgacttggtgtggaacaaaaaggtaacgcgggttggtgacattgttgcttcagtaaatagatatcttgatcaatggagacatgctcaaaactctactctagaggtatcatggcctggtattcaggcgggtgatggggctgagcattggattttaccacaggttaatagtatcaagatcaatgtggatacaactatgtttgagagggagaatggctttggattttgcatggtggctcgagattcaaacggctttctgatcgaaggtcgcactaccttcttgaccggtcaagtagaaccgaaagtagcagaggcaatgggagtccgggaagcactttcttggatcaaagatcatcaatggcagtcgacttctcttgaaactgtctgccttttagttgtgcaagtcctgggatgcactttttctatgatttctttatttggacatgtaattgatgattgcaggcgtttgcttgctttattgaaaaatatttctgttatttttaaaacgatcagctaatatagtggctcataactttgctagagctgctatactataccctgattgtcgtttcaacttggaggctgttccaactgatttgctaccttgcttagtagctgaaattaatggttaataaagatgaattttccattcaaaaaaaaaaatcttagtaaataaaaaaataaaaaataaacaatttaaaaaattttacttgtatggaattatttatcccatcataataaatgagattaaattaaatggattaattatctagactatcaacatgcttaaatattagattgaacaaattaatctttgaaatctaattcaatttttcgtaccaaacagctcctaaaacaaaagacaataaaagaagcaagcaggacttcaaaaagttgcaaaaaggtagattttcatcaaattgaccaacttggttactctattctagaaccatacaccattccatagaaaatacaacaaaggaaaccaacaccgactcaaagacttgctcacatcactttatttaattacttctaagtcaaataccatttcacaaacttgaataataatatagtatttgtggattagtaaaaaataataaatatgtaatttactgagattaaattatctaattgcatatatataaaaaaaaaaataagtgcgccgactctgtgttgattggtgaaagagagcgaaaggtatatagtgttagtgactgtgacagtacataggcatagccccaccaaatctaacaactgtcaattttcatcatcacagagacaagactcaaaccgcgtctcccattttatcccaaaactactttattacttcacccaaccccaccatacaacacaactggttccaccccatcccatccatcaccattaactattctatcaacattcgaagcttcctttcttacttccttcttcctccttaccaaatactaaaacgtgtcacccaaacccaactataaatacctcctcaactaaactcaactcactcatcaaaatcaaatctttttcttctacaagtctctgataaacatctcatttggaaagaacactatggcttttctttcttcactcaccaattgttcctctgttttgttgttggttactcttcttgtttttggctcttttgtggtttatgtctcagctggtgatttgaacc

SEQ ID NO: 21834 - DNA, 3389 bp, Cannabis sativa
  modified_base (3339)..(3350): a, c, t, g, unknown or other
tttttatctcattcccttttatgtagctcgaactcttaacattttttcgtacaggtcaacgtgaagatggcttatgcttattctcgagccaaatcaactgttgccaagagccttgccaccaccaacacattgcagagggaggtagatgtggcgagaaaggaaactcaagacgtgaggagcgagctcggggaagtgacaaatgagcttgggaaggtgaacaaaaagcttcttgcagctaacaccaagattgaggagctgaccaaagagctgcaagagatgccttcgacctagtagatggagggtgataatgtatctttgtccaaggaggtcaatgatcttaaagatgagagggagagtctccggactcttctttccaaactggggaaggatgtcaagaataagcagactagggaggaagagctcgagaaggaggtggagaccctagagatagctgctcttgaggttttctacgaattctggaaggccaaccctgaaggaaactttgattaccttggtgaatccaagagcacgtatcttgacttctgggcgactcagacggctaaagaaaaccccgagggagctacctccacagcttcagccgactagattaacgagcagcttttaatcccgaatttaccgtgctttgttatctttttgtatgaatatcgcccattgttttgataattatcttgttttgttttttagcctgttatttattttttactaacgctttctacgggtatagttgcccccccaagtaatcgaacagacttttgactcttggtcacttgcattttacaagaatggaataaattatttgaaccttattttcagtactgtaaactgtttaaaattaactaaaccattacaacatatacaattaaaaaaaaaaattaaactaccaaaacatatatagatatacccaacactcatttttgtaaaaggtgtaccataaagatcattatcataactttatatatggtttgtagttaatctatattatgctctcttaaaaggatttttcgatagattttatatttatttcactatttataagagctcttaagtctttttcttatgatcgtttatgctatatttatttaagattatctgtaaattttttaaaaaaatttaactaatttacaataataaaaataagatttaaatattttattacactcgtaattatttttttacacgtgtggtaaataattatttaaattttattttcaacattacaaactattcagaattttctaaacatataaacataatctaaaataactactacacataaaaaaatgtttagactaaataaattttgtaaatgcctaaaagagataaagtgatccaccaaaagactccctaaaaaagtgtactacataagttttatatagcttgtatgtatattcatatggggtcactgcatatgatggtggtagtataagtagcaaactatcgcaatttattagttaaaaagactttgagattggttttagtctacctatagtcctacactgcatagacgtgcgtatcatattaatctctgtatagctctgagtaatcaatataaatttggttattcatgaactttatgttattttgtgaatgtcgacataaagtagtaatcggaactaaaaatgtctacatgaaccatgacacaccacatatattatagagccacccattcgtggggctgaccaaaatttaaattaagccttttctaaaaatttaaatttgtagtcatccaatattttataaataattttatattttaattattttaaaaagattgagacattgcaacagctaggacataccaataaggttttttttttctttagaaagcaaaaaagaaaacatatatttattgtaagaaagcctttcgttttaggattattttaaaataatctaatcattaaatggttaaagtgtataataaaaatgtcaagaaatttataactgtgtctgattgtcacaagaatatttttaaattaataataattaaattatattatttgttgaccacagaaatctcataaattatatagtaaaaagttagtttaagaatgacggaaactataatttttctagaattaaaattgttaataacaaacataaaacataaaaaatagcttttaaactaaatactcagattttttatttttttctacttttttactatggggtagaattttttttcaaaaatactatgtaaattttatattttctacaggattgttttttagttgtttcaatattgttttaattgttctgttttgttgttttataaaaagacggtatctttgtaaaaaaaaattttgtgatagtaaaattgtaaacttttacttaaaatccaatatttttgtaaaatcccgcccaaaaaattagtatttagtgtaaattttctttatttatattcttaaactttatttatattcttaaatatatatatatatatatatatattgcgagtgtcacttttctcacgcacattagaactttaccaattaaatcaaatttatttttattaagagtaatttgcggcataaatacttaagtttaactaccacttgtaaataaatatgttagtttaatttttggcactaattaataatacttaagttatatttctggaactctgtaggtacctgaaagttaaatgtcaaatcattatccacgtgtcattttcttattggtacatataaataaattattttttaaaaaaattaaaaaatcataacttggaccaattaagaattgtcacgtgcaaatttgcatcatatttaacaaccaaatacctacagagttctgaaaatataacttaagatattgttgctgtcaaaaattaaacttagatatttatttgcaaataggagtaaaatttaaatatttatgccgcaaattgcttttttattaaaaaaaaaaacatattcatttaaccttttacctcacaaaaaaagtccattagctttatttaaaaaaccaaataaaaataatgtgccttctaaaatgtaggtcagattgctctaaattgcccaatgcttaggcctaggtgcgtccaaactagtattctaaagtgaggaaattgtattctatacttatttagtttactttttaaaatttttatttttattttcatattatttatgatgtacttacttttatagatgatgtcctaatatactccttagattaatataaattatgtactgaatttaagtaaagagtgagagtatattggacaaaacatccacaaaagtgtgtagattttaatgaaatataaaatgagagtatcttttcaagagaattatcccatatactattttttttaatttnnnnnnnnnnnnttacggtttgagtttctaaaatggttgcagcgctagttg

SEQ ID NO: 21835 - DNA, 3062 bp, Cannabis sativa
aggcacaaaagaaaaggaatttaaccttttattaaataattgtttattgaataagcctaatactaattaggcttaaataaaactatcatggatgatatcttataaacagattaccatcacccattttgaattataagtcaccatttgaagttgtctaccataaaaccagattataaactgttaagaacctttggtgcaacttgttttccttgtcttaggccttatcaaacacataagtttcaatttcactcactaaagtgtgtgaacttaggatacagtgagtcattcaaagggtacaaatgccttagtaccacaggtagggtctatatctcaagatatgttgactttaatgaaaaggaatttccttttaaatctggttttctcaacacacatgcccttaaacagtatctcattgttaatcatgaagcgtggtctcagcttcccaatctccattttctcctcacacatcttagctcaattactctatgactgttccatcaacctctccaacatcccctgcaacaacatctcacagtccaaccttatctcctcacaacaacagtccagacaggtattcccttccatctccacatctcaatactaaaaccgctgatgatattattttacattcaccaaatgcttcaacttccattacatctccaactcctatcccttctcccacacatgcaaattctggtgtgtcaccacatccagcacaatcagtgtcacacctaatgattactcgcgctaaggttggtgtttttaagccaaaagttttcctcaaccatcttagtgacacatttcatttcagaattcctgcctcagttgttgaagccctcaagattaaggggtggaacaaagccatgggtgatgaaatcttagctctcaacaccaacaagacctggaccttggtcccctatttagatgagtacaatcttgtgggctacaagtggattttcaaagaaaaattgaatgttgatggctcccattagagatttcaaaggcatggtttggattttggtgaaacatttagtcctgttatcaaggcatcaacagttagaattgttttaaccattgttatgaccaggaactggagcattcaataattggacataaataatgctttcttaaatggcaatctagaagaagatgtttacatagtccaactagagggttttgaggaccttgccaaactaaatcatgtgtgcaaattacataaatctttatatggactaaaacaagccccaagagcttggtttcacaggcttaagggcactctacttggctagaaattcaagaactctaaagcagacacctctctattcttctacaaagatggcaaattgatcatactggtactcatctatgtagatgacatcatagtaactggaaacaatggagtaaagctaaaggagtttatcaatcaactcaacaaactgttctcactcaaagatttgggagccctgactcgagatgacacgggactatatctcactcaaagaaattatgttgaagaactcttgaacaagcatgacatggtaaatctcaagccttgtcccactcctatggtaataggcatatctatttcctaaactgatggtgaagctattcacaaccccactacttataggagccttattggagcactccaatacctatgccacataagaccagacattagctttgttgtcaacaagcttagccagttcttaaaggctcccacaacagtctattggggattagccaaacgaatcccgagatatttaaaaggcacactcaaccatagtctacacatatgctacagtgacaaacttaccatcacaggttattctgatgctgattggggatgttgtactgatgataagaggtctgttggaggctaatgtgtatatcttggagatactctgatatcgtggtcttcaaagaaacaagtagtggtttcaagatccaacactgagtctaagtacagggctcttgctcatgtggctgctgaaatcacttgggttgaatctctactccaagaagtggaatttcttctgctgtcaacttctatcaacttcagttacctggtgtgataatgttagtgccagcgctttagcatcaaatcctatttactatgcacgtaccaaacatatcaaaatagaccttcattttgttcatgacaaaatcttaaaaaaggaactggaagttaggtacaattcttcttctgttcaaattatcgattgcctaaccaaggccttatctccatcgagattttaacagctcattaccaaacttaaagtgatacaatcacccatgcgtttaagctttggtgttaagacatgggacctcaccctgcctctgctgaaccttcatgcatcaagaatattccccttctcagatcatcaatgatttcctcattgatgtaatgattattctagttttaccgattggaatcatgtttgcgaccctgtcataacttggtgaaagattggttgttcacttcataagtcaaccggctaaccggttgctctatttgatgcctatataatgcttggtgccttactggtctactcttctatgacaacaaactcatgttttaagtgtgtttgatcacaactatctcttatgtgagtgagctggtttgtaaggagacaccgccattgttgagagtgaaagttctgtactcagctttgtactctaccattgttcctaatcaataaagctttgccaaaatgaagttctctactcagcttgttatttttgtgattcttgatagtgttaattcaacacaaacccgataacagtccaaactcggtggccgttactcgagtagtgatgatggagatcatcggcgaccctacccaatgtacggccaggatgtcttcgcagaccgactcctttgctttggccacactatcagtatccatcctttttctactgtactcaggtcagttcctccttttcttttttcctgagttcaggcgagatgagaaagaaagagggttaggggtgtgagcttttgaagagaagggaggaagaaacgacaatggcgttataatattgaaagttttttttttttt

SEQ ID NO: 21836 - DNA, 2790 bp, Cannabis sativa
gagagagagagagagagactaacatcattgaggtgaaattcggttcctgagctctgtttcttcagttcctccaatatctagatagagcaaacataaagtgaattgaagtgtttgtttcttgataagataaatggttttgcatttcctaattaatagtttaaagcacatatatgtacctctaacaagcgcattgagggtcctcctagctgcattttttccatgatcaagttgcgagttgccgacaatagattctcccgtctcattctttcgcttgcagagactccagttgtgatgagatccatgtcaattgttccttaaataggagaatgatttaaagagacttgtgagattttgtaaagaaggtgaaagaaagagtggttcagtttgattggagaacataccggtggagtgatctgtagctgactgttgcattgcaacttccaggagtcgaaatgcctcagttacatcacgtttttctacctgcacgagcaaaaaggagaataagttcagtcccccattctacttgttagtgttccattacgtgctgttagatgaatccaaagatggaaaagtttactgaccacttctgaaaatcgaattcgagccaaggcttcactaagacgtatcagactttcaatctgccttggtgttgctgttataacctgttaattgaacaaatcagaaaccattgatggcacaaagacgtatcaaacattcatgcataaccagtaatggtgtttaggagttgaagaagctgttatgtcgtagacacatgtgcataacaattctgtatctattaataaagtataatcctttttacctttttcccacttcccgggaaatttcctctccttctcaagtcaacataacctcgagtcaagtcttcggcagcttcatcagataattgtggatgaatatgctttcttgcatagcttacatatgcaatcaatgtaggaaggtccaagacatcctgctctatgctctgcaaggagtgacatagaattttggatattatgattaataaatttcgcaagattagagcttaaacaagagacttggcaatatatcatcatacctcaggattctcaaaatgtaatgcaactatatgcttggcaaggcgcctgtcggtatgttcatcagccttgtctagaattaaataaatcagatcaaacctgaaaatgtatcgaaagagtagaatccaaacatcagtataggtcgtcaaatctacaaatcatgccatagagcaaaacattacaaattaaagtataaaggggcaaagtcatgctacttaagtatctaagacttctgtaacatcctagtttttattacagtaccttgataataaagtaggaggaaggtgtatattgtcaatcacagacaagcgagggttatagcgtgacccacttggatttgcacaagctaacactgaagccctagcattaagagaggcaatgattcctgcctttgcaattgaaacagtttgttgctccatcacctggggaatgcatacattattattagtaacaaaaccattgcaagatatgggactaagattaattatgaatgtatcattgcctggtggcccaattgagagaatacactccccaaaactaccctattagtggaggatgcctaaatggttataagccaccatctatacttagtcaacgtgagatctgaaagtagacccgatatgaaagtaggtctcctctaacaatgcaagttacaggacatcacatttactctcaaatagatactttttctaatgcataccagtatatttgaaggggaaaaaaatcaatcacgaatttatcaaaaagaaaatacaatatttatggtcagataaaaaatatgaatgatcacatggattaccaacctcgtgtaacatgctccttgcattgtcagacattttgtcaaattcatcaatgcagcaaatgcctcgatcactcaaaactaatgctccactctccaaaacctaaaaacatcaaaccatttgtagttaaggttatgtcataactggagagaagatatgtaggaacaaaaaattgaagagttagttagcgtcatactgtttccccggtttcaggatctttggtaacataagcagtcaaaccgacagcagaactccctcttccactggtgtatataccacgaggagatagcttgtgtatgtactgaagcagctgagacttactcgtcccaggatcaccaacaagaaggatattaatatcaccacggaagttagcaccagatggcaacttcaaagcaatcccgccaaacagctgcaatgaggaaggttgcatttagtactacactagtcaaaagagattcaagacaaactaccctttaaacctaagacaaaaatacaatcaaggacttggtgaagcggaaatatcaaaagtacctgacaaagaaggccccttttgacgtcatccagctcccagatgtttggtgctagagacctcattaaacggtcatatatatctggttgctttgacagttctttcaattcttcaacctgtaatcaaaacaaaaataagattttgtagaataattcattttacgaaagaaagacagatattacacattagacataccttcttctcatcgaaaacaatatcatctgagtttccacctaaaggattatcaatttccatttgatcatccaccagcattctcgacttgtcagtcttctttatatgaagacaatcaatgtatgtctgcattcaaaagaagaagaaaatacatcaagaccctgcaatgaacaaagaactcaaaaaaaaaaaaaaa

SEQ ID NO: 21837 - DNA, 1289 bp, Cannabis sativa
actaataaagttcctttatccatttgtcgtgatcttgacgcaatggtaaggaaattttggtggataggaaatgactcaaaagacaggtatatggcctttagagcttgggacctaatttgtcaacctaaatcccatggaggtctcagaatcagacggtttgaggacatgaattgggcattgatttctaagttggcttggtccgtggctcgttcggagaacaagccttcggtaaattgtatcctcaacaaatactgtgcctcggaaagcttctgggaggtaactccaaaaactaatacctcttatttttggaaaaatatattggaggttagataaacagtggtgaggggctcgatggcgttcataactgagggtgggagtgtagatgcatggagacagccatggattccgtggctggattatgatggtttccaaaggcttatggatagtctcaaaccgagaggatttacttttaggactgtggcggatctatcagatggatacggttggaataaggaagttgttctttaggtttatggttcaaaattgggtaggaaggtcctggatattccctgtctgcctactcctcacaaggacaagctaatttggaaaggcaacaacaatggaagtttctcggtgaagagtgcatattatattgatcaaggttcaagatttgaggccaagaaaaccatttggaaatgggtgtgggatcctgatatgcaccccagagtagctgtctttctttggagagccctaaacaatacacttcctatcaaatgtaggctaccgttcttacccgacaaggtttgtggtatgtgtaacttgggagaagagaatgctcttcatctcttcaaggagtgtccaatggctaaagctttatggttctctggaagttatccattcagaagtgacagtgtaccagctgttacacttattgactttgttgaacaagtgatagacttattttctcctgaaaccagatgcaaggttttgacgcataatggatgcaccctagcggaaatctggtcctgcaggaataaatctttgttagtgggggagaaggttgatctggctcgcatgatgaggaatatttcagtttcttcctctgaaatgttacagatgaaggaggacagggtaagcaatggttacaccgaaagcatcagtcacgctcaggtccagctgcggtcgacaagggtgctgtttgtggatgcttcctggggcgaaagaactatgggagctgtagtgatcaaagtggagcatttgaaggaggattggtgtggagttctatgcca

SEQ ID NO: 21838 - DNA, 2331 bp, Cannabis sativa
tgacaatgtcaattgtctatctactaaaaatcgaaatgataatggtaaataggttttattatgcctaggattcgttctgatatgtaaccaaacagaggaatgaaatgaaaattgaacaaacgtgttatagtatataagatgtaaatgatcttacttgttggctaagccttcaatatttcctccatctccaatggttatgtacacaggtgcagattgatctttcacaggcatgcactcgccattgatgatattataggcgacgttagacacgcgttcctgtgtttataaacaaatcaaacttggaaactaagcaattcaaacatcaacatttatcccttgtagagtttagagggcgagattcgagtgaggaagaaaaaaccgagatatggagggcataccgagcgctcataagcatggacatggccggcaaatactaagtccactttgtactttacaaacaaaggctcatacatcactctcatggtttctccttccatgtagtggtagttgtagctgttataccacggcgaatgcattagaacaatcaaccatggcgtctcgcttctgttaactttagggaactcttcttctatccatgcattctgaggagtgtatttccctacaagtttaagaatcattgtaaattttaacaagttagaaattttaatcgtttggtagggaggaatgaaaataaaagaataagaatgagaatggaaataagaataaaatcttgcattggaatgatcttcccttctatgttaaaatgtaaaatggtgcaaaaaatttccactggattgaaatatcttgaaatgtaaccaaacaaaagaatggaataaaaatcattcatttccattctatttcatttcattatattcaaccaaaccaaaaccttattgatacttgtatggacacaagaaaagttcatagaaacatttacaaaccatatcaaacaagaaactaaatgaagtaaaagcaaactcttgtcaatacaaaacacatcatgtatacacacacaaacacatatatatatagagatatattcttaccataagctgaataagaagataacactatgatgtatgctgaagctctcttgattgagtaccaaaatggagcagtacttcctgatgctttataaggaacatgataccgtttcgaaaatggcttaaagggcttagtttctccctgcaaaaacaaaaagttattccttctatctttggtttaaaaaggcttaagatatcaagcattctaatcctaataactgagattgtgttctctcttgaaaatctcttctattgcttcctatcatcaaaacagttgagccaaaccgaaattgtgaaagttaagctatgtctcctaagagaggcttacaatttctggtgcaaaatcaagttcatgattccctgcagtccatatccaaggttgataagcaacacttctctcaacaaatcttgcccatgaatcccatctgttattatcatgattaggatagttatctgcataagaaagatccccaacaaaaagtactgcttgtcccttctgtggattcatttcataatgagtaagcgtcttgttcgaatcgaatgtctgaccaagatcccctacaaacagattccaatccaattattatgttagaacaaaatcataagcttgattcaacacagaaaacatgtatggtcatcatcaaatgcaatacctatgagaccaaatgtgtaaggcacatcaggaccaacttctggtggagtgaaaaaccaaaacatcctttcagtatgaccaatcccaaccacatagtaatatttagtattgaactgtcacaattaatacaaaacaacattataagtcatgttagagagtccgacattgctaatgtgttacaatatctcttacaaccaattggttttgagatggcaaaaacaaattttttcgatagaatcacacctaacatagcatttatccaatgaagagcgaaaatgaacaaaaggacacaataaagaaaaagggggttctcaccttcaaatttctaatggtgcaatggtgaatgtaaccagaagtgtaattgaagtaagtataggttactacttttcccttagctaccttcttgtgtttgctaatttcactccaatacaacacttcacttgaacctggttcattcactgtgacccatgacacaatcactgccttaccaacttggtctccttgtgtaatatgaacctttaatttcaaacaataaaaaacataaaaatagaatcataaagaccaaattcataaatttcaacccaaatccttttcaccaaaaagaaaacctaatagaacaaactcaatatatatata

SEQ ID NO: 21839 - DNA, 5717 bp, Cannabis sativa
  modified_base (456)..(458): a, c, t, g, unknown or other
  modified_base (1882)..(1883): a, c, t, g, unknown or other
tccaagtagtggactccatccacgtacgtgttgtcactattcattctcgtgatgccacaccagagtgcaaaatttgggatgacagctaggatgaaaagaagttgaaggttacctaatgaatatgacccacatgtggctcagttcattagagctaagctaactgtacctaagtttaaaaacctagataatgcgcgtggtgggaaggtgatggcaactaagctcctcaaagctgccattgagagtgatgatccaagagctcgagccttcaagctaaggcctcttatatttagcactcttactaagcatcaagctcaattaatttgggatgattattgtcttcttaaaacttttgtgcggaagccacgataagacggtcccaatggctcccaaaacacttgctgtagtgcctagtcgagattccacatgaatgtgggtgcttacttgcccttgcatccnnngttcatatccatagctaatttctttggtgttttcccttacaaaataaatctaaatggctatagaatttttgccaccttcttcatattttaccgccttaggaactgccctattccaactcctcatgagatagactttctctacattttgaaaagaagtcaaccccgcaaagaaggcttttaccattcatatagcatatgaccaaaagcaattgtggcctttatcatcaagagtacttctatactcttgttctttcgtctagacacattaccttccaaaaggttggccctttcaaaagacatgctcctcttattgacatgaagaggagagttgatgccatgttgttagagattgttgcatggtatagagatgggtgaactctgtttagtactaaaaatctttgaaaggtttggttgatcatgtcatgttagtgggtgtatgctaacactttctttgctgatgaatcttggacaatgccactcgagcaagatgaaaaggatgctcaaaatacaactgtcatcttctctcagacagtgacaaaagaagtgatttaattcaaaatgacataaaatattgagggagaatatatgtgttcatagaccaggatgatggagaagttacccccactcgaactgctccagagaagtatggggaatcagcatgtggctgatgctccatgctatgcagttaactttgttgtttcatttctcttttgttgtactaacctcctgtctttgttctttgtatacaatatgagcttcctggctgctatggcatcttgttcaaacttgaagagaaagattttggtgctgaaggaaattgagcctccggtaagggaagtggttcagggcatccctgctgcttctgctactttgaagaagaaggtcaaaaagaggggtagaactactaatgccgctcttcctattcaagactctagtagggagagatctaacactgctggtgctgatgaaagttcttcgattaacctctcttcgaatgaaattgaccgtggtgctccaaaatcgggttcaaatttgatggagcaattgtgtgagcaaggctcttggcttctttctcatagtgatgccttgattagtgccaaggttgaaaatatctcgttgcagcagttggttagcaccaaccctccacacatcattgcccaaagatacttcagcaacttggggtagctattttatcttgtctccttctagcttaactttcttttattttatcatcacctgctactgttttctttttattttactttatacattaccgcttgaccatttaacactagagtacaccatgtcttaagaaactcgattactgggagtaatgtcaatgcttcttaaagttatctttaccatgagagtacttacacagatgtgcaaattttttttgaatgctcgtgtaacatatggctctnntataccataacataacctatgtgccctcaagtgatcaaagaagcgccttcattggtcaattaccatactaaatccccttaggccttcttgatcatgactcttgagtggcgttacacgtgtgagcactctccacttatccaaggattcgtgggtggtagtgttgaactcactaaagaaacaaccaaagttatctcaagaacaactcacaagcattactcaacgcttagagagtgttgtaggtctgtgagctgttattgattaatttaaatgatgtaccaaaaaaaactttgttcaacgcttttctcatagaattaaatacaattacattactatgagctaagttaaaagaaaaaagtacccttcgaggtagtagttgcagatttccttcttcatccaagcttagctgaagtaatcctcactatactaatgccttatttgactttttagtatagaagccataccttatcgatggacctcttaacctagggacaattttgtcgtatctttccaattaaagagacaataaattcacttgcattaggtagtgtgaatctcactatgaagcgagctatttgaagacaactgcttttatgggtaagaccgtcatagatgcacctcgttccaataccttggtactagcactggattcaagttgtagtcatatcatgctaacttataagttcagggttcaagcgcttcaactacgacatatggtccttctaaattaagcccaagtactcctactgatgtgtcttctgtgtttaggaatactcatcgtaacaccatatccctaggcttaaatttcctatctttaaccttagagttgtagtgttttgcaaccctttattgatacgctgcctttctaagctcaaacctttctttgatctcttcaattccatctagggattcaaccagaagatgatggttagtttgctagttgaatgtaagtctttgatgggatagaggaatgaactctacgagtatcatagctttgtacctgtaggttagagcaaagggagtgtgacatgctgctattttttctgttgtgtgatgggcccattgttcaagccaatcccattttacttgctccaagcgtttatttagcgtatccttaagagtttggttaactaattccacttctccatttgcttgtggataggaaaccactgaaaaactcttaatgattccatgtctgatgcagaatttagtaaagaggtcatcgtcaaactgtgttttgttgcctaaaactatcttttgtgggagtccaaactggcgaatgatgttcttgaccacaaaatcaagaaccttatttgatgtgatagtggctaagggctatgctttagcccatttggtgaagtaatcgattgccaccattgcatattgaactccgcctttcctcttaggtagtgaatctatgaggtcgattccccaaatagcaaatggttggggtgtttgcatactcttgagtttgtttggggcagctttgggtattttagagaatctctggcaattgtcacactttttgacatagtccatcgagtcttttgtcattgtttgccaaaagtaccattgtctcaagatcttctttgagaggctttgcccctagcatggtttccacaaaagccctcatgtacctcgaccatgaggaatttggctttttcttttgtgacacacctcagaagaggcattgagtagcttcctctgtacattacttcgtccatgatgatgaagtgagctacttttctcatcagtctcttagcttcgttctagttagttggaagaataccttgttctaagtattgcgcaatcggggtcatccatgatggactgttgtcgatcattaggataggctccgagtctttattaatgctccacttggtgaggtattagaccaagattacattgagagtgttagaatttattgtgctagcttgtttagctagtgagtctgcattggcgcactattcatgtagcatttgttggagggagtaatgctagagttgggcttatagatctttagttttgcttaagtatgcaatcatgtttgaccctcgagcttgatactcaccgagaatctaattaacaactagttgtgaatcactatagatctcgagtgattcagctttgattgctagtgttaatcgtaatcttgttaggagtgcctcatactccgctttgttattggttgcggtggactcaaactgcaatgcattgtgagttcgaaattcctctggagtaactaagatgattctagcaccagaaccatgctcgttagaggggccatctacatatagtttccaggaaggtctattgttttcctgagctgcagtctcaagcgtgtggacctggtcttcacaaatcatgggatcatgttctttgaggccattacattcagtaatgaagtctgctaatgcctatcctttgattattatttgaggctggtaggtgatctcaaacttacctagttcaactgcccacttgagtaggttccctgatgcttctagcttcatcagaacttgcctaagtggttgttcagttaacaccttaactgtgtgagcttggaagtatggccttagctttctggaggccaagaccaagcagtaggctagcttctcaatggggggataccttgattcggccccaatgagacgcttgctaatgtagtagacatgatgttgtaccccttcttcctcacgcaccagagcaacactggttgcatgctcagtgattgccaaatagatgtatagttcttcactatctattggcttggacaggttgggaggcttggctagatgatgtttaagagcttccaaggcttgctcgtattcatcagtccattcaaacaccttgttgcttcctttaagtaaataaaggaagggaacacacttgtcaattgagttggagacgaatctactaagtgtagcaattcgtcttgttaggctgagcacatcttttatctgcgacggtgacttcttgtcttgcaaggccttaatattctcgggattcacttcaatatctcttgagttgacaatgaatttgagaaattttcttgattagacgccgaaggcacattttagaggtctgagtttcattcgatactcctagaggatgttgaagcactcctctagatcttggatgtggtctttggatcttttcgacttaacctgcatatcattgacgtagacttccatattgttcctaatttggttatggaacataaggttgactagtctttgataagttgcacctgcattcttgagtccgaagggcattactttgtaggaataaaacctgatgtcagttcaaaaactagtatgctcttcgtttggtgcatgcatactaatttggttatagtcggaataggcatccatgaatgtgaggatttcatggtcgactatcgtgccgacccattgatcaattcgtggtagtgggaacaatttttagagcatgctttgttgaggtcggtgaagtcgacgcaagttctccactttccatttagcttaggcaccagaactgggttggatacccaaactgagtaccctgatgaagttattctcctgtagtctttcaacttcttccttgagagatttagagtgctccttctcaaggagcctgcgttattgttgtataggcttaaagttcactttgtctatattgagggcatgaccgatgacctgggggtcgatcccgatcatgttctcatgccactaggaaaaatgacttgatttctaccgaagcaagccatgagcatttgactcaagatctctgtcaggtttgttccaatcttgacaaccttggtcgggtctgttgtgttgaggggaagttctttgagtt

SEQ ID NO: 21840 - DNA, 7444 bp, Cannabis sativa
  modified_base (7396)..(7397): a, c, t, g, unknown or other
tcaatatatctattttaaaggggtgcattgtagaatttttcataattatttaagatatttacaaaattttaaaaaattcaaattcaattcaacactccaataacaggttttaaaaagttattggagttactcaaataaattatttgaatattttttttatattgtaaattatttttaaatttttaaaattttataaaatatattttaaataactataacgtacacgattaaaaaaattaaaaaaactattaaatatcgaaataaatagaggatagacactttttaaacaaatccattatagaaacaccatatatataatatgacgaagaacccaagtttttatatattaatttttgtatatatttacacggagctgcttagcgcatcacatttcctattactgtaggagcattttttatttttaatatctaataaaattttatcctaatttgtgtatatgacggtatattatagttttagtaatcattttagttatttttgagaatttcaaatttattatgataaaaaaaaaaaagttcaaatcatattttcgcaggatatcatatgtataaaattataatgtacaacgtcatatacaaaaattagtttatgatttttttcatataccgcaaaaaataagaaatgtctcaaaaagtgatggcctacctaataatttatttatatgtatataatgattttgtatcctttttttttttttttttgaaacgatgattttgtattctttagataataaggaagtcataggatgaggttatctcgtcaaaatataaagagtgaaataatagcaattaaataaataagtgaatcagaaaaccacttgatgttgccaattgcctacttaatacataatattgtgtgctcttgattaccctccagctagcctacgtttgaataaataggtgatcattcatattttatttgctacaatgccaaaataaaaaacttcgactgtactcattaagcctacgtagtatttaattatttgtgaaatcaataataatattttctctctttcttgtaattaaaatttacttctatttctttcccccattagggactcacaaaagaaacactttaaatttgtaaaaaaatactttctttgcatatacagccatccactggtcaacgcgttctcagaacgtaaagcgtataatacactacaattataaataataactaccacgtatataggtttataatatatatatatatataattaataataagagaataataatttattggtcataaataagaaaacttcagtaggctcacgatggatagattagaatctgcacaatggatatatatagactgaactgtaatgaaaaacaaaattcaaataaagaaaaaaaaaagagaaaagtggcttaaaaaattaataattatatatatatgtatatgtatagggcaggtgcattgtgcgtgcatggactttaattaagtgatctaaaataaaacccttatcatcacgtctagctctaagaaacaattatataaattattattacaagagtggaagacgtaattaatgtgaaccagttattgagatccgacatgagacatagggttaagaattataaaaatgaaaaacccacttcgagagttgattgagactaaaaactatccccttttgtggaaccccgagacccaattcccactctcttgcattaaatgcactccacatgattccaaccttctaatcttttgaaccgagaaaaacaccttcttttccctagttgtcatgccctatgtacaaaatacaaatcttcttttttaaccttttatattttatttattttattttaatgtctgcgtttttgtcttatcaaccaagcttttgtttttttctgtggctatgggtagtactcatagatattgacttattattattattatgtatttcattcatatatatatataaatatcatgtaatgaaactattgcaaaaaaaacgttaaaaatagattattaatggtgctgtagaagttgaagttattttagttttcagttttccagttcctaacccctaagctctaggaagaataaaaacttgtacgctctagacggtgagagaactttgtttattaataggtttgtttttactagcctaatttttttaatgagattaataaaatagagaaaaaacagacatctttcaccatgttagaggaaaaactaaaaaaacatgcgacctccgatgcaaacatttaatgcgcttggtgataaggaagattcgattcttgagatgtgtatggttttcaaatctagctaagacggtgaagattattacaagtaataataatgtttgacaacagcaaccttctagggagttttcaaagtggctatactgacctcaaattcaattgcttgaacagagagttaattgttggatttccaatgcccaagtcctcataatcagcccaatgcaaagaaaaactttgggataaaattaatctatctaccttattatagcacatgagagggaccatgctatatttgctgccttttcactttaaagattcttagttatcccaaaggatcatgatcccaacatcaacaatataaactagagttactttaatatttctttagtaattagaaagttctgtaaataattatttacaaacagtagttgtcgtatctacaatctgattttatcacatcaaaaagttcttgtcagtactaatataattgtgtcatattaagattcgagagggtcttctcttactttcgacacacaaccttccaattctattatgtgatgtttggtaagaatataaaaatgaaaaggaagagggggacaagtgtgatagaaagagaaatggttttcatttggtaggtgagaagtaaataaaatgtgtttgataaaaataatttaatagaacaaaacggtcttataatctaatcactgtgttctataagatttatgaacagttatggaggggtgtaattgataagtgtggtaaaacgtttctcttctaccaaacatccacagtttcatttctctcttcttttctttctcattttttccatagtgccagataataaactaattaaagttagaaaattaaaatgattctaattcctattgaattgattacatgggattcctattaaattgatctcaatttttttcactgtacagaccttttcacaaactgattagatgagacagaactcaaaagcatatgatgcttgcatgctggtctgataggaactatacagtgatcactaactaagcttgacaacaaatacacatgcagtagagtttgaagtaagaaagaacattattaaccttcttatgacatcattcacaagtgccaatcgtttagtgataaaaaaataaattagactgaaacaaagacgatatgataagcaaaaacaattaaaatatttatcatttttagtgatgttgtattccactcaagtttacgcaactattataacgactactcgctagactatcatgtgacaatgtgctatgagcttaggtgttgaattgtatagtacttctttgttatatgtaagaattagctgtgctctggtgtggcctatgagatgccactagtacttgggcccattctagaacctgcaacaataaatgtcagacaatacgagcacttgccaataagtgccagtttgcttatcttcttatatttgcacacacaaataagtatatgctgaaaaaactatgaatgtttagaagatttatatctttcctccaaatgttactccaaatctccaatcatttgatgatttctttctctgtaagtcataaccagtttattaagaatttccagagttaggaaagtgtggtggtaatggtttctctatgcttgagatttggcattttataagacaaatttctagagagaaagtatgaatttcctccaagatcaagtacatgtataatcagctggaaaagaaaattttaatcgagttactaagatatttcgaacccattaaagtacaaaatgggatacttaaatcctctaatattcagaggaatactgaccctgaccttagacctaattaactggtttatactggggtaagttggtttgtgtgatttgccgagggcctcaaccttgtggctataacttttaccttgaataatcctttggataaggcattacatcgaatgtttctatgggactgatccttactcttgtggctacaactgcatctaaaactagtctgagatgtatatcaagtcaatataatcttattcaatttaattgacaaattaagcaaattgcttcaacttctattggtatttggttcatcagtcatctttaccaagctttgactttcctgcagataccgttgatttctcttcctgattccatttctgaacaaagtggttgctaaatactgtgtctttttacaaacagaagaacttgctttacttctgttcttcaatttattctttgtgtacctctcagcttgtacctgaactgataacacagagcctatcaacttaccgtagctaatgattgtaataggtcttaaaacaccaatcaatcaattaagtaaaaacttttcaaagatagttataccaactaaggaagacacaagtgcaatttatacatcctagataatcaagatttgctcttctataatttcgggttaatttgtcagcttttctagatacaaaatctgaatggtcgtgtgtggctgtgtctagtttaatctcaaacaatacatgtttacccaacaattagtaaacagctaatctgcatgtaattttttttttaatgagctcccgttgtaaaacgggtgcttccgaaaattgatgggcaggtcgaaccgaaagtggggctcaacccactcgcctcaactttgagtgttcgtaacagtgggtgttggcacgactcgtcgcctctatacaatcattggcgagtcacctttaacccctgacaggacgggatgtaattactgtacagcctctgtggttgttagaagatcaataagcatcacaaatccaatgatttctagtgaagcattctttatttttattaacataaggggactctatacaactccctaatccctactattaccacccccatcacttatttgtttgtgttgaaaggactctaaaaaatatttacatgatccatgatttgtaagccaagcaattcattatttcacttagcttgtgtaaaccccttccattagcatcctcatcagttaccagaggaataacatacagagcacttctttgtcccaaaatcaaatgtaaataaatatttattagcactattttcatgattcacttaaatcttactcaaactacacgatgttctcttcaagcttcttacctttactaccacagtcttaactacaatgtgaaattccacatctgtgctctgaaaaatatggctagccagtttcatgattttgtgtataattatgggtgcatgatatgcattcctaacttgaatactgacataattttcctatacttgtctaaaatgaatactgataattttgctatacttgtcatttatattatatatggtattgatggacacaggtagttttcaccatattcatattaatggagtaagttaacgtaagcatagctgacccacaatcgaagagtgtagcatcacagtcacctaatctgcatcttatattttaaattgaaatttgaatcaaacagatcttgccgtatgaatagcaatgaagactccaataggtcataccagaacgtgaaacagctgaagtcatggcgcaatccttgagtctctttatcttttcaataattttcacaccttcaaagaactcagtagtctccaaatttgttttagaagccttttggaagcacaaaagtgcattttcacatgcctacaaaagaaaaattcaaggagaataaagatgcagtgccattataaaaaaacaaatatacagaattatgtagttacactaaaggaagtgtaatagagtatgtatttatttcactaatattaacatataatcttccccattagaaaatggtgaatagtcaatagttatccaacgcagccacaagtattgtagtacattatcaataaaccatagcaagggaagagaattgtgtcgtaacttataacaatctaaaaagcttttgacacttatttatactattcgttatgtaaacttctttaacccatgattcggtttacaggtaaccttactagaactataagaaatgcttctagaaccacctaatttttttttgattatcaaggcacataatataaatcattaaatcactaaatcctgaaagaaagaaaaaagaaatcactaaactgaagcaaaataaagaaatagaactagtagaaaacgaacacatattacaaccagatgaaatgaagcagattatatcacatcctcaagttgaaatagagaattgtcagttatcatggcccccattgactacaacttttcgatctaaaaaacaatcaaacaattcatcctaatccaaaacgcagcatctcaagtctattttcttattagcaggattttaatattaagaattaagaactaatcggttagcaattagaaaaaaaataagaactaactgatcgttgaattcaattattcatatgcacacactgacataacctcacctttcttgcaatggaattaaaaccgtaatccagtgattgctcggcaaagtttaaccattccatatgtgaaacctcaagccactggcaacttgtggacttgaaatccctcaaaagcaaggcctcgtacctcaaagccaaacaattctgtgaaaaaagaaaatgtaaaatatcacgaatcggataatgtaaataacattataaaatcagtaatgttatttcatatggatcattagataagaaatttttgagataagtagaaaacctgcctcgacatcacctaaaagagcgaaagctcggacaagaaaatcgagatccagaagcttcttctccacaggtttttccgcgttctcacgcataatagaaacggattcaaacctaatgaaatcgcgcaagctcgatcggatcgccactgatgatgatctgacgtctttggaaaccatgactgattcgatgattcgcagcgcggcgccgtcgagcctgcgtgcaaaagttgagagagcttcagcacaaaatcgagaagtgaaagaaagagaatgctcgaagtttgaagaggcagaaggcgtgaccttctgctgagaatgagagagcgaaggagggagatttggtgagccactgagtctgacattttgggcgggtaatgctagagttatgcactgctcatgtctttcgcggggtttggctttaaatatggggaattttgatgagattttttctattatagaccaaaaatagatgaaatttacatttatggcccnnaaaaaggaaataaacaaaagtggaaactaaaaagttggtaattacaa

SEQ ID NO: 21841 - DNA, 1381 bp, Cannabis sativa
ataagctcatcatttagttttaaaatgaaattaaataaaagaaataataagccaaaccgctctccatataaaatgcatatctaaattattaaagtttctaattacgtatagaatcaagtacgtagtttattaattataaacaaaatttcgacgtttgcctaattaattaattttttttgaagagttggcctaattaattattaaaccatatgaaaagtcaaaaatattcaccccaataaatactggatacaacataccttaatttcttcgatttctgtgttttacttgaggagagattacttaggtttcaatggcggaggaggtgattctgctggatgtaggggtcagcatgttctgcctaagggtgaaaatagctttggccgaaaagggtattaagtgcgagtacatagaacaagatcttcagaacaaggaccctttgcttctgaagatgaacccatttcacaacaaggttcctgttctcattcacaatggaaaatctatatgcgattctctcattattttgcaatacatcgaagaggtttggcctgagaaacctcctaatttacttccctctgatacttatcacagagctcaagcaaggttgttggcagacttcactaacaaggtatatataattaataatatttattattaatttctcaatacaataatgtaatcgaaaagctaaatgcatgcagatccatggttgtggttggaagatatgtctttgggatggtgaaaagcttgaagtagccaaaaaagaattagttgaaatgttgacggtgattgaaggagagcttggagataagccatactttggatttggaggggagaggtttgggtttgtagatgttgccttaataggattctacagttggtttattgtgtatgagatgtttgggaagttcagtatggagagtgagtttcccaagctcagtgcctgggccaagaggtgtctgcagaaggaaagcgtctccaaatctattactgatatagatgggaacaagacttaccaatacgttgtccaatccaggaagaggttgttggccaggccatgagtaccaaatatcgtatacatatatacagatacatatatatatgtatgcatgtgttgcaataaaagtatagtagttatgctattttatgtgtattttcttattgcattaatttgcatgcatgtgttgtttgttggttggttatacatattattaaatattttaatgtctttgcttctctaaagaatttgattagtttgtgcccgccaaataataaatattctgttaaaattgttcaaaaaaaaaaaaatattctgttaaaaatagatcacaatttgatcttgcaagtaatataaaaaagttttctttttaggctaaatatattt

SEQ ID NO: 21842 - DNA, 3920 bp, Cannabis sativa
taatgagattcatctctaatagatattcattcattagcaatttaataccatagaatctcgaaagataagtattattataaatcttttattctcagcaatgatcaccccaatagtgactgcttagaataggttttataaaatataaaacaatggtagaagctcataaaataagaatgaccttgactctcacataaatgggataacgtcgaattcttattttgatcgaataaaaagatgctaaaatagtgtctattttagatgagctgacaactctattcaactaatgatgtctttgactctccccacactatatatcatttagttggaaaccttggaaatttttttgagatgtgtttgttttgtattttcacatgtcttcattacttgcaaaaagtttataaatttccaaatatatgtttataaatttatcttaaacctatgattaatttctatctattgataattgtggtttcaaaaatgactatgaacaacccaattgtgtcaatgttgattaaaaacaagctccctagcgctaactttgtcaaatggaaagagaacattaatattgtcatcatacatgaaaattctttgtttgtgttaactgaggaagctattgagcaactaggtgagaatataaccaagaatgtaagagataaatttgagcgttggcagaatgctaacaataaagctcgtttctttatgctgtctagcatggttgataccttgaaaataaggtttgctaacactctcacaactactgagatcatgaaccagttaactgaattgtttgggaaggtgtcggatcaagctcgttttgatacgaccaagaacttcatcaatgcacgaatgaaagctcattagaatgtgcgtgaacacttactccagatggcaaattatttccaggaagctaagatccatggagctatcattaatcaagaaacttaagttagtttgatcttgaatagtttatctccagctattctgccctttacttccaactacgtcatgaacacgttaatttttgactttcacgcgttaatcaataacctttacacgtttgagagtttgattggaggcccacaaaaagaaggtaacaaagctcctacttctagtaatgctatgaatggtacgacaaaagctgagacaaacatttcctctatttcaaaacccaacaagaaaaaaattggaacaataacaaaaagcctcttaaagctgttaacacatctaataagagtaaaaaggctgctaattcaaaggcaaaaggaaaaggaaaatacttttactgcaacgaaaagggccactggaaaccccagcgtcctaagtttttggcaaaaaaatcaaggtgtttctaattttgttgggaattcatatgttttagagaattattatccctttgggttattaattctagatctactaaccatgtttatattcttcttatttcagttccaactacttaaacttggattacaatcctagcaagttgaagtggatagttggagagaggggtggagaatgtccaagcttgaggatgaagctcaaaatttttattttgaataaatagttttaattttcgaacaattcggtttcaatttagtttagaaattctatttcctatttcatattatttagacaatcattgtgacatttttgagagtattaatttcaatttttcctctttaaaaggatttcattatgagttatttttataaaattgagctttatattttgtgatttgtatgctaatactaaaattatatttgtcttcttatcatgttattatatgttttatatttattattgataaaaaatatgtggtataattctctttctaaagagatattaccacataaacacttgaacgtgaattcaatgtttatgaataattgtcctttcttaagaaattattatgattttgtttaataaaaaatcttgtgatctaataggggtggagaagttaagtaatttatatatgaaattcaaagatcttttataatgaactctagactatattcagaacttattaccatagaatatctatcacacacatattttgataagacatagatatactatactactcaaactagcaaactagtagattaagtttattcttgatcctgtatacattctaatatctcctacaattgtaacagataccactaaagtccctagacatagaatcatagaaccttatcacagtgagataatttttctagcctgttattatttggatgacactagtgatgacttacattgatatgttcaagaaaggaactttgcataaagctaagaaaagttaatctaaccattcacatgtatagtaataacttatcagtattatgaggataagataagatatcctacaatgtctattcaaaagacttaagcacaattcgtggtccttatgaattattttatggtatctctagtgattacttaatcttaagcaagtattttatattaatgttaatactagaatgctaagttggcgacttagtctagaaagattttatgttttccacaaaaaattataagtcacaacaggatgtcccttagtactaatagtaagacattaaatgcaccttgtgtatgcattaaattagagtcctactgttgagtgagagacatcaaatatgtaatccatcaaggaaatatagggagataatcaagaaagaatctctaaaagtgacctatatgttagatgataggggtatttttttagaacccttaaatctaaatcgaataagaacttaatatctgggatggtgattactctgggagtggaagaattattttggaagggtgtaaaaactcatctataataatttagttctaccaatgaagctaaatgacttagttacttttaaaaggcacaagaaagctattcaaattgaagaaagttcttgactgttttatttctattccactttggatagaatgagagatgtgtcttctgtatattcagatacacttattaggtaataaagaattcaatatccctagaggagtaatacatatagaaaaatgatgtttcataatattttttgaaaacaaaaggaagaaatgggggacaaagttattgctttttaaaactttacagttcctattatttgggtaaagtcaaacacactacacttgatatgaatattaagacaatttattaattgaaatgcacttctagtttaatgttagtgtaagtaggagtttgttgggaatttatgccataaataaaacccatgtcaatttaatcttatttgctatcaatagaagattagaagtcatttaagtttacatgtagttttcataattataattttaatatatattttctattaagtccagaacatatagttatttgcaattacaatgatgtcatcacactgaaaagtaattgtgattatacgtttcaaagtctttagtctcatgatttatcagggcactagatttatactgacgtgataatcagtgataaagtttacttacacaatgatatgtggtatgtgttttccagggtattggcaaagtatactagtatcagatgtattgaatatacatcagactcaaccgatgttgacagtggaaaagatatcactaacttaccataatatcttttctaagtcaatatcacttagttaatcttagatcaaaagatgttaatcttgagatggttcggttctggcttaactttattatttgtgttctttgacttgttcgttaaagctaaccaattggatccacccaatacttacatcttgtgaacatggtagtgcaattgagtgtaagtgctaatcatagacatggaatctatagctttcataactatatagaagtgaaatgctgatttcctttgagcttggcttagtagacataaatggaatagctcttatttcagaaataatattagtttactgaaatat

SEQ ID NO: 21843 - DNA, 1687 bp, Cannabis sativa
acagaagccagatgaacacttttaactttgaaaggtagaggaccctccacaacatttttgttcgatcgacacattggaatcaatcacaagataaattttctgagctattacacaaccaagcctttctgtcttccatgtaatttagtaaatgaaaacagaggccttttatcattcaggtttatttcaaagtaaaagtttcaatttgaacacaaaacacccttctgtctctgcaaaatctaagatgcaatcttttcttttttgaggataagcttggaccgggaaatatgattaaagattagccaagtccatccaagtgtctttctaaaatgtaatattattttaagttcctacactcaacctcaccagttgtaggacattgttataaagcgaagcaacactactgttccatgggcttttaataaattttgggattgttgctcagtttctatttattgattgcaatttataaattggtttgaataattgtatgtactaggaaaggcatttaaattctgtgtttctttattctggggttttaattctgtctgaaatgcataagctttgatctatgtgtgattcaggaaaagcttgctgaagacatggaaggtttcttggacgaaagttaaagtcaatgggaacgatcaagaggtatcttacagtgctgtatcagttgtggaatcacctgcatagtacatcttgtccactcttaatggatgactcttttactagaaactattcactttgtttttgtatatattatacacagaaagggaaaagaaaagaaacacacaaagaaagcaatattcgttggtgaaccactagtattactcttgttgttgatctgtaacatattgttaaaaacatgtataacttgtagacaaactggtatgcaatctaagatttatttgaattagatggttaatgaaatgatttaaaattcaggtgaggatattttgtgggtctttgattgagagatgaacggtatgatttgggtcttttaatcatgtagggtagaattgttataatctttctatcctcacagtagcatatccataatatgtgcgaaatgtcgagcgaaaaagagtgatttattcgaaattacatgatttcccatatcatctctgggagtgtaagtggatcgggttcataagcggacctaggggtaaggtgtgttgagggtgggcttagctctcctcgagatttaaaaatatatgttagtacagtgttaatatatcgctaaaaataaatattggttttatattgcttacaaacttaaaattttaaatatttatgtcgctatttacccaatatattaatatataattgttgcattcatatatatgtagatatatatagtagttaaatagaccaaatttattaagatgctttcatgttttgaattctcttgtctctttttttctatatgtatttatattttatttattaagaaaaatgtagcggcataattacttaaaatttaagatttgtgactataaacttaatattaatttttgcggcataaatatttaatatttgtaaaactataattttttttttaattttttcagtacagactctgtgaatatatcgctgaaaataaatattggctttatgccacttacaaacttaaaactttaggtacttatagggaaacttacaaaagtactggaatttgggttaactttta

SEQ ID NO: 21844 - DNA, 3888 bp, Cannabis sativa
taataaaattaataaaataaaaaataattcttactaaaataggtactaaatattttttatttaaatttcatagaaaactaaacttgtaactttgatttgatcttaaatcattaaaaaaaaactattttacaaaattttataaattttttaatcatttttttacgatatatcttatacattaaaattgaagttaaaataatgaaataatatttatttattaaaaaattattatgaatattttgttaaataatagttatattttattaaaattcacaaaagaaaaatgttaaaccaaggttaagtcttatagtcacattttatagtttcggccggaagaggttttaaaataattaattccatcgttacatgaagattatttcatccttttgtgaatatggaagagatcttattttatttatattttttgtgtaagggaaggagatcttattttatttttattttttgtgtaataagggaaggagatcttattatcactgatactattatctctaaaataaattgagatgatgagcaattgtgttgtataaaacaagtaaatgttgaatgcaacatatctaaaattagaattaaaatatgcggctaattaatattcattataaaattgatatttttttttaattattttattcaatgacagataatcatgttaatctggaagttaagaaaattgaaattgtttaagaaatcttttctaaatgctaatgcaatatataatatattgtgtacacgtaaagaaaaagggaaaaaaaaaggtgaacacagaaaatctaaaattaattaattaggaccttaattgtaagagtaatactaatagattatcttaagaaaatctgaattacatattgaaatatcttttttttttttcctaaaaataataactataataaataagaaatctcgaatattgaaataaactttagtaacaatatatatgaataacagtaattattcagtgcacaatctatataaatctgcatatacgattttattaatacacatatatatagaattaaacagaagaagaaaaattaataacttctatatatacatatcgattagttaaaaacagaagaagaaatcgaacccgaaaacatactctgaataggttctcaaaatattttgtagtcaattaggcctaatataattaagataactatgcatataaatcaatcttggtttttaatcagttatgaaataattaattaattagtcaataaaatgataatgtctgatcaattttttacgtgaagcgaacaattaaactatatttcaaaacaaattaacaaattattggtttgtctagctatgtagctctaggttcacccatatatgtagagggatttattgatttttattatatataagaaactacccatatatatatatataagatgacagaataaatattagtgaacaggatatctttctcatattaataattcctgattatatatatatatataataaaaacaaaaagaaaaggctctagatttgtgtgtaatataaccagtgattagagactctggtctctaaattaaggctaaatattcacatatgatgatgaattttcaaagaagatcaaatggggcaaatagtcatcatcatgtgattataaacattcttattattatcgtatttatgagcaatactactcatcagtcacgtgataagctcgtgaccgatacaacaatagatcaatcagcaaacaacgactactccaatcttgctcttcagcccgtgacgttgaatatccttgataaatatgtaacatgatttttcccattattattattattattattacatacatataacatatttgtgtaaatttggacaattatatatatatatgtattttattaatgtgcagattgtgttggacaacggcatagtgcaaataacgctgtcaaaaccggaaggatcaatcaccggaataaaatataacggcgtcgataacttgcttgatgtagtcaacgatgaaatcaacagagggtacataagaattcttataatatatgcattttcttatttgaaaaataaattaagagcatgtttatgtatggctgacaaaatttagtttggatcaatagtaatatttgtagaatatttttaatactagtcccgtatattaataatttaatttatattttattgatgatgaaagattaattacctttttcttttctacacatctttatatataataggtactgggaccttgtttggattgggaatggaagtacagggaaaaagggctctcttgataggtatatatattgatgatcaccagttttttcttttattttttcctttttacaaataaatagatcgatataaatatatatttccaattcaaagaaaagaaaatatcattgattaaaatactcagcaaaagctagctaattgaaaccagtttttctaaattgaataaaaaaaaatgttaccagatcattgaaaatagatttgattaaaaaattataaatatggaaactttagtacgtacgttaaatgtgattaatcccaacttggtgctagacatacgattatatatatatacatatatactactaatagaacttctttatgggttgtaattatatatatgcaggctccaagcaacagattataagataatactccaaaatgaggagcaaatagagatttcattcaccagaacatggaatttctcacaagagggcaaggccgtcccattaaactttgacaaaaggttttagttatatattcatatttatttttattattattattacaattttgatttattacatttaattattatatatagatacataatacttcggggttcgtctggcttctatacatatgggacatacgaacacttgaatggatggcctgatttccaactcaccaacactcgagtagctcttaagctaaacagagacaagtaataattaatattttcaattatatatttttgtcagttcctgtggcctgatcgtaattaatatttaataaggatttgtacatatatatatatatattatatataggttcaagtatatggctatagatgatgataggcaaagatatatgccgattcaattagataggtcaccagaaagaggccaagccttggcttaccctgaggccgtcaaacttgtcaaccctgtcgagccacaattcaaaggagaagtacgtatatatatatatataatgagtttttcattaatgatcaacactgttattaatatgtattattgtgataaaatgatgaattaatgaattagatgttttgacaggtggacgacaagtatcaatattctatggaaaacaaagacaatcgggtacatgggtggatatccacagacccacctatgggtttttggcaaattactcccactgatgagttccgctccgctgggcccctcaaacagtgtctcgcttctcatgtcggccccaccacactcgccgtaagtatctaataattattatatttttgccatcatttaattactttttataaaacagtaaacttaaataatttacaatgttagaaaacaaaatttgaaaattcgaatatgtgaatcttgttttttatactaaattttaatgtttactatatcgtctaaaaataaagatgtccctatatgtagtagattttttctataaaataatatatttatggcatgcatgtgaatcagatttttcacagtacccattactcaggagcggatttgataatggaatttaataaaaatgagtcatggaagaagatgtacggtcccgttttcattcatcttaataccttatcaaaacaaggtgacccacttcatcaactctggcaggacgctaaaaaacaggtactaataaattccattttttttt

SEQ ID NO: 21845 - DNA, 1363 bp, Cannabis sativa
aaatcgaattatagtcttttgattttgagttaggatttacaaattcattaacataaaagtgcaaaatctcaaaaccaccgaaaaaattcttccaaataaattgaaaaatcaccatttcattacattttattaggaaataagcaactaacattctttttaaagataaacaactaatattttgaaatggtgtttttaaacaactagcattttaaaaacaattaatttacatttcacattttgataagtaactaattagagtttattatctcctaatttctttatcaaataatttttttaacagaatttaaccccaaaaaaaaaaaaactggttcataaacaacaaaatatttttgtttttgaaaaaaaaaaatggatttttgtagaacaagctgatgattcttccacgtcatgtgagatagctacagcatgactatctctattaattacatttaaagttaattaggaaagtggacacaatccacgtgtgacttgccatactaatccgtttcatcaaatcctgaccgtccgttactagaatagcatttcaattaattttcttttttttttctaagataaaatgcatttcaacttctgtacggtcactgtctgtaacccataaacaaataactttcttcgactataacgatcgtccgatcaaaattcacaccacacaaaataataaattgacgaaaacagattactgatcaagtgaaaattctcacccaattcagaaatcataaaccattagagtgtgagtttgaactgttttagtgacgatcagatagatataaattaatctctgattaaaaatctaacaaaaataaaaaggagaaaagaaagaaagggtcttacatggaggtgcctagtgagggatgatgatgatggtgatgaagatgaaagagcttgaaatgctgagacggccacacgcttcatcgccatttttactatgtaatatttgaaatttaggagtaagaaaggaagaaagaaagaaggggttggtttgggttagattatcatagaatcatctctatttataacccatttctcattcgatgtcttaaaaatgactttctcttactcttttctaattgggaaatgtccacatcatcaccacgtgtcttaattatcaaaaattactcaaatttatttgtaagataattgttacgaggtgaaatgctaaagggtagtgttgcttagcacatttttatgtggcaatatcgttattggtccaattaaatattaggtctcacataatttaatataatagtttttagggagtatcgctagtcaatcgcaacgtgacatgtcgagaaggtgctagacaccactggtgcctagagatgcacatttcctccacggggat

SEQ ID NO: 21846 - DNA, 3946 bp, Cannabis sativa
tatatataattgtgttatttgtaatgtaggatcacttaaaatgtaacaaaatatttgaataaccaacacaattaatgttaacgtagagcattgactcaataatctcacaatctctaatctctcatcaaagaagcaagattcttttctaacacaagtttttccaatctttgaaatgctaacatttgacttacaaactcctttagcaaaataagtggctcgtcttattcttgaaataaatatatttcactcttcaataaaattttgatagaattaacatttaaccagcatattcatattcaacatatatcccaacaaattatatagatacacctaaattaatgatgtggtattatataggatcaaataggtaaatgatgacttcaaactcaaaattgtagccacatgaatgttttcaatgtggttacaaaaattcaaaatatatatatatatatatatttcttttaaatctttttttttaaaaaaagaataagaataagaagaataggaagaagtgatagtgataaactcaactcttgtcaatctgtgtattgtatgaatgttgcaacatcattaagaccagcctctttataacattcagcaatacgctcaacacattcatcccaagtcccatccacagaagctaaatccaacaagaaagcagcttcatccaatacaacctgggtgaaaacggtcaaaaacaaatattacccttatcgtatgagcgttttcaattttcggtattttagagaaactataacatatatctcttttttcggttatatggtgatgtatattatagttatatcagacacccactaattttggaaaaattctaaataatttacggtattaataacaaatttcaaaacaattagtggcactcagtgttttaacaagcatacaactagctattttaaaatctgtgtttgataacgtaaactattcagaatttttcgaaaattaacatgatgtctattattacctatatatgtccatatactaattttttttttatatatatacacaaagtatgtaccaaaattttatgcacagttatgtgaccgatatttttaatataggtgagtcttatcttaaataaatgtgacggaccaaaacaacttaacatgttccagtgtaaaacatggtatgtattttgtgtgcacatatcagtactgttattcattttgcactacataatactaacctgagcaggtgcttttcccttcttaagatcttcttgctttccttcttcactaactttctctttaaaatactcaatttgctcgtcgtcccattgagctatattagcaacttcctgaatagcacaacaacaagaacaacaacaacaacgcatatggtagcgagggaagtattcaaatgagaaaggagaaaccgaaaatgtctacaagaacataacttttatcggttcttacctcatacttgcaacctagtgtccaccatggtgattttaaagctccccgcgctgcatctttagcttcactagtccgaccaactctatacagtgtaaagaaagagatacttagaaaatgagctatggactcgggttgagaagttgaaacacagaccgaaactagaaaggtaaaacggcaaaaaagtatagaagtttcctacgaacttcagcaaaacctctgcgttgaacacaaagggccgtgcaaatcctggaaaatgctcctttttagtgtagaattctccagttaccattgctgaaacatggtctccttgctcgaaatgtcgctttactttacgctctaaaacatcagggaacaaaccaacctgaaaaaatgatctatttattatgacattgtattaagttttttcattggattgaattgaagtaacaaattaagaaaagaaaaacatatctatgcatacttgttttagaaggtagacatccaggtttgaaatctgagacttggcaaagtcaccctttgcgtaaagtttttcccccaaatcacccgaagcatgaaacagctcgtcgctattctcactagagttttcggtatctgcttcaactagaattctatgaatcaattggtctacctgtataaacagatgagaacataactatatatatacgtttgctttgaaatcaaattaaaacttttgcatattttagagcttacattcttggccaagagccaaactccatgctttctgacctccactactggcatctccatgctatagagataattaaggaaagatccattaagtgaagacaagtaaccaaccaagaatagaaaatgaaggcttcgtttgatatactgtattacatcgtattatactgaattgtattatatatcatatttttttagtactatgtttgatattgatttgtacgtgcagatgaatatacaatattttggtataaatcaaaacttaacatatacaacacaatttaatacaatacaatacaatctaatacaacacaccaaatgaattcgaaaggttttcttctagtgcttacccgggtggagctgtaggccatctcagaagagcagttatagcacctagcaatatggaaagagtgtaaaattctcaactaaaatcaagaaaagaaacacttcctatgaatgaatagttattctaaatgagtgaagaaaaaagagaaaaggttatttataccagagttgtttctagcaagtggaatgacaatggggattaacccttgtttagctcctggagacataatagtatcacctaatatacacattggaaatagcaacaacatacatgtgatcagtagctaataattaagcattgactcctcatatccattatgtaagatgggaaggcattggattaagaaggatatttgcggcaaaagtatttaaagttttgagtttgtaactgtataaactcaataattttttttagcagtataaatacttaatattaataactttaatttttgttcagcttcatcaatactaaattcttaaacaagatacatgtaagactcaaattttaaatcatcgagtctgaacaagaacgtgtagtataattacttccatagttataaatttaagatactaacggagtcctaacggagtccgcattgatagaattagacgaaaattacagttcgattaaatttgatacttatgccactaaaaaaagtcactggtctagccacttacaaagtcaaaattttatttactaatagcctaaatatgagaggacttattcactaggactaaagttatttgatggaatagtaagtgaattaatcaaattgttggattaaattttttcaacattctctcaaatcacataacaagcaaatcaatcatgctctacacatatgaaagtagcaagctacttgaatgaaagttcttaaaccaaaataaagctacaatctttaaatccataaatgaataatttgagtgtttaagcaataacccacctcttattttgagcattttcataagttgagacaaattctgaggaggcttacttgtagctacatcctttatgaaacttacatgatctgaaatttgtaccaaaacttgttaaatcccaaaacaaatatatgcccacatgctcattcaaactcaccaaaatatcccacttttccattttcattaatacacaaagaatatttatgaacacacccaactccattagtgtaaaaaaaaaaaaaacatatttttgtaccagttgatgaagaagaagcagagcaacgaagtctgttgcttccatggctaaatagtagtttgggtagagcggtggcgcgtggggctccgtacaccactcctccgccgatcttcattgttttgttgagctcagtttagtggtttgtttgtagtctggttcataatattttcatatctccattctcgtcttctacctcaaatttgcaccaccaaaaatctgaatctcagccacattaatttgggctcaatattccaagcccaaaatatta

SEQ ID NO: 21847 - DNA, 5405 bp, Cannabis sativa
cagatatagaattaatttgagcttcaagcgtttgttgaaaaacaaagattataaggaagcttagctaaatcaccaagttaaaaacccaaatgaaggttatttcccaaaagttgtaaggatattgaaactagtcttgatattaagaactaacgtctattttaatcttgtcctaagcttgaaacaacaaacattttatttccatattaaaagcttgagtggtataattgttctgcttaagcttgtaactacaaacattttgtttcaatattaaaagcttgagtggcataattgttctgcttttttccatagaaatttgcatgagaatgtgtttatgattctacctcaagggtataggcttaagtggaagttgctctctaatgctgtatgcaagctaaaaaaaatctctatatagccttaagcaaatctctagataatggtttgaaaaattctctacagctttgattgaagaaggatttcaacattcagcttctgatcattctctagtcatcaaacagaatggatcaagcatcataatcctccttgtttatgtggatgatgttattgtaacaagcaataacatgtcaacattggagagtttaaaagtcaatctgaataacagatttaaaccgaaggaccttggtgatctgatatactcccttggctagaacaagtagggcatttttctatctcagagacacctccaattattagaagacctgggacaattgggatgtaaatctgctagcagtccaatggaagtaaagctaaaactaagtcaagaaggagaacgactagctgatccaaacagaactgataagctgcaatatttaactataaacagaactgatttagcctatacaattaactataaccagactcgatttagcctatacagttaacaaacttagtcagtttttggttactcccaaagctactaatatgaatgctgcacaaaggcactgctggacagtactctgcagattctgaaatcagacttgaggcatatacatgctgagggggcagcatgtgtagacacaagaaggtccaaaacagggttttctgttttccttgggagatctttagtgtcctggaaaagtaagaaacaacacacagtccaaggtccttagctgaagctgaatgtagggctatgtcaaacactacttgtgaattggtatggctgctatcattactaaacgaactgaatattgagcacaaaggccctcctgtcttgcattgtgacaacaaagcagcccaacaaatcgctgctaatcctgtctttcacgagagaacgaagcacatagaaatagattgtcacttagtaaggcaggaagttcaagagagaatcataaagacaacttacactttgagcaaagaactgacatttacattccagggagtataaagattagttagtaaggtgtagtgttaattagaagttagttggaagttggttagtttgtgtttgctcttgaactgtgtattaatactgattgtattcattcattttcattaatgaaatttagaatatatatttcattctatctctctctctctgtcctaaaactaaaaatatatatatttataggaaatatggatatgaatattgcatatgctctagcttataggaaaaccagccattactgaacagggatatccctctctcactcagtcactctcattgaaaatattaggtacggcagcattgtcattgatttcttctttatttttcataaatcttatactctgtgttatagtgtttcttgagtttgtcttgttgaaactgttattactaatagtatactatccatataacatattttatggtcttttattaacagttctttggacaaataaagggatacatagtaatgtataaatttaatgtcaagtgttgtgaaatgtatgttttttctggtttgtgctatattgaaattatataatatgttttgtgatattgtctatgccatgtgtttacatgtgctattgtttatgttatttatttttctgaaaccatatgaattatagccagtaaacctaaggtcaaggaagtacgaaatatgaagaccaagacaactattgcccctattgaagatcattaaagattggagcttttcaatttattttaatgtctagatttatatttgtgattattgatgactgtgaaaacttattttgtatggcccttataataagggtggttaattactagtcatacaagacattaatttttctttgttcttaaaattgatctaacttatttttctaatattatgatatgatatgaatggcttagaattttctaggccaaagtgattgggttagctcattaaaataccctcaacccgtccaacccaacccaacccatctcaccccgtgtgcagtggttcagatttgtagacaagcaatgacttataggtacaaaacttaatattgacgttggacttttgtgtgttaggacagagatgaggaaaataccctgtgttagcatatttcatgctttgtttgctttagttcccatactagattgagtttggatgcatggttctcaatgcatataaatttattagtatctttatccacaattgggtcaattttgtaataagtattttgcaattgtatgaattgttttatatataccgctaaggtaagcttactttgcctctctaagtgggaaatatatgtgagttgatattaacactatctttttatttaaattgtagaactaagaaagtagatcccttcacctcaatatatttctacaaattcaatttaaggcgcatcagaataccaaaaaataggtaaaattgtatttattgtaaaattgattaaatcttaaatacatctaaaagttgttgagaatttagtttattgtatttgagtttcatattcattttttttagtctcagtgcaattttcttgttctagtttcagttagttacaattactctaaggttgtgtgatggaatcgatcacagaatttattgtccagaactgttatatatatattttttttgtaatctcaggttccttacggtggttcatcagttaaacataaaaattttataatcattttaatcactgtttacataagaattatttgtgcttacatcaatcagaacaaaatagagctatatatatagagctctgagtacaacaatcataaatctacttttttggagcgcagtgcgttgcactgcccagtatatatatgtatatacatctttgctatcttttattatcagtaagtaatgtcacgtattgatattttttctttgatttaaaaaggctaattcttaaagatatgtttttagttattaatttacttgaaatgcagctttacatgctaacatacctacctaggtagccaactgagtgatgctcaattgctcaaatttatgaaagaaaaatctcaaatcccatttgtgtttgtgcaaagggtattgatttttactgtttgtaatttgtatctttttcgctacacaggaaatgagtcgatttcaaggtccttcgtctttgaaacgtaaacagcaagagtctagttcaccattagattctctgtcagaacaagagcgaaccgtttataatgtaatcaaaagcaaacaagatatgggaatatggtcaagagatttgaagagagagactaatcttcttgacaatatagtcaacaaatgtatgaaaatccttttagccaaaaagctaatcaaagaagttgtcaccaaaaacaaggggaaaaaacacttcatggcagctgagtttgagccctctaaagaaatcactggtgggaattggtatgtcgatgggagtttggatacagagttcattaacttgttgaaagatcagtgttttaagtggatttacaagatgagagttgctacatcggagggactttcagatgcgattcgaaggagtgggatctttaaagttgagttcaccagccaacagattgaggagattgttagagcattggttttggataacaagattgaggaggtgaatagtaatggaatgggagagtttgattatattccagttgggaaagtttgctacaaatgtataagcaatgaaggtaaaggagagcccaagttaggagccatggcttctatcccatgtggagtttgtaccaggatcagtgagtgtgctcctgatggtgtcatctctcccaaaacctgcatttactatgaaaaatggttggacttttgagttgattatatataaaatctcagggatagaaaccttagccaaaggtatacattcaaacctttttatatataataagagtgatgttcacctccggcttaatagtcatttataatctagtttttgagttgcttcataaggagtgaattgtaattttacaaagtaatgttcacctctcacttaatagtcatttataactttatttttgagctacttatgttcataagctttatttttacaattaaaatttattgtcagttgtcactacaaaaagttgatacgcataatcaaacttaaacatgtcaagatattctctaattttctctaaattgtaatttattttttttttttttttctttttatgacctctcagttttttctttttttatttttcatttattcctttattaatttataaaaaataattttacattttatttgttagcagaaaaaatttatacaaaatcatcaattttagtccacgtccaattcgtttttatgctcatttataccatattttaaatgggttttcttagtttttttagaatgtctttaattacttaaggcaactctatcataaattagttatttatttattttttttctttttttctttttcttttccatccacaagaattccttttattgttcaagtgcaagtttgaatgattttgtagaataaagaaatactaattgtactgtactgaaattcaaatgtcaaactgcataccatgttaaatgtattgagatagttggctaagcggaatatataataggttcaattgcacacaaataaatagtcttgacaaaagaaaataagtgtagatatcattcatgctaggtgattttctattacttttgagatttcaatttaaattattgttcgacgtatacgatttttattttaaatttgtttaattttttgtctttcaaggacaaattagtctattgtatgtagtgattattaaattgtaaaatgagaatgagttgatttaacaagttggatgaaataattgtacataagagacaatattgtcctatgattttttttttttttaacattatatatcaattgttttttttaataaacataagggaatcataatttcgagaatcatgtgtcagctataagaattttatatctcagctttctttaattggaacatcaatagtgttgggataggtttcgaactcttcacccaaataaa

SEQ ID NO: 21848 - DNA, 1907 bp, Cannabis sativa
taaactatctttttgtctttttgttttgtgtacatgaaaacgtttttccaatcattaaaacatacactcataaagttgtaatttttaaacaattaattaataagttacggtatttgaaaagtttaaggggtttctataaatattatttgtgtaacatttggtagagtatattttctataaatatttcctaatactatcatttctctcaatcaaaatagcatatgaaaatagattttctatctattccaacaaacaacaaagttgaaagtaagacacatttgctcttggagtttctaaagagttggcctcctataaaactttaaaaaggtataaaatgtcttacaatttttttattttttattttggttgcaattagatccaaagactattgtaagctttcttcttctccttcttcttattcttattctttttcttcttttacattcttatatgattcctcaatttttttggaaactattaataattttaaaattccaaatagctcatgatttaaatttcctcgacactaaaatatgctaatttcatataattttacataatttttgatcgatgtacaaagttttcctctaattagataaaatttagccttcgagtgcaaaatgaaagtgagttattcacttcaaaactaacccatagagtatgaacaaaaatcggccatagtaattcgacaatgtcaatgaaattagaagggtcgtacgtcaatcaaaaaaaattaagtatacataatttattttgccattctttaagaattttatataaatattcatttatatatattaattttatttcatattttaattaattatatgttatttttcttttcactcaaggagaaatattccaatccaacaattaaaatatcttctttgtcttcaagagtatctcttattaatattacttaattattatgtattttaatttaatttatatatattatgtaactcactacaatcgaaatatacaaattataataatattttataagaatataaaaattattaatcattatgcactaaccacatatagattactaaaacctaatgtataaaaaaaattgtgttatcaatgttcaaaaatagttttgccaataatgaaaattttaaatttatattttttattatatattttttttcaaagcaagagaaatgaattggtaattcacacatcacctataaaaaatgaataaaaaaattaaaaagaaagataaaacagactagaagaacattattacacatcaactttttaaagttttgcagtatattattttgattattttttattttaatcaacttattattatttatatgaaaaaaaaaaagtaattacgacgtagagtctctcacttggccgcttggtctactcattatttattgaaaactttcagttaagaaaatgaaataattaacataaaaattatttattagtaattaataattaaaataaaatataaattaaataaataaattgaatggagaaaagaaggatacaacaatgttaataaatagttttaatataaaagagattgtaatactttttttttttttttgagggagagattgttgaatactacatctatataatataaaagtttattaatgtatgtaacttcaattatatttctatatattattttactacataacttcaattatgtttctatattattttacgaccaatacatatatatttgctcttttcgttaacaagctttgtaaatttttagttttaaggtaatgaggtgtatattttacaggttattagttatttattaatcaaaattggatatttagtagtttttcccatcacacatcttattagttgttttgtttaatattttgagatattttaattgtttcttttatattttattagctactttaatagtt

SEQ ID NO: 21849 - DNA, 3282 bp, Cannabis sativa
  modified_base (1649)..(1657): a, c, t, g, unknown or other
tgatggttaaactcctaatgtagtaattttattggtcacagttaactatttatataaacactttgatggcataactataggtagtagattttgttgtagtttagtggtctatctagaatttttttttaaggaaaaagtctcatccaccacaccatgattgaactccaaatatctttgtgatagttgacctagtgttgtgttgggctaaactgttattgtataaccaattagttctaaactgatcattagtgtctgctttaaggatatcatacttcttaaacttctccctcagatgacataatttgcgccaataccaaccagtgtcaggtttaagatcataagttcaaatatctttatttttcttttctacaatttttagacagattttatcttcattttttaatatttttttatttaacacaattattcgaacaataatttttaatttatttttgaattaatttaaaaataatttgcagttagattattaaaatttcttaaacactaatatattgcatatttaatatttacttttaatttgcaacaacattatttagattaattgaatattcgtaaaacaataactaataatgtttttattttcaagtatacttaccaatttttttttgaaatatccctattttatggtatctcataaattagttgtggtttctattataaattattttaaattttttaaaaaattgtaatatgtcttaaataattatattatatataactataaaaaaattaaaataataaattttcttaaataccaaaaaagattaaaagtgcattagcggcccttattattagatagtattaaattgagcttttaacatattaactcataaatcaccactcaattttcttttttattataattacttgatttatatcattttaaagtaacatgtaaaatatttataaaataaattatgatattgttttcaatgggtaggcaccattaaaatgaaattaaggcacttgttttcaatgggtaggcaccattaaaatgaaattaaggcaccaaatatgcaccacttgatattggccctctacaatttaattctagctctgcacccatgctgaatgtagtgatgataataaatatttattgcactagttgacatgttaaatgttaagatgtaccttagcattaatatttggttgctacaaatccctatgggaaataataagtgggtaatatacctcctcctaactctattctcatttcctatttatgccctcttcggatttttcttgctgtgtcccacttaattactaatgagttcagttttcgagaatttctattgggtataaaaacttgttaggtaattattaaaattaaaattaataataataaaaaaatatataatataatgtaattcaaaatgaaaataaaatgaaaatcttaattttaaaataaataaatattctacccattaaataatttttattacaaatctgtaaactaaaaaaaataataatcaattttataagtatagtcaataattttaatatgtaataattagaaaattatatttagaaactatatatttaaatcgaatatgtgagtagtaatattccttctattctaaattcacttcgagtatataaaagagataattttacaaatacacaaaaannnnnnnnnaattataaaaatatagtttcacagaattttaaatatttttacaaattttttaattttatttacaaaaaatagggtttttttttaatgttgtattcatgttaatttattgttatatatattattttgttttgatgttatttaaatgttatttttatattatttttatgtagttttttttattatcttttgtgttgtttttacaaataaaaatataaaaaaaattcattaaacatataaatataactttttttttaaaaaaataaggtaattatccctctataaaattgcagcaaactcacactcactgacaccccattacccatgaaaggtagtaattaatcccgggtgggtccatttaggaagggtacccatcccgagagtcaaatttccataacacaaatgacacatttggctgcgaggagatctagttgctctcatttaattctaatccataattgtagttgagaaatgttaaatgacactagtggtgcctagcacttttttatggtctaattaagtattggattccacataatttaatataatagtttttaagaagtatatcgctagccaattgcaacgtgacatatcgagaatgtgctaggcaccactaaaacttaatagcaatgctcattttaaatatatcaattctttcttctttttttcaatatatatagtggggtatatatatactagacataaaatgaatgttagtagattaattgtggaaaaacacctcggcattctcactctctcctagacagggaattaatgtgatgttattgtcaattttgtcctcacattggtcagactgtaacaaacaataatacaattaccataaacacttaccttattgctttgtttttttagtttaaatatatattgattcatccaatatattatcagagaggtacaatagaaaagccacaatagcaatagcttatcttcactgtcttatttatttaatttaaaaaaatcttacataaaaaacaacatagtacattaataatatctaataccataaaaaatcacatggtaatgttgggaccatgttactacctcaacttatttcgtttgagtagtctctattaatccattaatagggctttttttttaaaaaaataaataaatattgagtttacaaacctaaaatagtaaaatattaaatttaagtcactatttattttaaggaaaacttacacacaaataaataaatatacaacccaaataaaaaaaattacacaaataccatttacacacaccttcaactcaggatctatgcttcctgcgcaactatcgcacaaccacgcagcaacccaacgcaaccaaaacgaaaattcaactaaaaagagaaccatcattaattccggcgacctcacctaagaagacgatcagaatcaatgaaaatagaggctgtttcgaattcataaaaaaagtgtagaaaaatttacgaaactaaaattcaaccaaaaatccagtttaatttgcataaaactaatgttttgatttcaatttttaaattcataaaagacagatctcaaaaagttgaactggacttcccaagcaatccaactcaagtataatccaaaaaaaattacatcgatactatagtaaaatatttatcc

SEQ ID NO: 21850 - DNA, 2417 bp, Cannabis sativa
tcaatctcaacttggtatcagtgcacttgttttttttttctttctttgttagattcaagttcttgaagcagtctacaatggcgtcttcctctgcagctggtcttaggcctgaaggctcctccacttccgttatcaacaccactactcaaatccctgccgttcaagtcattcctcatcacatggtgcctctgaatcttcggctcgatcgaaacaactttttctactggcgctcacaagttttatcgactgttcgtgcacatcaacttgaaggttttatcaatggagatcgacctcgaccaccagcaaccattgtcgatccctccgatggcacaagatttcttccaaatcctgacttagcagattggattcgtcttgatcagttcctcctgagctggctgttcaattcgatttcagaaagtatgcttggacatgtcgcacgatgtgcatctactgcagaattatgggaagtacttcgacaacttttctcaaacacttctcgtgcaagaattcttcaactccgtggtctgcttcaatctacaaagaaaggatccacaccaattgatgagtatatcctcaaaatgaggtgtctcggagatgcgttaatggcggctggacacacaatctctgacgacaaactaatcttgtacattcttggagggctaggcggtgagtatgatcctgcaattgtcaatctcacctccaaagaaactgttacaattcaagaggttcaattcttgttacaaactcaagagatcagaattgaacaaatgaactccattgctgccctggatctgcaaaatccaactgcaaattatgctgcaacaaataaaaaaggacctccaccacaaagttctaacaccaccagaggaagtcgtaatcccaacaatcatggaagtaatcgaccagtttgtcaagtatgtggacgatctggtcatatagcactgaaatgctatcatcgtttcgacttgagctatcaaggtgaaggaagctctaacactcaagaatccactcaagatgaagcacaagccatggttgctacaacttcaactctcacggatcctcaatggtatctagacagtggtgcttcccaccatgtcactgcccatgccacttccttgactgatacagtggactacaaaggaaaaggcaagctgaccgtaggtaatggtgcctccctttttatctctgctattggaaattgctttctttcttccttttctcaccctttgatactcaaaaatgtcctatatgttcctaccattcataagaatctcattagcatttctcagttttgtgctgataataatgtcatcatagcatttgacactaacaattgttttgtcattgacaagatgaagaggcaggtccttcttcaaggaactcttagccatggcttttacaagttgtctctccccactacaaattgtccatctgcaacatttctttctgcaaattcttggttgtattcccctactgtttcttttaacaattcgaataaaatggcctataatgtttctagttcttgtaccaattcagattgtattgccacattgtggcacaatagacttggtcatccctcctctgtaattcttaccaaagttcttcaaaaaataaatacaaagttgtctaaatcttatttacatttttatgatgcttgtccatttggcaaaaaccatttaatgcacttcagtagttcttctttaaaaacaactcagctcttacaactcatacattctgatgtttggggaccctccccaaacccaaccgctgaaggttacaagtactatattctatttgttgatgattttactaagtacagttggatttatccaatgaaagttaaaacagaagcttttccaatattcctatcttttcaaactctagtagaaaagcaatttgacacatcaataaagggattacaaactgactggggtggggaatacagaaagttacaacctgtcttacagcaattaggcatcttgtttagacatccttgtccccacactcaccaacaacaaggtagagtagaaagaaaacataggcatgtgactgaaatgggattaactttgttagcccaagccaaaatgcctctaaatttctggtgggatgcatgtgtttctgcagtatatctcataaatcgattgcctaccatagtcaatcaatacaaatctcccttccaatgtctttatggtctacaacctgattataatttttttaaaacttttgggtgtgcttgcttcccatttctcagaccatacaataaccataagttccaattcaagacctctaaatgtgtctttcttggctatagtccattccataaaggatatagatgtctccactcttcgggtagaatttatattgcaagaagtgtcaatttcaatgaaaaagaatttccctataccactctattttcc

SEQ ID NO: 21851 - DNA, 1552 bp, Cannabis sativa
tagagaactattcacttggtactattcattgttttttttttttcaaatcgccaccttagttttttttgagttttgaaattctaaacttgtacttcatcaatccattgaaccctcaataagtcaatcccttatttttttttcattttgaccatagaaaatctaacttggtcacttctgcaacctctgaaatttcaaagttctcgactaaggttgtttcatatcactttgaaaaacttaatctttagtgtttagcttctagaaacaattttaaaaggcaacttatgattgctacccaacttgaggcattccatttaaccatggatgacattaattgcacaacttcacaggctggttagtttgactattacacaagatttaaaaattttgggatcactctagacacttctgatgcttttattgctcaaataacttcctaggttattgaatctgacgcatctaacatctcaacaccttactgcttaaaaaattttgtcgaggtacttgtaaattaagaattatagatgcctttctctcaaccatggttgataaaggctcattttatctacttctttccttactttgagaactgtcctccatgtacccaatctatcttttattttcttctcaattagcaagcacaaagataaagtgatatatatatttacaaatttacacccaaaagtagagcatctattttctttggttatccccaagaaatgaaagcttatatgcttatggacattgagacaaaacaaatttgtgcctctagggatgttgttttctatgaacatatatttcctttattttcctcaacatcctcctttgagatcaacgacttgttctctcacactgtccttactattgttagacttgtgcagcaaattaacatgtcaatggataccaattccatgctcacatcattaaatgcattaaaacaagtaaaatctggttcccgtatccaccagtcaagttccccatctgctgaacttgaccaagtttaatacacaccagtcgctactggtccattgcctatccgtaaacaagtcattacacctgtaactcatccatcttcaccaaagtcccaggttcagcagcctcctgctgcaacaattcctaaacaatactaaccaacatctcaaccacacaccagcaacaaactagcacaccgcaagattatctgtgccatacaacatctacttctcatcctattgaatccttcctatcatacattaaactccgtcctcaatttttgagctgctgttctagcagtctacactcatactgaacctaaaaactttgctgaagcatctttatttcaacattggctgcaagccatggacaatgagacccaagctttagaaaaaaaaaaaaaaacttgggtgatcactaaactgtccctggccacaaagctattagctgcaaatgggtgtacaaagtcaagtacaatcaaaatgggaatgttgataggttcaaagcttgccttgtagccaaatgtttcaaccaaagacaaggcatagatttctcttagacctatgcactagtggccaagttc

SEQ ID NO: 21852 - DNA, 3727 bp, Cannabis sativa
  modified_base (3069)..(3069): a, c, t, g, unknown or other
agtagtccaaagccttacaggtaagtcgcggcacaaaatcgctttacatcatattcctctgatacgtgtaaataatttttttagattttaaaaggaaataaaaagtttcaatggactgataagtgtgaagaggctttcaggccttaaaaacgcacttggggcaacccccaatactatccaagttgatgcctagagaagttttgtcaatctacctcacgatgtctgaatacgcaattagttcggtactaatctgcgaagaccaaggtagacaacatccagtatactatgtgagcaagtgtctcttggacgctgaaacctgttatccataaatggaatgactagcattttcgtgatcgcttcaagaaagttgcgaccttattttcaagcacacaacattgaagttttaataaactatcctttgcgacaagttttggcaaaaccagaggcatcagggagactactcaaatggtaaatagaactaagccagtttgacatcaggtacaagccgaggttggtaatcaaaggacaatcccttactgatttcatacttgagtttccaaatgatgaggtggccataatcttggaagagcgagtcgaccacgatgtaccaactggcgagcggtggactttgtatgttgacggggcatccaacagtgaaggatcaaagggtggactaatcctcataagttgcaacaaattcaaacacgcgacccttagatttgaatttcctgcatctaaataacaaagccaaatatgaggctttagtcgcatgattaaagctcactctcgaaatgaaagtcgagtacctccaagcagtcaatggggaatatctagccagaggaggacgtttggccaaatacctttctttcttatagttgtttgtgagttatttattacaaaaattcaaaaagataattgttagtagaatacctcatgcttacaattcccatgcagatgatttggcccgactggcctcaataagagaaaatgaattacttgacataatttatatcgatgtattcacccatccagttattaatcgagataagatgatggaggctgatacagtcaaaaaggtcacctggatgagcccaatcattgaatacttgaaaataggagttctttctggcgataagactgaagccaaaaaactgtgatatcaagccgcccgatgtgtcatttatgacgacaagctctatcgcaaaagttttagccagccattgcttaaatatatcgatggttttgaatgcaactacatactccgagaagtacatggtggaatctacgataaccatgctggtggtaattcccttgctctaaatattatgagataaggatattactcgccaacattgcaggcacatgaaactagctacaccaaaagatgcgacaagtgtcagcgaatagcaacttatgtaaataggccactgatcactagtccttggccatttgtggtttggggcatagacttaattggtgaactgccaaaaggaaaaggaggagtaaagtatgttgtagttgtcatcgattacttcacaaaattggctgaggccaaacctcttgtgacaataacagcctccaaattacgcgatttttcctatagcgctatcatctgcaggtttggcatcttttacaagttaatttctgacaatggtaagtaatttgattgtaaggagatgcatcaactgtgcaatgaattggggattcaaaaatcttttcagcggtcgcctatcctcaaagtaatggacaacaaaagcagttaacaagatcatcaagcataccataagaggtaagcttgaagaaaggaagggtacacggaaagaagaacttcgacaggttctatggtcatacaatacaactcctcgctaaatgactggtgaaaccctcttctcgctttcttatggatgcaaacccatggtacacgtcgaggttggagcaggatcattgaggagagatgtcttcaacgtcaacaaaaatatagaaaattagttgttacaactcgatcttttggaagaaaaacgcgatcaggctcatttgaaaaatgcagcctatcagcagcgaacaactcgctatttcaactccaagggtcaaagaacgaagcctgtgagtaggagatttggtgctgcccaaggttatgcctaatatgtgtaactcagcacatggagttgttggcaatatttgggaaggaccagacctaattgcttaaaaatcagtaatgcgatttaccgattatctgaaggcgatggttcagcgatcaaaagagcttggaatggagaaagcttaaaatattaaaatcaatagtactcgcatgtatttatactaagtcaatttatttcaataaatgtactaagtataggcagtgtaaccgaatattgtactgttgattatattaatgaaatattcgaagttttaagaatttttaatcttttttgcacgtttttatattctaagatattacaccaagctgtgatgacattgataaagaatattgcgaagataaaaagcaaaaacaataattaaaagtgcagcttaaaaaatgcgagtacccgtgtaccgctaaataagtatgaaaaagtaaaatatcttcgaagggatatattgtttgataacaaaagaattataatttattcaaagtacaaagcgcgagtacccatttactgctaacaaaagagatagaagttcaacaatagacttagaaaaattaagaagctagggtgctaggatcgtctccgaccttgcttgcagcaccatctgcgacttcctctgcattcgcgttttcaacatcctcatgttgagcaagtgttaccaacaacgcctgtgccagtggtgggtaactaggggtttattgtcgtatagagattctatgtttgaacggtttgtgaagctggaacctccaacttttctgggaggtactgacataattaaagctgagtagtggatgagtacaatcacctgtatcctggataatatgggagtgactggagcagagagagtgaattgtgcagctttcatgttacgagatcatgcccgcgtctggtgggatattgtgggacaaactcgtgacgtcantgtaatgatttgggatgagtttaagaatttgtttgaagaaattttttataatattattgtgaggacttcacatatggaagattttgtgaagctaactcagtggaaaatgtctgtggccgagtacactctggagtttgatcggctgtccaagtttgctggtgatctagtgcccaacgatttcaccaagaaacagaaatatgtgagaggactgaatgccacaatcagtcgggacttgaaaattaccactgcacatgacactttgtacaagaaagtggtagagctagctttaattgctgaataggctgagcagtatgtaacaaaagagcagactacaaaggatgccgccgtggcatcgaatcctcctgctagtggtaatgtcagtaagaggactgacggtggtaaccctgatcacaaatagaaggttggtgcttcccgaacatcagggggtaatagaaagtttcgaggaaacagaggtggcggtcagggccgtagatcttcattccgatcttatcctgagtatccaaaatgcaataaacacaatcaaggtgaatgttagaccaagacttgtttccagtgtggcatggtgggccacttcatcagagattgtcctcaagccaagaaggaggagcctaagaagagtactactcagaacccagga

SEQ ID NO: 21853 - DNA, 1729 bp, Cannabis sativa
atatatttatgtatatatagctttcagtacttgactacatgggtattggggttggcaagtttacagggaccccttagttggtgttgtctctaagctggtttcaaataacctaaattggctaaagtctttgcccaactttttcccacttaataagtgtaattacattatatgcatgttcttcttcatcactacatctaaataatagtgatataattataattccctcagatctcaactactttgtggtggtgattactcattcattgattaattatcaaataaaccctgaaaatatgcagtctaaaattaattccacaatataataatagagtcctatgtgtattcaaccaaacactgtactacatatatactcatatgtaatatgcaatatatataggtataccaaatcaatacaagagtaataacattcattttaatggtagaaattggaaaaattaatctaaccaaaaaaatgtagcagaaatagtatatcagtagtgcttaacattcttctcaattagtccaattaaatagataattacttttaataaatatcgttaaccaatacatatcatttttaaataatgttaaacactactactgatataactcataacaattataatacatatatatatatgtatacatattttaacatgcatgtatgcgtgtatatgaatacagatatataaaaatgggctatatatagctaggaaaataatgaagtatagaagatgatgatgaagatgtcaattctaaatatattatataaatatattttgttgaattagtattaaatgatgaacattatgaaggggaccacatagtatttattagccggttccattagtgagaattgataactcatctctatgcttttgtgtatcattatcgccggtaatgggtgataaatgaacatgggtccccaacttaattcatacactaaattattaattacaaccctactacttataattataattaactttatacacatactcaaaaacccctcatcgtatacatataaaaaatatatatacgtatcttatctctccatatatattattccttttttcttttagtcacacacatatatatacatcaagttcttgttctctgcaagtcattaattcaactcagtgagttacggtaaatttggttcatcttcatttactttcagtcatgagactcacttttttttggtaaaacattaatgacccaaatatctaagatatgtgattaattttttttttctttttcaagttttcaatcaaatcagctttacacgatagtcaaattaaatggggatcgattaataaaaaaataaataacaaaaaaaaaattataaaaataaagtcatataaaatttaaatatttttacggtttttaaaattttatttatataaaatattatacttgtcattgttttttttctaaactttatattgttttgatattatttttttttttattattttcacgtggtaaaaatatataaaaaaaatgtactaacaataacactttgtgtaaatttccactactacaaatatagtttttctcgatgtttttaaatagttgttgaaagtatttccgtcagtttatataaccgtcgcctatacgaccgtcgtaaaacgacgatggttaaaaattgtcgctaatgtggacttcttgacggtttaaaaccgtcgcctatagtatagggtatggtttaaaatcgttgcctataccc

SEQ ID NO: 21854 - DNA, 4953 bp, Cannabis sativa
  modified_base (935)..(935): a, c, t, g, unknown or other
gggtttgcacatgtgacgatgtcagtcatgtatttcaaaacataaaaactacattcttgatttttaggttgtcttggacaatttgctagtgaaatttctggccacaccctaagaaacacatttgattcccctataatttcgtatgctctgtcttaaaaattatattaacatttcaattcattaacatatatatgtataacttaattaattaaatgatttgttacataaagagtaattaaattattaccttttcaacattgcattaatttgtgggggaactatgtggccacatatagggtttaaataggtaattttccctggcgcaacgacctctagcatccaatgcgcactaaaaagttatattgggatgcatgtaggatagtgtaaaaatatttcaagttataatatagaaaacaattttaaataatatcttaagttgtctttatctgatatttcagggaatgaagaatatttggtggttattcatcaatgataaccaatgagccaatccttgtgatgcattctcaaaagactctgccttctctaaatcattgttatcattcactgcgagaagttttggatcataaaacttgaaaattcatctcaaattatttaagctctcccagatttgtctacattgaattgttaaatattagtattttataataatttcagtataatttgatatatatatatatatggttaattagattaaagaagactatacatcattctaaaaagcattctctagttgttgataaagtcacacaacgccacttgatataaatcttctctagatatcgtgatctggggatgaggtgctatgaatccacatggtacccgaattggaattatctcatttttatccttgactctcaaaaattcttcaaccatttatttaagtgccttggggattagtgtcatgatctctggtntgaataatagatctgcttgatcacaactgccttttcaacaagacatgagacattttcccttcgacacatcacgtcttgatggtaattgagctagtggactatatacaaaataccatataatatatcaaatttgatcaaatttttgacaacataactattgtaattgaacgtctctaaaaattttaaacatacctaataacaaacaaaacagatataacaattgattatccatccatctgactgcagtacatgtattcgcagaacctacttcactatggttaaatatttaagatattcaaactccactaattattgataattaattaatgacaaaagttacctggggttttaatattaggtatttagggcaaggaaggaacatgtttgctacttccttaacgtatctgcacccctcaattgagattggaatttcaacatcctcttgcagcatttttgaaatgagaacccgacatgtgaatcatcgtaaggcttagtgtgaactgtgattggatcctcatgttagtacagataagcttgggccactatgttgctgatattttctgagcagaaaaatattgtctgattaactgtccttcattcaacaaaattgtacatgacatgtggctcatttagggaaacaaactcctcagtataattttacggaccctcatcctcctgagcatattgttcacttgaaaggcactaatggttcaaacatcaacaaggcctcctctatttcaggtttttgggataaggggacaactcattctttggtcaagtcagttggagatgacagtggagttaaaaagatgtgtgatgtacccttaccgtattttcctacgatgatggaggagactacttcaggcaaggggaaggacaaaggcattgggacgattgatcaataccagaaggggaaagcgatgatgttagttgatacaatagataattttccaatagtgactgatacacagatagggaatcaacttaatgtggatggattgagacaaatagtgtgcaagaagggcaaagtaatcacaagcgcagtggatcttggagggaagagatgtttatggacagtaatacatacttggatacacagggtcttcttcataattcgatacagatggggatcgtccaagaagttgctatgactggttcccaaattttttttgatgtgctaataagttatgatagaagcaatagtattccaagaaagggtgaagggatgacaaaaagaagaagggttacttcgaaacagctcaagaataaagggggtcctatatcagaagttttaaacatgaatatggaggctgagaaaggttggggcagtgaaccagggggaatttcagctttgtctaattttatccttgacacttcaatggcagtggcgaacccacaggttctgggtcaccgagcgccatgaacgccttattctagaatgtctaaagacttgggtacccttggacattaaacactctcaaatcccatgtcaaggattatcatcccgggatgattttttttcgaaactcgtttgtctaatgctgccatggagtatattcaggttcagttgggatttgctggctacttttcagtggatgctaagggtaaaaatggtggtttggctctcatttggtctgatacttttgatgttcaaatcatgcaagttctatacgatttctcatattgatgctcttgtggagaatgatctagggttcctctttcaatttactagcttctacggtaaccctgatccgggaggactcacagaaagttggaaattgttgaaacggttgcaactgatgtttcatggtgcttgggttcgtggagacaattttaaagaaattacaagactttgtgaaaaaatagcaagaatgctaaactagaatatttaatgcgcaactttcagatggcgatttcagattgcttttttacgtgaaattcctaccgagggtggcaactttatatggtgtaatgggagatcatcaaacttggtttttgagaaactagatagagttatgtgcacttcaaaatggctagagaaatttcaggtaaacaaagttaccctcttaaactggtggaattctgatcatagaccgttattgctaagcgctcagcaggtaacaatggcaatacctgtaatcaaaagtggggctctcggttccattttgaacaagcctgggcagataatgaagatttccacaagattattgaagaagtttggcggagtaaggatttgagtagacccttgcacaatcttactcgtcttttacaaagctgtgggaaaaagcttcatacttggaatgtacaacaaaaacatgatctgcatactagaaccaaagagctcaaggaaaagatcgggtggttagataaatcgacttgccaagaggattggctaactctacaaaaacttgaacacgatcttaattgcctagaagaaaaaagggagatttatagcaaaggattcgtgctctttggtttaaacatgagaccgaaatacaaaatatttctatttcaaagcttcacatagatggaaaaagaatactattttgggattgtttgatgataaacttcagtggcactctaatgaggaagacatatcagccattgccatccattattttcgacaactcttttcaaaatctaatcgggggtctgatatcaagaacatcctccacgactgtgtacccaactgtgtaagtcttgaagaaaatagacgaatcctagaaccattcactagtgatgaggttaagatgactatgttccaaatacatcctttaaaatcccctaggaaagacggcctctcaggtctctttttccatgaaaattgggatttggttggcctcgaggtgactgcagcttgcttcgaagttcttaaattgaatacagattgtagcatgattaatgagacccttatttgcctcatacctaaagttaaaaagcctaccatgatgtctgaattccgacccattagtctttgtactatggtgtacaaagtggtgttgaaatgccttgctaaccggatgaagatgagtttgaatactgcaattttggctaatcaaagtgccattattggtggtcggatcatccaagacaatgctattttgggatatgaaagcctccattgtatgagaaaaggcaggtttgacaatgaaaaaaatggcattaaagcttgatatgtcaaaagtgtacgacaaggtggaatgggacttccttgaagctatgatgtcttgtctggggtatgaagatgactagattattaaggtaatgaattatgtctgacctgtgtccttttcaattcttattaatggttcggtcagaggttactttactccagaaagggggttacatcaaggagaccccctatcacatttcctttttttattatgttctgaagggttgtcttgcttgattcatgaggctaagcgggttgggagaatccatgggctgcactttgggacaatggaacaaaggttgccccatctcctatttgaggatgatagcctcgttttccttgatgccaatatggaagatggccttgctctaaaagaggtgttggagtgctatgcaaaactatcgggtcaatgtattaatcttgaaaagtccgagctttatgttggttgtaagataagtatgaccacgactgaagagttggctgaaaaccttggggttaaattggttaaacatcacactaagtacttgggtatgcctacttttgtggcgaaaaataaaaaagcaagtttttggtaagattcgagaccgggtggaagctaagcttcaaggttggaagatgtgtcttttttcttaagcggtgaaggaaattctaattaagtcggtggttcaagccttattacgtcatgagttgcttttcgatcacgaaagtgattcttcatgatattgaaagcatgattgcctgcttttggtagggagcttcttctaaaaaaatataagcttcattggggtaattggaggaagatgttgttggaaatattttaccaagatcttagatttactaacaagt

SEQ ID NO: 21855 - DNA, 1279 bp, Cannabis sativa
ttcactcaatctccctttagcattctggtgaatataatatataattatcaacttcgtgagtatctttcgtgggaaacagctattagcagtagccagttattatataatccttttcactttcaaaaattaattttaattggagtatctttatcattacaagcttgctcacacgaaaattaattaatagtttatttgaaaatacttacaattttgattcattcccatattatactaaaacaaagtcaagagcaaaaccatacaatgaatttagtaacaatatgccttggttcgtgtaatcactagaagatcatatagtggcattttcttaatcatatcagattttgatcagaataagattaattaatatatagttttagatgtacactcttaaaaaagatgtactgatttacctattatttgtttcgatatttaaaaaaaaataatttaatttgtttataatcacgtacgtcataattatttaagatattatttgaaattttaaaaaattcaaaataatttataatatataaagcagtgttcacacaatttattactttatttcacacgtttataaaataacaaattcacacgttgaataaattattttaactttattttaggcgtgttaattatttctctaaaaagcttaaaattttacaatatatcttagataactgcaacatacataactatgaaaatcttccaaataatattctaaatcaatatattattattttttccttctctcagaagtaggaagtagaattagcctattggttgccaattattggatccgtaaataaattcctaagtaagatttaatgtaagttttttttttttttttttttccatatattcattaatttgaggtaaattacaaaagagaaatatccttattaacgtccaaaaatgcatataaacttttaaaaatattacatatacaaaaatacaaaaatataattaactatatagtattaataagttgcccctctaaaattagttttttttttaaatcttattcccccaactaattatagatcctccctcgatccgttagtatataagttaattttattttacaaactgtagtttctggagacaattttatcaaggataaagtagtccttaatattatatgcattactctataattaatttatcatgagcctataaaggtgagatatatatatatatatatatgatatataaaactaaatttaattgaagttggttttatgtaaagaaaaaaaaaaaaaacagttcaattacagccttaatt

SEQ ID NO: 21856 - DNA, 5637 bp, Cannabis sativa
  modified_base (3621)..(3632): a, c, t, g, unknown or other
agtacaaactgacttgcaagatatttgagatgattctcgttgttgagtctttctagccacgctattagaaacagcacagtagtggtatctcaagttatccctgggatctattgattcttggaagatgttcaagaaagcattctatgaacaattctctccatcacggcacaaaccaatcgagcctaacgatttgatctttatcaagaaacaagaagagaaacctcaaaaagattaccttcaatgattttgtgaggccaccatgcagacaaagacactaagtgaagatgctaaggtcatggcaatgacatctagactaatagtaatgtgtcaattctagaaagacttgaagctcaaaccaatacccatcattcaattttttctagatagagttgaccgtttcatcaagctcgaagaagttgtcaagaaggttataggagttgcttattaaggagaaactagttaaactacttatcaatatttcctgagtcttgaatagacattgaccaggaaggtgatgaaagatcaataactaatgtgtcctctgatacagactcatcttctatttcccaagatgaactcgagcagggagatagtgatgatgagtccattgctatttctcaagaagatctcgagaaagaaatcaatgatgaagaatctccccttacttcccaacatgactcaagagatggggcagtaataaagattcttcctctatttcaaacaattatcaagaacaggggagcagcagtgaagatgtgtcttatgagtcttccaaatatagtgaccaagaaagcaacattgaagaatcctgatgagagagggaggaacctcacattgtcacagaagcatttgaacctgggacaaatatgttggaatttgctatgactaccactagaatctagtgtcagcaccaaggtattggaatggggagcatcttagataataataaagaaaatgttccctaaacagtttacttcatagtgagattcactttaccttttgcaagtgaatcaatcgcctcttgaactaaaaaggtatcgacgttacactatttttcgaaaagggcagtagtgcagtggggatcactttagccaagctttggtgaaaaataaaagtcttcaaccactactttttcttccaacttagctcacagtggtgatttaattaaatatctaatgaataagagcgttgactgaagcttgttggtacttcattatttttaaccaattgtaggtcatagacctaacgatgctctcaagcgctgaacaaagcttgtagaatttgtcttaaggtaactactgttatttctttagtgagttaaacactaccaacccaaaaatctccatataagtagatgagttctcacacgtgtaaaaactccctaagacccatgatcaagcaagccaaacatgatttggtatggaaagtgaacaatgaaggtatttctttgatcactcgggtgcaaataagacatagtatacgagaagtatgcacgttacatgagcattcacagaaatcatgttacacgagagccatatatgtcccatacactttggtatacgggagtcaggggctgtagtgacattcaagaatttttcacactagagttaagcactattatgacataagcgcttgaggtctcacaagaatataacagccgagtttatagatctaaaggtctagtgcaagtgttcctcctcaaatcacaaaaataaaaaaagaaaataaaagcaacatcaattacaaaaagctctttggaaacaggaggctacatcaagaagagattttctaatttatcagagaaaaccctctggaagtggtacgctatcccagttgtggtattccttcagtggctaagctcctcctaagtgtgggacgttgtacacagcatgggtttagtccaatatttattttttatttttcctcccttggatttttttctttaacaaggttctatgtgtcgaaatcttcaatctaggttcttcaaaaatctgtgactttgcccctatacaaaagatctgacggggttttccgcactactcatcgacagtgattcatcgaacttataatcataaagtgagcttatgcttgagaactaagcacacaagaaataacccactacacctcaacagtggtcgatctcactcacaacagattgcttcaacatacaaactttaaagtttttcaccccaatcactaagagatcaaagttgggggcaagagcagtcaagcttagacagtgttaacaaaatttcaaacaccatggagacaaaggtgatggttaataatcaagcatcacaaaatgttctaatcaaaacaaaccctgaaaagagtgggtcactccctaagagagccagagccatgcaaacaactcatgtatggtttcaagtgagctaacatagctccctgtggtaaaatcaaattaccactcataatcaacacttccttgtggcaaacatcactatgactacctttatagtgatagacattaattctccttggaaggtcaacacccagcaacctccgagccatctcacgtatctaccacatgttcatcaagttcttgacagtagatggtatcaacagtctccttggcaaccaaagagtagaaagcacatgttacaacacttccctaacatttgacaagaggacctcctcatctgtattaatggctaaggggatgaggaagacctccttcattgtgataacaaccaagaggaagtggaagacctccttcactgtcaagacatgcaaggggaagaagaatgcctcttttattgtgaatacaatagaagggattgtaaagaactcaaaggtgaaagaccatggaaaaattggagaccacacttataatcactctaagatgcacccatgatggggaagacatcaccctgatcttgggcatattaattcgagagttgtttgcatcctcagttgaccaaagaacgaccaacgactgcttcaacaaatctttggaaaacatcaagaagacctcctctactacaaggatgaggagatgatgaagacttactctgctatgaagctgaggagatgacaaagacctcctctgctgcaaagcagaggggatgttgaaggcctcctatgctgtaaagctaaggagttaacgaaggcctactctactatcaaactgaattagggacatgaaaataagagctacgacattctatttataaggtagcttttagggataggtttgaattaaaatagaataaaaaaagataaaaaaaaaggcttcatttaaacaaccttggccaaaccttacatgggcctagttgattttaattttgccattttattgaaacttatgtttcttttcacaaattccatcttttagttctaactctataaatttcatttctatctatttaataattataatttatcatcaaataaaattgtcatttaatttatttattaattacaccttaaaaagtcttttaattaataaacaaaccgtaaattctcttttttgtctcaaaggagccgttgcttagcgaaactaataagtaagacatagtcttattcaaaattcttatcgattaatgaaaatcaattaattgagtctacaagataatctatctcaactagtgtggggaccannnnnnnnnnnnatcaagctcccaataagtagttctagaatttactaagtaaatttcctatcttattaattcctcctaacgccactatagagtcacaattttactcctgattacatagaatgctctcttcactaagaatagatacgctataaattatccattttttcaatctaaataatcaaagattctttatagatgatttatatcgcgtagggacaaatttactattttacctttcaatgtattttatttttaaaatacttagtttcttataaatgatattttagtaaactaatataatcactaaaataagaactcttctatttatgtctattagccaagctctaagaaaatcatcgtgttatttctaaatagtgatagaagttatagattccatatctattattagcgctcccactcaactgcacaaaccatgttcacaaaatgtaagtattcggctgatccaagtggtcaacttcaacgaataaatcaaagaacatatgtaatacgttatgatataacggtaagtttatgatatcttttccactatcaatatcggtctagtctgatgcatagccaatatatccaatactagtatactttgctaatgccttggaaaggacattccacatatcattgtgtaagtaaattttatcgctaattatcacgtcagtgtaaatatagtctactgataaatcatgggactaaatagtttgaagcatataattccaattacttttcaccgtaatgacatcactgttattgtgagtaactatatattctaagtttaatgaaaattgtatgttaaatccataatcatgaaaactacatgtaatcctaaatgatttgtaatcttccattgatagtaaataagattatattgaaatgtattttatttagggcataaaatcctaacatgcctaagatgacattaaaagttaaaggaacatcaatcactaagaactatgccattactgttgttcttatcgaagcttatcctactgtgagtggtaagccaatctgttcgagtggtgccacacttttgccgaagaattcgtagactaactgagtgcaaggaaccaagtctttaagttgaagcccaattttttatatgttattttgaacaaaatatttgaggaagctccattatcaaccattatatgagccactattttatttgcaattttcacttaatgaccaaagggtcgttgtgtagatagataacgtagttggagtctgctttgctgaaagtcataatcggttatccaactcgtggctatttaggctttctttcttcaacggtcagaactgcattagtttgttcatattgtacggcttgggcatgcttttctctagctttgcttgagtctccatcaaggtgggcgcctccaatgatcacttcaagatgtttgtcccgtggtggaggcattaattggttctagttgttatctgtttgggtgaccctttatccttgatcggtcttgacatatttttctaagtgtagtttatttttcctaatgaggaattctatttcccactttaagttattaaacccatttgtgtcgtgaccatagtctgcataaaaatgacagaacttggtggtgtcctatttgctcatgcccttcttcatgggagagggttttttatatgcactatagactgggtggtcgcatagattatttttatgtcttcttgtaggattgtgaatacactgaactttgaggcattctttcgaggatgttagagttgccagtgaacctacctttcttcccctatctcttgccattgtttgacctctttccaccttggtttgaactattgtagttttgtgaattcttgtctagctagatggatgtattggctgcagtggtgtgttgttgagttttcttttgtccaattgtatccacacgccatatttcttctttaagctttataaatccatcttctcagtctgagaattctgccatggatcccacagtcagtctctttatgtctttccatagctctccttgttggg

SEQ ID NO: 21857 - DNA, 3770 bp, Cannabis sativa
  modified_base (259)..(261): a, c, t, g, unknown or other
  modified_base (480)..(484): a, c, t, g, unknown or other
ggtatctccgggaggtactggaccttatttgcacagtcacctctcatttaatgccgcatgggagaaaacgtattggaactgccataagcaatatgtctgactgcgtaacccctgttttgcagctatttcgctatgatgaataaggctattgacggctacttgatgagggatcacatcaatcaagaagggataaaagattatatccacctaacccctaagatgcctatattataggccatgtatttcctattttgcatcnnntaggaatatgtgcccctatcaaacctgcacagcaagacaagtgattcagttccaaggatcactccagaaaaacactataaataccccccaaatgcactgagatggaggtggagaattctgagttcataagaattaaagagagcaactaagaggaatatctaccaagaacattctctgtaataaatactctcataaataaaaaaaaagactcgtggactnnnnntcattaatgccccaaccacataaaaatctcatgcattaaacttcttacaactttcttacatttattattaaatttgttgtcgaaaacctcggtcaacagtgtggtttgattaaaacctttaattaaattcaaaataaagacttttatttaaaatactgtctatggggatcccttgttaataatattcttttacaatcaattataaaaccattattacaaaaataggtcttacatccaatcatagaaatggttggtcttgtttctcaaaagccaagacagcacagttgatatgtacattgctgggagatctctaactcatggatgaacacaactgctattcctcttacctgcatcatgcagcacccgtgagtcacaatgactcagcaagaaaagctactagacaaaaagtatagtaagtactagcatttacaatataaggtacatatcagtggatcattacatattcaacatgcatatacatatcagtatgtctatgggaacacattcataatacattataagaataatcatagtaacttataattaacaacttcaccttgtcactaaataaacattcatccaatccatagccatataatcgcagtgctttgtaaagcactctagtcatatattattttaatcacataatatcagtgcttcattaaacactctacttacacaatactgtaatcacctaaactcaatgtttcatgaagcacccttaccactcgttatcaacgagcaatatatgtcaatatcgttgcccgataacgcaaacgataggtaaaaaacctatccgcggtttcaacgagtaattactcataacggtaatgaccgtatcttttactcgatcataatcaagtcacaacgatgataatcgtttcataacatttcccctcgatcataatcgagtcacattgatgataattgtttcataacatttcccctttatcacaatcgagtcacagcatacacataagaatctcgttcataatcgagactatcacatttataattattaactacaaattgtataaagtacttttcttacctcagtccaatagtcaagtatgcggggccagcctgagagaaactacccctcgatgatcctgggtcctatgtcacgacaacaaaaacaacttaatctaaactttaaaataaccctaactttgcaaccagacatatctaactctccactggttcagaataacttaaatatcatcaaaatgtcctattctaagctctgggaaataccccgaacaaaaccggtctcgaaccttaaaactagattttcccctgctgctaaaactggttcaccgattttcactatgcctgtgaaactggttaactagttttccctactgcagaaaggggaaaactctggtttgtagctccaaaacccaaccaattctcttccaaacctgttcaaactctccaaaaccgtttaatattacaaatataacatgttcaaagcattcattcacattaattcatccaattacacaattcaccatgcttgagggaaccttgagttcataaactcaattctttcagattcaaacctaacagccctagaatactcaaattcaaacataaacaatcttgcatctaacatagaaatcatgctctgaattcaattcaaacatacaaccccaaaatcacaagagaccctaacccaaaatcaactttaaacttgaaaatcactacaccatataacaaggaacttacctcatagcttctaggttgaacatagatgaaaatctactagaaatcaagaagaattggtgaaaaatatcccctggttttggttggcttctaggatactcgaaggagaaagacaaagcatccatttttggtgtttttgttagtttctaagataattgttttatatcttccaattttattcaacaacttactactataaaccaaaaaattcagaccaaataaaacactaaaagacaagataaaaatcaatttaagaaaaagaccattctaccctcctttacaaacttaaaccatttaaaatctaggggcattttagtaattctagctaatccgccaaaccgacaacccaaaactctatactagtctggtataatttccatttcgatccatattttattttcgtgacatttccgaccactccgctgagttcccacggtcaccgagcccgaaaatattttatttcaaaaatggtatctacaatacccacataatccaaaatagtctccgtaattaataaattacgctttattaaccaatattaaatttttcactgattatcacacaattagccaaagtaagatcatagtcttaccccaagatcaatacaatcacatatttaataaaatatgcccgattaattatcataataaaacgaccacctcgacgagtagatcacacccacgccaaccgtctatcaaaatagtacacgatgttgccgaaaagttgtcgaaaaggggcggagctacaaaaatatcacctaagaaaatagcgagttgggaaaaataggaacagaacaaggcttacacaagttcaagttgcttagtaaattttcccctttcagaataggaacagaacaaggcttacacaagttcaagttgaaccttttgagcacatgattaatgtaagcttcttgagataagccaaaattttcgattcttgtcacgataaatctcaatctccaaaactaaatatgcctctctaagatcatttatatcaaagttggtagacagaaaaaaaaaattagtctcttttgcaatgaaaaatctctaatggcaagtaaaatgtcatctacataaagaagaagaaaaatatgacgactctcactgatcttcatataaatacactagtcaaacttattctcgatgaaaccaaatgatgtcacagtataattaaacttcaagtaccactggtgagatgcctgtttgacaccataaatggatcgtttcaatttgtaaaccaaattgtcatttccattttcctcgaagccttcaagctgagacatatagacttgctcactcaattctccattcaaaaaatcagcttaacatccatttgatgcaattcttaataaaaaaaaatgcaattaaagccaaattaattgtgaatgaatctttagtagaaacaggcgagaaagtttcattgtaatcaataccttctctttgagtaaagccttttgccactaaacgtgctttaaacatttcaatctgtccctttttattcgttttagtttttaaaatccatttacaacctattggtttaaaaccattaggtaataaaacta

SEQ ID NO: 21858 - DNA, 3178 bp, Cannabis sativa
  modified_base (1971)..(1975): a, c, t, g, unknown or other
attctcactgacaatcctatcttcgagaattacatttttaaatcaatgtcaaaagggcttcgtgactgaagagcagacacaaaagaggcatgaaatgggaatattaagaaatatagagaggtaaaagcgagtaggagatcacgctcggatgtggtcacactggaagtgtgggcagaggttattgcatactagaaagacccaaaataacatgtctaaaatgaaagatgtaaaattgaatatccattaacttatgatttttctctcattttgctaacaataaatttactttaaattacatgcaagagccgaacaaaatgtgaaaaactgatggcagatgaaattaaagggggatgggggtctaagaccatagtcagccacatcatgagcggggtgtgatgttgtcagcatatttgttaaaaattcatatttttttgagtaatatatttttaattttttatattatataaaaataggccgatctcgagacgggagaacttcccagtattgtggacacttttataaagtttcagtgcaaggacaacaaatagcgcaataaacacacacaacaactacatgtaagtaattttatatctttaataaactcgttctatattttaatttctattcaactctaacagtttgttaaaatttatggtaggccaaaatggttgagatttgtgaaattcaaccagtgccgaccaatgtcccctagcagtacaatgtcaaccccacccaatttcttgtaaacatgcctgttatgacataggttatgggtgagaagtcacgccacttgagagggatgagccacttgccgagacttaggatgggggcaaagagggaaattcccaaggcaagtccttctaggccacccactgtcaccaaggaggaatatgatgccctgaagcgaagggtggaagaacaagaagcacgaaacgaatggcagcaacaaatgatgcaggctcagaatcaagtcatgatggccagcatcattccaggattcaacatgcctctgatgcttctgattccaccattttggtttcctagtgctgggtttacttcacaaactgcccctcccgatgatgacgatgatgacgacaatgtcgtggacttgtagttttattttttaatttgcactgtaaataatattaatttttataaactaattgtacttttatttagttttagacaatttatatagttttataattataatataaattttagttttataatatatttcagtgtatatttatttattattatcttaaaaaattagattttattttcaatttaattttaattttattataaatatagttttttttaaaaaaaaataaaaatattttgccgacgaactacatctcctcaacaaaaatgaaattattttttattgatgaagttttgccggagaaatgttgcatcgacaaaacttttgcgagttaaaaagaattaggcgtaaattggcgcaaaagttttgccagtgtaatattttaccagcaaaactccttcagggacccgtcggccgacaaattattgctggtgaagaacttctgtcgaccaattatttcaccgggataaatagttttgctgacgagttatgatgttttgccaacgagttatgatgcttttccggaaaaacatgttatgtcgacatattattgtcagtatcttttatcggcgtaaaagcttgccaacaacatatgtatacttttgtcgacaaaaaaactcgccagtaaaagtattttttttttataataacttatggttggatatgagtaattatttttgtaaattattaaaaaaaaaaagttatattaattgaatggattaataccatatattataagcatgtgttttataaaagttattgattggactttctgttttgttaaatgataaaatagattttatattttccaaaatagtataaataagactctaagctcaatttaatttttgataatttttttnnnnnaactaacttgaagataatttttaacatgaacaaatatagtaaacgtaaccaattttatcataacacctctaaattaagttattattatatttttattttgataaaaaatcagtttagggtactatttagaaaaataaaaaattaaatttatcacttatcaaaataaaaaatccaactaataatttttgtaaaatataatatataaaatggtatttaccttacttcaataaatatataagttaagcatatattttgcttgttgcatcaatggatttaatgctcatcttgggtccccactctccttccatataatggtaagcattttggttgatttatatgcaaaggtcggcaaggcacaatttatttattcttttctagtgtttttttttttttttttcactttgtattagcattattagagccttggggtgagttttaatttgataaatgataaaagggtacgatgcctagcacttatatcattattaatgtaatttattatttgattccacttatttttcttttaatattattataaaaaaaattgttgataatttgtaggttttatcttaagatagacactataatgcttaggctaattaagattttttttctcttgaattttaatatgtattaaattatgcccattgaacttttttctttgttgaaaatttctcatgagctattgagattgttaaatttaagggcatttgtctaattttattcaattgtactaattttgtgattgttcatgtactaaattatattccttaaattttgatatctaccaaatcatacctctcaaactttaatctatgccaaattaagctccatgaactttcatccaagttagactttctttattaaaattagaaaaaagtcataaaatccaacaatcttaatagttcaagagaaattttaacgagaaaagaaagttcaaaaaacatgatttagtacatgttaaaatttaaaggacaaaaatcttaattaatctaatacctagtaaccatatgttgttttgattgggctcaattcataaaagataattgactttttattgtgagttctaacaagccatcaatcactaaatttgtcaattaaaacggtaaatatattatatataaacaatgttcacacaaaaactacacttaaatattaaatacatttatagacaatgagaactttgaatttaagactccactc

SEQ ID NO: 21859 - DNA, 3910 bp, Cannabis sativa
  modified_base (3489)..(3490): a, c, t, g, unknown or other
atatttatttcttatggaatagagatactttgatctggtaggtactagatagggacaagattggtcttgtccgctaccgtgctgctggctagccgggcaagggcatctgttggggcattttcttctctgggaatctatttgatcgtgtacccttttaactgacttagtaagtcttgtatcttgcttaggtaggccatcattttctctccccaggtagtttattcacctaggacatgattaaccatgagctgggagtcacttaatatgtctaggtacttcgcctagacctcgtctaccaattttagcctggcaataagggcttcgtatttggattcattgtttgaggctttgaaccaaagattatggcatcatgcatttgctgcccctaggtgtaatgagggcaatccctacgctagataattaatttgtgcatattctatctatgtgcaacttccatgccaattttttttactcttgctctcgcttcatctctagctattatttctactcttgctcttgatcaaagtttttaggagatacattagtgcattcagtcacagagtcagtgagagcttggccttttattactacctttggctggtaggttatctcgtattgtcccaattcaattttccatttaagcactcaaccaaacactttaggtttttgtaacacttaccgtagtggctggtcggtgtatactctggtaggatgagcttgaaagtaaggccttagtttttttgaagctagtagcaagcaatatgttaacttttcgattagaaggtatcaactttttgcatcaacaagcctattgctaacataatttactagatgctgaactccatcttcttcttggatgaggattgcacttacaacaaattctgtaactgctaagtatattcctagctcttctttatctagaggttgttaattggatgggaggttgagctagttgcgttttaaattcttaaaaggaaactttacactcctctgtccatttaaactttttattttcctacaggatgttgaagaaaaggacacacttatctgtggactttgatacaaatcttcttagtgctactatccagacaactaaactttatacctcttaataattgtgggaatttcatgtccaaaagggcttggatcttctcatgatttgcttcgattccctgggcattcactataaagccaaggaacttgctcgagttgactccaaacgagcacttaagggagttgggctttatattgtatcctcaaagaaccttaaaacactcgttgaggtcctctatgtgcccccacccttttcgtacttggactaacatgtcgtccacatagaccttcatattgtggccaattaggtctttgattatcttattaacaagacgttggtaggttgtacgtgtctgtattttttagctcgaagggcataaccttgtagcaatacatgcctacatctgtcagaaaacttgtatgttccttacgggttcatcttgatctgattgtataacctgaaaataggcatccataaagcttaggatctcatgaccagctatggcatccacaagctattcaatccttagaagtgggaaccaatcttttggacatgccttattgaggttagtaaaatcaatccaaacccgccatttgttgtttggcttgggcaccaatacgggatcagaaacccaaacatggtcgaatgcctcgatgatgaagttatttgcacatagcttttcaacttcatgttttaatgcttgtggtcgatgtttatccattagccttcatttttgttgtattggacggaagtttggatctatattgacgacacgagaaattattaatggattaatcccatcatgtctttatgtgacctagaaaaaatgtcaaggtttaccctcaaaaatttgatcaactcagattttatttctggcactaaacctcgaccaattttgagtttccttaccttgggcacatccttcatgcccttggtcagactcgctgttcgagctattagcatgcgagtcttcttttttttgctttggaaagagcgatgttgtaacatttttgggcagactgttggtctccctttaggaacctagcatcatgattttttggaaacttgatgcataggtggtaaattgaactcaatgctttcaggtcatatagggctggtcaccctatcatgacattgaatgcagatgccacatcaacaattatgaattgggtcatgactgtcttctgtgtgggactttcattgattttcaatggcaatcaaatgtattctagaggagccattccttggcccgaaaacctgtacatgagttgtgtacaaggtgttatatctttcaaatgacgccccatattctcgtacacaatcttgatgatattggaagaggctccatcatccaccatgcaccacgctaccgtcatattccctattttggtggttatgaccagagggttattatgggggaatctaacatggtagcatctcctttggtgaaggtgatggcatgctcttctatctttggctatattggatttctttcctctacagtcaagatttcatttctttgctcgtgaagaagagtttgagcatatctttccaatgctttgtttgaatcccttgcaatgtgggatccaccaatgatgacctgtaaatggtcagcaactggtgggggcaatgagtcattattttggtggacttgtgcctggttttggtcggcttggacatatcgacgtaggtggggattattccttcttatcaaaaactcgatctcttccttcaaattcttacactcattagtgtcatggccaaaatctttatggaatcaacagtacttggtgggggtccctcttactaatgtcttttttcattggagggggcttcttgtacgggacaatgacacgtgtggccattaggatggtcttgggggtgtttgtcaggacgataaagcatgtgaacttctcctcattttctcgagggtgctgttgtgtaggggaattattgaacttccccttcttgccatttccttggtcggaaccattatagttttatttccctcaattattgttgttagtttggggttgggcggcattactagccccatttgtgacagatgtgttgttggggttgggcgacattacaggaacaatcttgagtatattttgtttttttttaaaaaaaaaaaatatagatttttttaaataatcataatattattttagtttaatttataatttgtttcaaaataattttatatttttattgaatttttagttatttttctttattttgttaagatatgagtttataaatatagataaatttgattatttcttcaaaaaatcttattttatttaaattattaattagattctcaatcatttaatttggtttgattttctaatatacatatttgtaaataaaataaagtttaaaaatgtttttttaagagtaattcaagtttttttaagtaaaattaatannttttaattaatttaatatttttatgagatttttaataattttattattattttttaaaattactagaatattataattactttaaaaaaatagaatattataatttttaaaattatctttttaataaaaaggggtaaaattttgtattggtcaaagtttagagggtaaaaatactaatttttaacagtaaaagaaagaaatctaacaaaaaaaacatcattatataattattatattttagaaaaaatatttaacatatattttaaggagcaaaatcaaatactaactattctattatttattatagcactagtctctcttatataattttatatggctagtaaataatgctaagtgcgcatgcaccaatatatcaactaatcaattaatacaaatataatacttatatacaataaaaaa

SEQ ID NO: 21860 - DNA, 3280 bp, Cannabis sativa
gtaaataaaatttccctttttataattgtgtagtttatatatatttagaatcttttacacatttttagaaaattagaaataatttattaaatagttacttaatacatgtataaagaaaaaataaatcttatttttaacatggtaaattatttaattttttttttttaaatttacaaatgattctaaataataataatatatatgatcataaaaaaattgaactaaaaaattcttttaaatgcaaaaacatataaaagatctaccgaaacatacttttgaacactagtagtgtctaacattttctaaatctgttttatattgaattatataaaatttgatacacaattatcttaatattgaaaaaaaaaatattaaacagtcttttaatatttctctaataataataataagagaaaagcttattaattagtgggtggaactattgaggagagagtgacagagataggaagatgtgtcagctgataaagggtcctctctctcgtggtttttattgatgaaaatgaagaagataaatacttgtttgtgcctggtttggaggttatttatttggttaattagagtgtgtttgtgtgtgttattattggggacaaaatactatttaatatagtgtgaaaaggatctcaattggtttattataatatttatatatatagcttcttcttcagttatatgtttatgatagttaattaattaatagtaattatgtgtgatgtagctgagatggttttcgttatattttatttatgtattttatataataaccaatatgtaacaaagggaaagtgtacaattattggtgcaacgacataataatatgtagtttcgaaatgatatgagtgaaacatcattttcacttgacgagacaacacctttttcctttttttggcatattgattatcttgagtctgaatggccagttctggctttttatataaatatgggcttcgattgtatgggccttagtttcagcccaaatagaactgcttacattgtctttagaacactcacatcccatcggttaaaatagctcaaaaaagtaaaaaatagagaaatactattaaaaatgagttttatcaactaaaatagtttaaaattttagattataaataatacatttttctagtattaaagcacgattcacattgttatgctggataaaaagaataagggaagctctaataaaaataatattagaaaagaaaaatatctcgaaaatgaactcgttcttcatgttctttaaaactttttttatgggaaaaatagttaaatattatcagtcatcttcttgaaataaccaaataactatactgttttcttttttttttttttaaaatcccacacaattaattttttttaatgaaaaaaaccataatatttgtaaaattgtaccttgaaaaccttaaaatgaaaattcaatgtttttatatgataaaaacaaggattcaaacgcttaataggagtccctttgtatatgtcaaatcaatttaaccccactcatttatctaaagtggttgtttgattaaataaaaataaaataaaattggtcgatcttgataactagtaatgactcaataatgacaaccaaatatagagaacattatttgcataaggttttggatctttatcaatccattataaagtcaatgtacataataatgatgaatcattatttggctttgtaacaaaggggtcttctttccactagatgaagaggctcccaacttaccacaattcttttccttagcttttccccatcacacaacataaaacccaagtcacaatattgttgctccacacatacacaaaaacaaaaacaaaaaaaattgaatgtacctccgaagatggagaccatctccaagaatatgaaacttgcagcagtagcaataacaatgactaatggcttgaaaattgagatataaagaggcccttttgaaggcaagcaacaagagacaatagaggctatgaagactgggcctagaaatgtctaaaaataataataaagcattctcagttagacatatcacaaacaccttgtaaaatatagcctaatgatgtgttcatgacaacatacagagtatataactgtgattaattttatatcaggtttcagtgttcaatcactaaactcccctttttaccataaagcttataggtacagtaaaaatggtcacaccaaggcagtacatgaaggccactataagctcagtagggtatattttcaggatctgtgcctataaagagaaaattccaattttataataatgtattaatgttcataactttttctctctttgaaataattgagttgagaaggaactctgtagcaactaaaaaaccacctaaagcccaatttgacagtggtttttgtagatcaagggaatgagattgtaatactgattttactggtgcagattgagaattgagatgatacaattgttgggcccttgttgagaactgagaagaagaagaagaagaagaatagttgtaagggttatttttcccttgtgaagttcatacatataaatatatacccaataagtgaaaggaggattagtttgtaaataatagtccacttaaataaaggggtgatcttctgcaaaagtaaaaccaaaataatgtaaatatgttagttttgactgaatgaagttatggtatgttaaaaatgtttaggccatgaaaaataagcaaagtgggaagagaagaagggtggccaaagaataagaataggccatgaaaacaaagaaggtgaagcctttcaaagtagctgatttatacagaatatgtggaccaaccatactacactcagctgcagccatagctgcaaatggcacaacttcttccttagatttccaatctcccatttttagtttatatcaatttatatttaatttttagcacatcatttttctcacctacttttcaaataaactccccataaaattttaataatgtggaaaaaaaatgtactaccaaatcaccaaaaatattgaaaattaagttctcattccacatcctcaactattatttactagtgttctcttttacatgcatattttatttgttagcttaattcagaaaagaaaaaacaaaaaatgtgacaacagaatctaccataatctaatataatattgttattattaatatataaatacatatttttatatggaactctcaactcctcaacaaaggggtcttattttcagttgaagtttccaagtcttttgaggcacaatctttactggtttcctcttttgctttt

SEQ ID NO: 21861 - DNA, 3850 bp, Cannabis sativa
cacggtttgcagttgcacttcctaaacttatctcctcagctttttggggtaggcagctcattggttgagtgctgtgggctttttgaatttcatgtgttgtgtgctttgggatgtttcccttgtatcgaacacggcatagaacccaatcgtccagctgtgacaacagggaagccaatttatttcaatgcttgtttgtcaacattgattagaaaagtatatagataaaattggcaccacaaaatctgttaaaactttgaaaaatattaataaaaagtaccaatcatcaaataaaaaagtcaactgtcttgtcatgtagtagtttaagagtcttgtattattgagaagttgattctgatttaaaagctgcagatgctgggacatgttgtacacctcagaatttataagagtaaattaccatatggttaaccacatggatgagcaaggcaagtgaccttggtctaatatcatattcagaatttgtagtaaaaatagttaagtttgaccaagattataactgcctcggaccatattaaatgggggagagtagggaaacttgccttaattgacaaggacttttctaaagctacacacaataatgacttcttacaagtggaagagtgtgaaagagtaagaaaaccgaagatagattctagctaaaaggaggtttttcatgaagaaaagtggccctggcgcatggttactatgctaagagttttataatgaatataggctacttttctccttttttagccatgaagtggtggtccccccacaacccattattaggagtttctttttcacacttgattgttttttttttcttctctatattaggtacctatattcttttagctcacttactctcattgatcctttgaaccttgatgacttgttaattggtggtgagtctagtagtctgtactcattcattgaccagtcagtcttttccccttttgggggtcgaccagcgtagaagactagagccttcttcactccaattttctttgacaatccataagagctgaaaattggcttgtcaattccagtggctttccagtaacctaatcctgcagctctattaggtctttctccctttggatacttcctatctctggggctgaaaaagtaccactcctcttccccaaatgcagccttctctgtatatgtacatgcaaaaataaataaaataatgagaaatatacattgaaatattagaattaaaacaaaggagtatatgtacatataggaaagatagagaactaactgggtagctcccatggattatatttatagagatcgatatcagcgatgaatgatgctggtaaaggctttgaagccactttgtttttcaagtagtgaactatgagttcttggtcagatggatgaaacctgaaacctggagggagtataggatttaatgtagtattagtattaggactagttttagtagtaccactactactacttggctctctttccatgggactgggagggtggtaaaagggagtaacagagagtaacatagttttgatgattcttcaataattggagaaattaagggagatatgattaaacgttattaccaattatgaaaaccagttgtaagttttgacagcatgcatattttttcgaggcatttatgttaagtttccatgcagatactgacattatatcaatcgaatattgtaaagtgattattatataatatttgacacttcttctaactaattaaactgatgatgattttcaaatggaatagtgaaaggttttattagaaaataaccactttggaatttcttgctgactttgacattttgtatcgttccatttaattacaatattttataattaaacggctgtgtcctttgtttgattaactaattaattatctgcatttataagtgtaatatatatatatatattattattattatcatgcattgatacgtatgtatcaaaagcttttaggagtgcagtactgtgtacttccatcgttaaaagtcatgatatataatagtacttttaattaaaacatttattagatgctatagtgcttctttttttttttaaaaaaaatgttatattgctagatatagctattgtaatagtgtgggtacttaatatgcaagacctaaatcaaattgagataatgagaatggagattgctgtatgtattttctttattcaatttcaaatcaataaatattgtctaatttctaaccatatgtatatatatttactgttacaatcaagaagagttcttttgggatctgctaaataatttggctacatgtgttgcctcagtactcatattattgctcagatctgtactggcttattatatagccttttctttcatgtcactttcacacgtcgtggtcgagcttggatattggttaataatatatttatatatatatatatatatagattttggtcttaattaagttccaatttaaacactgaccatatctttattatccatctatatattgttttttaagtactttaacaaataaaaatgcatatatagctgcttttttaataatgtaaaagcgagatgttattagttttgtccggactaagctcattgcgaaagtgtacatagtttttgccggaccaagcatatttaatctataatttcttttgtatattattggccaaaagcctaaaagacatagtaaatccaatttacacaacaggattatgaagagaaatattaaagggtactagtggtgcttagcacaatatgccaatatcattatcggtccaattaaatatcgagatccatatagtttaatataatacattttaaagagtatcgctagtcaatcgcaacgcaaagaaaatgctagacaccactagtgtctaatagtaatgttctattatgtaagagaatcatatattcattacttttaataacttgatgcagcttaaacaattgtggttggttgaagtttatgtgttcaaatatcgttactcaattctaatggcttctttcatggatagttagcaaatggcggagatccagttttttatttactagcatatccaaaatccaaattaaattagctaaattttgatcaatattaaagtagatgaactcataagcggattagggtttctagggagagctaaaacccaccttgagatataaaaatatattactatacaattgttgcttaaatatataaatagtagtcaaataaagcaattagttaagatcctttaaattttagaatctcttaccctcttttatttattaaaaaaaacacaaatttgaacttattatcactaaaataagattaaatgttgctaaactattatttcacttaaatttaaattgtcatttattgttttgaattttatttataaaatcctaggttcgatgaactagtttaataattaatattaacttatttttttgatgaaaatttcattattgagcattgttacccaatcatattgatgtgtatggtctacaatttataggatttgatggaatacacaaataattatatatattactattgttaccttggtggggttcggatatatagtactacctatgaatgaatcaaaaggtaattaggagaaataacgtagaaagaagtactttgtttggtgccaaacatagtgtttatttaaacaataaattttaacattatttggtggcctggttactctgcttgtgttggaatgaaactatattttggatgactccattattattacttgattcctattccttccttggcctttgagtttggaaagttgtgttcttcgagattatttttatctctatataattataatttctcttaatttatacacatttctctcaattaat

SEQ ID NO: 21862 - DNA, 4030 bp, Cannabis sativa
tatattaaaacaagagttataatacaatagacatcagtggaggtggaagttcctcaaaccatgaacactcagtatccaccaaaagagcaaacttagctaggttatgagcatcagtatgcgcagatctattgacagagtaatctgcactccaggaaaattggacactaacagtgaaatattcgctaacaaataatggaaatcagagacagagttttgatgtgattgcaatcctttgacaactacaagtgagtcagactcaatgtagtgaattggtaatctttattctttaagcaattgcaaaccatacatcaaggccaatgcttccataacttctggtttaaaacaacctgggaaaggtttagacatggcagcgattgtatcaccactactatttcgaagtatgacaccaaattcagaaatttgtttgtttgtatcgactgccacatcagtatttagtttcagccgacccgaaggcggatttaaccatcgtggagtaggattgacactgctgttctgattcagctgttgagaagtgctcgaggcaggcgattggcgggctgatttatactcatccaagtatgagagtgtcgagtacaacagcagctcatatggctttggttttgtgtcatgacgttctttgttacgttccgtccaaatactccagatacaagcaaattgctctatttttgaatcatcccatactttggatacatgcagtattaattcctttagagacatatctcttgagagaaaattactgatgtaaaaatttgaggcagcccaaactttcttaggccttttacataagaacaaagcatgaatgattgtttccgttgcaccattgcatagagaacatcaagcagtgtcactgatgtgccgagtgtgcaaattgtgtaaaaccggtagacaatcatgaatagctcgccataagaagattcaaactttagatggtatggataaaggccagcatttcttcaaccaagtgatagcttcaatgttgctagtattcggttgttgttccttaaggagtacagtaagtttgtagcccaatttaactaatacaatgcattagattcatggtgccaaacttgttggtcattctgggaaaacagagtgagtggtatacttagaatcttctcaatatctgaatctaggaagagtgatttgagcaggggaatatttcattgtcttgtatcttttatgagacttgacactcgcatttctctgtcctggttattgaacagcagtggtttcatatatgtaagacctggtatccactaatcggttgcacatttgatattttcaccattcccaactttccatcttaagccttctaacaaaagttctttcccccatatgattcctctccaagtgagtgatggatataagcctgtgtctgcatccaaaaaggaattatttttgaagtatctttgctttagtacacggttgatcaagaatcaaattggttcagaaaaaatccgccatgcctgtttaacgagtaatgcttgattgaaatagacaaaacttttgaaaccaattccaccttcaacttttgattggcatagaactttccaagtcttccagttaattccagttccaaatgaattagagccccaccaaaatttattcatcatagtctcaatttgattgatgagagattttgatagttgaaagcaactcattgcatatgttggaatagattgtgccacccctttgaggagaacttcttttccaccaatagaaaataattgctcttgccaagaagaaagaaatctccataatttgtccttgatatcagcaaagagaatttttttatccctacctgaatatgaaggcagtcctaagtatctctcatgacatggttggattggcatttgcgaaacctgttggactttttcttgattctgcatagtagtgtttggagagaaggagagaactgatttttcagcatttaactgttgtcctgaagcacggcagtagaggtttagtgaacgtttaattgcttcagtagactgtgaatttgctcgacatagtaccaagctattgtccgcaaaataaagatgagaaattgctggtgttcctcttgaaacacgtagactagtaggcatcccattcatttcttcatactgaaacagtctcgagagtgcttccgcacatataatgaacaaatatggtgataaggggtcaccttgccttaagccacagtttggaatcaaacatccatgagctgaaccattgacaaggaaagagtaagacacactggataaacattgaagaataagttccactacatattgatgaaaccccatagcatacagcagtccttggatgaaatgccattcgactctatcgaatgctttactcatgtcaagcttcatagcagcaaagccttctttacctctctttaagtgcttaagagagtgtattaactcaaatgccacaagcacattgtcagttattagccttgaagataaaaaggcactttgtgagtcagatatgacttgaggaaggaatggcttcaacctcaaaacaattgatttggacactagcttatagagaacattgcaaaggcttattggtctcagttgtgacatgctacttggttttttaacttttgaaatgagtgtaattaaggtattattgaagattgaaggatctgcacctttgtttagcactttaagaaccgatgtcgtgactaaatctccaacaatatcccaataattcaggtaaaaacgcacagtcataccatcaattcctggacttccatctgcattcatggttgagagagtttcgaatatctctgcagcagtgtatggccgtgtgagtgtattgttgtcttcagctgagactgtacaaggaattttggacataatatactgcattgcctctgtatctttaccatcagtggtataaattctttgaaaataactttgaaccacattggcaattcccggttgtgttgtgtgctcaacactttggtcatcaagtaacttggtaatcttgttattctttttcctgattgttgctttctaatgaaagaatttagtgttcaggcgccagatttaatccaattcattcgtgacctttgtttccaataatcctcctcttgagctaagagttcatcaaggatgttttcacagctttggatgtgttcaaagtgttggaaagtagtgtcattagagttatgtaaagctgcaacttgtgcttctgtaatttttattttcctaggtagtgcaccaaacttctgtttatgctaggtttgaagttgggaagagcatgaagacagattgttgaccacttgcaggatcggatcaaccaaacaattgttccggctattgttgacgatatctaaggcagcttcttcatttaaccaaatattttcaaaatgaaatcttgacttgtgtcttgtggcagggctttgagcactcattctgagttgtattaaaagagcacgatggtctgatttaaaaaacccaagatgttccacttcagcagcagcaaaattgctagttcatgtatcaatgactaaggtatagtcaagtctctccttcacattcgttccattgacatgattattgtgccaagtgaatcttggaccattataagacagctcatgtagcccatagtaatcaagtgtgttctgaaatccatcaatttgaacatcattgtgtaggggacctccaaacttatcagattgagataaaatttcattgaagtctcccatgacaagccatggcatcaatggagcggtatcttttagtctttttaaaatttgcaaagtgagtggcctttgtgatgttgctggtgccccagaaaaaccagagaaatgataatgaggaccgtcaggaaacgcaatatagcaatcaacaaagtttataccataattaagaaatgttacatttacatcagctttccaaagtaagagtaaacccccacttagacctaccctaggaaattctatcccattagctttacatttgcatttacattgattttagtttcttagttttttagtcatatttttatataa

SEQ ID NO: 21863 - DNA, 897 bp, Cannabis sativa
actccgaataccccacgaacttctaaaccaacaaaaatgagccacatgacagtggaagaacagatgttccaaggagtcgacatcaccatcacaaagaacacagaaagaagaattctcaaacaaacaatgaagcctctgcccgcaggggagaatgtctctctcaaccttccaaagaaagagcttgaccctttcactgagagaggatttccacaaagtcttgaaaagacgatccactccaccctgcctccctttggaaatcgaatgataagcagccttaacagaaaacctcccatcctgtgaatccttccaaaccaaaatgtcttgctgggaggaggggagaaggggcaaagaacccaaacagtttaaaaactcaagtctaaactcaaatggcttcaaggtttgttgaaagctagaattcaagcaagagaataatgttttgcataggtgatagttgataaataatttagcatttctttctagaactaagcatatttgacttcgttattattttatcatatctttgttggaagatgaagtgttcaactttagttgattgagaaactaaagttgtgttcacctttagttggcctgcaagagtaacaagaatgagaagactgcatagaggtgaaatgtgaaaacaaatcgaaatcaatctttaattggaagactattaagaaaataaatattatattttgatactcttatattaagagttattaatatagttttactaaaataaagcaaggcttatgttaattagttaatataggacgactaaaaatgtgtacttatatggtttagaaaaacctataaattaatgttatgtattcattctcacatatcacaaaacaaaaagaagaaatgatttagttagaagcttagagagagaaaagcttt

SEQ ID NO: 21864 - DNA, 7022 bp, Cannabis sativa
agagagagagagatgagatgagttgagttatcaaacttaaagcataaggctgagggtttgagacttagagaattagggttaggctaatactctttatatagtagagtttacatccctaatatcccttaaaagtaggtaaataaagctgtatttacataattaaataataaagtttaaatgatttaattattgcttaaaatagggaagttgttgatatttttgtggtatcttcgtgggttgtcaatgcccaacttacagtttggcttgctgtccacggatgagggatgcgcatcaatggtctaccaagcaaaagctagccagccatacacctgcaaggtgctggctggccgaccacatactgtctgcaggttggagtctgacatgccatgttcctaccaggatctggcaggtcgtgttcctgccagctttggcaagtgttagcaagccttcgtaggtgttggccagcctttgtaggtgttggtcagccaatgccaacctttgtagacctttttcttatagaggttaggcttccttggtcgaacatacccttccttagtcacaaagtcacctttggtcggccagcttttgctcgaaccctagccgaccatacaaggtcatcatgggcggccaatgtaatccccttggtcggccagacatggtgatgtagctcattgacggctcgcttaactcctttcgcttgtcgctttatagttttgttatacctaaggagactttgtccttctattagcaatgttgtattccacgtgtcctcagtcttagcttacgcgaacatgtcaggtggacaaaatttaggataatatttccccccaagtccctgtttgaacttttggttggatagggacttcttcattctcgtcttgcttgtagtagcctctattgagcagccttgtctagctgagtattggactttttcatggcatgcttttagaccttctctctccatttatgcctcatcttctcttctttgacatctcttctttgaacctgccattgataagtttcaagctttttaagcttttagaaactttttgattctcacgttagattgtaatatttttggtattttgatctgtgtgatagttttagaatgcataatgtgtgatttattgatgaaagagattcaattttggcctttgttgtgattcttgacactttgagtcatgaagaacacgaagaacgcattcgagttttgaaaagcacacatttcaattcaaaactaaccttggctagccctaggggtcttgttttagacatggccggccttatgattcaatcatgggagttggacagctctagggtttcaccctaggaagctagcctgttcatgcctgggtttggtaaccatggccagttcgtggttgagtatgggaccctggtcgatcctctcaaagcttgggaaccctggccggcctaggccttggtttcgagcgggtggccagttttctgtcctcttttaacctcggcaagaatcttgccatggccttgtaggcatatacaaccatagtctcatatgtggtttccctagaaactctttatgaaacttaatggtgagtctattatagtcgaatactcaacttaagactcaacattcgttcaagttgttacacttgagactgtatttcgctaatacccaaccttgtacaatgacattatctggcaagtacccttgggtaaggttgcccagagttttgtctatggcttggaacctacaaggaactttgccttttggcatgggacctgctaggaactctgccttgtcttagagatttagcatggtacgtggttcctataaaaactttgtcttatgcatttgaaccgattttttatgcatattcgaccttgaggctttcatgttcttgcttttggcctataggcactctgttcttgaacactattactgtttagccttgaagcctgttactatagacatatgaccatccatgctatcttcttattgccttgatatgtaaatatacagatttacttttctttatgtcaagctaaagtatgcctgcacttgacttagaggcaggtttagtagcttattctaagcgttaaaatttctctgcataagttctctgtgctagtttgatgcattgtacggtgtgggtgccccctaagtgagcacgcagacttacggtctcttggtcacttacaattcaccaagtttcatagaccttgcctgggaattttcttgggggtgctaccgggtgtacgcatgtggagctgaaaaaaattaacttcaagaagttatttttgttagcaagtggtttagacataattggtcttatgtgtaacaaaagcttacagctttgtgtccgcttttaaaatcatgtgttggctacccctacgtggcctactgcgcaacagacatcactgaagagtgatgggaggccatgctgaaaagcgatgggtactatctcttttatatttggctacctctgcagggcttaccaggcaaaggccatcactgaagagtgatgggaggcccttgctgaagagcgatggatactagattttttatggattcatggacggtgaaacgttagaggaaccactatacaagttggctagtgagagcacttaccgagatgttctctattccaacactttggtagaagagccaactccaagttttcgttgtactctccaggcttgtatgcacttttattattatcttgtaactcgatgcgaaccttttcagttgggtctaagcatgcttgttacatgatctttgttgtcaaggaatattctttagagcactaaatcgcttaagaagactttcctttctcagacttgtttgctgaagcaccttgcaagcttttgttggcaaacatgtcgctttaagttggcttggtcttttcttctttccctttcatgaaaggataacgctagcaagatgtggtttacttcttgtcatagtagacgaaaagtatgagagcagactgttagcgaatcggtccagccagggtacaaaccaggtggcaacctataacttcttcttgtgatcctcaagtttagtttgtaaataagagatgagggaggccttggtggtgttctctatattcctggcaccaagcatggtctccaacccaaaaaccattcttagtctctctgccgtaagggcctctagctcagaattggctttgtcttttgttgcaagggaagcctccaagatcttcacagttcacaggctcctaaaaagcatttgaagaccccttagagatatctcgagatgagctcaatttcatcatggcccaaaaataaagcaaagcaacatcagtatcaaacttcacaactctggccagccagtcccctctttggaccgccatggccggtcagacccccatgtaggcttccaatgccagccagccacatgcaagaagcaccatggttggccagcctatacagtgccaagaagatgaatagagctgaaagtataactcaccaaagaaagatctcgaatcctggaagagtaaagtctatcaagtccaccatcacccaactcttttagagtctcatccaagaaagaaagaaccctcttatgcaccggttggctgactcagcagccttctgtccaacagctgacccagctcctctactgggccttcgtgtaccttggccggcaagtcgtatcacaggctatctggttggtgcaggccctagtggaggaggaggcagtgatggtccggcagcatcctcaccacaggaggtcctagccaccttggccctcacccgtctggtaggctcatctgaaggtccacctgcaagaactcccaacctagaagacatgtttgtaaaaagaaaagtagcaaagtcagaaagcaatcataaatattcaatataagaataaaagcatggtgttatcaactatcatataccatcatctgaagaagaggagctatcacagccctcaactatagccttgcccttagaggtaagcacgggacatgtaggtctctcaaaaacctggcctctaggcccaatatgaagggaggcatcacttactagactcggccaggcgccgacggagggtcttctccctcctctccaaattccgtgcaatacgagactaaggtacttcatcatcatccaagtcagggccttgcccatctccaaggcacacctcatcaacggttaacactcttgcaactccaggagtaggaggatgcaagccatacatcaaaaagttattcacactggccaactgagtaatgttcctctgctcaaccagtatagagaggatgtgatttaccctatcccttatttgtaatgtggggatggaacgcttgacgaatggtactctctgaaaatgtcgatggcagatctttttaacatcccaagaaatgaagtacttgttaacatgctcatcgacctttggcatagacaagttgttagaatcatctagccactggtgactaacttggctaaaatagaagtatctaggccgatgttgctgcaaaacagactccatgtcaaaatagtattcaacctcataaggagtgggttggggccagcctagctccttatacagaacgaacattgttaaaaggtacgtaatacctcccggggtgatctgtgttggacacatcttaaggtaagaagcaatatcatgaaagtaaaaatgaagaggtagtacggcttcttgatcaatatggtactctaaccacgccatctagttgagagccaatctatgcgctagttgatctggaggaggtatcttacaatgtataccgcccactagcccattagcctatattctctcaaaattgtccttctagagagacgaaacatgggaaatccacctatcttcttgtgcacttacatcgagaattttaggctcaagagattgctccaagaagtggtccaaactgagcaccaaaggctcactgagcctgctcaacagattaccatcgctatcataatgacctaagggacaattggaaaggatgacacaatgctcgcacctcttcctcctaatcggtacaactctctcacgattaaacgtagccctaggtctgtcattcttatggtcaatttcggagataacatcgacatgaggcaaggtaacccctctcgtaatcttgatccgacaccttatagccaatctggtcgtatgagggtcgtgcgtggtcacattgccattaatttgttttgtatcaaccatgaatacaaggaagacaagagacctacacaaatgtcacctccccaattcaacacccgacactacctgcatggaagaaataaggggaggtgagtaacctgacacagctacaaatatatctaagtcaataataccccaagggtatgttctaggtaaagcaaagtgtacaaggtcgaccaatgacccagtatccccatagactcactcactaaaacaaacagtaagtcctaagttgtacaattgactataatggactcattacctagtcgtatacagagtctccaagggaaaccacgcataaggcaagagttgtatatgccttcaaggccatcacaagaccctagccgaggtcaaaagagggaaaaaaatggttgcccacttggagccttggccttagccagccagggttcaaggtcctagtggcgggtcagaccccaagacccagcctagtggtcggctaagaatcctagttccaggcataggccagtcagcctagggacacagtccccatggccggccagaccccatgaaggccacctatggtcagccaggtttcaaacaaaacctccttggtctgtcaacatttgcatggatcagaacacttattttttcaagaactcaaacatgttcttcgtgttcctcgtgacgtgaagagctaacaatcacaatgaaagttggattctgtttttcatctagaatcacacattgtctatcctaaggccatcatgcagatcaaaatactgaatggactacaatctaacatgagaatcaaagcatgttcaaaataaggaataatgttcatgcattcatggaaaaatcaatcaaaccaagtgaaatagcagtaatagaagcttacccactacaagatttcaatggagatgaaggtgggaagcttggatcgttgaaatagtgcaaaactcccgagaaaaatagtgcttgtgggttaaccacctagagagaaggaatagctttttctagagaaaatttctagtgagagaaagtaaaagtgaaaaatgaaagtgaaaaaagggttaccccccaaaattcacttatgtagtacatgtgggcccctttttctcacttacctcatcaacatatcataaaggcacctaaagcagttatttctctactgcaatgagatcagacagtcatgacaaagtgttcaataagtgcatcaacttttatttagcgaagataacactagtggcgacaatatctatatatagctggtaaagtccctatccatacgacattcgcacatggaattgggggcaaatatatcccaatttttttcctcatgacgcggcatgcttacgtggatagaaccaatgccacatggtagtatagctcactaaaagaaaggccaagtcagcacctaaataaacaaagactctggcactcaaatggggattaagtgacagactagctccctctcaaaagctggccagccacccctagctggccctatgctggctaacctagggatagcaccatggtcggctagcctagcctccacaagggcctgccagccaaggcgtgcactacagaccttgatggacacctctgcacgtggacaacaactatgggctgtgaattgggccctaaaagtctaacagaatggctgaataatatctagaatcaagggcactttggtcttttgtaaatatctaacaaactatacaaatgttaagggatttgaattgtaaacctagggtttaggcctcttatataaaggccttaacctctagttgaaaacctaagttgcctctaagctagaaacctacttctaaattctaagtgtctaataaactctatctcttcctcattctctctctct

SEQ ID NO: 21865 - DNA, 3629 bp, Cannabis sativa
gttagttatctacaccaagattaagcataaatatataattaattaattcaacactttttaatgtaagatttaaatgtaatcatatcattaaatatttgcatagcttcatctcctccaaaatatattcagagataaatgacttctaattatgttttacccgaaaccaaccgttaaaaataatgaaaatgttaagaaaaatatttataatgatgttttacatgaaatgtgcctctaaaagtcgtatttatatagcacttaaaaagaaaatgtgtcgatcctaattgtttttattttcaaaatataaatgtaaaattaattaattataagttttggcatatattatatgatattaatttattaattaattctcttcatattatttgtacatatatttataaatattattttaatgaagtagattattttatagtacttgatttactaattaattggcatgtttgaaaaagtaatttttgaagacgctttagatgaaacgcgccgcgaaaagttatatttctttaaaaaaaaatatacgtttagtcatgaaaccaacatgtatgatatgatgaatttattaacttaaacgtacttattttgttctaaaatacaaatcaagagaaaatttatttacacaaaatgtgccactaattttttcaggggaactactataatttataaaatttaattattaagtcatttttatacttattataacctacaacgtacattgttagaaaaagtaacttttaaagacgctttacatcgaaacgtacttattataacctactacgtacattgttagaaaaagtaacttttaaagacgctttacatcgaaacgcgccgccaaaagttatatttcttaaaaaatctatgtttaattataaattcatcatataattaatataatgaatttataattaagtattgtatttttaataattctttctatatatatattttgagtgggttgatcaaaatattttgattttttgttctattctaagacacattgagagaaaatttacctttaatggcaagaaatgagttttatttgcactcaaaaaatttataaatacatcctattttaataatttttattttgtataaaatatatatttttaattatattagttttttctttataatttttttttttctaaatcatattcttaaaaaatattactaccaaacaaaaacaatttatattttaaatattataacaaaaaaattaaaaattaaaaattatgaaaattttattgaaaataaaaaaaaaattatatatgatgtaataaaaaaaattatgaaaataaaaataaattaaaattaataaaaaataatgtgagaaataattttcttagaaaatatatattaaaagtaatttttaaaatttatttttagtttaagttttttaaatattgagatgcgcaaatagaactccctttttattattttctttttagggcaacgactatttttttttttactcagttcatcatttatatatatcatatatcatatctaaatatatatattttttttacatatagccagttcaataataaatattcttgtaaatacttatttcagcaacgtgcattattttataaaaaggaaaaaaaatattattagaaataataatatgcggacaaaaccttacaaaatataaatatctgtggacaaaatgtaaccattaattaaaattacaccaaaaaataaaataaaaaaaattataacaatccttctatatatttaatatatatatttagtagtaaatttgggtcccaaaatgcgagaaaatgcataccggaaaatttataggagcgttcttgccccaaaccttaagagcagctagatcaaaggctttcgcagcttcgtcttctttttcatatcctcccgctacatcaaattattcaatagtaaaataaaaaataataataatgagattgaatattattttagcaaatttattctgatacaaataacacaaattatttagtttttatttttaaatttaccattgtggtgtttgagctaaaaagaattgtacaaaactcaaatgccaaataattagttattggattgaaattatattctactaacccttagcattttcttattgtaattaggaaattaatatatttgtgtttatataaataattagatgcaataattattaaaacaatctaattaattggtacaatatttacttacccacataaactatgtgtccaataatatcagataattaaatcggaaaagaagaaaacaacaatagttagtcacatgtatttaattataatcgaacgtgtatatatatacacacatgaaatagtataataattttataatataattacttgtctttgatttcacacttgggttggagttatcccacaaaaatgcatcgaaacgtccaccgtacctattggtaaaaatatatttcattaattcaataaaattatagtatcaaaagatcttagaaacatgtatatagtatgacgttatttatattgatgtgtgagtaatttgtaatgtttatattataattaataagtcttaattttataatgaaactttggtaattaattaaataaatgttaatttggtttgatttattaaaaattaaaaaaatatgtaattctatcgaaaaatcactgatgatgagtgaagtaactgatattctttaataaatctcgcattttgtattttcttgtgtcattatttcactttacaaatgattaattaagctatttgtaattggtgaatctgataattcattagcgatttcataaagtttattttattataccctcttgataaatttggggtcctctctctagctagttaaattaaacagttgtggtttgtagggcattacatatttagttgtatattttatacatttcatggtaagtatatatataatatatatcatcatatattcttcatgtggtctatatataacaaactttttcactttcacttctaccattgtagaagcatttcctatttttcgttcattatgaaattaaatcccaatttcttcatataatgtaatatattagagttataataggcattatgtccatctttaaaaaattctcaatactttgtagtgtcgaaaaataaaattcaaaatatgcctgtaaaataaaatatgcacccgtttttgaattatattttccacacaaaaaattattcaaaatttccaaaaaaaaaaaggctagatacctagtataactataacaccatcatatgtttttaaattctctataaccaaaaataaaaaacactcatacattaagatcaaaatctgaaggcttcacccaaaaaatttccaatatataaatatataaaataataaaaaaaaatcagatttatatatatattattatacctactaactccacgatagatagagcctctctcaccaaatgtgcttcttggtcccttaatacatcgtccactacgtcgaggcgcagtaaaagcaatatcaccttcatcttctaccactccattactatatatataataataataataaataataattcaaactataattaattaagaagtcataataattaattattatatacattacataccatcgaaaatctttgaagatg

SEQ ID NO: 21866 - DNA, 1060 bp, Cannabis sativa
cgtctagtcgtggttgagagttcgggtctgggattcagggtccatggtccaagattcaagtccctaatctaagtcaggtctaggttcgagttcaaggccgagtctgggtttgaggtttgggattcgggatctgagtccgggtctgggactgggtgcgagtttgggtttggagttcagggtatcgagtctgggtccgagactgggtgcgggtttggatttgaaggggtcagagtccgagttcgggactgggtgcgagtttgggtttggagttcgaggtctgagtccatggtttaggtcggatgtgggtctggatctaggtttgaagtctagagctcctaccaaggtaggggtaaggttgtgttcatgtcgtggtgtggaatattaaaatatttttttaataaaaaaaatctaaaaacagtttttagaaaacattagccaaagaccaataaatttttaaaatgacaaaaaattaatttttattctcaattttttttatagcattttctattctcatatttgaaaacacaattaataataaaattttctattatatttaaaatttacaggttagtgcttgatccaaattgtactttattatgtatagtgggtatgatagaatagcatcaaattaggttataaaatttaaaaaagaataagtgcacgtaataaattataaaacaacataagcaaaaaaagaaacgtaaaacaatataaataaaaaatttgtctcaattatttaaaatataattatataaagagatgaacatcgtgtagaattaagcgatattaattttcctttaacaaaataaacaaacaatactaagctttctttcattgcatatctatactaaattactcaattattcaacttttcattcaatattgattaattttttaatatttgggtttagcttttcattcaattactcaattatatcgaaggaatacatcaatatataagaaaatttagcttaacatacttaaaagtcaaaatcttttattataccacctaattaaaaataggagtatttatactttcaatattttttcttccaaaaaa

SEQ ID NO: 21867 - DNA, 5326 bp, Cannabis sativa
  modified_base (5275)..(5279): a, c, t, g, unknown or other
cataattataatttcaatttcaaagtctactggtgaaaaagcaacagtgactcgaggtaaaaacaagggtctctttaaagggatagaagataaaatctgggattctagccgagctgcatctcgtagaaaacagtgtttactctcgttaatttcttacaaaaatggcctataacgactggcaatttcaacttgatgggtttctattaaatgatccctaatttttgcatcatttacctcaattttggatttaggtttttggattttggattcaaatggaagggttaaaattttaggacattctatttctgggaaatctcgggttggaattttagaaccagattgggacatatttgtacaaaaataatagtcttaatttctagaagaaattactaaaccaaaaacctatgaatttagtaaacctaaaattcttacttaaccctaaaattatccaacaaaacaaaaattacctaaaaaataatcaaacaaaaataaataaagaagacaaacaatcgtgaaaattaaactataaatatcaaaaagaaaggtatagaccacttactgttctagtgagtatttttgcacaagaaagagttctgtaactgggattgagattggcgaatcaatgtatcctgaaactttcatagcttaaacgaataatctgatgaaacacgtaaaaaaaataagttagtgatagtgagggcatgcagagaagtcacgatgattttcacataaaggcttgaaggtttgaaggataaaaatggttaaatgagtgtttactctcgaattttataccttggaagtgatcaccgatagatcaaaagaaataagatctaacggatgggaacacgacaaaattgggaaagaggggcatttaatgctaatgatgtgcctcgaaatcttgaaccgccaaaacccaaagcatgcaatttttaaaatttgggctaagacaaaaataccattataatcatttaaaaatctcttttcaattaaaaaagaattttttaaggggcaattgttatacctgaaattcggctgcacttcaaaagttgacacgtgtcctgcagttgaatatgaaccacagtatatagtaaagtcatattaaaactgatattgacgagacatacgtctgcctcggagtacatagtcaaaaagaagatatttattcattcgagtagaatacatataatcacacactgcaacctcggattacatttagcgaagacagtcacctcgcaatcttaactcaaataaagagacataaagagacgaaccacctgctaagacgtagcattttttcctcattaagatggacaaggaggataactcatgttaagcgagatacaaccatccaaatcagcattaaccttctaaaggataaaaacaaaaggcaattgagcatttatctaatattatcccacatgtaattaaatgaaacgtaggaattgtacacgtttcatgaatagttacatttaaactgatccaaagaaaataactgccaacctattttcctataaataggggcagattccacagaaaaagggacgagaattttaagagtaaaatactatcatacagatattgtattctgtactcaaaaaatactattaataaaaaagactcatggaatctgcagattttaactgcaaaacggcgtaaaaatatcttgagttattaatttctaaattatttattattatttctctgaagtatttatttcttaaaaaaaaattaatttatttatgttataacacaaaaaattaatgtatttatggtatacacaaaatatcttgaattttgtgtataacataaatacattaatttttttaagaaaaaatcaaacttatttatatttataaactcatctgaaaaaattaaaaaaatagctaaaaattaataaaaatataaaaaaaaattctaaaaatgttaaaataaaaattaaactaaaaatgttatgtttaattaaacaaatttagattttttgaggaaaaaaaaacaaacttaaacttgttccccttaaatttattttttattaaaattgaatttttaatatatttttttatatctaaatggattttttaataaaaaataaataactttttagaccacttaattaatttaaattcctttttaatttcttaagatctatttcaatttttttaagatttactaaaagaagaattgaatctttgtcattttatttgtaagaggtacgatttgacagtttttaaaatttaggaggaaaatttgttaatttataaagacacgtctgttagaaacagaccttttaaatgtaacagaataatagaacagaacttaacagaatgactaaatttctttaaatgtaaaagttttgaaaatttttaacaacctgtatattttaaagaatagaataaaaattagtaattattcattaaaatataaaatatcatataaaaattttgagaataaattcttcacacatttttttttttcacgtgcaactaaacgacttattgtagagatttgtaccgtaccaaacggactcttcaattacatattgcctctagctttttggaaaacaaaaaggtatatagattatttaattataagtagttgtattatattctgtttggattccatctatataaattaaataacattttacaactcaaaaaaaaaaaagtctcatatatacgtcttcatgttcacaagtgtttgtcctcctaacttacgtacatagaattattctaactattgttttgttttaattaaagttagcttaattattaaaatagtggcaacttgctattggaagcatgtttacaataaaaacaaaacagaaagatcaaatagtcgaataaaattcataacggtcaggataatagaatatatatgagtactgctatattgggcagagttctgccggcttcatatatatggtatcaataataatgaaacatatgtcaattggcatctatttatttgtcttagcataataacgcgtctaaatttttcatgaccaataaagttaaattcacttgttttctattttgtaaaatcaagttcatgatagttttaaaaacaagaggcggcaaaacaacatgttagatttaaaattcctcatatgtattagggtattggtaattaaaatttgacttaaataaagtcattcttttagtaattgtgagtcattgaatatttaagtgtcatgtgttaatgtgtagatactgtaagtgatatttttaattcattgagggactaatttaaaaatacctaaaattaataaaataactattgggttatatattggtagtgattctaaagaaataagagccactctattctcatcatccccatcagagaaaaaaactagagaaaaccctaaaccttgtattcttgaaagatgattacccaaagatctaatcttatctatctatagaaatcattaaattaattgtctctatcaagaaattaaggtacacttccatattattcctgttttttctccactttaaatcatcaagggccttagagcatcttcaagaaggacattaaattttgtgtcacactatcaccaaatttagtatcaaaaattattttcactccaaccacgttaccaaaaattacactaaaaaaatattctttaatatttatattaatatactaataaaatcaccacaattgttatatctaaataataagaatgtgattactagtgtaaataattttcatttaaatgtgtgtttaaatttgtaatatttttattgtgaatatattttttttaaaaaaaatataaaaatgtaataaatttttacataaatcataattgaaaataaaaataatttacggtattcacatttaaatttacacacaataaattaaaaggtgtttctacaatgcactcctctaaataaaagcgacatgtgcaatagatagtttgaaccttgttttctgtgtgttaaatttttctgaattttcaaaattttatgtaatatcttaaataactatattgtacaagaccatgtaaaaagatagattaaaaaaatcttcgaatgccaaaataagtatgattacatcagtgcaacactttcaaagaggtgcactataatttcataaatataattaataatataaataaacatatataaatattaattaaatataaaaaaaaaaaaatagaagcagtgtatgacatgtgtgctacaatgcacggcatatgctgttcactatagcacacacggcgacctatatcgtgcactgtagcacacacggcaatatgatgttagatctgtcatttcgttggagaataaatcactccaaattcacaagtttgaaggctccttagagatgttcttagatctatggttatacacttctaataatatttaatattttgtttatggaatttaatcttcatattgcatacactacaacaaatacacttattacgggcgactaattttggggtgacattatgtcgcctctaataataggggtactaggggtgaatttgattctcgccccttatgtaatctggtatttttttttttattcgtaaagctttaagggaaatatatgttgcccctaaaacttttagaggcaacaaattaggtattaggggggacatgttaaaaaatactactgttaattttgggtgggatatttcctgctcataccattaggggcgactaaaatcgcccttaatagtttgaaaagctgccagtcaaccttttagaagcaacttttaggggtgacataagtcacccctaatactcaataaattaaaacccacccgatttcccttcttcttcattttgcccctattttcatttctaaaaaaaaccaacaactttcagaccaaaaattcaaaatcgatccctttcttcttctccttccttttcatcttcaccacactgttattgtgtcgtgccatcatccccgcaccaccgtgttgttgtccccgcaccaccgtaccgtcatcttcgcgccaccaccttactcttcttcttccttttcatcttcaccattaaaaaatgtatgttctttatatttttattagtttggattaacttatgttatttttatgtttattggtttagatgattaatttatattattagtttggataaaattaatgatgtctataaaaaagtgtttgatgaaatgtgtgtgtgaaaatataaagttgtgtgtgattgtttgtacacaattttattagttgtatatacatgtgattgtatttatataattatatgtgtatatatgggtgactattcaatgattacatttttattgnnnnnatatggttacatttttctttgatctgtaatagcaggttattaatagg

SEQ ID NO: 21868 - DNA, 4177 bp, Cannabis sativa
attctgacaagcattttccttttaaatttgaatatccattctgacaagcatttgccctttaaattcaaaaaataagaaaaaaattcttctatgttgaagcttaatttacatttccagctttttgaaacgtcttcgtttaagtttaactgtgttgaactaaagtaaaggtagttgagctgagatgaatcatctcgtggtgagaaatgcgtcgttagaaaaaaacttgaagattatcagctcttcttgacccacatatttctcagtacatcagagcaaagcacacattgtctagtctgcaacctttgaaactgcaagaggtggaaatagagtagccttagagcttctgacttcagctattgagagtgagaattttgttgataggtattgtgatcttgaacctctagtaaagagcacacttagtgaaaagaaacttgactccatcagaaaaggttacgaccttccgcatgaaataacaaagaaacctacaatagatggtccctgcaccactaagagcacatgctgcagtctttagtctcgcatgcacatgaatgcaggagcccgtctacccttgcatccattgtttatatccattgttgacttctttagagtatgtccatatcaaactcatcaaaatagtaatcgaaatttctctactctcttcatcttttaccgccttagatgttggcttgttccctacccccatgaagtcatctttctatttgacctagggaggtgtagtaccatcagaaggaactacaaattctactacttatcccagtttgcaccatttttgatgatgagaaagaatgaaattgcaaacggtatacgcatgagtacttcttcacatctttgattggatcaagacatgtctccttttcgaaagtacgaccattcacgaggccagccatatttcttgatatgagaaaatgaggggatgtcatgctctatgacattccttgagaggagaggaatgggaaagtgttgtttactaacaacaacctccgttaagttggactaatagcgtcttacgaacgagtgtatagagacattctggttgaagatgactcctctttgtgtaatgccagggagagtgagcagagtgctactctcatagtgcatgattaagctatggaagagagtggttattctttccaaggcctcatgtattcttttagaagaatcactgtttcccatgatcaagacaaagtcaagggtgacacctaggcccgtgtcctcaaattgccaaaagaagaggaactttgcagacacgggctgcgacataggaattgagtgtcatggcccacacctttaaaatttcaaaaaaatgatatttttttgacctttttatcttttttcagctataaaaggagttagactttcatattttagcaaacattctgagagtacaaaaattagagagcagaaacgattgagaaggattttttcgacgaagttttcaatattctcttcttttctattttcttcttttattcttaatttatatgtgtgaaggtgttacgatgaacaagagtagataaacaatttattaggatactgatgaatattgtttgacatcgatttatggttttaatgtgatttaattttctcacaattttctatgtattttatttcattcgtgcttaattatttttaattacttgatcaccaattaaataggaataaattttgacacctatgtggtttggataacttatggggtttgtgtgtttaatgccttttacatgtttaatttatcatgaaagtagaaagtttgcatgtgattaaaatttatatatttgagaagactataaattacttgagtaaacatgctatggaataaaatttagtaataggaattgaatcatgttagaccataatagatatatacaattaaaatcaataactctaaccttcaatcatcgttactttaacatatcaatttacttgcttattttattatttttattgttttattttcaagttctaatttcttcttaaatttgaataaccaactacaataaatacttaactacaattcttgtgggattgacctcacgttttgtgagtgtataacttgtaacgatacgtatactttcatgttgaaaagaaccacagcaagtttttggcatcgttgttggggatcgttagttaatatttataaaattaaactgtaacaccctgtccaacagggatgccacatgtgtgtataaatataaaattcttatttaaatactatataattatatcaaaagtgtgggtaattaaatttttgatatttaaaatcaagcataaaaaaaaaacttctttatagtaaaagataagtaaggagaactatgtggaccccctattttcaaaatattacaaactagtttattagtttttttacaacataaactttgcaatcccaaaatactactaaaatggagcatcctgttcactagggcgagccactgcgactgatatgtacattactgctacaacctcaaactcatggctgctcaacctttgctttccccttacctgcaccataaagtacccgtgagtcacagagactcatcaagaaaagtgaataaaataataaccagtaatattcagcaattcaatctcaaattaagttgcatacacatttacacaatattaatattttatattttttaatatgtgtttgtacttttttagtatattagtattattttttataatttattaagttagtgtttttgtataataattaggatattttttttgtaagatataataattagtatgttgaatgataattaacgtgttatattttaatttttaggtaattgaaattttatatttaatttttttaaataaatcttatttttacattatagaatttcttgtctcattcttaaataaatgaagatgagactagagtgaagattaaaattcttaataggcatgagaatggaggaggactccccatttccctcttgtgtgcatcactaattgcaatcattaaagaatttatgaaacaatttaagatttttattttgaaacaatttaagatttaaaaatagaaaatcttatattttgacatttttgttttgaaatcagcatattttgacattaaaagaagggagattccaacttgaccttttttttagagaaaaaaagaaaaagaaaaagagagagagatgtattatctttaagttatgcctatgattaacatgaacatatttaaggttttttgtttttcttttcttgtgtgtaaatactaaaccgtctctgcatatattttaatgctaaaaatcaacttaactcacattttaaatattttattattattagtaaggtgcaaaataaaattttgagagtattgttaggcttgttttttaaacgatatatcacatgcatacaataattctttttatttaaatcttataaataagtataaacaacacattctataattattatcggcctatgaacatgtgcaatattaatttcttattatatttcattatataataaattttattttgtacatatcactaatgattcttttctaagtaattacatagaacaataattaattgtaatttgtttatacatgataaaatttagaagatataatttaaaaatgaattaattttccaatataagaaaatggatatgaagttatcttttcatttgatgagtcatactcacacacacatgtataataaataattttattaccataataataatattgaatttttttatgagagttttactaaaatctaatatgaaaaaaatgaattaaaatataaaataattagaagtaatattttaataccttctttactaatctaaactgaatggaaagaaatcagattattagattgaaaaaatcagattattttattttatttacataattaaaaaaaataatcaaaatatatataataagaagaatgctttaatttaactaaatttcctttctaaagaacataattatcttttatacataaatttttgcataatacctttaatttttaattattaaaaaactaaattaagaaagttcatattctttatgaaaatggtcatcaaaatgtgaaggaaacataaattgatttccctttttattttatgaattttcattttctttaagtaaagccattaaattaaaaaataaatactacttaaaaaaattaaaaataaa

SEQ ID NO: 21869 - DNA, 4497 bp, Cannabis sativa
  modified_base (347)..(353): a, c, t, g, unknown or other
  modified_base (3133)..(3133): a, c, t, g, unknown or other
gtatgagtttttataattaagtttgtttgcacattttttgtaatatattaatttttgttgtacattaatgaaaaaacccataaattaattcttaaaaactacaccataattaataatttgtacttataattaattataaatattaataattagatccaactaacaatactccaaacctataatttttcttatttatttacctcataactttttataattttaattaattctttttgttgacctcgcttttagccaacgacagtgagtttaatttgtaagtgataagtagtataacgaatatataatataataaatcaaataaagacacgagaattttatagaggttnnnnnnngagcagttcggtaatagtctaatcctcttagcttgtattgacttaagaataaggagaatagttccttttcttagagctcttacaatagtatctctgaatatgaattcttagatagatttttctaccctttgcccagtgagtatgaatcactatttatggggctttaagcttgggagggaagaattttccttctaattacaattgatataagcggaaagattgcgtatttaatacaaaataccctgattaagggatgcagacagcttgccatatctttgtgatctgatcccaaagttatagggatttcttcgatgactcacgatgcgaaagctgaatttgctaagtggtggcatgctgcgcagattgctcactgcccagttaggaaggctttgtccgagcgaatatatgttgtgccctgttcagcatatttcttgcgagtagatacatggagttgattccaagtgtcaccattgtgtgatgccacgttagagtacaaaaattgggataacatttgccccccaagtctgtacgggacttctaaagttgcgtgtagacttcatccacactgtccttgtgtttggatgggtgacacctttcaggtgcgtctgttcgggattcggtatgaggctaaccaggcgtctcttcaatttttggctaataaatgttctaacgcaattaatgcttcgaaacccagttttctctcacaaagtttgacgattaaacttgattacatttgattcccaatattttcttttgggtggaaccgaggcgtctaaggcatttgaaacgattaccctttttcattctagtgcctattaataggactaagcattattcacaaatccatttttaccaacttctccattgaacaaactcagagcaaaaagaagtttctggcttcaagtttgccgtgagattttcacaagaacaatccgagcagctttgtttggattgaactcaaacgtcgatcagtgagtaatttttcgattccttcttcttttactttgcacatttagtttctgaatacgttctcgacttcgcggtagaagataggtggaaaacctaggtttagaaactttgtgattttcctttgcaataatctgtgagacttcacaattcacgatgctggtctttggtcgtacattctctgtctttcaccttgcttattcaaagcttcgtgaaattttgccctaaacctcaaaaatttcaaacttctgggttttgacttattgttgaatatttctattctataatctgttgagtactcttggtcggtatatttgcctgtttattgttcgatatctcgaccaaacactcatctcgtgtgttgtcttttgtagatgaaccctggtgagttttggggaagcaaacaccgaattgaccaggacttgcttcaacttctatacgaggatcactctcgtctttgttttagtctgtcctcttcaagtgacggactttccaactcaatccttccgtccagccacaggatgatggatcgaacaaagcagaaaatgtgtaaggttagcgcatctgatctccacgtggcccagctcgccacctttcctagctccaacaagatccgcccgtccaagaggagggagagcatgtgggggacgtcgaagtccaagagattgaggaacagggcgatgttcgtccgggtagcccttccgaggcagaggaagaggaggaagctgcacctccaaattttggggaatacaacaaggctggggagccagtagatgcgggcggcgatgtcctggttgaaggagtagactacgtcactgaggagcttactgctgctgttcctcacaggaggcaaggtgccttaggtgccagatgggtgagccctccatccaagatcactaaggcacgcctaagggatttggatcagttcggctatctgggcgagctagaatgttatgtccctgcctcaaatcaccgagcctcaaacccaaagaaggggatgtgtgccttgtcgggtgcccatactaaacaaggggcaatgctgcctctacacccatacttcaagaaggtggcagatttcttccgcctttgtccgacccagtttactcccaagggcattaagtatttgttcgccctgtttgtcctctacgccatccagaagtggggcatgccttccccacacgaggtcaattagttttttgacctaaagtctacccccaagcaaggtaggtcagggcacttctacttttcccagcctgacttcaagtggttgacagacaccgtggataaggccgtgagcaaaattgggaattttgttgacaagtattacatggtagaaggcatgggcaccacctatacttggttccagcagatcactatatattaccgtccacccttcacgctagctcttagggacagagctgaaaggatcgctcagctgccggatgatgcccagaatatcactttgttgacctcggaggcaaactttgtggagtatgggctttatccatcagattttgttcctcaacctgtgaaggagaagaagaggaagtccagtgctggtcgggttgagggagctcatcaggagaatgaagccattcaactaaagcgtgaggctaaattgaagggaggtgcgggagccaagcagtatgctcaggagcattctgagtaggaggatgaggctgaggaagagcaggagacaccgctcaaaaggaaaaagaatattttggtcaagtacaggcccatcgaacatacaattcagatcagggagcccattctacctgctcggccatccactcttgtagtaggaaaggggnaagccgtcctggaggagcaagaagactcgtcggatgatgatgccccatcaggttttgctcatgcagatgcttctgccaaagtgtaggatactccatcttgcttttaaccttcttgattattatgctttcatatttctcatgctttttcctaaccatgttgcttttatttcatgcagacatgtctcagaaaatgctcgaagctctgaagaagagagtgggaggaagctcgggcttatctcctccggctaagaagtctaggggcggtgagacaaccccgtccagggagaaagcaccagctgaaatggtcatcgacctctccgaggaacaaactgttgtggacgctgctgtcccaaaaatgactaagtccaaagactctcgagggtgtagctcggacaagccagagcagttgaagggcggatccgagctggttagaagttgatctgagcagatcaacgcccctgccccacgtccggtgctgcacccaaagactaaaagaggcaaagacatgctcacccactacatgactcggtcggtccctaaggtgaatgagcagctggctggggcagacaatgacctttctctggagctggtgatgggaggagtcctgaaggagtttatgagggtaagtctttcctgacgatttccttttgtccttcttcacttagttcagatttaaatattatttctctatgcagatcggtatgaagatggcttatgcttattcccgagctaagtcgactgcctctaagaatgctgccatttccaacaccatgcgggcggaagtggacttggccaggaaggatgctgatgaagctagggttcagcttggggctgtccggatggaactgggagaggttaacaagaagcttcttgctgctgagaagaaggtggctgagctgactgaagatctacaggcttctaaccaacttgaaactgccattgcctcctactcaaaagaagtgaccagccttcaggaagaaagggaggttcttcgagctgtcttccgcaggttggaagtagagaatgctttaaagacagctggtctcgagatcttatatgacttatggaaggctaatccccaggcaaactttgattacttgggcaattccaaagacatgtttctcgagtattgtgcttctcaagtggcatacggggaacccgaggcgaccacttctacctctggccagaatgttgatgtgcccaccgctcagacaaatgatcctccagctccaactgacccagaagaccagtacaaagagcttgggactccatccatttgaatattttctttttctatctctttttaatttgtccggccataaggccttttttaagacaaagtgaccgaccaagcggtctttaaa

SEQ ID NO: 21870 - DNA, 3911 bp, Cannabis sativa
actgctttattttacttttcctttaccctgaattctgagtcccttaatcctctggttggagatcctgaatattatatatatatacatcttctctccacaaaatttcaagttttgcattttgtagtggataaacaactactcactaaaatgcaatttatttctggatttcttgctttgaaagctgtaggttatgggggcctatttattgcagtttcaacaatcatctttgcatggtgaaaatgattattgaaagagctttttgcggttaaactcgtttgattatcattctacttgtacttaatttttaaattttgatgttaaaattttttaaattattgaattgttagtaaatttgaaatgtcatttatttgttatatgtgtctacttttgtacatatgtcacatttatataatatatttaatattattattaaaaaattatgaaaaacttataatatttttttaaaatatatattgttttatataattttaaaatgaattttgaaataataatattaagtgtactaatataaatgtgcacgtgtacaaaattacaaaaatgtactcataagtagtccataataacaattaattgaatgataccttaaatttactaatagatcagtaacttgtaaaattttaccgtcaaaatttatattttaacgattaagtgcaagtgatagttaaaaaagtttaaccaacttaatactaaaattttattagtgccaaatgatgtttacaatatcaatggaatcactgtgtacttttctgaagatttgtgaaagatgggaatgtaaatgggaatttatattttctacacttcgagcaaaattctaaggcagcaatcaaaacatccagcttgtgaatgattaagaaaactactataactaaaaaatataattactgcaaaattttgtgatgtaaaatgtcacaaatataaccaatgtacaaatcccaattaggcaaacaaggctatttgaattcacaatatacactccccaaaaaggggggaatttagaagaaaatccaataaagacagaacatgtcataaaagtatttataatcccttttttttcctcttccccttcctctgttacaatcaatcaattggtaatatcaaaaaccacctggctatgttaagatggatatttgagtgggaacagctgaacatgtaaacaactgagtatgaacatgggatgtcacttggattgtataagaaattttgaagtgtttaaggcttctgctttttctcgacgtcgaaaagcacgcatacatctgctgctgtcttcaactgaatttcaaaacacagcaattaagaacaattaagttcatgtaaatattcaaatattattccttcccattcaagaagggtaactatttgtatcagtcattaggcattacctgtataacattaacagcttgcttgactgcccagccaaataaacttaagataactagaaaacaaagcagtggattctgtttaaccgaacttaataaaacctgaaagaggtagcggaaatcagcataacattggtgcgaaactttaacaatgatgattcaagtacttacatccattaaattctcagtctggttctttgcaagtagaaacaacagtatataaagaacctgtgaaaggtaatttagtcagattacgaaaaatcactgcagttacttgaaaaagaaatacggtgagcaaatagagaaaggaaattacctcacatgccacacagcagtaagccataaacattcggtttccataatataacctgaaaagccaactagtgctgtcttttacatctttatggctaaccttgcccgacaagaaagtactgcaatcaaagcattaaggtcgaacaaaaagaaaaaattcttagtttagaataacgtttcagccttgtttaatgattaaataataatcaaatgaacaagagaaaatacctgtacatctgcaaccagtggctagaaatatctaaggcaagcaatgagaggaaaactaggccaggcctgcattaaaaggcaaacaaaagcttaaaaagcttatataagttatggaaactttaaatgtacatgaggagcatagagaggtaatattaccggtacacttgggaaagtataaccaatagacaagcagtgctaatcctgagatacaacgctatataaaatcaaaaccttaaaaggacaagaatccacaacactaattgattgataaatagtactttacattgtagaagttgaaagattgataagatcacctgtctgttatcatgtctaaaacagctccaaatgtagaaactgaaacagtgaatagaaagaagaccaattatttcttaaaaagatacaaagataagcactattgataatatatattttttatgttctagatcgtcgaaaactaaatattgtttgttggtagtataatatatacatagtatgatcagcattttggtaacattaccaaactacattgtgacaaatacaacttaaattattaccttggttgaatttacgagcacaccaaccatctatgccatcacatacaaagctgaaaaaaacgcattctcattcaacactttctaagtgcaagtgcttaataaaatacttaatgctaaaacttctgaagattatttgttacctaaaaaagtagagaacagagaacagctttttgttggagaagcattgtgcaaaagcaaaacagttcattagaatccttatgtaacctgcacccaataaattaattcataggagttatggtcaatgaagatcgtagtaacattcacagcaacagacattcagttaaacattatggtggattcaatcaagggtcttttacaaatatcttcctaaagatttatctaaatgttacagtgtacaatatcagtagaacttggatgtgttcctaaatactatcttcatcaaatgaaacttcaaattacagatatatgtatatggtcataattaagttcaaaaatatttgataaggaaaataaaaaacaatttgaaaatcataagttttatttccatctttgcaactaaagatagattagaattccaaatggggtacttgttaaatatagcaacctaagagaaaaagaatcaatacccaccaatgatattaggaatataaaggtaaacagatagcatagttggtctaggagcagctttcccggccattgaaacccaccacaattagcttaaaactgcatgaaacaccatcatcataatccattttcattgttcatcaaatgcagcacaaaattttcgtaaacaaaaggtcaaactaatcaataaaacaaaaaatgggttcattgtattctactacgggcgaggagatctcacacacagcagatgagacccctatttggcgacttgggaagatctgggatgagtttgagtagtggtatgagaaatgctaaagaaaaacgaatacgcagagaaatatatacatatacataaatatatatatgtatatatatgtaattatataaattgggaaagaaagaaagataccttgaagggcagaagagagttttggattggaatggggaagcgaagttgtcgatgttgcttcgtcttcgactaattcctttcttcagagcttaacttttgcagatttgaaatgtcttcacccatcatttttcatattctcaatatcaccccaaaactataccaattcatattcttaaacaatagagttttttcgggtaaaccctcctaattgtcgttttacttgtatttaatattttaagttgaaattttagactacaaaccttcaaaattattgaataatttacaaatttaaaatgccatttattttccataattaactattaatatataatgtttatgtatacattattgtgcatgtggcacgtttatttaaaaaatataaaaattattctaaattttataata

SEQ ID NO: 21871 - DNA, 3170 bp, Cannabis sativa
tatttgtaaagtatattctgttaagttaaaccaagaattgtcgttagacgttagacaggcacttttaatatataaagatatagtataacaaacaacctagctataattattcgatgtatatatgtacataggaattaattccatgtattttgtttggtagaggggagagaattaaggatgaaagatagagttaaaaggagaggaataaagggattatgaatttttctgtttttggcaagagggagactttttttccaaacacaaatttcaattcatacaaaaatatgaaaatctaagaaaaagaaatttgtttatataaaaaaaatatattttttaccatttaaaaataatgtgtacttaattacttatatgaaaaatgataatataataattttaatatttaatttctccctattcttcttccaattttacccttacttttggtaagatcatgatgaaaataggaaagaattgagtattttggttaaaagtatgaagggaggatatatttgattattctttagttttgtttggtataataaggaggaaagaaagaagtattttttagtatttaaaataaattatatgtgttgtaattataaaaatgcatatatatttttttcttgattttttttcttcgggggggcgactgccccacctcgcctctatgtgggtccgcccctgattcaaagccacaacacaccaccatccaaaatcccacatctgaccttgaaaatgaccctagaccacatattctcacaactgatactaaaccacctgcttcatctgcacctattcgaagccatgccatgcgtacaagatcccaaaatggcatctctaaacgaaaatcatatattaccactaaacaccccttgccagaatccctattaccctctgaaccacgatctctcaaagctgcattaaccaacctcaaatggctaaaatgttgactcttgttccatatgactcctccatgaacgtgattgggtgcaaatggatacatagggtcaaactcaacaaagatggctctctaaacaggtacaagtcaagattgattgctaagggttacttgcaagaagttggcatagattttgatgagacttttagtctagtgaaacctacaacagttcgaacagtgctttcattggctgtaactcataactggaatgtatctcaattagatgtgagcaatgcgtttctaaatgggcccttaaatgagactgtgtatatgtgccaacctcttgaattcgaagatctagatcacccaacctatgtctgcaaattacaaaaagccatatatggcttaaaacaagccccacaggcttggaatgacaagctaatacacactcttttctcttggggatttcaaggctctcgtgctgacaattcattgttcatctatggaactgatacaaatcttgtcattttattggtgtatgtcgataacatactcattacaggtcctaatgccaccttaatttccaagctcatatctgatctgaacatgtctttttcattaaaagacttagggccatttcactacttcttaggagtggaaatatatcgagataacactggtatgtacttgtcacagacgaaatacatcactgacttactggtgaaacttcatattgaaggagctaaatcgtgtcctaatccaacgaaggcccagttcactacttcttaggagtggaaatatattgagataacactggtatgtacttgtcacagacgaaatacatcactgacttactggtgaaacttcatatggaaggagctaaatcgtgtcctaatccaacgagtatgagtctcaaattgtcattaactggaggagaaccattttacgacatcactttgaacataagcaccataggtgctctgcaatatctatctcttactcgtccggatgttgcctatattattaagaaactgagtcaatttcttcatgctcccacgactcttcatagggaatcctgtaagaaattacttagatatttgaaggccactgttaaaaatggtttgtggctacaaccttcattggctatgacacttcaagcatactctgatgctgactgggccagttgcgtagacgatcgtaggtctaccggtggctatttggtgtttctaggggaaaatttgataagctggtccgcgaaacaacaggtggtggctcgctctagtacagaaagtgagttcagagcattaactaatgctgcagttgaactaaaatggctttgatctctgttacaggagcttcaagtgtctattgttcaagttcttgtcatttgggttgacaatcaaagcgcttctgctttagttgcaaacccagtctttcatatccgatctaaacacattgagatagaccttcattttgtcagggaccaaattttagacaaataggtttcagttcgatatgttccatcattggaccaagttgtagacgttttaacaaaggcattgtccattgagagatttctgtactaaaagtccaaactaaaaatagtgtctacaccatttagtttgagggggattttagtacagcggtataatccagttagttctactaattgttttttctaacaatttcttgatctttgctttatgtacttaattatgttactctatttttcattgtatataaatatgtcagttgtaaataaagaattcaagttttggttttatgttttctattgtgctctattactttccctttcttttcacttactctatatattcttaagtttcaaactctaaaactctaccctatctttccacttttctctttaaatttttatttccttcctcttttcccttataccaaacatagttttagagtgcagtgaattgtttaaaaagtaataataatggacccaaacaaagctttagtattaacatattactggtacaatagaaaaagtagtagagtaataaagtggtggttaaaataattactgaaatgaaaattaataaaagagtggggattggaatatattatatataatattatatatagaaaataatgagactgttttgttgggagtcataaactgacggcgtcactgtccccaaaaacgacaaacttcaaaacaaacgaaaccaaacaaaaccataaccccttcactgtaaaacgacggcgtctcagccttttcttggtcggcttgtcggaccat

SEQ ID NO: 21872 - DNA, 2987 bp, Cannabis sativa
gactaaatcctcgcatgagaatggttcgtctaatggcacatcttcaatgaaaaccgcgacatcctcatcatcttctcatttgtccccacgagcaagcaattcaaagtcttgccccatatcctcaatttcattatttggagcagctctgggatggataaagcttccttgagaaaatacaatggattcgcttccttgcacttcaaaaactgtcggtacttcaagttcttgaaccaattgagctatttcgccaatagaccatgaagcttgcaagtgcaatgttgctagaacctcatattttgacagcgatgttagaataaagttgtcatcttttttaggttcatccacaaatactcctccatcagactcgaagatctagctacctgagagatcgctcatctgaaagatagaagatcttttcagcgtgttgtgcatgcaatttcaagaaaagtgtcctcacatgcataaggtgacaaaaataaagcatgtaaaagtaacattatagaaagaaaaaaaatacaaatattcatgctatttttcatatcccaagtgaaaaacctatagacatgtgtagacattcatagtattctaccaaaaagtgtgagtatttgtagttcattataaataagatgtgaatactcagatcataggtaaaaaaatttcctgaaaaatcccccttttgacttatttcttcttaaagagttatttcccagaacttatcctcccattttcatactatttctacccaaaaaactcagaaggcacgcgattattcaaagaagatactttaaactaacaaaaagtttttagagaaccaacctttaatctaaaagcctattggagttcatgagtttgattaccaccttgaagaattcttcgaacctcaaaatgatctttagcgaaagaaaattcctcaaagttgactaaaatttcagaaaagttcttggaattttaaagaattttttttaatgaaatctaaaaatgagagggaaatgaaaggaatcattttgtatcaaagaattttaaatacggatcagtctcatccgttaagatcgtgatatgtggcgtttgaaaaatcaaaagtcatccaatccaacagttgtctcaaaccacgcctgcgcaaaccctaaagggttcgatgacgtgacatcttgggaagataaagcaataaatacgattgtcatttaaaaaatctcaacaagacaatcaaaggccatcgccatgtgacatagcaactcacctgtccctcgtgattagtttcggtacttgacaaatagttgtcatcgcaaaactagggccatgtgttatagtgcgaatattttgcctaaatacgataacaatctcttaaaaagttacacgtggagccagtaacgagtgaatcaaagaacataatgaacacgaataagagttcatgtatactcaggattcagactgatctactaatgatcattgttgtgatatgaataactctttcatggtaaacgacatgttagatgttattttatatcggtccagtcatgtataattgaattatacacaacacatttaatacatgtctatccacatatgtgattcaaatcaaaatcacacacactagaatatagtgtatagtaaattgtacttgataattctatattaaagattccttactttaatacactaccgatgtattttattcatattgtacaatcttaattttcgtgtacagccttatgaatatgaaatttttagatatttattaatcatttaaaaatcaaaattatctcatcatattaacttcctacatattttaaactccattttattttttatttattttatttctataatccaaataattgccccaattcattttaaaactaaattcataatccctttcaatcagacccccatacctctcccttccccctgaaactaccatacctgccactgcattatctgattttaaagttacaatatttataacatgttcttcttgttccaaaacatccctagaaagcatcattagggacatagcaaaatcttcctctggcaaagtatctgaaactgaactcaccaaatctgaatcaacatcagcccaattaggtattcttcccaaggcattgggtcgacgattctatttggatcgtcatcgcaagtgggtttattgactctgttttgctttccttgtcttgaatgttgacagagccattatcggtggtggggaaagagaacttgggatggacgaagggggcctaaggatcttagggtttaaatagtcagggaggtctgtagtggtctctattttggtcgagcgtcactagaggtggttcattggcactgatccaagagcaccaatggagagagaaaaatctaagaaagggtgaagaaggatgcgagtgagtgagggtcgaggtttctgggtcttcgtctggggtggtcgagctcgagtcacgaaaaacaagagctaccccgccagggttggggctgcctatggctaacagagaaagagagagatcacagaagagagaaagaagggagaagaaatgaagagagagagtgaaaaaaaaccaaaaacaaataagaagaaaaaaataaaggacaagaaaattttgtttttttaatgattttctttattttaaatttaattatttttttttaatatttatttatgtggatctctaaaaatgtgccatgtgtaaattttgtacattgtggcatgtcctacttggcacttaatagagccttgtgagcagaagtgtaaaaagcaaaagaatgtgagtttggtaagttttactgctaaaaaatcaatttatgtggttaagtgtcacaaatcgtataatttaagtagttttactgccaaaatacaagaattgtaacataagagtggttacaaaaattgaaaattattttgtaacctaaggatcacatttgattatatgtaatgaagtaagttattacatatggaagttataaaatcaataggataagtttctagttgttagaaactg

SEQ ID NO: 21873 - DNA, 1950 bp, Cannabis sativa
gttggccatgaactcacacctagttcacgccacagccgcatctctccatcattcacaacctaaattattcagcaaaaagtaggaaaatgaaaacaattcagttgaatgtcaacatgtagttaagctaaaaataggattgtccgtcagccttgtataaagtgaataggttgatagaaattttcaaagttcactgatcttaggaatttggggtagtattattaacagatgtgagtgtcaaacactaagatattctacagccaacaacagtgacatctgtgtagatagcagtcggaaagaattgtggcggcactacatgcagagtgagtagaaagtatttttcaaattcttgggaaaaaataaaaacaaaaagatgaaaacgaaaagaagaatgaaacaaagatgaaagttcagaaacactgatagaaatcaaatagcgacatatttgttttaaccagtactatctaatattgaaagttgaagcttactggatgattaatgccataacgtaacactgcattgcgaatggcttctaaatctttctcattatcaaactttgctgagtggactcccacaactgtgaactgcataacaaaggatgctttacaaattacacactaaatgtccaaatgaataggtaattctcttccacgagtcataaaatcacacaaatttatgattttgtttacttaattaggagcaaattggttaaaccaagactcaacttgttgagaaatttatattttccaacaactgaacgcatctaaaacacaaaataataattaccggcatatctttgtatttgttctctaaaaattccagatctggtagcacatgtatacaatttatgcaacaataagtccagaagtcaagcacaaccacttttcctttcaactcctgccaaaataaaaataaaaattatactctgtaccatatatcctgtttcaccaaatctaaatgttcaagtcagctagaatttacctggctaaacttcaggggagctgtattcaaccagtccagtcttggtggaaattctggcaccataggagcagttccacttccacagtgaaggattgtttactcagaacaggttacacatatataaatctcaagagtaattactgaacttgaacagaaaagaaacctaaccaaaaactagaaaatatgcaaatcagaagaggttaggatgagaatttattacctggtttctaagtcagctatatatttcacaagttgttggattcttttagttcttgattttcctacaaccaacaaaagaaaaattgaaaaaactgtagttccaaaataaggacatgttcattatccaagagaagattacacatggaaataccccacaaaaaaaaaaggaaaaaagaaaaaaaagatgatgatgaaggaacccaaaacaaatgtgacagagcagaagcaatagaaaacagaaacttatagtgttattaccttcattttgaccaaaagatggttgagtggcaccaaacaatgcattccaaatagcttttggtgatgcatactgcattgcctgggcattaatggaagttcatatgtttaccaaaccatgaaaagctagagagaaaattgaagccattatctttgcataattcacttgaaattaaaccgaaaaaactaaaatgatatgtttactatcaagctttcctttctcaagtaagtcggaccttccagtttgagatggcgaaagctaggcaagaaagagaaatccccaaacttccatatcttattatatctcgccgagaaccctgcaacctgtccatgaattatttttccagcctcaagctagggttttccaagaacactctttaaaatcattgcaaatggggagcacaaaagagtagacaaaatttgctcattattaagtgataataactttgcaggaaacatactttggacaggaagatcaaaaagaaattaaaaataatc

SEQ ID NO: 21874 - DNA, 2052 bp, Cannabis sativa
atgatagactttaaaaaagagggtaaaaataaaagaggacaatataaaaaggtatagagtataatgttctctatttttccatatttatgaagaaaaaaaatctcatttaccaattaataaggcccattaaaacaaaagaattcgggctaattacattgtacatccactttattttacatgttttaaattttacttttattttcatattctttaagatatactcacttttatagataatgtcctaattataccccttaggttaatgtaaattatgtgctagacttaagtgtagataatgtcctaattataccccttaacttaatataaattatgtgaaatatattgagcaactcacgaaatataatatgaaagcattttttaattaatggatacaaaaacagacatattcctcacctttatcccaaagaattctctcacgcccaatgtagcccaaatccattagttgttgagatttagaaacgagcatcgtatattttacaatgttcctacccacactgtagtacaactctccaattggaagtgagttgatactggataggataataaaagccggattttccagttaatcttccaaggaaggaaggaactgactcagagtagttatggcttcaatcccgtggactataacttccaccaccaacctcaccttaactcctaatttatctacttctctccccaaattgaactcccaatttgtgggtagaagaagaaatagtaggcttggttgggttagatcttcctcttttattggtccctccaacgggtccagagccaagtgttggttcaaatttggcaaaaatggtgttgatgctgaaggtgctggcatttatggcagtcagtcccgggatgattttgatagagatgatgttgaacaggttctctctctctctcttgagtgttttcttagctgtttgttattttattattgttgaaacttgagaagcctatttcaagattaattctatattttttcttaaatgtaatttgattgaaatttcagaaaataacataaaactatctgatattgttagagacttactccatttgaggattcgtatgaacaattatctcaggaatattgttcgctttcaaaatagaaggaacaaattgttatctttatcatggtgttgggtcaatgcagagtagatgtattgttaaattaaaattaagttatatctcaaaatttataagcaataaatcgagttgcatcatcttataaatgatattaatattaagtttccactctctaacaagtggcaacacaaatcaatttacttggttatggaattagtgtgaggagaagtgaaaagtgagaacttgtttgtgttgtgaacttgtggttcagtactttacatggtcttgtcgtgcttttaattcaaaccccatttgctaatattcgaaatgctatttagttgtggtgtggtcattggcagaactgttgttcttaaatcatgatttaatggttgtagtgagggaaactagtgtcaaaaagggaacataattgaatgtcatttttgtttttcacagtatttcaactacatgggaatgctggctgttgagggtacatatgataaaatggaggctcttctaagcttaaacattcacccagtagatatcttgttgatgatggctgcctcagaaggtgacaagccaaaaattgaggagttactaagagctggagctaagtatgatgtcaaggatggtgatggaagaacagcaattgagagagctcaaagtgatgaaatcaaggacttcattcttaatttttcagttcaaaaagcatgatattcatacattttcaagtaaaagtttattgtagtttggttttgtttttattttctagttttcttatagcttaatctatggtacctgcttttgccatcgaatcgaaatactttttctttttcttccatgtagcaacttgaatttacattcttgtctacttctctgtttttaggattaaaactttgaacttctgtgtagaaagaaagatatgattgatttgtaattagttggaagaaagaaaagttc

SEQ ID NO: 21875 - DNA, 3315 bp, Cannabis sativa
acctttgtgattgaggctatagccgaaaaatgtgcatgaagcatatctaaattcaagtttatgtttgttgtattgccttatatttggaaagaacttgcatccaaatgttttaaatgatgtgtagtctagtttaatgttgaaaagagtttcaaggggagactttttgcctaaaacttgagtaggcaaccgattgtgaatgtatacagcagtcctaaaaagcttcatccaaaaacttgagggcttagggaagcttgagctaacaaagcaagaccaatctcaactatgtgtatatgtttgcgcccaactacaccattttgttggtgtgtagtggggcataggtgtctatggtgtattccattttctgtgaggtagcaaaaaaattatctaaattcaccccaatcagtttgcaaagcttttaggggtttaccagtttgaattttttctttagatttaaagtttacaaaaactttgaatgcatttcatttggttctcagcagatataaccaatttaacctagagaacacatcaacaaagtggatgtaatacttgtaaccattgaaataacttgtgtgaaaaggtccccataaatcagtaaccaccaactgcaatggttttgaaataacaatattaaaagctttcggaaagagaaatttgtgaattttcttgagacaacaggcataacatatttaaaatggagaaattttatttcttaaaggaatattacaagattgcaaaactcttcatacaattttctcaaatggatgtcctaacctattatgctatagagtgaaatcattttcaacattagagttacatttgacatagctagatactgtaggtttacagttgttgtgagtgataacaaaagtgctctttcatgcaggaatgtagctattattattagaattgagttgctggagtgacacaggttgctcaaattcgtgccttcccatcaacaaagtagaatgattcaacttgtccttaacataacacatgccattgtgaaattcaaaaaatacattattgccatgagaaaattttgagacattaattaagtttttggttatttcaggtacatgcaataaattgttaagggcaggaggctgagaagactatttggggaggtgaaaggattgaccaatatgtttaatagacaaacctgagccatcatcaacatacatctaatcttggtcatcatagtcataatagttttccaagttgtgaacttgtgtggtataatggtttgtggctccagaatcaaggtacgtgatagcattaacaaagtttcttgatgttgttgattagcctgtgtctgtgcttaagtagaaggttgagtactacaactgtttgagcctagagaagtgttatcccaatttttgtcctcctaacatggcatacttacctgaacaaaattagtgccacgtggcattacagctcaccaataggaaggtcaagtgagcacctaagaaaatgaagacctcgatactcaaataggcatcaagtgatagaccacttgcctcacaagagctggccagccacccctaaacggctttatgaccggtcagccttgggactgcaccatgactggctagcctaccctccacaagggcctagccagccaggaggtgatctacagggttccctgtacacttctacacgtggacatctcatgggctgcaaattgggccataaagcctaacaaaataaatgaataatatctagattcaatggaatttttttttcttttgtaattaactgataaactatgcaaatatatagggtgtcaaactgtaatatagggtttaggcttcctatataaaggccttaacactagcctaaaaacctatgttgaatctaagcctgaaacctacctccaagctctaagcctaagtctgacaatttccctcttcctcacttcctctctcacatgcctacactagcatcctctcaacactagagttttgtaattcctgattcatactttgtattcctaagggtgctatagcagatcccatctatagtgatttcgatagtattaaccctcggtattaatgcaactaaagaggagtaggtcattacccactatcataagggggccgaacctctataaaaaatctgtgtttattgctttttaatcttatttgtgaaaacatgtggcaagcatcagatccatacgaccccgctgtcggttgatcactttttgaggctaatagtttggttctttgattgagagcatgaatgtcgtatctgatcaaccatggtgagcacaagaagaactcttatcgcaccatctgcatcttaaactcttcctcatgacccacagattgtagctctaggtacttaagttccagtcacaactagaacccccatgaacacggcagatgtggtgaatcctatcaccataacaggcgctaccagtctggccactatagctggccaaactaatacaggcatcccggtggatccaagtggcaggccccttcctctaagagaagacccttcattggcaccttatactgaatgaaggacccatgggcagtagcacccttaacaataactagatctcgactctagttttatgctggagggacaggaccaggagttggtgagccccatgttgatttaggagaagatcttaagtaggccatactcagggaagctgtaggtcgtgcaggctaaactgaagaaccacgcgcttctaattgtgatgtttttgctcaaaagagatgcaaattcttgagatggatagatggccatgagtacatccttcgatctcaccaagaaaagttagattgccgcaaccgagaggccagcaatctgataagacaattcaactagagaactgatagaaggggccaggatctcctcagagattcacttcaagaaagacttcaacccagttcctcaggaactaggacagatcttcccttgccagagggaggacagacctttcctcaaaggtcaaacagcgaaaatagccagatcctggcaactagcggcacggggcaccaaccagggatctttggctcagcaactctccctattgtgtagcgattggtcggccaaccatcaataggagtacccaaggggagcaaggtggccaaagatcaatcttcaactgacaaggaccgggagcaggtggaaacacccaaaacaacgatttaaggagtgaacccaaccgctttagacatctagatccaccaaactccagcaattgttgtgatctacccctctcaagacacaaccagcagtaatcgaccgtggagtcataggcagccagagccttccctttccagggctggccggccatggagg

SEQ ID NO: 21876 - DNA, 3257 bp, Cannabis sativa
  modified_base (1154)..(1176): a, c, t, g, unknown or other
  modified_base (2188)..(2191): a, c, t, g, unknown or other
tttttgaaaaactttaaattatttttaataagcaaatcagataaaattcattacgtacataataatagtactcacaaagcacaatatacacaaatcatatcatttacaataaaaagttagaaaatcctagctccttcactaaaaaaccaataagttgttaatagtaaatcatcaaaaaagtgcaaaaaatattagatttcttacttaaataaccattagtaaagtgatagtagagtagggccaacctaaatattagatagtttggactattacataagacctcctttattaaaagactctttttttttttttcatcttccctttatataaatctagataatattatattttttttttttgtatattaaaaaaaaattgataaaatgtgtagtcccagtacacattattttcaaattcttgtctattctattttttttttctttaaaaactaagtatatttaattttattaaataaatgtaaaaaaaaaatataaagtattgattgatagttttttttagggatttttacaatattgaattttggataaatttttcaattttactatcatacggcagaaattacatttatacttttcaaattctcttcttttttttttctcttttatactatatatatatatatatatataaaaaaaaaacgaaacctccatcttctacacccacggacataactaccataggaataccagaacagccaaaaaacaaccattaattctggtgagattgagaaaaaatattaaaatcgacgttaaataaataatcatgacaaaataattgtaaaacaacactaaaacaaatcaaacaaaagaaaagagaaaaagaattttaaaaaactaacaattatctgcacagcctcaacaccagatgcaataacaactatatttatactgcaaattactcttatatgggagtctagtatttttgtactgtgcttagattcgtgtagtgctttattcgagctgatccgtttttcttaaaaagaccaacttattttttatacaggctcaaattcctgctttatatttttgttacaattgataatctaaacgctaaaatatatgtattaaaataagaataagttgaatatatattactatattttaattggtaaataaatatttattattattatnnnnnnnnnnnnnnnnnnnnnnnttattattatcaaattattagacatttttatgtgttgtatttttgagttaatttattcatatttttgaatttgtcctgtcgtgcctaaatttattttttttcgtttaagtcaatattttttcacgtcgtaccatatcgtgtttaagcacatatttttttgtatcgaaattatgatcgtacttctcgagctcatactaatttcatgcagtattaaaaatcctaatccgtattcacagaataattatatacggtgaaaaataaattatagtgatttttttttttttttttcgatcaaagaatatttgtatatatacatgcttaaaagtgttggaactaaatgacaaattaatatatagcttatagattctcctcatcttagttttcttgctctcataattggatcaatatatatttgcagctaccgcctagagctagctagtttataattattctaataatctcatcatcatcatcacctagctatactatataaaatgtcctcagatataggtaggtatatatataaatcataggatatatatttcatctataagaattgtcggaatttgaaaaagttaattattttccaaggccaagagcatctccaaggagcccactaaatttgatgttacactatcactaaatttagtttcaaaaagtattatcactccaactataataccaaaaattacactaaaaaaatattccttattattatattatttttttaataaaattaaaaacattaatatcatattaattaactaaaatcacaacaatgtacccctctaaatgaaaaagtgatacatacaacagacaatttgaattttattttcggcgtgttaaatttctctgattttttaaaattttgcaggctatatttaataactataatatacacgactatgaaataataatagactaaaaaagtctcttgaatgctaaaatagataggagtatatcagtgcatcacttttaaaaagatacattatttttggcgtgttaaattttnnnnaatttttcaaaattttacaagatgtcttaaataattataatatgcacgactataaaaatattagactaaaaaaatttgtgaggtgccgaaacaatacattacatttaaaaaggtgtattgtataattattcaaaattaaatttttaatttaataaatatatcaaataatataaatatatataaatattattttttttttaaaaaaatatataccgtgtctacagtgcacatcatatatgtcgtgcactgtagcattaatctcaaaatgctgtgttgaatggtgcctccttggaacaaaaaggaacggcatttatataaaatgccgcttccttggagaagctctaagagaaatccacattatatatatgcactataaaattttttattataaaattataattaaaagtaaaaaattataattaattataaattattttatattgtgattaaaagatttgtagttaaatatattagttacaaaaattataatttattgtgactaaatataattttaatcacaatacttattgtgactaaaattaaattagtaatatatttaatatttaaatactatattttaagcacaaataacattttattataactaataaaattctatttaatcacaaaaaatttatattataacaaaaaaaattatcattaaaaataacttcttttttgtaataatacaatatctacagcccgtggcaatatataatttgaaaaaatatgcataaaatattctaatattttatgcctaaactaatacaattcaaaattgaaaatatatgactactttatcaaaaattcaagaatacccctctcataacaatacccaactctctcttttcctctatctctctcggttctctctcaaccgaacccttcaccaaatcaaaaccccccacacaaccgcctacaatgccggcccctcaccaccgcctacaatgccgtccccctcccaaatcgaaaccgaccacttctcactgcctaccgcctacaccgccgacccctttctccacgaccatcgcgacccacggacccaatgtcaaaggttagtgttttt

SEQ ID NO: 21877 - DNA, 4887 bp, Cannabis sativa
gatcaaagaacgacaatccatattgattcaaaggattcaaagagatgcaaagcaccaaaagaaacatgaagggacagattctaacaaaaacaatctaaagccaatgtcacaaagaacaagagtgataaacactattattacaatgaaaagaaaaagaaacacaacctgaatagaaaatcaaccctctaccacacacaactagttgatttttatactacactatagaaacaaaacccatgtaattttttataataataatgtttaaatattgcctatttattaatagtactagctaaaacacattggaaaactctttgaaaatatagtgtagtaaatgatcatcctcaaaatcttacagcagtaataatatttaagaaaacacaatttaaattagaacaaatcacaaaattaaaactgaacttagatgaaacaagaataaacttagctcgagaatgaataaatcatgaatcatgaatctttattgatagaatagtcagtagtacacgagtagatatgtccaagattacaactcaacacagtaaacaattacaaaaaaaatatctcacattgaaggaaatcacttcaagagtgatactcacattacatccctccacacaaacactcattgtgatcttagacttttctctctagacttgactttgaaatctgaaatatgagcattggagattacttaagagagtagaggtatttttatttatatatgttggtggggctctctttgagttggtgtcaaagccaactgttataacactactacaaaatttactattcctgacagtcctaaaaatgtttttttaggagtccgtcgctaaaaaaattaagtgagtatttagaaccttcgtgaaaaattaggtattcctaacgattttaaacactcatgatgtattcacggcaatttataagcgtgccttaaaaattgcaaatgtttattaaagggaaattgcccacggttaaaaactgttgcctatagtatgggccacagtttttaattacttacatttaaaaaaattcaaataatgtgtttttccttgctctaatataacgcgttttcagatctaaaaatttttaaatttatacattttcaagatgtcggtctcactctctttagagttctccctctatcttttctcatagacagtggtccacgagctccatcactcgtctcttactctctctttctcactttctctttcacgagctccaccatagacgaaagcccattcaagctccatcatggtcggccacggccatgagctccactatgagaactactgacacttgtctctgtatctctatctcgtccaaagatagacgcgcaaccacgagccaccacgagcaccggttagtcttctctctttcgtccactatttctcgtaacttctttattattattttaattttcaaatttatgtatttttgagatttttgtatttcacagattgtcaaagatcttagggttgtccattcggaaaaaccatggcccaaatctcgactcttctgaactcttaaggccaaacgaaactcccatcttggttttgaggaggatgaagacgatgatttatctttgggagaaatccactataatgacggtttaaaaccttcagctatactataggctacggtttaaaactgtcgactatagtatatagctgacaattttaaactgtggcctatagtctcaactatagccaataattttaaactgtcgagaattattttataccgatatttttctatagttacctattctacctagtattcatgatactcgtataggcaacagttttatagactctcgggaattttttacccgacggtgtacaactatcaagaattctagatttttcagtagtgtaactaattgcagcttttttcaaattcatttgatggtgttaagatggaactactaacttgggagagattaaatgagtgtaatcctaacatatagttatgaagttattccatcttttttttaaacaaaaacaaaaaactacattaataaaaataagacgagttataattggagaaaattgtcatttgagtctaagccattaggataagagaaatgctaaagtgtactcatagtgcctaacatttttgtgaagtgtaatatcactatttgtacaattcaatatcgtatcctacttattttactttaataaaaattatcattttggtgacccataacaatgttgttagtataagtgtttttgcttaatgatcaccctttcaccaatcaacatgacgtgaaattcttgtactcaagaagcaactaattagtgtaacaccctctaaaatgtgaataaataattttcaatgaattctattatttgcattaattttcattaatgtttattactttaaatctcgtagaatcgtagttaacgaaaaatctgcatatatttatgttgactcaaaaatttaccctaaatttctaagccacacgcacttattagattggtgagaatgaaatagttgttaaataattataaaagagacaaataaatttatagtagttcactccctatatcgcgatagtaatagagctacatctaatttgactttttatttctcacgagatggtattacaaaagaggctaagtgtcagaagtttcaatttctaaagagattaactagagagataagctttgatattatgggtagttttttgaatgtgaaaaatgagctaagggagctctctttataggtgaaggaggccgacaaaaatgggaaaaaatacaaattagatatttttgaccgtagatgatgatctaacggtgaaatttagcttgatagtaatagtcattttttggagcccaacaagacccgttgcaggtaacccggagcttatttttgtaactccattgggagtgaaatttggcactgatagcttcagaattgcgattcaagtatcagacatgacttgatagatcattgaaatagcttttaaataaaagttgaatcacgtgatcaattggattcatattgaatgagttatgactattttactgaaagcagttcatgacccattgcccaggttgacatcccactgcccaggttgacatatgacgtcaacctggacactaggtaagtgaaaaaaaaaaaaaaagacgtccaacggatgtaatttaagatgcctaagtgatattttgacatcactttatgatgcaccaggtcatttgtcaacctaggtgttgggtactcattcccaagctcccgtgatctcgttttaatacttccgaggttcttgaacttgagaacgaggtaacctaccctatttttgacaatttttaattcattggtcgaatcaaatttggcatttgagcaatcaaaagcagggcctcaggtttattgtcaatcttggcgctgggcctagcaccaggtcaacctaggcactgggtcctattcccaagggcttgggtttgtgtttttttccccgagtttgcttgaatcttcattatttccaatgacgaaagaaaaatttggaacactttttgtgaacttgattggaaatagcccaagttgacaatatatcggttaatcaagatcttagagtaaaatgtattaagaatcattttttgtgttgttgtttctttgatttacaaactgatgtttgtatgattattattgaatcttttgagttattttatcatggttttctaaggactcaaagactagccgcctaaaatgtgtttttaatgcatgtgaatcttgtaatttgtggtgttcatcttaatttacattatgtattattaggtttcaataatcttcgcaatctattagtaaacaattaggttttactcctaattatatatttagaaattagaggttttttggggctaattaggatgtttgccttttaaattttgatatgtaccaaatcgcctcccgaacttttgaagtcgttaaaaaattatcaccgaactattacaattattggatttaaggacttttgtttgattttactaacggaagtctgatgtggatgaaagttcaagatgtacagtctgataaaatttagggatataatttagtagatttcaaaattcgggagtacgatttgatacatacacaatcttctcattaataaaattaaatgtaattggaaaaaaatcttcaaaatcaataatcttaacaattcaaatagaatttttaatattctgaaaaaaaaaattaaaaaatatgatttaatatatgttaaaatttaaaaataaaaattataaataattttttttttcattacataaaagttaaaacagcaaaaatagtctacaccaatagaaaaacatctgactggtcataggagaaagcttcccaaataaacttacatataccttataactaaacaaaaatgatgtgttaacttataattgactacaaattaaatcaccactaatccgaatccgataaccaagatgatatatttttttttaactttaagccaatatattcgtagaaaggtccggagataagtcaaggtaaggaattttagtacaaagacattcagactgaattaagataaaaaggggtcatgtatatatcttgtatatatatacatgtcttgccagcaaacttgtactgatcaaacacgtctcttaattaatttaaatgatatatatttataaataaaaactgtaataacaggatttgttggtttcccaggtttcagacaaaatgataggcaaatggcaaacctaacttccccatttaatattatgtataataatgctaaatttgtgtgacctctcacctcacctcatcacatggttcgactttgtcaatctatcattaattttgctcatcactagtttatggtttcggcttcataatatatatactgttataaatattaataattatgtggat

SEQ ID NO: 21878 - DNA, 1909 bp, Cannabis sativa
  modified_base (1555)..(1558): a, c, t, g, unknown or other
tataaatccattcaatatgaaatcattccttaacaatgccccctccatcttttgcaggacaatccaaaggtttcaaataatccggataatttgaaattgctgattcataacatggacctttcttaccggttagaatgggttggcgaacggaaagtacttcttacaaggcatggtcatgagttgggcacttatcagttataagtatccagcagtagcagtggacagaatgacatacaaaataggttggcgacatcaagtacattttacaaggcatggtcatgatgagacgagcactctgcaattgtatgcatccggtggtgaagagaacaggtgaatatttttgttcactactcttcttgtgtatgagcaaagcaaaacaaattagaaaacatttcttgctgagtagcacttcccggcctgcaattttggttttctcaggctatatataatctatatatgtatatgtatccatatgatatctttatagctatgccatttattcttatttcttaatttcatagataaatatgatgtctttctttctctgtctccggtagcattagtgaattcaacacagatttcacaaattaatgtattcatttgtttgtttttctttgtcgggtttggaagagttaatgagggtcgttcattcaagtacattcatttttacaaattaaatgtacagagttgagattcctaaaagtaatgaagttgcatatgtttgatgaggcttcttcctttttctttgtgattttttgttgttattattcatagagtgtgaagatgagaacatgccgctatttagcaccctctaacatgtattggtacaattaagtgtattctatattaatttttatgaaatattgctaactaatttaagaggctacttgtagatcgtattatgcattattgatgttttatataaatgtttctatcaaataaacttttaccaaatttcaaaataatactttttcttttgttgtggtttcaagatttacatttaatttaaatctgtctttgtgtttacatatctttaaaaaattactttcatttaagaaaaaaaattcaaaataatgttggagtaaactattgattatattatgtctatagtaagaatgacattgattattattgagttccatcgtgaatattttttttcataaaaatattatttttaatatcttgtgagctttataaatgaaaattaaaataccaaatgataaaagaattattaaatggaaaatataaattgacattttatttataaaaatatctctataaagtgtggacaacatttatatttttttatgtgcttttaattaccaaaatactttttacactatcacttacacaatcagaccatggttgttggatggttgttgggtaattggccgaaggttgcattagacgaatgtttcaattagatgaaggttgctgggtggctggccgaatattgcattagacgaaggtttcaatcaaatgaaggttgctgggtggttggctaaaggttgcatcagacgaaggtttcattcagacgaaataactgttagcaaannnnttatgcaactgtaatgcaactattatgaaacattaaaaatcagaacaatatttccacgtacgtaactctatctatatttctcttcacgatttaatatttagaaaataacgaaaatacaccatgataaatattttactatagtattggtgtaatttttttttattatacttgagtttgattatttggaaactccagttcaactttttgagatctgcattttgtggatctgaaaattgaagtcaggacattagttttattcaaattaaactgtatttccggttgaattttagtttcgtagtagttttttttccatgaattcgaaagggaaatttcaatttttgaccctaataa

SEQ ID NO: 21879 - DNA, 1504 bp, Cannabis sativa
cttcaagttggttataataaaaaacaagtattattttgtaccaattcaaaaagtatattattcaatttgttaattaattaataattgcaaattgaaaaaaaaaattattaattttaattacttaaaaaaattaaaatgttttattgtattttctaaataattagaaggtagaatattataaaaataaattgaattaacaaaacgaacctaaacatctaaatagataggggtgtaaaaaaaaatagattgtaccaaaataacctttttaaaagtacattgtaaatttttctataattatattcaaaattattttaaacaaaaaaatggaaattaatgtctatttagttaattttttaacatataaaattcaaataaataattctaaaaaaatacaaaattcaatttaaaataacatagtatcccattttattataagaaagttttttattttatttttgatcacaaataaaaataatatatcacaaatataaaaataatgtaacttatgagaaggaaaaatggtacggccaaataggagttggaaagtgatctttgaggttaagtgtgttatatatatgtatataatataattaaattatttgtgtaaataatatccaaaaagaatgggtctagtctttaatccaaaattgatattatcattattgttgttgttgttagattatgaaggatttcaacttacaacaactattagcttataccaattaaataggaaagagggtagggtttttgtaattaattaatataattaaccttataattaattataaaatatttctattatatgtatttacagaaagattattattatttgaatgttgactcattcacattattataatgaaatacaaaatcttagttatataataatgataatgatgtgtggatgtggatgggtcatactcataatataatatatatacatgtatgtaaaatagtacaaaaaattcctaattttaatggcacatcatataactcaactctacatacatttacttctcaaaattatgtagaaaatttatgtactagatttcttaaagggtggtttaatatactcattatctgcttgggtttttttttaaaacctttttagttgattttttttcataattacatacattgtaattattgaagtgatgtaaatttttaaaaaaaattgccgaaaataaaatttaaataattacttactacttgtataaaatatataaattttatgttgacattgtaaattatttgaaattttttaaaaatttatagattgttctaattaattataatgtacacgataatgaaaaaataaataaactaaaaaaatctcctatatgttaaaacagaaaaaggagtctactaaaacacccatttaatgggtgcattgtagacctttccaataatgtataccttttagttatatatacagtagaacctctatttaagaatactctagtcaagaataacctctaatttgttataaaaaaaattaagtccc

SEQ ID NO: 21880 - DNA, 2186 bp, Cannabis sativa
gctattagtataatttaaatcgaattttatttattttaatttaataagaattagaaaacactgcaaatcaattataaaaagctatagcaataatatgtaaaaaattataagtacttgggatttctcacaaatcttagaaaccttttcatatttaatgggatatctactgtactcttcctaataattaggagagtactaattgatcatttagtataattttttttatatgacattttagttattagggaggccacatgttttcgaagaaaattctaaaattgttaagatacctattacaactacaattattaatatacaaaattagattgtaataattatattcgggtatcaaatccaccaaatatatactccggtgctcctgatcatgcgagagattaattatatattccagatcagacatatatgacatatatatttatatatacacgtacacaatcaacaatcaaaatatatgaactaggttatttaggtgaacttaaaatacatatatattgataaaattattaattcagccatgcatatagcctcatctgtttttcttcttcgatcaatattcgaaatttacttatgtaattatgtatatactcagaaagaaagtacattttacatataacaaataatgtcgatctaggttacataatcgtttttcgatcattcactaattaaatatatgtacttgctatagtcacaaatgatattaattagaattatatccaaataattgacagagcacaagctataaatataaattaccaaccatgtatattacaattagataatataacagtaaaatgtttatcatcatgtctctaaagtatatatatttggatacttcatctcaaaaaaagtttattttacatgcttgtaaaaaagactgtttgaaccctatttgttaaattattctaaatttcttaaaattttacatgtgctaataatactgtaaatgactataaaaaaatttgactaaataattctctaaaataccaaatcggataagttgtagaatttttctatttatattatatataaactatcgtgacaaatagttcacagcatgtatactttttgatcacaactagctatagccaagcatatatatatatatatatgtaagggcacagaggaatttaattggttatatttatcttgaaatttcactgatatatatatagccataactgtgtaaaaaccaaaatgaagcaaaaactcaaaacctatggtgaatattctttttctttcttttcccaattaattaattattctagttctgtaaattgaaggtaatcaataggcacctcctatatcatcacttgaatatttagctattagctagtccccttctgtcatagtgacctagctaattgagaagggctaagatccatgacataattgaattatacatagctaagctagctttcaaaaaattttcaaaaaaaaaaaagctagctttcaaaaaatagtcataatcaattcccatattcatcaatgcatggaaataatcaaggagtcatgtgtaaatatgaaagaatgacattatattatattttgtatatataggatatagcagtcaaactctatatatattttgaagtacgtatacttttcagctctaatatagaattagttgtatgttttacattatatatatataggtcactactcatatatcttcatttcagcgtttataaatatgcaatacacatcaacatgaaagacacatttagctggttgtagtcaatatatgtatcctattaataaagtaggatataaggtttatatattatgtatatgtagtattaagtttctaaactaacaaacacaccatcatgtttttagatttattacataatttatatagtaattccaaccatactctctaaatacactaactcgttagttaaaaatgtaagaagtgagatttgaaaaaatgagttccaactatttaaaaatgattctctataataaaaaataaatatggagctctctaaaatgtaaggaactctttattttttgcttaacttttttaatagtgttttaataaaaagtaatattactttttttattattttataaaattaatttatatttagtaatttaaaattataaaatattattaaaataattaaatactaactatagtaagcatagttggagcaacaacaata

SEQ ID NO: 21881 - DNA, 6905 bp, Cannabis sativa
aactatttttagttgagatgaaaagtcctaaggttttttttttatatatataaattatatatatttaggttatcctcaatctcatcaactattgttcattcatattcatgcatgcccacatgttattgttatctatttatgtactagtctctagttttctttatatggaatatactttggtacctatattttctttttataattttatttttattttgttgaaaggggattcgttgtgatcaaggttaaaaaagacaaaaccctatacaataatgtagaaaaaattggtacaaaaactcaaagattgctaaagaaaactgttattcggatttttagataggtcacatgtataattctaaaattttatatcagctgagacaggtttaaataggcccaacaactaggtcaaactaaaactctggtccatgaatgagctataatttgctaagaccgccaaggtcgaatcgtgttgatctggaagaggccatctcgaccagaaacgaagagtctctcaatacttatcgaaggcctccaagatgcaatcctgaagcgggtaattgaagagtcactctaatagattccagagctcaatcaactcggaaccctttagatacagggccccaccatgtcagagtttgtcccttgcttcagcctagctgagtgtgtgtgctactaaaagaatgtcacactttgttccaacgccatattctatgacatccttggtacggaaacaataccttcgaatggtcttagcttgtacggactatctttagctcgtgaattgggcctactcaattggcccaaagtcaataaacattgtattttatcccatcagatggtctagttgacacccataaactctaccgggtttgggaatgcccatacccgattctttcctataaatagaattactccttcgtccaagggggagagggatcaatttttgaggagaaaaactaagaattagggttcttactagagcataaatacttgtaagaaatactttaaaacttttcttgtttaataacattgactcgtagactagaatttgttaacactcaaaccacgtaaaaatttgggtctcatcatctttaatttatttttttcttaaacttatttatttaaatacttagttttcaaaaatctcagtaaataagaataaaggggcaaaaaaatacacctaaagctaatgacactgaaggcaaagggtgttaaacactattattacaaagaaaataaaataaactaaatgatcatgccactaagtcgctctataaactcaaacaccgagtggaaaggagccctaatatcatcctagatcatgtagaaaaatgggtagagaaagcagtagaaaactcccatcgataacaatccattctcagcctcccaataaggttcaaaacggtgaaggagccaagacatggatgcacttcccttaagtaaagctcaagtctctccctctacaattacaaatttgccggagttcaaaaaagagctttgtgcatcagagtcgaacacttggaatgaacaccagagctaacaccgagaacaaaatatataaaagagaatcacactaaaacccaattggcaactgtgacagttagagtttcgtgatccgtaaagaaaaatataggtaagctatgcaatcccacatcgcatggacagggtcaagtgtgatgattctaagattgtataagtatgagactatacaattgaagaacacttaaatggattgatgggtatattttcttttctatagtctatcttttaagtactacaaaattaattgtgtttgacctgaaacaatcttatgatggaaaacctcttgaaaaaataaggtacatgtgtatactatataggtatgggactacacaaataaaacggagacattacaacaacatgaacatttagcatgaaagtataaaataaattattttgaattttttttaagaagagtatttaaagcaacatgaatatttagcctgagaatttaaataaattattttaaattttcctttaagaggaggatttagagcaatataaacatgataaagttttaatatatttttttaatacttcaattaaacctaataatttcttttaaacttttatatttatttttagactaatctttttaatttaaatatacaattagcactaacatgacaatgccacatcactaaattaaattttaatgatcaaagagtttgtatttccaaataagtcccactttttaaattaaaatagtagtaatgttaatctacttttttgttttgttttcaagagctagatccttcatgtctctctctcaacattggagtaaatatagagtagttgtaatttcattcccaaatatagctaaaaaatgttattttaaagagaccatttgaatgaagaactagtcatatatcaatatcacttggccactcctttagatgggcattattcctcttcatttgacattatgacaatccttcatatcaaatttcacatccatttctattaggtaaacaaaaaaaaaaaaaaagacccaagcttgaaaatgatgccatatatgcagaatatgcaaggcatttttcatatatgcaaacttaaggagctatacaaagcatgtacaaaataagtagtgttatagttacacaaatttaaaaaaaaaaaaaaaacaccatttgaattgaaaaacgaaaaggaaaaaaaaaaaaaaaaaactatcttaacttcaccggccgaccaacaataattctggtcgggatcttctcatcagaagagggaagaaactgattctaaattttccaccgagcaaaatctcggttcttaggtaagcgaaagtagatgagttactactattacaactactcattcaaatgcttttcttcttttctttagttttcggggttttgtgtacgaaaatcatctcagatgagaatcatatttgtcgaaaaggtcatcgggaatgacaagaggcaacttatctacatacaggaagagcctccttaggttgtctcttgtcaccgttgccatgtcaactacgtctctagtgtcagtatatacccagagatcgcccgagttcactcgcttaagactgtcccgacaaaaggggcatgattgagatcttgttcgcctgtttaaacattttaggaaatgttaaccgaattaactaacaaaggagttataaaagcaacacatgttatcaaatttcgggcctcaaaactcgatgaagttataaaaatcaatcctttagtacaattctaaggacattttgtctttagaactaatctttctcctaactcaatattaaaagagtttcgaaaaggcactaatagccaattgctcattttcttcccggcctaacattcgactagaaaactaaagcaattgcaatgtaggtacctagtaggcgttccctcgggaccatgtgagagcaaccacatgccttttgcctaaccgttcctcattttaactgatcaaacttaaataggacataacaagaataaaatataagctattgaccgaaactaaggcattcgagcagctcgatgaaataatagtatgctaatattcaagagcaataagagagagatggcaataccattcgcgataacatttgaagcacatagcatgattgcagttgggtaacacaatcttactattcatctccatgcatataccacattcttcttctctttcgatttctatatctgtacaatgccaattctcatcatcgtctcttctcttgtacctctccaagcacactgctttttgcattctatcttcggtgtcagtaacaccttttggaagttgcagaagtgaaggataaattaccgctggccatgattaaaaaagtcacaaaatcagtcaatataagtcatagaatacatacatacatacatacaaaccgaaagcaagtatatgctatataccatagaactctctaatacttgctttcctttcatgagtagacatggtggttgttccatccacatagacctgtgcaaagtgccaaggtcaatactcgtatcgaattccatcacccgaaaatgagtctaaagtgattaaaatacaattaacttaaaagaaaaatgtcacattcaacaattgctcccctacgaaacgaaacaagatcccctatcaatctaactttgatgtctcgattttatgcccaactaatgaataaaaatcagtttttttacttaagagagtatcatgattcctacgaaaccaagcttgatagaaaagattgagaaaaaccaatcattcataatggattccacgaaaaattaaggattagtaatcctataacctttttagaaagaaattcaatggattcattcggttctcatacacacaaccgatgaatgcaatcaaaaaagtgtgctcgctctcacacacgagcacacaatgagaagacacgaaattcaaccttgtatataagaattctcaagagtccaagagctccggcaaggtggcaatcggtccattgaacaagaaaaaggaacaagtgagcagcaggactgtatgatatcctcatttgaagagaagcaccatcataatcccttggaaaatccgaagccctgcgtctcacaagataaattgattcaaaaaatgacagcttagaaaagcaacattacaacttaacatctcttctaattagaacttcttcaacagtttgatatgggactttgattattaaaatttgctattatgaaaagctaaaacatcaaaatcaatcaaaaatcagttatttcttgttgcaaagctataaactagcaaccgatttcgaagcaacaagcttaaacaacttgatatgggaatttaattgttgaaaaaattgttattatgaaaagcttaaacatcaaaatcaatcaaaaatcagtcattctcgattttcgaaacaacaaacttaaacatctcttcaaattagaatttcttcaacagcttgatataaacatttgattattaaataaacattgttattatgaaaaagctaaaacatcaaaatcaatcaaaaatcagtcatttcctgctgcaaaactaaaaccactaaaaccgattttcgaaacaacaaacttaaacataagaaactaagaattgccataagatattacaagagtaaggaccaagtggcattactgtgaagtatcaataaagaaaaggataaacacaaaagtgataaagaagcaaatgccaatatatatgctatgatagattgatattgaaaaacataagaagaatatgaacacaataatcaatgagattaaacacaaaacaaagattaattcaaatgtgacaattagtgatgaaaattgaagctaaaaaacagctgtgagtgaaacatcaaaggaaataatataaaggaccaaaagggtatcaaaggaaataatgttcaagcttcttcataattgttttactcaattaaaataaacacaaaagtttttacaaccaaagaaaacccaaaaaggaaagctttaaaatttagtatcacaaaaattaaacaaacccaattttaaagcaaaaaaaaatataatccaagcttaaaattcaaaactaagaacccagaaataaaaaaccaaacttttctaattattattaaaaaaaatccaaaaaaaaacaaagaaacttacagagtgttagcatgttgaatatcagcttcgagaaccttcagagaatccttaaacgactttctcatggaacctatgtacatttttttttctccttctcttccaaaaattaattatatatatataattcaaaaccaaaaattaacaaataataacaaaagaaagaaagaaaaaaaataggcaaatttggaaagtaagagagaattttgaagagaaccctaatatgagtgaacccttttagtggagttggccaaaaaccctgaagagattgtgttttggttttggttttggagaaaaatatgttaaagaaaagaaggaaagtaaaaataaaaatggtttctttttgcttctatgccgttcttgaaagcgaggttggggagaaggtgacgtcacctagacacgtggacactacaccctttctacttactattaacttttttttttcttattttattattataaatattaaaataatttgtggcgtaaatatctaagtttaactctgattagaaattatttatgagattttgataaactaataaaatatatgtgaaagttagagaaatagataaataataaaaaaagtaacaccaaagcttctacgtggttatagcattaccaagtcttaagtcttagttcaggaatcaatattattacaataagattagaatttgcctaagttgaggaatgagatttcaatcatttgcttgaatgagttttcttgtatttatagtgctagggttcctatttgtttatccttattttcactgatgggtaaatatatataatatattgactttaagtctttttgacgaagcccaacccattgggcgatgattgtatgctgatgtggatgtcatatcatattgatagttgtcaaaattatgtcttacttttatggataataaagacatgttaaatgtttgatcctcaattactatctttttatattttggaagttatgatcatatgaggaaatcttgggagttaagttttgatattgcgggatctggtaattaatgaatacgattttgagctgggtgttcggatgcttgctgactacttctctggatgctctggctgagatctttcaaatacgcacagtgctggaggattatctcacttgattgagtcatttatccaacatccgaaagataagactttactactagatttaatctattatcttagttgagcctattgttttttgggcttaaagtaactgagttgtaccacttttagaattatacatgccccatttggaaatacagataacaaaaataaata

SEQ ID NO: 21882 - DNA, 1011 bp, Cannabis sativa
atattgtatagctaggtagggtttatattgtagtactatgtttttaattagtagatatagtcattaatatttcaactttattaaaatagaatatgaaggcgtgtttttgcttcttctttttttttattttatttttttttacctaattaaattttgtgtcacatcatttaaaatatttgtaaaaatatggtatttgttcatcaaaagaaattattctttctagaatacatgttttttcttcttctcactttaaaattttgtagtcgtgtttttaataaaagagatgtttcgattgagttgcatgttatcattttagttgattacttattaataaaatggcatgattttctttaagaaaaaaataacttaaggtttatacttttcttgactccttagctaattcaactttaacctttaattttacatattacaagaaaattgaaaaaaaaaaacttttagtttttgtaaattgttagaaaaataataccatcaatttaaatttgagcaaaaataaattaaaaaagaattaatattgtgtgtggcaccctatgtcgagtaccattttatatatcgtgtgattagtggaatttaattttggattcagtatatattttaatttttatatataacttgatattatgattgtaacgtttccactttaagtttttattaagtttttacacccacagatatgatccttttattcacggttacgtcactctgactgttttatggactgaccactggccctacataccaacatgagtgttttcagcgtgctttgtcctcactcgcacacttcttgagaaatctttccaactggtcatctatcctgaaatcaagcacgcttaccctaactacacccatattttccagaataagagtgacaacattcatccattgttctaccttaataatatcagtaccacctaggaatgtctaagattgtaacttgacaaacatttaaaagactaaacctcttcattaaagaacttgtctagagttaactgt

SEQ ID NO: 21883 - DNA, 1849 bp, Cannabis sativa
tgcattcatggaaaaatcaactaaatgaaatgaatggcacgaatagaaatcttacccacaacaagaaatcgttgatgaagatgatgggaagcttcgatcatcaaaacgacgcaaaaaatcctaagagaatgatgctatgtgggtacatccctctagagagatggaggagcttctttaaaagttacattctagtgagagagtgaaaattcaaaaagttaagagagttttcccccaaaaagatttaaatagtttttgtgggaccactcccttcacttgccacacatattcagcaaagagacatgtaaaagcagttagttattgtaacaaatgagctcagacgaccaagaacaggtatttcaaagactaaaactacaacaacatctattcaataaatgctacatcaaatccaacatagctcgtaagtccctatatgcacagacgtttgcatatggacttggtgggaaaatattgttccaattttttctcagctgatgtggcatgctgatgtggaaaatattagtgtcatgtgataatataactcaccaacaaggaggtcaagtcagtaccttagccaacgagggtcccagcactcaaacaggattataagtgatagaccagccaaccttaagggagctagctagccctatggccgaccagcttccgaacaacacaaggctggctagcttgcttcctgtaagtgcctaactagccaggattagaccttgcaggattttggtatgcagcccaatacggggataagatgaaaaatacctcttttttgaatccattaatcaaaaataccttcatattgttttttttattaaaatatacccatttttttgagtggattgcctaatatgccctcactctttacttaagtctagcatataatttacatacctaaggggtctaatggggacatcatccataaaaatgggtatgtctaagaaaatatgaaaatggagctaaaaattaaaacaagtaaagtaaagtgggtatataatgtaatttcctccccaatacgtagactgcaagctagactgggaattgggccttaacaacctaataaacttgatggaaaatatctattttaagaggcattttagtattttttttatttaatcaatttaatatgtaaatatctacttattatacttgttacttagggtttaagctctcttatataaagagccttaactcaatcctaaagacctaagtctaatcctaaacctctatgtcattaagtctcagtcaagcgatcaagctctaagtgtaatagcattatatcactctctcttttacatgcctactatagcatctctcaacacttgagattttccatcttcaattcatacattataaccttaagagagatatattaaatcccacctatagtgatctgaacagtattatatctcggtatcaatacaattgaaaggagagtaggtcattacccgtaaactcagggggccgaacctatataaaatctttgtgttcttttagtttatagttctaatcgtgtaacacgtggcaatcatcaattttaattcgactctgctatcggttggccaatttctgtatcaataatagtatttaactatttagttttattagataaaacaatattaattaattaaatataatattattgttaaataatattaaagagagaaatatattattttaaagaaaataatatttattttaattcttgtgaaataagagattaatgagaattaatcgattattgtttattggtagaataaataataaatcttatttatgacagaattgaaaaattaattttagagcttagaatatggaccacacgtgtaggcccattctacac

SEQ ID NO: 21884 - DNA, 2711 bp, Cannabis sativa
  modified_base (1505)..(1506): a, c, t, g, unknown or other
caatcacaagttacagcttatgtacacaaattgtttgtttcaggtctcctaaaaagaatatttatttcaggtccttctttttctcaaatttagtttattactgtttatgtttgatttttattagccagaaacaggcaacaaagcagcagtcaaaaggctaacaggtggttctatatgtggacaatgagatagaatcagaaaatgttccctctttgccactctctaaactgacaaattggaacaatatttattagtgaggaaaagaaaaaacgaaaaagaagagaggaaaatgtgttttccagagtaaaccagacaaaattatagttttccacaaacgaacaaagaaattaaaagatagacaaaagtttcagggatttcaggagcaaaatatatattttttcaaaagctgattgttttattttttccagagctctactgcagaagataagttatgttttttgtcgtatattgctgaataataatataaatgctttggtggacaaatagcttttctttccgaaatatagaatattaccacggtcgctttaatatttttttttttagttccaaaacctgaaataattcatacggacaactaaaatcctatttgattttaatccttatagtcatttttaattttaattcggatgaaatgtcccagattttcagcaatggttacattttccctaaacttttaactgattggtgatatagcaactaaagaatattgtttctttttagaaaaaaaaaattaaagaatattgttttattataaaagaatcaaaaatattttttattaaaattaagtaaatcaaaatattatattttcaataaaataattatatagttatagataaaaaagaaaaaagacgcatctgacatctctatttacaaaatgaaagtaacaaatttgaatcattgattcctattgtcgaaaccctttcttttagattatctttacaaaatatataataacgtacttagatatcatcgctacaaatattataaagaaaactgtgtgtaaatcattaatcactttttaactcacaacccaacccatcatggtacagcctaaggtttgtcacttggtaaatggtaaacgtctgtactcttaatcggtattatttataaatattattagaaatatttgggtttttacttttgctatcttaatgaaaaatatctcatttttataggttggacttgttttaaaagaaaataaaaacaaaattattcagctaaattttttttttttaaaaaaaaagttgaattgaatgttttttttttatatatacatatttgtgtaaaaaatatatatattttttcattattttttataaataagtaaataaattgagtataaaaactaaaatttcaaatttattattagttaattagattaaaatttaattattgtttaatattaatccaatcttatataattatattagtgtttccatatagaaatttttacatcaaaaatacaaaatgataactttattacnnaaataccactacacggtaaactaaacatttactctttatctttattttattactattttaccacttgcacactctcccatgcatcagacacgtgcgtaacccctatctatcaaccatcaatcacttccccctctttttttcttctttttccttttattttccatttcttttcaattttttttaaaaaaattagtaacctccattgttgaacttccctatccacgatcccacctccattttccctcctctttttgttcttcaaatttttttttttcgactcccagtaacccattcccataaccgttttccctctttctattttttttttctcaatccgtatataaatatggctgtaacgcgttcttcatcacctccttcccctattcaaaagaaaacctctaaaatgggagtgaaatccttagctaataagaacaagggtaaacgacctgttattgaggaggatgactttgattttgctcctccattatctaagcgtgggcgagctcttccaaaaaagaaatcgaaggtggatgcccaagaaaaaattgctcaagatgttatcgaaaaaaaaatgatcatgttggtggtggtctttgatctgaggttcgttttctgtttcttttttgtttcccccttttttctatttttttttttttgtattttacatttctcggttttgtgtttttggattgtggtattctaggttttccattttagcatttcgtttggatttttagggcttcaatttgtcttgatcaattttatttgttcttttgatgcgttttgcattttagtttgtttagtcttcatttttgtttcattttgttgtattttttttttctgtttgtgttttccaggtttttaaatattttttcatttcagtttcgttttaatatctcttctcattttattttagttttttcatagttttttaatagtgtaatcactttctatatgttgttttttgggaatattatttggtctagttgtttcttgtctatttttatgtaatcaatgggtaacaatttgattttagatcattgcaatttatgttaaaagagttatttctgtacttcagtttgtttttggttttttaatagttttattatagtttggatacttgtatatgttatttgtttatatttgccacgtgtgttaaattgtaggtctgggataacaaattcagtccctctgatttctacaga

SEQ ID NO: 21885 - DNA, 4641 bp, Cannabis sativa
  modified_base (4101)..(4108): a, c, t, g, unknown or other
  modified_base (4491)..(4492): a, c, t, g, unknown or other
ttattcttggtgactttaatgcggtgttcaatcatgatgacagataaggggggaatccaattagtgcttcggagctagtagattctaataattggattgtcaactcttttgttgggccgatgaaacgcacaggatcgaattcacttggactaataaacagaatagtaggatcttttcccgcatagaccatgtttttcataatgaggattgggttgatgatttttcgaatacttcagcccacttctcttgggaaacgtgcttggatcattgcctttgtgtggttcattctcatgctactgagattattggtaacaagcctttttgattctttaacttctggaccgaacatccagattttaaaaggactgttatggagagttgggggaagtatctgagatgtagtggcttgaaggggatttatctcagaattatgcatctcaagcacaaactaaaaagtttcaacagaaatgtgattggaaacattggagaggcctatgagaaagccaaagagacttacattgaggcacaattccaaagctaagctaatcctaataacaactattttcttgatttggaacatgaggcggcaaatcagtctctcactcagaaaaaaatgtatcagagtttccttcatcagagaagcaaagtcaactggattcaaaaaggggatagtaacactgcttactttcatgcgttattgaagaagaggaaggaagaaaacagaattgtatcatttgtgactgaccaaggggaattaaatgatcacttccctgatgttgttcaacatttccttagtcactttcaaggcataatggggaaagccaaaccaacttgtagattcaacctgattacatagctttgggacccaagctcaatcttgatcaacaggttcatcttctaaaacccttttctctcaaagaagttagagctatgatgtttagtatccctattactaaatctcctggccctgatggatttggattagggttctttcggtctgtgtggcctgaggtggggaaagatattcatgctgcaatagctcattttttcgacaccaaccagttcccgacagagttacataacacagctctctctcttatccctaagactaagagcccttccaaagctattgactaccggccaattgcttgctgcacaacattgtacaaatgtgtttctaagttgatttgttcaaggcttgctaatgttttgcctatcttagtgaaccagaaccagggagcgtttgttaaaggtcgctccattgcgtataatattcttattcttcaggatctcttgaagaactataaaagaaagaattgctccccaaggtgcacaatcaaaattgacataagaaaagcttatgatacagtcaattgggattttcttgagaagcttctagtagcctattgctttcctgataaatttgtaaagtggatcatgaactgtgtaagaaatacgtcgtactctttactaatgaatggaagagttcatggaacttttaaaggcgaacaagggcttagacaaggggaccctctctctcctctcctctttgtccttattatggattacctgactagtagcatccaaaaagcggccagagataagaatttctggtaccatcccttatgcaaaaaaatgaaactcaccaatctttgttttgtggatgatttagtaatctcttataaagggaatgagggttctattagtgccattaaaaatcttcttgatgagtttagcaaaacctcggggctttccattaattttgctaaatctcaggtttactttggaggtgttgctcaaccgactccccttgctcagaaaataaatcttttgataggagattttcctctcaagtaacttgggatccctcttagaccaactaaatggagacttgaggactgtgggcagattttgaagaaaatgaaactcaagcttcactcttgggctaataaacatctatcctatgttggtcgggttcaattaatccactctacattgataggattaaggaactattggatgggagtcttcctcttgcctcaaagtgtgataaaggagatcgagaaattttgtcggggcttcctttggggtcataaggataatcgagctagagttcacttgattagttaggaaaaggtgtgtcttcctaaatcttttggtggtcttagatttaaggatggaactaaatggaataaaacttctttagctaggtttatttgggatttgatgaacaaaaaagaccttctttgggttaagtggattaattctatttatctcaaaggaagtgatttctgatcttatagaatgagcatggatactagttggtattggaagaaactttgtagattgcgaacaacatttagcaaggaaatttgatggcagagggtggagaaaatttcaaaaccagcaaggtttataacagtttgctgaagtcgagcgagttcccagcagcaggggaaatttggaatggcctaaatatgccgaagcatgtgtttcaactatggcaagcagctcaaaaccagctgctaactagggaccaactaagcaggttgaacatccctatttttaatctgaactatgtggtctgcgaccttgattttgagagccacagccacttatttttcaaatgtaatctgtcaatacaggtgctgcaccagatttttagatggatgggcacgattgggtggtctatggactacgaaaggtggactgtttggctgagtagctcaagaccgaaagtggtggacaggataagagttttaatccttgcggctgtgatctatcacttgtggagcaatcgtaataattgcttgttttctttattctctaatactgcgaattgtattgtaaataaaattaaaagtgaagtgaagtataggctcttattgattaaagataggaattgctctagggaggagaaaactttgattcacaaattgatttgtaactagttggttttgttggatgcttctttttaagaagtgatcttgtttgtatttggtgagtagattaatgaagttttcttcttcttgataaaaaaaaatacttttttacatatgtggattgagtaaaacaaatgataatagaaagatattttttagatatgtaaatggatttaaatttcactacaagaaaaagaaaaattaggggaaattttattactggcagaacttttctacccctaataatgggagtattactagtggagtatgcttcccactgataatagtcaaagaaaataataaaaaaaaaattagcattatcgatgtacttttgggtattaccggcggagtggcccaccactaataagaaaattggaataagtgagaaatttattgcttttttagtttgaaatcttattaccagcagactattagcggcaggtgttcgctggtaattgattattttattactattatatttattactagtagttcctattaatgccagtggatttttgccggtaagaaaactctatatgtataaccctcaaaaaccttatgcttcttctcactacaagaaatgttagttttgtcagtgcatttttgcaacgataaaagtactctatacttttacttatgcataatagtgctagtaaaagctgtcagcaattctcggtcggtaaaagatcttttgttggcacagttcacctttgcattggcaaaactggcttgtgccagcgataataagtgtcggtaaaaggtatatgccaaaataaacaaagcccctaatctgccaaaagttagctaaaagcacttttgtctgtgcaggttcgcacctttatgactgaatggcacgagaggttttgcaggtgcaagtttgcaccaataaaaccttttgcgctaatcaggaattcggtggtattacctttatcgacgcattaatgtgccgacaaaggtaaataagtttagggttttaggtttttagggatgagttttgccgacacattttttgtttttattttttaaattttattatattttaataatttataataatataataaaattaattactgttatacctgaaactcagctgacacttcagagaaagacacatgtcaatttgggagaatacgaatcaacaaatataatgataatnnnnnnnnaagatattaaaatagaataactcattaaatgtggagctaatggagtatatttacaacttgttgactgtaaagttttaagcaagataaggatatacaaactattatctcgcgcgttaacgagaaaccattcactgtcagaagtacaaagcgaggcactaacctcgctatgtatgaagaaatgtaaataggacatgttgattgttagaacacttagcatataatgcacattatacaaactaagcacaacagttgaatgaacttgaacagcgaatagtgaggcatccatctcgctataagaaagcatactcatgataccttcactaatcagcttgagacatctttcaatgagattcactgctccgtcgagtcagctctctcagatnnaagctgacattcaaatgatgttgaatgttgaagtccatctcgtcaccaggaattgcgattgttagatggagcgttatgtcttcaatagtagaagcaacgagatttatattatcaacctcagaaagacatgggaaaagctctagctcgct

SEQ ID NO: 21886 - DNA, 1918 bp, Cannabis sativa
aaattaaaagtcacccataaatttctcaaaaaccaagaattttagttatataggcacactttatatagaatagatatctatatatatcatattattttttataaatttaatcacaccaaatagcatttaaaccaaataattatatactaattgcttttgttttgatagaaagtgattgagagataacagttacactttttttaatttttatatgatctaattaaagagaattattggatattctttaaccttctgttaatatatatatatatatatgttcttaataatatatatcctttaatgaatatatatccaataatttttaatttctccttttttgtaattaaatttttgagaagaattaatgatcatatccaatttaaccctctcttaatataatatatattacatatgcaaatgaaacaatacatttgaaacactaattatgtaattgtcacaaatttgtgagcttaatttgcatgtacattgcacaataatattacctgtgatagaaacttaatgcaaattatatattttagcaggattaattcttataattattttatcatgcatactaatagattggaaaaaagaataaaaaaagggtgaatgttcttttgttttgggatgattaatttattatccaaattgctaatacaattaagtagatccatatatgatggataaaagcaagtgaaccctaccacaaactcatatggtaaagaggatttgtgttcccacgtcaaaaacaaacaaaagcaatctgtcaaatccaatttcactatataaaatatatgaatattaatgagtattattactgtgtggtctagttcaactgtaacacaacttgtgttgggatttcattaaaagaaggaaaactatgtctttttatatagttgagctgtaaatccatccatgtatatgatatgtatatattacaaatgattaaggttatatttaatgtaaataaattatgtgtaaattatgaaattatttaaatatacgaccctatatatacaagaatttgattaatttgtggtataaatatttgaatttaatttttggttgtagataaattaatacttaaatttaatttttaacgataataatatttaattaataagagaataaagaggaaaaaaaaaccctagaaatcaaaattcccaaaaactaaaacttccacgggagggcttaacaaagatataattttttaaattaatatattatttttattagtatatttaaattaaattttaaataaaaaaataaaaatttattgacttgaaccaatcaaaagttattacgtgataatttccttgacacttaactattaaatactacaaaaattttaaaattataatttaagattactcaaaaatatttaatacaaactttttataaatagtgtatacagacaatttatctgtaaaaaaaaaatcatctgaatcattactatttatctatacagcaattctctaaataaatataagcatggttgcatataagtgtatatatatgtgttaaatattcatgattccaatataaggtcattgatatatatatctcatcaggtcgacgcatagaaattattttaacgaaaatatctgtaaaagaatactcgaacatttaataatacaaaaaaatcatttcggtgtaatgtttctttaatttttgataagttaatataaatgtataattatatattttttaaatttatacgaaggaaatacaaaatggtcatgaatataatttttttttgtgtgtgtgatttaatctatatatataaaagttaataaatatatagatttagacgattttgaagttttggtgagtttgacctgtcaaacaacttaatctgatagcttaccttacctccaaagggaaactattgactttatacactgtatatatacatata

SEQ ID NO: 21887 - DNA, 2726 bp, Cannabis sativa
gactccaagtatttgtagtgatgtttacagtatgctccaatttcttcaaacgctttaattaagttgaagaatgttttgtaattctcctcatttggattagtaaatgtatttttataattaagaagaatatgatgcgctctcaaaagaaaataacccaacacaaaatcttcatatcctattaatggagaccgtagcatttgaaaaatatcttcactgcttctttccaattcaattgaatttgaaataaaatttttgatcgaaacaagaacattgagaattggggattcagtgtttgatttaatcaacgaatcccagttcttgaaaatataattaccacaaaccactcctctaatttcatgaagtgatttttcataggaataataaacaatcttaggaggattagaagggtaatttttaggaaaaaataagtcaaagaaaaacaaaccatggtgataagaattagtcgctgcttgctcgttaatcacaacaactctcataagatcacaccttgactcataaactctaatataaaagatcgaatttagaagttgagacgataaaatctcccactcttgtctcattattttctttagtgacttatttttgtagacaccgaaacaaaatagggtagaagttgactggtgatcaagaaagtgatgatctaaaggcggggtttcgagtatctcaaaatttttaaaattacgaaagtttttctctatttcaacttcaatctcttcgatctcaccataacgattgttgttaacatgatgatgatttttgactttgggaaggttaagtagcttcacttgacgagatgcattatgcaaatgttgcaaacgttcttttacaatgttgtaaaactcttcagcttctctaaatgttaagccatgcatagcttcgtcgtagccaaatagtttcattgtattactcgaattcatatttaatttgtatttttagggttatagctactaatcactttcttacttttttttctagtacggcaggtgatatatataatatagttatgttcctaattataataggattagaattagatttctctaccaaaaaagataaaaataaaaatatcttaagtaattatcggtttaaaaagttatctataattagagattagtttatttaattatatattaaaaataataaacaaaaatggacggcataattaaaatccaccaaaatacttaatattattattttttttgttaatatgactaaccaatcatataattaaaaaaattcacaattctaatttatattattattattattgttattaaattaatgtttgacattaattataattagttgatctcttttaataaataattctatatcgaaaaatcattgtatcgtaaaaacaatcaaaacgacatgtctttttatataatactttatgtcgttacaggtatgaaacaattctcttataataaataaagtatatattttccataagagtccattcaatattaattaattaaataccccttatttatttgtaagattatctaattaaatataaacaattaatattatattttatatgtatatatatttaaatttatatatactgcatgttcattgtaccataacatggataccatgtatattaattgtgccctagacaatttttttacaactagctattatgtcgtttgtttatatatatagaggtgtgtataatacgatccaatccaatgaaaattgactaattcaattataattgactgtcaagtattaaatattcaattgtgatcatatagaatttgatattatttttgaatatccaattgaatcgaatcagatttagatggagtgtccaaaaatctaatacatctaatattcaatcaaactaataagtattttcatttaatttggatgagtaattaaattttgtattactgtatgtaatatatatatatatatatatgaaaattaacattaaagattttactcttttttttagattaaattgatccaattaaatacaatacaaactaaatttaaaatattagattgatctgatttaatctaaaaaaatactaaatttaaaatattattagataacctccaaattaaactaataattatatagatataactgattcaatttaacatttaatataaatattataaaattagaattaattgaatcaaatttaaataaaccaaaaatattaaatatggtgaacaaaccctattaaatttatatatgtggttgtataaaaagtcaaaaaaatttatgtattatatattaacctttgacattaatgttaatactcattattttattaataatatatatagtcgtcttcatttgacataaacatacaataattaaaaaaaacaagtctttattaattaaatgcaatgaattcactaattacgtaattgatgccataacacaaacatgaaattgtacttgttatttgaattaaaaaacaaaaagaaagatttatacatattttagactatttataatttttgtccgtaaatacttttcagacaagcttaataaatagaacttaacatctataaatataaaatataatataaatagaaaatgggaatgaaaagtatgtacagtaaaatgtaatatacacccaatacatatacgtacaaatatacaccaatttaatttaaattatttataaaagaaaaaggtaataaagtatacagatgtataggtgtcgtttggtaatactttt

SEQ ID NO: 21888 - DNA, 2334 bp, Cannabis sativa
  modified_base (64)..(91): a, c, t, g, unknown or other
aggttttctaactttatatgtgtttattttcattgtttcagaattcatattaggttgttaatcnnnnnnnnnnnnnnnnnnnnnnnnnnnntggtaaaataatttctaacagtttcttctgattcacgccataataggcacaaagaacaaacaagcactctcttgacacgaagctgtaccaatgtggggagacactcggagcaggcacgccatagcaagttagctatttttcgtggcaccttcagactcaaaagcttatgccagaaggtcgaagtagtgtcttcataccagaaacccttgtgaagttgtaatagaccatatgcactcttaattgagtacatacccaacacctcctttgcctaatacagttgttctgaagctgttggagcttgcaactggatgcttttaatcaattgttggtctctttcctcaaataaatctccaataatctcttcgtcccaactagcactatccatagccattaagtttgcgacagtagcactagaaagagtcaggtgagttgaaatgatgttggcattagttgcgttcggtagccaaggctcacccaaaacaaaaatagattgaccgttccccacataccatctcgtaccattacgaactagctcttgtgattcaagtatgctttgccaaacgaaacttggattggaaccaagttgggcagagagaaaattaccatttgagaaatacctggccttgaaaacttttgaagccaatgactcgggtctagtgaggagtctccaaccttgcttacctaacatcgccaaattaaaatcacgcaagtcacgaaagcctaaaccgcctcgtttcttatttttgttgagtttatcccatgacatccagtgtataccgttgcgcagatcctttgatgtttaccaccaaaatttggttatcattcgctcaatgtctctactagtttccaagggaagtaagaacacactcattgcataagttggtagggctagaagaattgttttcaccaaaatctccttacccgcccttgacaaaaacttgtcttcccatccttgtatttgtccacagactttttctttaagatatcccaagaccacagtcttatttcgagacattgtactaggaagacccaaataaaggcttccttctgccgcctcatccatgtgaagaaatgagcatatttggctcctcaaattagcttccgtattaacactgaaaaaaattgaagacttagcaaaattaacttgttttccagaggccaacacgaacttgtggagtaactcttgtatacgggatgcttcctccattgtagctttgcaataaagatacctatcgtcggcgaagagcatatgtgatactcttggcgccccattagccaccttgcaaccgtgaatcaagccgtgattttcatacttacgcataagagatgacagtccttccgcacaaagaatgaattacggagaaagagaatccccctattggatacctcttgatgggatgatcgggcccatctcatggcaaccatgaatgactttgtaattggttgaagaaacacatgtcatgattaaaccaatccatctaggcaaaaacccattttcttcaacatagcctccaaaaaaggtcatatgttcttaattaatttgttgtgaatatagttattttaaatctgaatgtatgttctctatgtatagtatgtctacattaggtggaagctcttcaaaaaagaaagaggtgttagattcatttttatgcatttttagagtctaatttagggtgtgttttagtatttatttttattattattttattgtgcagttttatgcttaatttttgcttttattttttgttttaggagaaatgattgcagatcttcaattttgataattttagtattctgcaagcctttttaaacaaaattaatgaagaaaagaaatttcttttagctcggattgatttcatattttctaaaataggtcaaagatggcatcttcatcccttaatttcgtaatcaagggtcaataataggcactttccaagattaaagtggaaatcaaagaaaagggaatcctagccctaaaggttgcgactttgtgtaaggaaaggcacgacttgacttgttcgctgaaagaaaattgaaacagaaaactaccaaaaatcaatgaataattaaaaaggggaaagtctcttataaggccgcgaccttggtggaaaatggaaacttatatttttttttcattatgaaagagggctgaaggcaaaactttgacaccattcgaaaattgagagaaatttcgagtgtagaaggagggtaaggagccgaaggcactagtggagaacttcaat

SEQ ID NO: 21889 - DNA, 3199 bp, Cannabis sativa
aatctattcaagacaatacatagaatatcatatttctactaaacattcagaattcagtcacatgcctaagttctactcttcaaatgacagataatgcacatgtagttcttaaataaaatatcagttgcaagcatttatcaagactcaaaaagttcaaaaagagaaaaagtctcttggtgaagagctggtggtggtctcaaactcgaaaggaaataaggccttggcgaaaaaatgttgacattaaatgagggcgctaaagagaactttggtagagatttttgatcaaggtgtgcaaatctatcttggagcgcatgagcatgactaatcagttcatcaatcatgtcgttgaaatctagtttcattagtaacgtctgagactcaagaacaataactaggggtggtgcatctggatactcacgatcattgatctgaagaagaagattgatgtaaaaattaatgtactactccaaaattgtttgagtagtcgtctctgaaaactcaagtcttgtttgaaatttgggtataagtgataaacgatggtatttcactatatttatactcaaaaagagagattcacacaatttttagatcaaagaccaatatcaatttttagaaaacactaaacatgtccaacaattcgtgaatgccataatttaaacgtttaatacaatatattgaaccaaggaaatcttaatgataatattatcctcgagactcgcaccgaaataaccagctgccagtttaataagctctacttcaagtgcctcctcagagattgttaatcccatgaaccaatgaagtgatgccacatattgccttaattcaaaaaatggaaagctttcaaaaacctttaaagtgaaattgaaattcctaaaattttcacctatagcctccacgtgtccatttgtgtagcatggagcaagcctccgcaactcctagaatttcagaagcttgggggtaaatgttatttgtgtttctagttagggacacgtggagtacttataataaatatagcttaaatacttaaggcccaaaacatgcccagttgagataattgggctgaatccataaatcatcaatccttccgaatgaagaataaataactcatctaggtgagatcctattttgcatggttaatgcagaagaggtaaaatcgcatacccagatgaagcctctagcacatatttggaagcccagtacattttctttatttgttaccagatcatgtatgattagggattgcattctaataatctcagacagaagatcatatctttctaaataaggaaagatggtaattagcaatcaagtaattaatgtgtcattaatttccacgaagataagacatgattttaacaaccaatatcttgatgtggcatccacatcagcatacacaaggcaccccatgagctgggcttcaccaaatagcctaaagttaatattttatttataaactccccattagagggaaaaaggtaactagtatgacctctaagcaatataaatactcaacaaatcctacatgaaaagggttcaaatttctttactcacatatatgcctaagaaaaagagatagtgctcataccttcttgtattctctaaggcttttctagcctaacttaataatattgactcgtggactaaggctagttaacgcccccaaccacgtaaaaattctgagtgttcttatttcttacacttttgaattattattccttgtctcttacatttaatattgatttctgaaaaactcgataaacaggttgaacattatttcatgatataacatcattctatgtgttttaatctaaggtttaatatcttttcatatgcacaccaaccacacacacttgagctaaacttgttcatatcttctttagtgtacttgtaattctctctaagatttcacattgtattccatcttattagatagaattttcttagtattttaaagtcacatatccattttattgagaggtgaggttaatattggtagaaaaataactcagttgaaggtgaggttaacactggttttgtaaacaactcgagaagaatgagattgccactacaacaatctgagagtgagattggtacttctacaatcctgtgaggttgatagtccttagatgaaaactattgtgagaggtttgggaaaaactttagtgaaaaattctccggttgtaagggttaatcaagcccgttacttggctcgatagttgaactcaaaggttggtccatagctttgaagaccaatgatgtaatatctcaaaaatttaattatagttaattaagcatatttaatgaaatatggaatataatatgtataagaataactaatgagtaagattataatcttactaggttaagtatgagaaattagaattatcttaggaaatgggaaaattagacgtaatttattaattgtggagattttaattgattatttgggtaatatatatactgtatgaaaaataaaatatttttaggtttgataacagtggaaactcgataatttagccaaaaatatcacagcggtattaatatttgtttcagttgtaccaggagagttttttatatgatgtttagaaattattgggttaaacaagttatatattaatgatggaattaccttagagtttattaagtgtgatgttatgttatgaggagtattattttgagtcatttattaatggtaattattatttgcatttgagggtatactattaattacataagtcacaattttttgtaaaaaaaaatacattttatgtttgaagaatttttttttttttttacatttttatagttttccatgaaaataataaaaaaactacataaaagtaacatgaaaataacatctaaataacattaaaataacaacaaaaaattaacaagagaacaacataacactactaaaaaatgggtttttagcttcccttttttcaacccattttataaaaggggaagctaaagggtgtaaaaatacccacttattgaaaattgacctttagagacgattttttttataaaaaccgtaggtatagaattgcaatatagcatttagagtcggttggaaaataaaatacgttggattttaagaagtaaccctatggcatcgattcctatataagaaccgacgacatagggtacacgattatttgacacgtgtaccctatgccgtcggttcttacataagaac

SEQ ID NO: 21890 - DNA, 2340 bp, Cannabis sativa
agagagagagagagagaggtgataggtttgtgctaaattttattattttttgattttaattcttaattatctgaccaaataaaactaatttaacaaatctaataactcagctagtattttctaggttatcaaataaaacaaaacaataaaacttagcaaaagactattttaccctcaatcaaccacttaatctagcttataatttaggggtactttggttaatgctaactaccccaattaatctgacactacgagaatactaaataaatcggtacaattctaataaaactcattctattatcgtcgtgatatccttggtcaaaccatcgagtttctatggtcgccgaacccaaaaatattttattttaaaaatagtatatataatacccacatgttctaataaaatctccataattaataattacgttcaattattcatttactcaaaaatctcgaattatctcataattggcttaagtaagattataatcttactctaatattcatataattacatatttaataaaatatgtcaaattacatatagtaacatttttcaggatattacatatatttattgtatttccaaaggatttttaaggtaaagaactatttagtagcatcgactcgtgaagtaaggctagttaacgccctaaccacgtcaaaactatttgcgtctttttatttttttctcgtttaattgtttatttcttaagttctgattatttataattagtttttcaaaaatttcaataaacaattataaataaatcatttttttattttttatttgtttcaattaattaatttataatttcaaattcatctcatctataatgtataatagtaaatattaatttattaatatatattctatagtctaaaaaaagtgcaagtgagtttagatgatatttttattattttttattttaaaataattgtagagttttatattttgtctcaataaaaaatgttatatgatttattttattttgaaaaaaatctcacataattaaagtgtatgtcttttatatcttaccttatataaaatggctatgtaacggtttttgttgtgtccttttaacagtttgttatctatttaacagaatatactcaaaaacaagttaactttaacagacatttattcatacacaactgaaaagaaaccatttacgataattatacaaaacgacataattattcggaatcggaagatacctattcacagaatcactcattcatttacacatgttatacatgaaaaattaaacatttttgcaacaattatacaaatcaaaaactttgtgtgctaccgccttccaaattaatttccactcattcttgaagccttataatctgataaaatctgcaaagttctcgctgcaatctgtaaaggtattttttttacgcttcattattgtaaatttaataccaataaatttatagagaaaacttaataaatttaatagcagattgaaagaaggaaattgaaagaaattttattttatatatgtatattatatatttgatttatatatacattatatataaggtaacagaactacaaacctggaattatctttgattattttcattactggactatgataagattagtcctcttgctctgcttcccctccctttctctatggccttcccttcaatcatttttttaaagcaaaaagaatcgacttttgaagaaaatcgatagataaagaggagtcttcttcctctgccattctctatacctttccttcaatctttgatttcctataaaaaaaatggcttctatgtaacagaaaaaaaacatagaaccatacaaagcgtatacctgtgagatttagtgtgaatggccaaacattctccacccacgaacactaacggcgccaccattaccaccatcgaccataataaaattactcaaccataaaaattctagcttctcccataagaagagaggagaagaagatttcataattaggaattttttagagaaaataatggctgccctaagtgatattataattagatggaaaattacttagggcttgccatttagggcttctcttttcttggggtagctgcggtaggaagaagaagaagagaagttgacatcttgagcgaaccctaaccctagaaaccattgtagaggtgcgactgtaaggttgaagaaaaagaaagaaactttgaaaaacctagaggagaagaagtttggaaaaaattgaatgagggaaattgaaatgaacggctgaagtagatataattgttttggaaatttaccttttatattagggttatggcattagggtttctttgtttgtttgtgtattgggcttatct

SEQ ID NO: 21891 - DNA, 2692 bp, Cannabis sativa
tataaatatatactgcagttaacgtaaaagtaaataatacaaatgcatgggaagtcaatttgggacaaaatctaaggtggggtcatagtatgataacaaataatcgtacacatatataaacatacacaaaaaaaaaaggatctatatggaaaaagaaaaaggagaaataaataaaggaaaagttatatatgaccctgctaccatgcgcgcaatactgctagtgctacaatcaccgaaaaaacaatatattttgcttcaaagaaattgtgaacaaaaacaaaactaacaaaaaagaagaagtaaaaggacttgtgagtgtactgcgcatgcactaggctgctggccgactctgtccctatttaattaaaatcacataacttaataaccccaccatttttcagtgacatgttcataataatgactgtgttttttttgtaatgaagtattagttgtgtgtgttaatcacatcggttgacgtgggaaactaatagcctaaggtttggtatgtatgcagaaaatgtcatgtcgacttttttttttttccttctcttctttttcttttgggatgaaatatttgaaagctatattaagtgatgaatagatagagaataatataataacatatgtttttaattatggcaaagatatacactcattataacctaaaccccaccatttatgatgagagcgagacatgttaaattaacctttttcttttctgaaaaattatttaattaaatcctgttttcaatatatattttgtaaaagatctatatagtagctattgcatatcttcaaaaaggaaagtatttgtgatacaattttgactatttttttgcatccacacctccttattagtagatgcaacaatagatataattatttaatccaaacaaacaatgacatatataaagatctaagaaagacaaaccataactccaacacttgtcccactcaacaacattacatagttttggctcattcttaattaattactagtcttaatttcaaagggtaaattaaagctttaatcatcattattaagatagaaaacaaaaagcaagtaaaacaaaagattaccattaccaagcatattttactatgacatattaatattaatctaactaacgtgcgccggaaaaggtcaaccccgttaacactgttcatacaatttaaaacaaagaacgtacctggcgcaatgtagccataagaaccggcgataacagacatggactcgtcggtctggatgagcttagccacgccgaaatctgcgaccctggcctccatctcaccgtccaacaagatgttactgggcttgagatcgcggtgcacaatgactggatcacagtcatggtgaagatagcaaatcccctgagccacacccaaggcgattttgtaacgcgtgacccaatcggctatcaaattttgagccttgttcttcccatgcaacaaatcgtctaagttaccattaggcatgtactcgtagagcaacatggtacactccctgttactgcaacaccctaacaatctcactatattcctatgcctcacgtttcccaatacctccacctcagcaagtacccctctacgccgtctgatgttctccttttgcttaccccacagtttcttaacagctatgatttcgccacctggcatctccgctttgtatactgttccagtggaccccatcccaagaatcttgttactcatcgacaaacactccagtacgtcatcggcggtgaagttcaatcgctgaaatgccgtcagtttccacggtccgatttgacggtcgtcgttgaatcgacggctgtagttagcgcggaaacacctggttccggcaacgaggacgaacagtccgatcccgaacgccgccgccattatccagacgatagcgccggcggtccgcttcggtcgctgctgattgacctcgacggcgctggcgccgagagtgtcgtctgcagcgcaaggcttgggtaaaactccgccgcaaagtccttcgttgccggaaaacgacgacggatggaggttcgggaacaggactccggacgtcggaattggaccggttaacgagttgaaagcgacattgaaggtggacaaggtgctacaatttccaaaatcggaaggaatcgttccagtgagattgttgtgagagagatcgacgtttgtgatggaagggagtgtggaaatctcccagggaattataccggtgatggaattgaggctgagattcaaggaaagtagcttctcgcagtgaccaatgtcccaagggatattaccttggaacatattatcttgcaattcgatcttcatcatacttctacaaccaacaaattctggtattttgcctaggagcttggacgaaatagcagaaaaaatcttcaaattagttgaattccaaatgttatcagggagagttgagttcaaagggttttgggagacgtttaagtgttcgattccctccgcattgccaagttcttcaggtatgggaccgaaaaggctgttgttactcaaatcgacgaagcttatattgggcaaagacaaaagcccgtaaggaatagaaccggtgaggttgttgttctgggctctgagccgatttaaggaagtgcaattccccagtgagtcagggagcgagttgactaacctgttggagaagaggatgagtttgacgagcttgttaccattgcagatgttt

SEQ ID NO: 21892 - DNA, 3014 bp, Cannabis sativa
tgaaatgagttttatttagtgcataaaacccaacactcttcatcttgtagatcgaatgacatcctctggaccgaagcggttcgaccttgttaggttggtgggctagagtcatgtccaaatcaggaacggtagtgtgactttgttagtgggctgaattactatcctgattgggtccaaatttgggcttgccttgactgttatggtgctttaaatttgcttagatcatcacttcaaaaatatgaataacatatacatatttctaccagagaaacttggataccatgggcaaggatctttgctctaccatccttgatgtcctgaacaatcacctgactgctctgctgtcaatggaacccctttggtcttaatcccaaagaaaaagaatgcttccacttttcgtgattttagacctatcagcctatgttccacgctttacaaagctgtctccaaggttcttgctaatagacttaaaattgttctgcattctatcatttccaacaatcaaagtacttttctctaggataggctcatcttcaataacatattcattgccaatgagcttattaatgctatccatcacatgaagaatggcacaattggttgggctgtcattaaactagacatggagaaagcttttgacaaagtggaatggagctttgtcaaggccattctcatccatgtgggcttccccctcaagttttttttttctcttattatgagatgcattttcatggttgactatcgtaattctatcaataattccctctctgagatcatcacccctactagaggcataagacaaggctaccctctttccccttacatctttttgctggtagctgaaggtctctctgctgccattcgggtcaaagaataaagaaatcaatttgctggtctcaggatctgtcgtaatgcccctatcatttcccatctcattttgctaatgacaacatctttttttctaccatgtctaaaaactcaattgctgccatcactgacatttttgacctttatcagaaggctactgggcaaacggttaaccttgccaagtcatccataatcttctcccctaataccaatattgatgccaaaattaactttaagaattcttcgggcatcgctagtgagggtcttacgcgtaactaccttggggttccccacggtactggtagactcactactgagaaatttcattacctggtccaaaaagttgcttccaaaatgaacatttggaacacaaagtttttctccaaagctggtaaggaaactctcatcaaggtggtcgtccaggccattccttcttttcccatgtcatgttttaagatccctaaatccacttgtcactctatccagtgcctcatctctaaattctggtggggctctttcagcaacaacagtaaaattcactggaagagttggtctactatcagcacttccaaattttttggtggccttggttttcaatctctcattcatcataaccaagcgttgattgccaagtaggcttggagaatctagaatcacccttattcgcttcttcactcccttatgaaggccaaatatttcaaaaacaatgacttcctcaatgctcctattggccactgcccttctcaaacttagaaaagccttctctgggggcctaagcttcttaatcgtggactcatttggaaagtgggagacgggaaatccatctccctaactagcgataagtggataccaaggctccattccctctctttccttaacaacattgacccctccaaccttgctgtctctttctttttagatagtagtggcaattgacatatccctaccctcaagcaataacttcctttttaccaggtccaggaaatccttaaggttcctatcgatccttctcagtgtgacagtctcatctggggtcagcaccactcagggattttcacagtcgattcggtctatcaccttgctaactccaacccaaacccttccctggccagtggccaccacttcaaatcccacgagtcaaaacatttggtggaaagctaggtggaatggcgaagttttacaaaaaataaagcatttaacttggaaagcctacaaccatatcctcccatgctctcttaacctccatcataaaaaaccctccctcacccctactgcctaatttgcaaatccaaaattgagaccattttccatgccctgcttcaatgcccactgactaagtctgtttggaaaaaatcttcactcaaagagttcttctttgcaaattacagatatgatattaagaattttcaccttacaggtttgtaaacacttagcaaagatcaattttggttacttttggtatggcagatttggaacttaagaaataataagctttttaaatgcaagtctaacaatcttcatgatgaagaaatttttgtgaagaatattttacaggactatcaagtagcccaactgcttacttctcattcaattcacagtaaagacttcaccaaaacaagtttttcaacccctgcagtggcccaaggatcttcctcgcgccagcatcctggcttcaagctgaaagtggatgcaacttttaattccaaactcttaaaatttggttttggtgcttcaattgtcaatggtcgtaaccagaggatagcaggcctgtcaagctgcacatggggagcctcaacgccaatttttgctgaagcccaggccctctttacagctcttgagtggtgttcaacaatccgtatccccttcagtaccatcgaatcagattgtttgcaattagtttctaaaattcgaagttcctggaaggataactctgcattttccagtctcgttcatcaaattcgggagtccctatcttttttcccaaatgctaccctccagcatattcctcgtagtcaaaatcaagatgcacatctcaacgcaaggaaagcattaaggttagatttggatttggtttggagagtttaatttctccttctctgtagctcttgtgtattactacttcaaaataaaaatatacatacaaatac

SEQ ID NO: 21893 - DNA, 3187 bp, Cannabis sativa
  modified_base (540)..(545): a, c, t, g, unknown or other
  modified_base (2514)..(2514): a, c, t, g, unknown or other
  modified_base (2634)..(2640): a, c, t, g, unknown or other
  modified_base (3151)..(3155): a, c, t, g, unknown or other
ccatatatattgtcttaatttctttattatgacatataatgaaaactacataacctataattggcttaaaaaactcagcaacgtgtggtccctcccctttgattaatttgtatttcactatttttatttaaaaaaaagttattggacaaggtttgattttttattagaaacaatcaagagaaaattaattaacttctaattgaattgctttatatcatatgtaaaaagcaattattaaaatatatttccctcaaagaaaagtaattaaaatatatatgagtgatgatttatcatataaattaaatttaaaagtattaagctatatataagaacatgtgttattccattcattaccaattagttttaagatagaaccccatgattcttaacatggcatcagagccatattcctagcgagctttcaatccacacatatccaaatggttagccagccgcacgagatccagatggtgtaaagacgcttgagatccgaacaaaaataagcgagcaaatggtgacttgtgataaggtgattcaagnnnnnngagcaaaaatagccaccatcttgaagggagatattgaagagagaacattgtcccacatgaattaaatgtaaaagtattgagccatatataaaaacatgcgctactccattcattatcaattgattttgagataaaacttaataatttttaatacaatatatataaatacagtgatcgttttattagagattattagagcaataacttcaactaatgatgaagaaaattataaaaaatgaatatttaattgtgtacacatatatagtttatcgtaataccattttttttttcttttttcacaaacgtatgttttatatttgaatcattcttgatatcttttcaactataatgtaaaaaaatcaaaaatatattaattgtttattcaaattttgacaatagtaacatagtaagaataacgacgcgtggcacaaaaatattgggactgaattgatgaaaaatgtgtaatgttatgattgttggtgtagaccgttagtcatgacccgttggaagagaattcttacgatcacttttccccctagcttgagcaaggtggctgcctttagggagaatttagactaacaccctcataaataaacgatcaccacacacttacgggatcaaatcagtgtacggggtagatactactacccctacctcaaatttaatgatatacaaagggtgatgaagttagtctagggtgtactcctaaacccctacatcctcatggtccaagaagttcattttcctacataagacacggtggatatgccacatcttcatgacgacaaggctacccacaacgtcgaagatcaagtggaaggggttgatatctcaagggtaacaccccgagatggcaactgtcacccccttcacaatgggtcgacacccctaattaaatattggctactaccccagaggaggttaccggtcataccacactatagagggacccctcatcgtcaataacaaattcaaatattcaaactccacaagaagctcaaagatggttacgtatacaaactcgcgaaaataacaggatattatcataagaatcgggttttaattacctccaaaaatgaaggagacaattgaaatatctccgcaatggttgcatctcctaaagcgagaagcaccgacattttcccttatataaggggtcacctatgacctaaaaaagagatctaaaaatttgagtacttagagaaaaaagaattctgtcattgttatccattgcattcaagagcatatttttgattttgtaattttgattaataaaatataaagagagtaggctattatcgatatttggggttgattttttttttttattaaaattctaatgtcattatttatatttattattatttttagtttaaatctcatttattataattctgtgtcggttgattcggttgattgaaaatttagtcaatatataatcctaataagtgtataataaattaggtatacatattgtaaagaaaatattgagtgtttcttatattggaatcacccctaaatcttatatctgttttgcttaattacaactcttattatatgtataattaatttcttcattaattagagataagctacatattctactttattattaagtcttcatacgccattctatataacgaataaaaacaaaatcctcatatacatacgtacgccacatcgcactaacttgtactattctattattaattttctgataattaattatatacatagatataatataagatatgatcaagaataccttaatacataccagttgctaagtaagttaaatttggtaatttttttttggctaattaggatttttttctccttgaattttgacatatactaaatcatgtccttaaatttttttagctgttaaaaattccttagagtgttagatttaaggacttttgtctaatttcattcaattttacgcagtgattgtttatgtactaaaatnatgctccccggactttgatatctaccgaatcatgcatttcaaatttcaatatgtattaaatcatgcttcctgaattttcatcaatgttagatttcttttactaaaattagataaaagtcnnnnnnntcaacaattttaatagttcaggggcatttttaacgaccttacaagttcagatgacatcatttggtacatgtcaaagttcaggagaaaaaaatcttatttttaagaattgggaaaggtgattcacttgttgaaaattaattaataatacactattttttaaatattattattaatgatatcattatagcataatattattattaatttttacttttaattttatatatatatatatattcatttttataaatatgtctctaagatcttttagattaatataaattatatgctaaactttaagtaaagagtaatagtatatcgagcaactcacttaatatataatacgataatatttttgattaatagataaaaacaaaagcatttttcaacttaagccaaaatattaaccttaactcgattcatcgtgactgaggacagggacacatatgtggagcatgccccacctcatatttacgtatgtttaagttatactagatgagagttacgtggnnnnncacgtaaatattagttttatataagttctagt

SEQ ID NO: 21894 - DNA, 4923 bp, Cannabis sativa
aaattaaattaaattaaattgaaaataaaaacggggacaatgctgaaactatacatttaaatattttaattacaaaaaattaaattattacaagaagaagaacaccatattttctaaattcaatagtcaattttaccaaaggagcaagcgagtgataaagtgccacgtattgaataaggacaattcgggtaattcagcgacttttagctctaacaagagataaaatcaagtgcgggcgagtgtaggttactatattaggatcggccgttggggtttaagtatcgggtcaaaatgtaaggatggagattgagattatgacgtggcaggaaaagaaagtgtacacgtaggcagaggagatagtgttagtcacataataataataatagtagagtagtatagtattgtagtagtagtgattaagcggtcaaagtcagagattgggtaaatagggaatgctgacaaggaaagagacgaaaactatgaaataaatataattagtttgaagtttgaccatggtgatagtagtgggtgcgtgggtcagtcagattcttctccactcatcttcttaaattacggttttaccctcactccccaagaataataattgtcacattaataacattattaatacaacaaaaatatgaaataaatatacataaaaactatctccaattctaaaaaattgaatggattataaattttattttacctactttgatcaattaaatttttgttgaattcaaattgaaaattttattaatttactataaatcaatcaacaaataagattataactcaataaaaatatcgtttttatatagtaaaagttcagataaaaatataaaaattaattaaaatttaattaacgagaatgatagaatgattttactcccaaaatataaaaatgaaaaataaagataaataaagtttattatatcttctcgtataaaatgaaataagttttatttttcattttatatactttaattaaagtataatctacttcgaactttaatgtaatatatactttataatctagtaactaataattatggaataacttattagttattgatccaagccttacaaaaatagatgaaatggtcctatttttaaagagtattgttattaaatattagtggtgtcgagtatattttttataagtatcattacatgattaattagctatatttcctaaaggttattttgctaagttatatggtttatcgctacttaattatatcaataacaatatgagaatagtgctagacacctttaacaattttcttttgaaaaatatatacttaacaacaattaaattttatcaaccaaaaatatctcgactgatatagtttgttttttgagctttaaatttgtttttttttttgagaatcttcctaaaatggcttatatcaatagatattatccattcttatatactattaattaatttttttttttatttttagtcaatgtgagagctcatactaatagatattgtatatttttatatacccatgattattaggggtgttcataaaatatctaatttaattcaatccatgcaattcaatctaattcgcaaagtgtgaatatccgcacttgtttatatatacttatgcagattagattttgatttacataaaaaaataagtggtctaattcaatcaacacttatttatatatatttaaaatgttataatttattttcttatttcaaatttatgatttaggtactccggtagtttcttcagtggtaaatatgtaggttgctatgcgaattttagttgcaatttatgttgctccgtgttgatcgagatttttggcaactaaatcattaatgtaataaagatgatttgaagagagttaacgcaaatatttttacgtagttgtgacattaatgaaccttattccatgagtctctgatattaatgtataggtatttttttacagagaatgtttcacctcctttttttctctttcccaccattaatttagttgggggtatttgttcaagagaagaaaagtcccaattgtcttaagtgcctaacttggctgtgaataagttcccaaacctatgaagtagggtatgcactccctacgtagtagtatatgtagagtttaggtgggacaagctcttaacccgtccttgattgatgtgattgctcattatgaagtcgtcacttacatccttgattagcgcgtaattgccgaaggatggctttaatgcgtctgacactccttttgtatacgtttatagatgtttcctccatggtgcattaaatgctagttgatagttcattttcaataccttgcatccagaggaatgggatgctacccaactcccagaggtgaataaaagttggatccttccagacccagtcgtggctcccagagtagttgttgagttatccagaaggtattctgtctatgtaatgactttcctttaattatctccgagtccttgagcttaatctgccacatgtcacataatgggcttgccatgtacattgggagaaaatcagggcaacattccgttagttgctataggaatttttgtgtagagttccataaaaatgtaaataaaattattttaaagtgtaaaaatgaaaaactcttttaaaaattaatatatatatatatatatatggtagatatatgttttaaaatttaacatatgtatatttttatatatgtgaaaatataatataaaataaacaaaaaaaattctttctattaataattttttttggttttttttttttaaatttgtttttggagacataaaataataataataacatattctattttgttgttggttatgtaaaaataattaatattttaataaatattaaataatttaatattaaaaaaataaccaatctaaaataatcaatccaatctacactaattggattggatctaaaatataaaatctacatttaaaatggatcagatgcactatgagcaaaatagtacgaagtacatcagataaacactcctaccttaaatgtgaaactttagttggacaccttgtaaataaacgaaatacattataaatttacttttttttgtattttacttaaagtttcatgtacatactaacttttattataattagatatatagtttgaaatctatttaataattattgaataaactgaactattgatccaatataattatgagaataaacagaataagtctactctcaaaaactatgaaaaaaatgaaaaggataaacaaaatttattcactaaaatatacattgatttatattatctccataggggaaaaaaaaaggcagcaaataaagaatagaaaataggttaaatcaaaagtaaatttgttatttgttatttttgaacaaaaaaaaagtaatttttaaatgctttagtatttataaaccaaaaacaaaaataatccttaatgagaaaaaattagaccacaactcccacccacttctctcccaatttgtatataacatgtatattaatagaacatataaattttgattttttttaattgaaatgtcataaagattagattggaaggtatttatatattaaatttttcaacgaatttaataacaaattacttgattaggtgaacaaaatttattataaaacgaaaaaaaaaaaattgcactttgtaggggttcaatctttgaaggtaaaaaaagaagttaaatatatataggttggtgaatttataagagtaaatgttttgtatatttatatatatcttatggatatgaattttttagattgatcttggctttgaagtaggactaggtgataacaaaagttggtgaaatggaaaatgagagtttggtgtggttttgatggaaaactgtatagttataggtgagagtgtttaatgataaagcattcattaaggtttcttttatagatacatattttataaataattttatgatgatataataggccgcaagagatatagcccatatttttacgttgaaatattggcggcaaattcatctgaactatacgatttgtaacacttaactatagaaaccgattttgtacataatttttataataatttttattattatagttttatttttatattttttaagtaattttttataatatattaataattaatgctatgtggaccactaaaaatacgccatgtgtaaattttatacactgtgtgtggcatgtcctacttggcgcttaatagagccttgtggacagaagtgtaaaatgtgagtttggtaggttttaccgtcaaaaaatcaatttatgtggtgaagtgttccaaatcgtatagttcaagtagttttgccgcatatatcccttatacataaaacctctatctaagaatatacttaaaaccaagtaattaaattatattctaactaggaaactaaatcgtgctttacgcagtgttacccaatttttgtaatctttttatgtatatttttgtgcttattcaatgatataatctaaaatatattgatatgtgtattataaataaaataatatttttaaaattagaaatataatttgttatttttaaaatatatagaaatatggtaatattatgacaaatatcaaaaattgtggaattaacaaagaaattgcaatgtattttttaaataatataaatgaaaagatatgaatttttcattttaataaactgaacttgtgattgatgatgcaattatttttcaaaaactatttaacttatttttcttcaataaaaaaatactttaactagtgtttatgaaagtttttacatttagtttgtggtttcatttgaatgtattctccacaaagataaatgtagtttgatgataattgtaaaatgggttgcaaaatattatctgtttttatcaactaaaaatatgggatgttataaatattattaattatgtggatgtccaaa

SEQ ID NO: 21895 - DNA, 5865 bp, Cannabis sativa
tcttacttctcacattttcatggcatcgccactacctctctcttgctcttacttctcacattttcatggcttcctaagttactccattcggtccaccagatccctaaacggttcacagtttaatggggtcctgcaagtccaaacgattaaccgtttccgtgcaggaattcaaaatctcaacttctctctctctctcaattctaccccaaatttcatgcaaacttcgagaacacctaataacgtccaaataaacataattcgactcatagatatatcatctagcccctgtagtgaaaatcaccatagttgagtcaagcttgagcttcaaaacttagctaaactcaacccaagataaaaccagcaaaatctaccaaaaacagcaaccataacctcaaaacaacctctaaaaacagtccccaaacaaaacaaatctcaacaaaagcaagtttacctaaactcaattcaaatcatgcttaaatcgtatttacaccaaatgtagccatgatgacgtggaataatttagaaatttagagactttcagtttactgctctcattctaactgaaagaaaatgaaaactctagctctatctctcttagaaatttcaaaacacacataatctctccttataaaattcgaccatcactacatttagtgattgagaatttgcctacacttgtcttgtgtgatacttagggcactgaggaagactatgaagatcataagtcaactattcagcttttagagattttcgggctcagtactttacaatactctgctataaaaataatacgaggattaaattacttaaatagaagagtcataatattcgctttgttcccaatgtaagaatactaaacttaatgtgtttaatttgtcttttaaaaaatcatgttataagtaatttaataattaagttaattattggaatacgtattagtaaataagatcttaataaaataagttttaataaattcgtgttcatgggtataatatttttatttttatagtttattttcaagtacatatcgtgtcgtattataaaaaaatataaatcgtgttgtgttgtgtcataaaaaaataaattttatagtgtcgcatcataaaaaaatatgagttgtgtcatgccatgctcgaatttgtactgtactttccttgagttagttcattttcttttatgtacttcaatttgtacttctttttttatattttatttttataattaatgaaataattattacactatatgtggtttttatagcttcaaattttcttatttatttttttaataatatttatagaaaaccattttgaaaaatcattacaattattgaatatgtagtatgaaatactcaaattattattattactattaaaattataagtttttaatgtgtattgcactcgagctagattatttgtgtttacttgttctgttttcgatgtttttcgtacttaaatctacattttttttatgtcttacctaaatccatattttttatgtttgatggtgctcgtaccgatttcgtatcgtattaaaaaatctggcacaacactatattcaaggatataattacaatcacaaataaaatcaacattttcacatcttatagtttttgtggactcaaatagatttgcaatcaatactatctttccctccttagccctttccttctagcccaacacataaaaaaatcaattcataattaatcttccaatcactcttaccaaacaaagcataagagagtcacacatacacacacacacactaatgggtgagttgttttgtggtgtgtttccaacagcacagtgactttatttggcttgtattagaggttgttttcgtgggcccaacttggtgtgtgtgcccttctaatttcttctgccccccaacgaaacccacaccgaaagcacaaaaattactaccaaaaaaaaaattaaattaaattatgacttattgttttttaattatttattattattatttttctttaaataagtccaaagacaaaattctccattcctttagccatatcttcagatacagatatagaaattagaaagaagagaaaagtcgcatgccatagtacattacacgtggcaccacaagatcaatctaatcggacggtctatcttttcaacacaattttatttctttttcttttctttcttatttattaggctatttagcatttttgtatgaatatgtgtctctaaattttttttagctcgttaaagtaaattgattcttctttcaagttttattccatgtgacaaataaaataatgatataagttaattagcatgtcaacattatatatataatttaaattaaaaaaaattatgtatttttaaaaaatcaataactaaaatttgattgaaaaatttaggtaaaactaaaatattttttttaatttattatacacatggtgtttgacatgttactgacgtgacaattggttaacaacatctctaatgctaaaaatttaaagaatacttactgaagtagacatattatataataaaattttgagatgctatactattaaagagaaaaagatgtcattagttagcattgatgctatttatttattttaataaaaaattgaagctaaaaagttattaaaactaaaaattagaatatatattattaaataattatgtgtgagataataattatagtatttttgaaaaatgctatacattagagtgttttttgaagtaagaatataaaaaataacgtgaaagagagatgaaataaaatattatatttttcgatgatgtgtagatttttagcatacttaaaggatgctatcattgaaaatgctttaagcaattatgttattattttatttgttatctgtgataaaatttgacaaaataactaatttataatactggaaatagtttaagattattagtaactaagaaacacaatttaaagaaaaatcttaaataacttatttattacattatttttcttttttcgtaaaaaaggacaagcgtgaaaacctctctgctgaaaattgaagcctatctctctccctctcttttctcactcactgcactacaaaataaaaggagtctcagctcgatagacgtagagagagaaagttaggcacactcagagaagagatgagactgagaagaaccaaagaacactgagtttttcttacttttctttttctctctaacataaaacagagtgagtgagtgtgagagagaactctgaaacctcatctctttgaagaagaagaagaagaaaatggcaatgaatgtagaagaagagcaacaaaacccttctctatctttacttgacactctctactgtgaagaagagaaatgggaagatgaagaagatgataagagtgaagtttacagcactaataatgataatgacgataataacccttctctgtttcctctgttcttacttgaacaagacctgttttgggaagatgaagagcttctctctcttttttctaaagaagagcagcttaaacaaactcattactatctattcccacactcttcttctacactcagtctggttcgtcgtcaggctgtagaatgggttctaaaagtcaatgcccattatggtttcacagctctcactgctgttttagccattaactacttggacaggtttctctcaagcctaaattttcagagtgataagccatggatggttcagctcgtggctgtaacttgtctctctttagctgcaaaagttgaagaaactgaagtccctcttcttctagatctccaagtatgttcacatataacttatctcttccatttttcttcttctttttctctttcatttcgaagttttaactgtaatttcttttaggtgagtgatgcaaaatacatgtttgaagccaaaacaattcaaagaatggagcttttagtactttcaactctccaatggaagatgcacccagtaactcccctttcattcctcgaccatatcataaggaggcttggattgaaatcccatctccattgggagtttctcaggcgctgtgaacgtcttctcctctctcttgtctcaggtaacaagttctttaacggttgaatctttttccttcataatccccataaagtgatttgtatttttcgatatgaacaaagaatatcacatagcgtagtatgtttcagtcagaattctcatcatttttcatatattttatagattcaagattcgtctgttaccttccatctgtattggctactgcaactatgatgagagtcattgaccatgttgagccatgtaaagccattgattaccaaaaccagcttctgggtgttctcaaaataaacaaggttcgttaatggtttacaaatcttttcaagtcaaaaccgttttcattaatttggtatttattatggggttttttacataattttaacaggaaaaagtaaacgactgctacaatctcataatcgagctttccaacgcctataacaacccacttaaacgcaagaacgaggtagttccaggtagcccaagtggcattatcgacgccattttcagctcagataactcaaatgattcgtggtcagctgaatcttcagtatcttcttctccaaagggtcgacagaatttgttcaagaagatcagaaccagtgaggacgataatcagaagatgagaatgccttcggcgcttagccgagtctttgtcgacattgttggaagccctccttaagaaaaaagtaaaagaaaaagtaaagaaagaacgtcgtcgttttctcattttgaatctatgattgaagaaaaaaaaaagaggaaaaagaaagaaacaaaaaagactccatatttaatttatggtaattaatatctcatttcaatgcatgggatttattagcctattatttaggcatgcttttttctccacctttcattcccatttcttctttgattttccaacaatgccctttctgtggaaaaggcttgagggagagttaagcaatggtgataggtggcaaaatggcatttcatgatatgagagaagaggggcaaaagaggcattagatataaagatgagcatttgtgtataataaagggaaaaaaaaggaaaagaaagtctacttcttctctctctatatattcgatggttttgggcaaaactctctctaacttttggaccataccccttttatttggacactaatattttatttatgtgataaataaattcaaaacaaattttgaacatattcttttatgtatatatgtaatgatgataatgtatttttatgtttgataaactgtgtttagtttagattttgttttgttgggggggtttgaaagtttgttttgttgttttgttggcatgtgaagagggaaaaaagttgtcgggtagtggggtaagagcgggatttggtttgaactttgaagaagacttttttgattgggggttttgacctcgtttatagagccactctcccctacccctatacccctacccctattatggaagtgactctataatcccccttttgtccaacctaatcctctctttacatattttatttaatattggctactagtgagatgttcaataccttctataagtactaattaattatattttttaaaaattaatttccctagttatataaaggatatgatatttagttaaactcattatactgaggtgagtacttagatagtaatggtgtcttttactaattttgttatttattgataagaatagttaaaagggactgttgatgcttattatattttttttagtctaataccattattagtttatgttggatttctaatcctcaagctatgatctaactcagatgtgttgacaatcgaaaacaaactattggcagtaatgccacatacact

SEQ ID NO: 21896 - DNA, 1732 bp, Cannabis sativa
gggggggggggggggagagggggtaacaagaatctcattcactctgtatttcactctgtattagctttgtttagtttgttagttagtttaactgttatgtcagttaaaccgtttagtctattagttgttacaacatctttactttcctgagttagttagttcactaactaattgagtccaccgactctcctattgtatatatacctctgtacatatcactctgcaattttaattccaattttttttttttttctgaattaaatgttccttttccttttcgcgttatattaaaaaaataattgatttaaaataactaattttattgcagattgaattggattagaattaaacggatcgagattaaatccaaaatattactttcaaatttaatagcgaatctgatgcactataactaacaaaaatcgaattggatttagataacactcttatcaacatcccaattaatacatatgatattatttagtttacacagaagttttgtatacagatcttattttgatgatgaatgattaattactcattagaaaaagtgacggattattaaattcttgcttgtatatatataaaagtaaaactgtacatttatatatcttttactaattcaatcaatgatattggtcttttatttgcctacgataaaaaaaggtaggatataaattcatcaccaaatattaaaagcaccaatttgtaataatgtttcaaccatttctttgaattttcggctcatccaccaccttctattattattgtatatttaaatacttccaaccatttttattgaagtactgctaattatgcatgttgtgcgcaaaagcaaaaataaacgattatttgattaaagtccatatatatttaaattattatattatatggctagcctaagaatgttaattgtacatgataatgaatcatcaatgccatgcagaagagttggtattgatatagaaaactagtatagatatgggtactcataaatctcaattatagtatcaattataataaatacgacaagttataaaagtactgtccttatttactttatttaatttttgttaattaaaattttttccccttaaattttgatatatatcaaatcatgtcacttgaatttttttggccgttaaaaattctcactgaactattgagattgttagacttaaacacttttgtctaatttcatttaattttactgtttcattgattgtttatgtactaaaccatactcctcagattttgatatctaccaaatcatgctcctcaaactttaatatgtactaaattatgtcctgaagttttatccatgttagaatttttttactaaaattggacaaaagtctttaaattcaacaatctcaatagtttagggagcatttttaacgaccttaaaagttcagaaaccatgatatggtacatgttaaaactaagggaaaaaaaattcttaattagccttattttttatctgttataaaagtgttgccactacacatttacacgcctagttatttaattatgttaacctttataacaacatttgtaattcaaggaatagctcatttttaattgcaagagtctactggttttatataattgcatgtaattatacctaatttacttttcaattaagtagtatttttttttgaaataaaatcatcatctttattaattgcaattcatagtgattacatgattaaaatctggagtaacatcacta

SEQ ID NO: 21897 - DNA, 1873 bp, Cannabis sativa
cccgttcccagcaccttcaaccactactggttcccaccaacaagtcccattgattgtcactcaccgccgctcgcacactaggtcaccccggtcgcaccccgtcattgttcgttggtcttcaggtcggcgttcacacaccaagcgttcgcacatgatgttcgttggtcttctctacatatatatgtatatacgtatcattgtgtcacatttagatatataaacttaagttctttactttcggcaaccattgataattgtatatatgtatttataattttggttagttttgagaaaatatgagcctcaataaattagtttatggtattgtatataaatttttgatctgattatttgattacattagcttgaatatattgtatattggagttttggatttgaatatttgttatttttgagtttttatcttagatctgacttgaatggtttgtggtttatatattgtactattttttattattattattaattttagtgtaagtctaaaattgacatatgctattttaatgatatttcatacactaagtgttagtttagaaccgatacttatgctcaagtttaggaactgacaccaaaaatttgattttttgtcactgtaaaataggtgtcagtttcatgaaccgacactaaaagtatagatgacaatttaaaacagataataaaattacagtttgtagtattggtcacttacatacttgttcaaggttcattcttcttagaaatgaacttatagtagaaaatgtttttgtcctaagtttgagaggaggtgttaaaagtaagttaaactatcttaattcttttataagctattagtaaatttagttaggatatatctagttgttggaattttgttttgaccaacacactttaaggaagaaaaatacatactatagtacaaaagtgatattttttaaaatgtgcgttcacaacagtatatgttattattgtaaaatctcacaaatgcaaatttatgtttcaggcccaacaaccaagagcccaatatgaaacaaaacaaagagtcaaagactcttactctctctctccaatcattcggtcaaagcaacaaagaatgagtcaaataagactccctttttcacaatatattcggcccaacaagaatatatgcagcccaatattgatgcaaccctaatataccaatataaaaggtaagttatcaggtaatgatctcaaaccctaaaggtgtcttcttcactattcggcagccacaaaaaatcctttcaaaataattcaaaaactttcaaactctttcctctcttcaacacaaaaatgacagctgcacaaaataatattttagggttctaataagtttcaagcttcttccttttctattctaatggcagcaacgaaataggtagagttttctatctcttcttcttcttacagcagctaaggttctatgggttcttctcatattttttctttttcttcttgctacaggttctagggttagggttcttgaatttttccttgctcttctcacttgttctacccgaaactaccaacctagaaaactctcctttctctcggccaaaactcaatataccaaagccgaaaatagcaggaacacccaatacacacaccaatacaaatataaacaatatagagattaagatgagagatacaaacagtaatggtaaagatggagacaccaaatttgatctcggaattcgcccaaaataaccggctacttctccatcaagccctcatcttgaatccattaatcattaaataacaggttacactcttgatttacaactgtatgatttctctctgtttttctctctttggatactaacaaaactctcttttccttttacatgaacacacaagtgat

SEQ ID NO: 21898 - DNA, 3450 bp, Cannabis sativa
  modified_base (3129)..(3136): a, c, t, g, unknown or other
tgtcctcactcgcacgctttctagtaaaacttcccagtaggtcaccattctaaaatttcttcacgtcaagcacgcttaaatatggagttctttcgtgatgggctaccaaaaaataagatgcaccatgttgacataggtagtaccaatcaatccatttaagctctttttaactttatagtcctatacctacacagtctcagaattattccacttgacctttctcaggcgatgtgggattgcacagctaacccggtattttcccttacggatcatgggactactgactctcacaagtttaaataaaaaatttaaatattataaaattaaaataaataataaaattcaacactaaaaaccaaaaactgaaaacggctaatacaagaattaaaaatcccaatataactaaataataataataataataataataataataatattttgttaatgtaatgcttaattgaaataaaaataaaaaataatccatgtataaaaataaaagatataaataaacaaataaaattttattacatgcatatattctatcatatatatggtggaatttattttctttataacatgaatagtttgttttactaccctatgctatacagacaaaatagagtgtcctactataaatgttctctatatatagaatatctacagtagggccttgatttttttcctatagtataggataataaattgagattatttcacaaacacacaaaaataacaaaaaattacaaaagtacggtttacggaattttaaatatttttacaatttttttacttttatttacagaaaatacggtctttttatattgtattcttgctaatttttttctatctgtatgttattttttgttgttatttagatgctgttttcatgttacttttatgtagttttcttgttgttttcgtatttttttttatgaaaaaactgtaaaaatatataaaaaaaaaaaactctataaacgtaaaaatgtaattttttttagaaaatgtagtgccttatgtaattatttgtaataaatttgtccaatgataagttaaagaaattgatttcactgtagttgcagtggagtaattgtatgagtattgtttataatattatttaatattattttttaggggttatttaatatattttccaactttattaataatattatattttgtgtcactccaacgtggaagaaaggttggctaagacatgtgggcttgtaggctgtgcctagttcatgagcttttaagcattggtagttaaaatgttattttatattggttttgttgtcaaaatttttactttttattaagtttattctaattattttttctaataataatatgaaaaatgtcgttttagattttgtgttttgtaaaaattactgattagactttttattttattaaatgataaatagacattgtattttctaaaattgtaaaaatacgacattgggctcaattttagataacttttttaatataaccaacttaaagataatttttataagaaagaacaactgtagaaattataaccaattttatcataacacctctagatcaggttattattaaattttattttaataaaaaatcagttcaggattctatttgtatttgttatatgtgttttcgcaagcataacacgtgggtattaattaaacatcttaatttaaaagataattatagtagaactatgtatgtaaataaattggtagcaaaaagtacttaagtaatcaatttcgtataattaactattactataagtataaaaaaattgaatgcaaaatttgtaagtaaaattatttttttttaaaagaaatatatagctatataaaaataattcaaattaacttaaaaaaataataaatcaaattaaaaattaatttttttaattattaatattattttattttttaatataaaaatataattaaatattattataatatctatgaagttttaattatatacaagcagtcctatcgtaagagtatagacctttcatcatgataaccacatgatttaaaatcaatggtcaaaaaagtttcctacaggtaaggtacttttgttaggtcctaccatagtcttgcccaacaattataatattagattgttcaggatcaaaattttgttacacctatacaataacaagggtcatttacaaaaatttatgactctattgtattgccgattaaattttctattattatgttgctataaattttttatatactgaatttatttatttatatagtcttacaaattcacatatttatttatattctaaacattatatgtatattaaaacattaatttttctaatatttttcaaatagtgtagttttttcttactttataattaaacattattcttctttaacattatgcatgttatataaaaattgttatattttgttttttagaatcttcatcaattattatttatttaaaaaaataaaacattactaattatatttatattaatataacatgctttttttttatcaaaaatttatataatttagtatttaattgaatatattttagttcatttattctttataatttatatcgttattgatttaacaaatgagagaaaattgaatacctcctacaaattatttacagcatcaattaaatatataataatttttataattttttaattagcacataaataacaatgtatactaatataaaataaattaagttttaaataagaatttattttaatagctaagagttttaagaaaaataactatattatcattaatccctaaaataataaaaaaaaagcttttgatacaatttttttattggaatgagtatataatgtagataagtttttaaagctttgttattattttttttatttaatatatgtttgtttcttaaaaaaataaaaattgttcatcaatgactttaaaacatctatacaaggaaaatgcaagttgagccataaaatagggaagcaatttaggtcaccatatgcagataatttattttaatatgaattaaaaaatatttattaatttatttttgagtaatttgcggcgtaaatatctaagtttaactctttattacatataaatacctaagtttaattttttacggtannnnnnnntaagttatatttctagaactttcctatttacctggtcattaagtgtcaagttattatccacgtgtcatttttttattggtattcttaaatttaatttttaaataaaaaatactaattagggtctgccatgtggccattaacttaacacttaatggccaggtacctatggtagtttaagaattttagcttaagtattattactgttaaaaattaaacttaaggttaaaaactaaagacagattgtataagttcaaggtgacagattccaacacctgcccctgctgcaaaattgcagaagaaaacattgatcatct

SEQ ID NO: 21899 - DNA, 3470 bp, Cannabis sativa
tcatttcgtgaagcactcaaacaaacttttgaaccactcatcaaagccaataataaaaaaaacatggaaacaagctttggggaataaggcttttaatataagaggctctcccaattctggtgtgatccttcttagctcgaaattgtcccatgttattattgctaatgccaccaaaaaaccatcgtcttcggggagtaagaaggggaagcataaggtggaatagagaggaattatgagaatagtaagaaaaggaagtcgagctttagttcgaaaactactgttgacatggtggtagatattatggtggagcctgctaggatttatgagtcttttgtgttagaatgcctaaggattggggaaccctggagcattgacggtattgcgagcggtggttcgcaagtactccctaagtttagtgttcttgtcagagactaagctctatggtggttgggtgaaaggagtgaaacgataaatacattttacgaacaattttcatgttcattgtgtaggaaagagtggagcttgttacttttatggaatgatgattggcttgtggatgtgaagtcttatactacggggcatatttacgccttggttaagttccctggtttaaagaaatggaggtttatgtggtttcatgagaatccgaagcgtagtcttaatcaagattcttggcaattattgaggtgagactcaaggatatgtttgacttgtcgtggatttgtggtggtgattttaatgagattcttcagaatagtgagaagaaggggggaagtgcccataatatttcaacaatgactactttccaacaagcacttgatgagtgttcacttgctgatttggggtgtgagggaaaattatatacgtgggtcaataagagaggaggtttggcacaagtctaagaaagactcgataggtttgtttgtaaccaacgttagaatgatctgtttcctactgtgaaggtgactaatggtgatttttgtggtttggatcatcgacctgtggtggctgttttagaaaatgttgttaggatggctagggggataggaaatgtaggttccatgtcaagcctcattggttgtgagatgtggaccgtcatgtcattgtttctcaaacatggctttcaagtagtgcacctttagactgccataacaagattatggagattcttaagtcctgtgtagtaaagttgagaagttagaataaaagaaaatttgcttccattcctcacctagttcgtgaattacaaaaagagcttgacgatttgcttaaggtggaggcacctctggtgcagatggacaagatcaagcattttgaaagtaaactagatgatttattgtctagggaagaatgttattggtgacaacagtctcgttcagaatgattggctttgggtgatcaaaacacgaggtactttcataataaggcttcgactaggaagaaaaaaaatgcaattgttgagcttgtaactgatgatggcataaaattagttgatgagggtgagattatgaaggaaattgagaactattttacctctattttttagtcaaattacatgtcattggatcagattcaggcaacctttgtggaaattggtagcagagtttctgaaacaaaaaatgagctgctggtttcaccattttcagcagaggaggttctctttgctgtcaaagcaattggtgctactagggcgccgggtcctgatgggtttcatgcggtgttttttcaacattattggatattttggggcctcgagtaacagttgttttcctagtgatttttaatgatgggtatcagttaaataaattaataagtctaatgtggtgcttgtcccgaaagtcacaaagccatcttcggtgaaggatttttgccctactagcctttgtaatgtcttatgtaaaattgtggcgaaggccttgtctattagattaaaggttgctatttccccccttatctcttcttttcaaagtgcgtttgtgcccggccgtgctattcatgataatatgatggtggaatttgaattgttacactcgctttttaaaaatagtattagatgtaaggggtttaaggctcttaaattagatatgaggaaggcgtatgacatggtggagtgaaattttttaaggggaattatggagaagttttgttttgcttcaaggtggtgtgatttgattatggattatgttttgactccagaatactccttcttggtgaatggtaggcctcatgagtgtgaacgaccttctaggggacttaggtaggggtgtcctttgtcaccatatctattccgtttctgtgcggaggctttttcatctcttcttttatggccaaaaggaattgtggcttattgggttctcggtgttcgcgatcagcacctagagtttctcacttattattcgtagatgatagcttgatatttgggagagcaaatgggagggatgctactaaaattcgtggagttcttgggtgttatgagttagcttcgggacaataagttaatttagagaaatttgctatatcattcagttcgaatgtttaaaaagagaatcgtgctaatgtattggttgttttagggcttgacttctgtggaaactcatgacaagtatctcaaacttctgatgattattagtaggaataaaatgcactctttagatagtatttgtgaaaaagtccataaaagagttcgtggttggaaaagaagcttctttttggcgggtggtagggaaattcttatcaagtcaattcttcaagctattttgaattatttgatgagtattttctagctcccagttgctacgtgtgataagttgtggtcaagtttgttgcaatttttgtggggtacaaagaatgagaagaaaaaggtagcttgggtgaagtgggataaggtgtgtcaacctaagtcgaggggggttttaggttttagagatttagaattgtttgatcaagctatggtcgctagacaggtgtggaggttcatgcaaaatcctgagtcgctgtcgggacgaggttgaaatcaaaatactttccaaactcatccattttggatcctaaggatcagaatgggtcatctcatttatggtctagtttgatatggggccttcaactcttgaggaagggattaagagtggtggttagagatgggaataggattgaagcttttagagatccttggattcctaaaccaaggtcattttgacccatcatgtgttggccaggagaagaactaatggttaaccactttattgatgataatggaccttggaatttacaaagattagagcaacacttcttacctttagatgtggaggctattctttgtgttccattagctattgggccttcagtggattcgtggtgttgggactatgattctcatggctgctattcgattaaaagtgggtacaatttggctattgaccttgtgtgtgatgataagactgcgtctaggaatggcaaattggagctcattc

SEQ ID NO: 21900 - DNA, 4942 bp, Cannabis sativa
ttgttgttgaggtttttatgttttttgtgcaattctgatgaaactttttaacatttggttgtgtaggcttcttgtaatggcagaatcaaaaacaagtttgaggaaaccagtctttaccaaggttgagcagctgcggcctgggaccagtgggcacactctcacagtaaaggttgtcagtactaaaatggttttgcagaagggccgtgccgatggtccccaggttcgtcaaatgagaattgctgaatgcttggttggggatgagactggaatgattattttcacagctagaaatgaccaaggtgtgaatattgaattattgttctgtttaattgatgcattgctgaatgttgagaatccttctggcttttgataattatgcatatgttctgttcctggggacttttctgttctgttaacatatgttcttgtgtgctaactatgggcttattttcttttgtctggattttagagattaatgattttgtctgcagctattattcttatattatgcttttatttatggtgattgttggatggtagtctttgtttttacaaaattctgttttcattttcatttcgtacgataatcttgcgtgttaggtgtactggaaagtttctaaaattgactaccttgtaccattatagtgtcttatcaccattgtcttcatacttcttctttttttaactcatatcttgtatgtttacaatgtggtgtcgttgtctaggcagtgctatatgactgatgctcttgcaatcctagtatagcgtacttagataagctgactaggttagaaattctaaagctttgaaacctaaaacaaaagtatgttagtgaagggatttgtaatctgatggaatcggatggccgcaagaaccgtacaggctattaattttgtgttcaactactttaattattcatgagtctctcattgtttttgtgcttttaattattattagaattcattggtcagttctgcattgctcattgttgtctgttttctaagatgattaagttgtcatgtggaactcacttggtaacttttctttttccttccataagtctttacacaatattattttggggtctttagacagggtgtcttcttttcttgccatgactcaatgcttgtttgttttattgacaacaagatggacctcagcttaatttagacaagctttccaaagctatttcattgtgattgatgtgtatttcattgccaaatatgttcagtaagtctttatccgggcaataggtattttttgggagatatcttaagggggtggtgccgacgggaagttgagtaacaacagaaatattttacttcttttgaggtctttggttttgcaagcttacaaatctagttgctgaaaagaataaatattcacgtagagtagatatatgcatggttttctgttctagaatactataggcaagatttcttgtcgtaatgatggttatgcatcctagctaagaacacgaaaggtttttttccctttcgcagtgctggttatgtagctggtatgttttatttaccaagaatgtgttttttttcccaacaaatgtgttttattcattcaaattttatccaacaaatgtgttttactttttttaaatgtgcattaatcttacttgatgtttccagtggacctgatgaaagagggttcaaccgttatctttcggaatgctaaaatcgacatgttcaaaggatcaatgaggctagctgtggacaagtggggccgtgtcgaagtcactgaacctgcagaattcaacgtgaaagaagacaacaacctttctctgatcgagtacgaacttgtgaacgttgttgaagagtgattttcaaggatggtgctccctctacattttggcccaagaaaataataataaaaaaaaaatcgaaacccagcaaagaaacaaaaaaaagaagtacggttctctacggggcatcttttcgccaatcaatctcatgaaagttttactagtaggaagaagaaatcttgaagcttagttactaccctcgagttgcatttcaccttgagcaaaagaaaaaaaaaatgggtgcaatcgttggttggttatatggtaagtttgatatgaagggagctggctttttggatttggctgtctgtttacaattagctatttatttttcgaagaatacatataagataaacactatgaagccaccattgtctcttctgcataactggaatgtgatttctcctacttaatatcttgaatgctaatatgcccttttgctattttcacttaattttgccttcatttttgtacattctatctatgtgccttggtttttttgggggaagaaagaaagaaataaagaaaaggggtggtggtgggaaagtcatagaagcttattctcgtccattctctgactagtctctgaattaagtgagagtgtgtagtgttgatgagtttggtttttggatttgtagtacataaattatgtgtcacgggaagaggtctactctgaaacttgagccagaaaaagttaaaaagggttcgaaagttgaggttagtagggctccaaatgtagagtgatgagatcttatgcagagacgtgtctgagctggatatgcccttgttttagcctcccgtgaactttatctttggaatttaattacccaattcttaaagggtatgttgtttgttggcattattattagtattattattctgaatgtgactaggagtatcacaagtcacagtaatcgtaacaaaagtggcccgtaatgaaatttggtcggtaagtgattttattaaaacgacagcagaagctcaacctttctaattatatacataaaaaaaatgaaattggaaaatatatatcatgattcatgagtctcaatcaacatgatcttctctgtacattttatgagcaagtaacatcatgaaaatggtaaactttcatattgaaatgtatagaaaaacttccactacaatggactaagcaaaattaataagctttaattattagatagagttgtgttgtttattgagattattttaaggttaatttttcttatataatgaataaaaaggaaaaaggaaaaccccatatggaaggaaggaaccatatccatctgaatcttcgaaaatgaatatctggtagtacatttctttatttctttctttttttttaagagtaagtggtttttgttatgcacaaacaggattgcaaataagtggaatgagttgatagtgtaatggggtacatgtccctactcacatacatactcatatgcaatcatctttgtctttgctcaagtgctacttaggctccacacattgtcttgcccttaaaatggagaaaggaccactcaaaattcacatggcaaatgacccaaaaaaaaaaagtcattagaaaagaaaaagaaacttcttattaaatacatgagactaaaatatagatatatgacattacgttttatcaacgtcatatacacataggcaataaagaggtaattaattacataccaattaaagatcaataaaaccatcattaagataactttagtgtatattttcaaatggggttttctttattaatacaaaacccgtgactaagtagaggactaatcaaatacttagattgaaaaagtaccatttttttttactataaagaagaaaatatatctatgtactgaatggttttaacttcatttaagttactactatcattttcgaacatttatggattagtgcattatgaagtaagcatgcatgcactgctgagcatacttgttaggtgctctactatatacatatacacacacatatatatatatatgctaagtgttcatgattatgtgtggtagtgcacttgttataatagattttcttttgagaaataattgttgttggtgggttttctttaattcttatttggtagttcaagtccacacaagacttccactgtctcacactatatccttaagtggtacagtagtatatatgtaaaatagttataaattaacccaatatatatatatatatattatctgttttaattcaaaaactccttatcaaaatccaaccccatttgtttatttatctctaaatatacttctttatgattattaaaacaaagaaaatgctttgagaaaaagctgctctctttgccaacaattttgttgttggttatgtctcactcttcatccattatgatcttatagacctatttcaactttgctttcttcttactcaaataacaattggccttacatgcatacatatatatatatatggagttatatacattataatatcaaaaaacacagttgtaaagttataaatgcatgtatataaggaacaaacctaattttcttgtttagtagtactcttgttctttggtacaaattgggacaaactaacactaataatatgatcgttaatttgtttcaaccaatcaaatttacccattgttttaaaaaatagtgtcacgatctatgtaatattttggtgcacgtatcattattttactcgtaaataattattaattaaaggaagaaaaaaacactatcatgattatatggaggcaactgttgtagtagtaggtagcatctttctaataagtaaggtcatatcgttatacttaaaatttttgtcttcttagtcaaaaccggctatgcatgtgggagcacatgagatgagattattatgtaaagataagatatatagcctaagtaccaggaattcattacaaaaatttgacagatccaaatgaagactcttctcttgatcatcttcataataattctaatatatctctctggccagtattttaaaacataaaaaatttctctataaataatttatttctatatgatagaacctttcataagttatcagcagcatgacaattttgtctattttgctaactgagataagggggaacagtctgaccacacaaaccatatttta

SEQ ID NO: 21901 - DNA, 3515 bp, Cannabis sativa
ctattttggtttgaagtattccaccaatacttagacatcatgccttccaaagacgaacaagtatctacaggtagtaggaacactgacattgcatagctgggtaaggcttgagcaacagtcttcaacagaatctcacggccagctttggaaagaaatcgtccttcccaactctgaattcttttttgcatcttttctctaaggaaccccagaatggcatttttattccgtcccatggtgcaaggaagaccaaggtatgttgagttttcaggagcaatctccatacgaagcagtgaacaaatccgttgtttaacctcatcagtagtgttagcgctaaagaagatggaacttttgccaaaatttacctgttgtcccgaagctaattcaaacaattgaagcagccgaatgacattggaagcttctctttcggttgctctacaataaatatagctatcgtcagcgaacaacatgtgagaaatgattggagctccattcgcaactttacaccctttaatatgaccaagcctctcaaactttcgtatcaaggatgacaatccttcagcacatatcaagaacaaataggatgacaacgggtccccttgacgaattcctctgtgagggataataggaccaatagtcttcccactatgaaccacactatattcaactgaagttagagtctgcataatcaaatcaacgaaatagctagcaaaccccatacggatcatcatagcacgaacaaagtcccattcaacacgatcatatgctttactaagatcaagtttcaaagccatacaaccctccttgcctttgcgcttacgcttcaaataatgcataacttcgaaagcaatcatgatattatcagagatgagacggcctggtataaatgccgattgttgttcagagataatatgatgcaacacaatctttaagcgattagcaagtaccttagagattactttgtaaaggacattacaaagagatatgggacgtagatcgctcatagtacaaggttgtttcttcttggggattagaactatattggtgcggtttatcccattaggaagagagcaagttgcaaagaattccttcacttgattaatgacatcacggcccacaattgaccaatatttctgataaaatcccggtgtcataccatctgggccaggagacttgtcaggatgcatttggaacaaagctttcttgacttcttcatcagtaataggagcaagtagagatgcattttcggcagtggtaatggatgggacaatactcaagactacatcattaaaatcagtattagatgaaacaaataaattctgaaagtaatcatcagcaataagagaatccaaacaaaccattgttgtcccaattaacccaaactcctgagtcgttttgaagactgtgaatggcattgttctttcttcgggatgtagctttggcatggaagaatttgctgttctgatcaccttcgcgaagccagagttgtttagaccgttggcgccaaaatacttccctctgattcatgatttcgcttagaagtttttgagcatcattaaacttcttaacggactcggtatcacgccctctcttccatcttttaatctcagctttgcatttggaaattctttgtttgaaattcccagtataatcacggccccaaaccgatagatgttccccacaaattctcagtctttccaatatgttacagtccacatgagcttcccacacttgtttaactacttgaaagcataaaggttcacgcaaccatgcgttttcgaaacgaaaatggtgggcagggacgaaagcatgttggaccgtgggctgaagcagtatcgggcaatggtctgatgctgttatttcaagattaaaaagctgagcagagatgaataaattagtccagctatggcttaccaacgcacggtcaagacgaacttctatccaattaggatttcctcttccacgctcccaagtgaatggataaccaacaatatcaagatcaattaaactgcaatcagacaaagtttgattaaaaccatcgattaatctctgcgggtagttgttacctcctcttttatcattgtgacttgtgacgttgttcaagtctccgatgatgcaccaaggaagagttgataaatgttgaaggttacgaatgagattccacgtgaggtgcctttgctctctgtttggttcgccataaaggccagtgagtctccaagatgttgagtttggagaatcaatttgaatatcgatgaagtttgcagaaaaacgaaggagttgggcttctaatttatttctccatagcattgctactcctccgctatggcctcttgaatcaacagagtataagccttcaaagcccaattttattctcagcctttcaagaacagtgttattacttagtgtttcacaaagaaaaatgaagttgggtttcttttggatcacaaggtccacaaggaattgaaaggtccatgggttcccaagcccacggcaattccagcttaaaacactcatggtgatcggtgggcctgagaaccagagcccaccaataattcgttttttgagcccaattgagaatcggccccttgaacagcatctgtagtagtatcttcttccataacttcattggaaattccgttattattcctcccagttggctcatcttgggccaaatcaataattgcagactctctctccaatcttgtgcgcctcctcttagaatcaacaatcacgttatctgccaattcctcttctagaagatcggatggtaattcacatggagtaatgggaatattaccatataaaggttgcattatttcggttgcaattactccttttgacttgccagaattgatacgctggtttaaagcaccctgatttgtagcattaatttcctgaattagtggggcgttgatggtgctctgctgcctgttcacacccaaggaagatccaccagtattctccatatcgtcatcatctccgttgcgcagccattgacttccgatcaggtgatgtcgtcgacgtggttgggctttcatccatattccgtaaggttgcgcgagttgatcggctggactatcaaaacgctttggacaaaatttctctgcatgtccaagaatcccacatataaaacagaatgtggggagaaactcgtacttgaagttagcccagaaaccttcatctccagttgtacgcctcaatttcattctccttttcaatggaacagtaacattcaaagtgactcgaacccgcatatagtctctccaaatacctctgaaatttttgggatcagactcaacgaatgttcctatatagttgcccgctcttctaagaacattctcggatttaaatccatattggaggccatgaacttgtacccatatgtcgaggttattgagaggtactgtgcgaggatcgtctgttggcttcaattttgaaaagataaactgtatgcgattgaaagtccatggacttccttcaatgacgcgattcaaatcaatttcatggtaaaattggaa

SEQ ID NO: 21902 - DNA, 2674 bp, Cannabis sativa
ttagtgcattccatacatcattagttgtgaaagctgctgaaatgatgcgctaggaatcctcatcaattattgttcgaatacatgccaaaattgtattaatagcttcatcatcaatcccctggctgttgaaaatttcttgaaaataattggtgataatgtcaagcaaagtagggatactggtttgggtattaccatttgaatctgtaagcttcttaatccggttgttggcagatctggcattagctcgttggtggaagaactttgtattagaatcacccgattgcaaccaagtaattcttgatctttgatgccaataatcttcttcctttgctaaaagttcatccaaaatttcctttgaattccgaagcgctgaaaagtgttcaggatcattgcaaggggaattctgcagagcagtaacatggtcatgtgaatccttaatctctctttttagattgccaaatgtagcataatgccatttttgtaaatcagtggcacaattggtgatgttagcagtccattgggagagagggttgctgtcattttggttccaattggcaaggatgatatcagtacaagtttcttcttgaagcccgattttttcaaagcgaaactgtgatcgaaattgaggtatttcgatctgatcatccaaagaattgatgatttctttgagagctctatgattagatttataaaaatctaggtgctgcaaggttggagcaagaaaagtctaatcccaatgatcatttataaatccatagttgagccgttctttaacattgtcatttccttggcatttgtttgtccaggttgttctttcaccttcaaaagggatttgggaaagatgactgctatccacagtagaacgaaaggcatcaatttgagaactacatcgtctaggacctccaactttgtcctcattggaaatgacttcattgaaatctcctaataccaaccaaggagacagaggagcaatatctaagcatcttcgtaacagagtccatgtatgagttctctgagagacacaaggatgtctatagaatccaataaaatgcaaagatggcccttcttggttttccacaaaacagccaatatgattagatgaaaagttgtttatggagaggttgatatgggatttccataagagcatcagtccaccaccttgcccatgtctcagaacttctaagccatgtctgaaatgtaatttattgcaaaaactatctatactaccatactttaactttgtttccataataaacagaacatagggagcctgctctttgataagcaagcgtaaatgcctgaatgcactcaggttccccaaaccccgggcattctaacttacgaaattcatggctatgtgcggtgttgcttagcaacaaccggtgaattttcagtctgaggctctgttgaatctgagaaagtgctggaaacaggcagagtagaggaaaggccagatggtgctgaagagtccatctggccatggagagcattagaacgacaacgtttgagaatgctcctaaggatttagagtccacttgacatttaaattgtttgtttggattgatattttccgtatcatcatcgacgacaatgacaactttacctttattatttttggcataatcgcttggatggagggaatgtttagtggagacaatagtattatatgtggaagagaacgatggtaatggtgtagaaagaacttgaaaagggttggttctttgaatggatcaggttgcgggtggatatgtagaaatcattggggggttggaagatatgaagggaagggaataatgactgtttcattggtggaagtggggggaacacgaatggagtttgttggtatgtggggatgtagaatgtcagtagtaacagcaagatgagaagtctgatgctttgctattgaaggactttctatatcagttaaatttggtggcagtggaagtgatcttgtggagagattaagaatggctgcagtgaacgatttctttgagattcatgtcattaatggccatactcctcctttgatgaagtcagttctatagcggtcatagctcgattcaggaagaggagaaccgatcatagaagggccataagccaaggagggttcaacaccattgtagatttgttccaagaacttgtgataagattcaaaaggatggccaatggttccgcatttgaagaaaaattcagggaggtgctcataccaaaattccaaccaaaattcatcatgtgagtccttaagatttaccgttttccccatgaggaaaggcttagaaatatgaagagtagcacgaaatcgcaaaaccccaaacttcgtttaatgaatcttcatggacattaatataggtaccaatcgaattgcctgcccattccgccatagccttcgatttgcttagaaaaggcagccggtgtagttgataccaaaaaggagttaagcacattgcctccggtgtagcagattgcaaagcagtaggtggagttaagacaataaaatgattttggaaatgccatggttccaacaataggactttctttagatcaccaaggcaaccaaaagtgattaaaaagagactagaatgttggtctgtaatggtgacgggaaattggcctttccaaaaaccactcattttgattcgaaaagtttttcgattaatgtcacgagaagagataa

SEQ ID NO: 21903 - DNA, 2283 bp, Cannabis sativa
tcttaaacaaatgtgaatctcctcgtcaatgacttgataataaaaatgtgttttagctctattattttcctaggcaatgataaatatcacaatcatttacttttgaggttcgtttggtacgccgtattacaccatattgtattatatagtattatattaaattatatttcatacaatatttttatgtaaaattatatgaggtattaatttttatcaatcctaaatatataatattttagtataaaataaagttaaatatacaagtattatataaaaatatgatatataatctaattcaatataatacaatacaacacaacttaatacaacacaacttaatacaacgttccaaacgagccctgtcataatcactataaatagattatgatgttggcctaattagttctataatttataattgtttagacatcaatatacacattttggtattaatttcaacactatcatatatttgatcataaagctatttagaaaaataccacatcataaaaataatacaaaaatctcatttacttttgcatataaagattatgatgttgtctaatattccatgactaaattttgctagataattatattattcttttattaagaaattacaccattatcacaacccacaaaactccaacatggaaaataatgatgtcaaagtgttgggttttggaaacagtctcaaccattttcagtgtttagtttgaaaaacaattcatggaaaattaagatcatatcaaataaataaattaaaaaataataaagactttctttgtattttttttaaaacaaagaaaaaaaattcttctatagtaatattttgaataatttttttgttaatggtaaattcatttttgattcctgttttaaaaaataaaaactaaggaagataaacgaattaactaactaacttttcccttaatgttctaactaaataaacggaccataactaatataaaatttaataataatccgatctaaatatgttatgacaaaactagttatattttttgtatctgtttttattagaaattgtcttaaagttaattatattaaaaataaaattattaaaaattagctcaaatactatttttaccctttaacaaaacagaaagtcaaattaataacttttgcaaaagacagatccaaaataatatttattctatttttcatttcctaccaaaatcaaacatagcttttaatcattttgtttataataatgtgaaactattcttttttacatagaatagagaatactgaacaagtttaatttcacatattgttacccaaattctacactaaaaactattttgttagatcaaaaactaatctaataacaaaaatcaacaatctttaactattcttattcccaaaagagaagctaattacataaaagtatattacaatatataagcaagcaagccatgtgttgtatatttctgttttataaatatatactaaatatttaactacataaaaattgttataaaggattgatcttaagcaaatgtgaaggactaagaagcttataactataagaaccataactatggttataatttgggctcaaaattcgtttagcaaagccactatttatacaaccataaccattattattactcaactgatcataattctccatctcagccaagacattatagaacaaaacgacgtcgcaaggaagcacaattggcccttcactatgaaacccatattccagctcagcatcttctaaaagtattctgaaaagtgggtgattagcaaactctgctctcaccacaaacctttgcttttctgggcccacgtacacccagaaacagccttctggagccacgtggctcctcctccttctccgccgccgactttggtctccctcggcccgcggcggaggaaatgggcccactgtggagctcctcctcaatgaagacttaataatattattattagtagtagtattgttaatatttgtgaagccagttccaagagacttgcaccttccccatgccttggctatcaaatttttcttctgcttttccttcacaatatccatttctcttcttcttgtgggaaaaaaatgatgatagaaatgagaatttgacaagtatatataagagatgattatgatttatacatgtgtgagaaatatatgactttaataatatgatgttataataataatacaaggtaggatttggaatagctgagagggcaaaatgttaagctttaactgggaaatctctgagtaggagaggtggtactcttaactattta

SEQ ID NO: 21904 - DNA, 2488 bp, Cannabis sativa
  modified_base (1538)..(1540): a, c, t, g, unknown or other
  modified_base (2024)..(2025): a, c, t, g, unknown or other
taacacaaaacttctataatttctgacctgagattcattaacttagggacatcaaccactttacaacaaagagatttgaagaacaaacacaacctcgtgattgcatatctaactttcttaggcaacacagaacggatactcaccggtagaatgtgttgaatcaacatatgatgatcgtgagatttaagaccactcaaactcaatttgtttgtatccacccaatctgatacatttgaagagtacccttcaggtaatttcacatgggagatagaactacagaaagattgtttttctactttagtcagagcatgacaagccggtggtaaaaacgttcgtccaccaacaacttgtgggtgtaaattggtccggatccctaactctttcaaatctaggcgggatttgattccatctttgctacgcccaggaatattgaacaaggtattaagcaagttgtttgatacatttttctcaatatgcatcacattcaaattatgaggtacaaacaaatgcttccaatattcgagctcaaaaaatattgacttcttcttccatggcccctgaggttcatttgtaacgtcacttttctcacgccgaccttttcttttctttgaagtcatttttcgctttccaaggtggaattgaactttattcaacttctcaaatacttgttccccttgcagaggtgaaggtggcaattcaaattcttgcttaccgttgaatgcttttttccaagtccgaaacacatgttcctttggtaaaaactttcgatgtcccatataacacattttcttagagtgtttcaaatacatagagcatgttttctcctcacaaataggacatgccttgtcccctttcacactgtatccagaaagatttccgaaagctggaaaatcattaatggtccacagtaatatggccttaagattgaattcttctttcctaaaggcatcgtatgcaggaacaccctcataccacaattgactcaaatcatcaactagaggggctaaatacacatcaatgtcattaccaggttgtgaagggcctgatatcaacagtgtaagcatagtgaattttcgcttcattaccaaccaaggcggcaagttatacatcacaagcaaaactggccagcaactatacttactgttaagggttgtatgtggattgattccatctacagaaagaccaagacggatattcctaggttcattgccgaattcaggccacctagcatcaatagatttccaagttggtgagtcagctggatgtctcatcttaccatctaatattctatcgcttgcatgccaagtcaaatttttagcatgattgacatttcgaaaaaaacgaaccaaacgaggtattgggggtaagtaccataatacctttgcagggacaccaaccttcacctcgtcagaatttttttttttttttgccacctagactcgccacacgtgggacacaatactgcatccacaagtcccttacgatataggatgcaatcgttaggacatgcatgtattttttcatattgcatgcctaannnagaaagtgtcttctttgcctcgtaaaaagacaaaggcatcacattaccttcgggtaataactctactaggaaagttagtaaatccgtaaaactcttatcactccacccgtgtttggcttttatattgtataatctaacaagtgtcgataatttagtaaatctattacaatttgggtaaataggcttctcggcatcctctacaaaactttgaaatttcaatagatcggcatttgattcaaattgtgcatctcctatcatttctggaatgcaatcatcctcatagtccaaattaacacccttaaccttcttagacttagatgttccctcgcccggaactctaatcttcttttccccgtggtaaacccaaaccttataactcttatctatttcgttccttaacaaatgctcttttatcttagtaatgttcatacgatccaagttaccacattcaagacaaggacaaagaaccaatttaggatttttnncatacttctgacaaaagtccaagaaatggtcaacaccttgtttatactccgctgataatctatttgcattcatccaatttctatccattttaaaacttctataaagaaaacaaaacaatatttaattatttgtttgaatatgtgtagtatttaattagttaaattaactaccgcacatatataaattttagtgaaatttatgcattctaaacatgaaaatttatcctaattctaccaaaattttagtaacataacgactgtaatcggacgtcccaaaaattttaaacatgccaaaaataagaaacaaaacaaacaaaatagcattaacagtacaaaaattatccacccatccgaccgcattacatgtattcgcaaaacctatttcagtacggatgaatatttaagatatctaaactcatccaacatgcatattccacccatccgaccgcagtataattaatcg

SEQ ID NO: 21905 - DNA, 2590 bp, Cannabis sativa
  modified_base (36)..(65): a, c, t, g, unknown or other
cgctcttccgatctatctttattaataagtaaatcnnnnnnnnnnnnnnnnnnnnnnnnnnnnnncataaaacccaacacttttctattttgaaaaagtctcttgggccttccatatcctccaaaattagagaaattcaacacaatcttaagcaggtgcacaattgtgcttttcctacagattctcagcttcaacgtggacgtcagctggaactcgagcttgataatcttttatatgaggaggaatattggaagcaacgatctcgtatacagtggcttaaactgggagataaaaatatgagatattttcatcactttgcttcctcaagacgagcgtaaaacaaaatcacatccctttcatgtcctgacggatctctagtcacggaaactgaagcccttgtgcggatgattgaacatcattttgaacaacttttcaccagtcaaaatcctgagcaagagatcattaacagtgtcctctctggactcaccaatcgcctctctgaacccgaatttaattctcttagtatcccttatactgattcagaaatcaagagagcagctttccaacttgccagtgacaaagcccctgggtctgatggctacaagggttctttcttccaaaaaaattgacatattgttaggaatgatgtcctagaggctgccaaaggttttttaaatggggatgctaacattgaggccattaaccacacggtcatagtgctaattcccaaactttcccaccctcaactagtgactgattatcggcccatcagcctctgttcgactctatagaaaatcatctctagagtccttgtcaaccgtcttaaacctatccttagctgcattatatcccctgccaaagtgctttcgtccctgaccgcttaatttcagacaacattatcatcgggcaagaagtctttcatgctttatcacatcggacatctgggcgataaggttggatggccatcaaattggatatggctaaagccttcgatcgagttgaatggaattttatcaatcagatcatggcaaaattcaacttccgtcctcgattcatcaatttggtaatggcctgcatctcaacagtttctttctctttttctattaatcagcaggttctaggcagtgtcactccttctagaggcatccatcaaggtgaccctctttcaccctatctcttccttctctgctcggaaggcctttcatccctcatctcccagaagactttagccaataatcctcgcaacaatggtcttggtctcaagattgctcgcactgccccaattatatcccatctattcttcgcggacgacagtctccttttcagtccagcctcttctagctccgccaatattatcaaggaagttctgcatgattatagttctgcatcggggcagatggttaattataataaatcatctctctttttctctcccaatactgatgagaacacaaaatgtcatatcacttctgtctcgggcatccctgttcgaaattcctttgagaaatacctagggcttccccaaactttagggagaactaagaaagagatattcaactacctttcagatcgtgcctggtctcatctgaacaaatggaattcaaagcacttctctaaagtggaaaagaaattctcttgaaatctgtggtgcaggcaatcccatcctatgccatgtcctgttttaaattgcctgtttccttccattcaaagatcgaatccatgatggcacggttttggtggggaggaactgaatgtagcaggaagattcattggaaaaaatggtcctctctcagtcgatccaagttccatggggggcttggctttcgatcaatgaaggccttcaatcaagcgatgttggcaaagcaagattggcgtattcttcaggcaccctattctcttgttgccactttactcaaagcccgttatttcccgcgaaacacctttctcgaggctgcaaaagggccctgaccttcatttatttggaccagcatctcctggggaaaagaacttctagtttcagggcttaggaaatctataggcaatggtgcaaatacttaaatataccatgacgcttggatccctggttttaacaaagtcaattacctcaaacacctctcagatggttgctcaaatgtatctgatttaatcacccctgatcatcaacgggataccaatcgtattagagccattttccctgctgatattagtaaagccattgaaactatcccactactgccccccagtaccccgacacctattattggccttacacaacacattgatactacatagtcaactcaggttaccatagagcccatgcactattatgtaagaatgatccctcctcttcggataccttggtacaacaaacttggtggaaaaagatgtggactcaagccataccaccgaaagttaaacacttcatttggagatcctatcatgacattcttcccactagccacaatatgcacacaaggaaaatcattccttctcctagttactgtcgttgtcatcaccacattgagaccctagagcatgctgttttcaggtgttcaactatccagaaggtatggaaattaactcaattctc

SEQ ID NO: 21906 - DNA, 2266 bp, Cannabis sativa
aacccttgatgagcatcaactatctctacaattgtcattgcaccaagtataaaaaaaactatttcactgacttcagcagaggcatgtgttagctctgtaacagctacttcagttgaaggagcctacacaaacccaaaaacatagcagaaactaattaaattaaaataaacattagcaacttatgtttgcaattaccattgcatacaggtaaaaggagatataataatcataatatagaataaaacttaacttttcagcttcttgttggatggctaaatgcattgttattaaaatggggaataagaaggaactatatataaattattagcaaatcagatgtgcttggtaaagtccaacacaacgaatcttaccccaatacttcgaatcacccacaggctcacagccattagtaatgctactccacttttattgaaagctagagattcttcaaatatgataccagcataacctattccaaacaacaatgccattgctacatcctgcatagaacatttttctcttcatatattttgtttctactcaaaatgaagataagacacagctggaattggaaccacaatcaattgacatataaatcgtcaaaaaactagcaacataaagatatatacctgattagccgcaacccaagaatggttaattgccaacacccctgttccagctgctgcaactactgcaatggctttcagcaaatcagtctttggctggtaatttgcttcaaaatcacttgagcttgtttcgtcaaccgaacataagggatcacatgttccagaaggtgtcaactcctgataatattttaagtggtcgaattcgaagtgctattatcagttatagttatgcataatatgatacatacaattcaacacccaatgctatgctatcaagttcaatcacagtacacacacacgcacacacttctatagtagctatttccttaattaactccattaatgtcaacaagtttggaaccttgttagagctaatagttagttagctcagctctgctctcaagtttttataggttagttagtaatgtctgttaggctaagtaactattagctctaacaaaacttaattcaaatcagcagcagagcaaacaaatcctgatttatggctactttcattgattcaagtgaaacccatatatcttttttaactgaaaaaaagaaaaaaatattctccttggtcactaaatgaaatgcagtttccaaaaagtataaaatttatttgttcaaagggttgataaaagtgctacagtgtttcacaaattgacccaaaatctccaaatttcactgaccaaaaatcattgacccagaaagagataaattgcgaaacaaagataatggaaacaccttcataatttgaaactcttcatgaaagtgaataagaaaggagaacctgcaacggtgtgtcaaaggaagaggaagagtccttggccttatcctcagctcgggccagcagcacatttccaagcagccttggagtcctcagtccaggcaaagaagaacctttagacagaagtgagaagtgggtttgagacagagaaggtgaagaatgggagcaaagtggaggtaggttgaacttgtgggatggcagcaaataggtcccaacagagagggaagccattggaggagctgaacactgagaaagggaagatttttaggaagagaaaagggaaggaggcaatgagctggtccctttttatatgaagattaagattttttttattctttctataaaaataaataaataaataaaagataagttaaatgcataaccataataactgtgttaattttgagttaaaaataagtggaattattattatctttttttaataaaaattgcataaccataataagtggaattgttatttgttatgagtagaatgtattatatatagaataatcctataaagtgatattggttttatttaattgttttctatcaaaattaacttgattaaagcttataataaactaagcttgcaattttgtagatcatgtactcagcaactttgaggcccctgacaagttcttcaattaggttcatcagtgtatttcgaccactttatttaatattcaccacaatggaggaaaggtgagcgacttagtctctgagtgtggcctacgagaggagattttctatccccttatctctttatttgaacagctgatatcttctcgcgtattttggagaaggtcttagactttggtgtcattataggtatcaagtttagcagagatgg

SEQ ID NO: 21907 - DNA, 5285 bp, Cannabis sativa
tgctgacgtggactaacaataacaataagaaccctagacaaaacactacgagtcccagacgcaactggaatgctactggacataatttgtcactacagaaaataatagttcttacaagagctaacattagacgtttgttgccatgaatctatcctcctactatttatcttctagattttggtcctcgtacccctagtagtaagggctaactcaatcccttgaacatatgtttgaatgacctctgtttgtttggcaactataaccatatctcgagcgatatgctcttccaactgcaaaatgaatttagctttcctaacggccttagtggccacttcatcaaaggtaagctttgccaatggatccaattcggtgtcatagtctattaccgtgctgccctaggttaaccatgtaaattcctctatgtttacaacttgggtggtctcttgtatcatagcatacatttgttcccaatcttgtggtggtggaggattcacattaacactgccaactttgagcctggtaagctcccaattacccatattagatcgcctcaggtacatattctagtacacttgcagccatacctttccatccttgaaaatctctcaacccagaattaatgatataagcattaccacacatgcctatacatatttaacaatagttatcaaaacttatcatgcttttttataagcttacacattgcaaataagcaggcagttcaaacagttaacaaatattctattaatcaactaacaattaatatttagtaaactatgaatcaaatgagtcattgcagccaatgtacatgtcaaaccagtcttcaggattttttaaccttagttgctctaataccatgttgtaacgccccgacctatagggacacaacgtgtgtatatttacaaatttattaataattaatatattagttttgcaaaagtatggtttaattaaaactttctaattaaaataaaatataaattttatacaaaataccaccaaaatacgaggatctcctatttataaattcgtttacaactagtttcaaaaccgctattacgaaagaagggatacatttccaaacatagtcaaaaggttgatcttgtcccctggaagccgagacaccgctgttgatatgtacatcattgggagacctatgactcatgatcgatccacagtttctttcctctttacttgcaccacgaagcactcatgagtcacaaagactcaacaagaaaagcaagtaattataaacaaatacattgcgcattacgagaaaatcatagcaactcatagccaacaacttcatcatcataataaatagatattcacccaatacatatttacgcattacataatcatttaattgtcttataagaaaacctaactttgatgcttcataaatcatcattaccacttgttgtccatgagctacgtaagtcactatcgttgtctgaaaaagcactcgataagtaagaaacctatctacggtttcaagggagtaattacttatttcattaacggtaatgaccatatctttatcccattctcaacaagggtaatgaccacatctatccctcgatcataatcgagtcacaaattataataattgttacctcaatcatatttgagtcataaatgataataattgtttctaatcattaccttaatcataattgagtcgaaaacaataataatcgtttctcacattacatgcttcgcagtgcatataccttttgttacctcggtccaataattaggtgtgcgcaccgacttatgtgggacaaactcaatgatcctaagtcttatgtcacaataaataaacatggtaaataacttatccaaactccagaataaccttaattccataatcagacaactctaacttcccacaggtttcaagataacttaaacatcattaaaatatcctaaaccaagctgtgaaaaaaacaccccaaacaaaacttgttttgaagccaaaactagggtttcccttgctggcaaaaccagttgattggttttacaacacctgtaaaactggttaaccggtttcccctacagaaatagaaactctggttttttgaactaaaacccaaccaaaactccatcaaacatgttcaaactctccaaaacagttatatcagataaacacaatgtatacaaactatcaaatcatagtgattcatcaaattaaataaaacaccatagctaagtgaaattaatctcataaaacctcatctccaccaactcatgtctagtagctctatttctaaccaattcaagcttacgcaaaccttaaatcaaagttagaaatcgtgctcagaattcaattcaacctacagccctaaattcaaacaaaaacccaagaaagtttaacctaaaacccttacaaattaaagagaaatatgaggaacttacctcaacacttgaagaactcctagaccttgatagttcaactaggaaaagggtgaaattgctgaaaaaatacctttgttgctactggactctagggtttcgaaaaggaagaggtagaaggaaggttgtaggctcttttgattatctcctaatttcttttctctctattatcagaataatccttagataaatattataacctaataataattacaattcagccaacacttgcactaaaacaataaaagacaaattagggtaaaatgatcattttaccccctcccaaaacttatatgtaagtataacctagggggattttggtcttttctaacttccctgaatgaactaacaacttgactttgtaaactagtctggtataattccaacataatacaactcttattgtcgttacaattctgaccactccgttgagtttccacatttgtcgaacccaaaaatattttattttgaaaatagtttctacaatacccccataatccgataaaatctctgtaattaataaactaagctttatttaaccgtttactcgtatttcactaactaactcgtaattaacttaagtagaattacaatcctactctaatacccacttaatcacatatgtaatagaatatgtccaattaaatatcattatatattctgggatactacaataagtcttcacaacccctgattttttggctgccataacaacatctctagcaatatgctcttcaaggcctctgataaacttagcttttcttacagtttcaatggccacttcatcagaagaattgttagcaagcctgtcgtacttgatagtatatttagtcacagtcatgctaccctgaactaattgtgcaaactcttccgcgtgagcaacacgaatgaaatcattataataattctcgtaaaatattgcctgaaatgcatcccaagtcatggtatacagattttgaccctgagaaacaatcttccaccatatctgggcatcatcacataaaaagtaaataacacatcgtacccggtcattatactcgacctgcataaagtgaaagatagatgtagtcatactcgtccactattctgccttcactgggtctggaccaccctcaaacataggcaaattttttttccaaaatagctcataaattggttccatatgatccccctattaggtggcactacttgaggtgccaatataggtgcaaggtgagctttttgctctttcaggtctgagatctgtttccccttattttctaatcataacctctatagtagcaattacttgttcccaatactgaggtggtaagggattttcttccttgccatctatctcaagcccaaacagctcgctaagtggattgtttgattgctctggctacataatttatcacacatttaatcaacatcttctaaccatttaaaactcagacagatttcaatatcaatatgtgtataccatacacatattcttatcataatcatcactacgctactttccctaacatgttttataatagactaggcagataatccaatagcaaataatataaacacttactataacatgagttgacctatcttcgcagcaaatgtacatgttcgaccagtctttaggaccttcaaaaccatggctgctctggcaccaaattgtaaggccctatcctatagcgatgccacgtgtgtagttttataaactaatttagtgctaataaaataattaattaatatagtctgtgataatattacaaacttcactaaattaaaacactaaaatcagacatcataacaacactaaaactgtgttccggggatccttattgtaaaagttttacaaaaagactaaatacaacaacaagcaaaaatactaaatcaaaatacatggcagatacatcccataaacaactcttggcaactccccacctaggccagtaggctcaatatgtacattgctagagaagactgtcacctcatggctgaactagcttttgtttgccattacttacaccatatagcacctgtgagccagaagaactcgctcataaaagtaataacaataatcatataatttactttttgaatattatcatttttactcaaataatcaaaatcaaacgaccacacattatcataagatgagatcaaaatcactactgacatctgtcacaattaaacgttagtatagatattcggtaatattaaactattatatcaataatagatatcatattaatttaataatataaattatatacatgttatctcataaagtacccatctttattacatcgcattacctaatcaggcaagtcattactttaatttgataatcctgtattcctgtattgcattgcctatcaggcaagcccttgccatagcctggcacccatatattgcataattacatcacctaatcaggttagcccgtgccaaaacatggcaccaacatatcccatcgcctaatcagacgagcccatgccatagcctggacctcacatatcagtgacgcccatgcctaatcaggcatcgtcgacaagaagaaacctaacaatagtttaagtttgtagtcatgacttttcaggattgtttcacagattaacccgaatacctctctcaatatccatatatcatatttcctaatcaggcaagctcacgccatagcctggcatcaatatatcgcatcacccaatcaggtgagcccatatatcaacattacctaatgaggctatcttctcattacataataataataataatcgtatcttaaccttaatatcaatcaattctctacaatattaatggaattgcaacttaacatgttgttgttgggttttatgccctaaataaaactccaattcaatgtaatc

SEQ ID NO: 21908 - DNA, 2676 bp, Cannabis sativa
atagcttttctcttgcaacaatcattgacactttacaaattttccaattcttgttttcaaagtagctttcgtacccatgctcatctaaggcatgtaaagagataagattaagacgaaaatacaaaacatacctcacattcttcaatgttaaatgatagtttacattcatttgaataattttggggcatgcaaaattacccatcttcacattttaaaagtcaccatcattgtatgtggtaacacatctgttaattgaaagtgatgtgaaaagaagctcctgaatctaccacctactcagtgatatcatctctaaacattcattaacaatcactctcatcatatcttcttctatagtggcattcgtagctgtgttgctgtcaccattgtttttcttctttgctggcctcttgaattttttacttcaaaatcctatgaattttcttaatatgatccaacttgtcacattgaatgcaaccctcaattctagttctggaatttgatctgcctatggaattaattatcatttcctttcctaccttctttgtttgacttctccccatattttttaaaataagggcttgagattacacacctccctcattcttttgcttttcaaataaaaccaaagccactataatgattttatactccaacttgtccttccaattagtaagagtggtgataaggtgatcataagatggaggaagtgtttctattatcaacacaatttttttcctcatccctaaacttccctttgaaccttatcatttgagaatatcatgccattgaaattactcaaatgatggagcatatccacattgtcttgctcccacatctagtacagttccttccacaagtagaacttgttagaaagattcttggacatgtataaattctctaaaaagtctcttagatttctttagcaatcttgtactctttcgaatctatatttttcaagatgatatctgatagatttagacgaattgtactacatgcgatctcatctatctcctcccaatcttaaccttcatcatactaggcttttctcttggctggataatgccttgtagaccttttgctgaataaggagatccttcatcctactttataagagggaaaaattaccgttgtcactaaacttctcaatatccaattttttgcccgtcatgtttcttgagtctcacaaaactttgtactggctaggtgattcctaggaaagaccatgtatatatatatatatatcaaaatcctaaatcctatcaacaaagcataggtttggataggcttctagacggaatcactcttataagtgagttcctaagaaagacatagagagtcacaagtggactacttaaattctagtttcccatacatttctacttacgttgtgcgtataaccaacgctacttcataagtagagcttccaaccttgataatctgacacaagttgttgggaataatggaaaatatttcaattccccttcaagataaatatttgcaggaaaatacaatggggactccaaaattcttttttgatgtgaaacattagtcaaagctgccatcacagagaatatttagaatttttggatatcttccaatgcaaatagtcctttataaataacaatcaaagcactaaatgcttcccaaaaattatctcgtggaaaataaaaagtacggtaaaccttttgttataacaataaaatgggtaaacaatactatactctcaagtattgacaaatacttgacgaatacactcaaaactctcacactcaatagtgtggtaatctcactatctctttacaaaatatttctcacaattttgtacgagctctcattttctcactctaaaattcctctaactaagtatcaagttagtaaagctttgtgttagtgagttattagttagttggtatcatagagttggttagttgagatgtaactaactcaagctactataagtagctcatttgcatgctgtaacatatttgaacattaataaaaaatttgttccattttcttcttcctctgttttctctcacgatggattgctcatataatatcagagccactattgctgtgtggtcttcttcatcatctttcttctttttgttctgttgattctctagttttcttcctatggcgcgcagtggtggagctcaaactcgaaacactcgcgatattgttaacaaatcgaatgaatcgaatcaatactctgttcttggtgaaaattcacgatctaggactgcaaatgatctttcaaatcctttcttcctctccaatgttgataatccagttgcgatactagtacctaagattctgacagagagtgagaattacagtacttggaaaaggtatgatgattgctcttgttgcgcgaaacaaaataaagtttgttaatgacaagtttcctcagccagatgaggaacacgatcattatgatgcgtggtgcaggtgtaatactactgtaatatcatggatacttcatgcaatttttggagacattgctgatagcattatgtacctcgataatgcggctgaaatttggtctgaactacatgaaaggtttaataagaaaatgctccaagaatatttgaagctaaaaagattatgcagaatctcacacaaggatcaagcaatgttactacctatttgacttgattgaagtctcatgggata

SEQ ID NO: 21909 - DNA, 4715 bp, Cannabis sativa
cttagcattagggcattacagattttacttgaaaaaaatatatcatttcataattacaagaaacgtggggcatgagcacatgcaagtaaaatacataaagtcttatttaagttattcaaccataaaactctttgataatttatcgccaccttatggtcggtatcgtatcaattcgattgagcctatgagaccatctttataatttttgaaacccattattttagatttcatgacttaacttagtgtgtcgccttaagggtcgatgtcatcccaaaatacataacttcttcttatcttagtcaaaaggtcaaccttgagcaacaatatagacaaataccttccttagggggacaaaaaacaaagctgtctccaggctagtctatactccctcggtgttgactaataatagatgtcataggttacattgacctgtactctttctcttgctcactattttaggttaatgtgtttattttatgaattcttagaattaatataaattaatgactttaataattatgattaagttatctataataaaagccttaaattatgaataagtttcttatcataatcataaaatctgaattaactctttaattaataatttaaaactattttcaattaataggttaattttaaattatcagttaaaaatagttagggtgttacataaggataaaggaatttactgagaggctatgagatacactccttgtaagcatcgccccagatccccattattgattaaatcccattcacgggggaggagagcctagaaatgacgccagcgtgctgcaccaaactctacattgtattccggctaggtttcccagccttgataagcagagtttcgagggcttggctcaaggaggcagaagcttgagttgtcttgggagttggctcgtcggtacgtgcaggggccagaggaggagttagatcctgagtctcaatttctaggacctcgagattagcggtctgggaggctcgcttcttgtgagcagtagtcttgttgggcctttttgggggctccacatcgacgtttgatggagcctccgagatggtcaacctcttctttccccttttgtggaggagaattagttaactccaaaaggtgagttaggtctataccaattagaattgaaggttaagagttgagcgttgatctaatggaattgggttgagtatattttgacaatattcttggaatgatattttgtctatatatgctatttgtatcgattgtaagttgaagatgatgatcttccattcagaagatgaagaagcatttatttttgtggattagtttagggatcccaatttctaaagattttggcattgaaagccaaggacttgttacaagatgggtatctagggtttttagcggtggtgttggacaccacttggccagaagacattaaagtagttcaagaatttctaggtgtgtttcttgatgagcttttaggcttactaccacagtgagaaataaactttgtaattgatttagcaccttcagcggagccaatttctaaagcaccttatagaatggctcttgcagaatttaaagaattaaagatttagcttgaggggaaaacagtcttccctaatattgatctccgatcaggttaccatcagtttagaatctgagaggaggatattctaaagactgttttccatactaggtatggaaattttgaatatttagttatgtcctttggactaacaaattctttgacagctttcatggatatgatgaatagggtattcaaggatttcctcgatatacgggttatagtatttatcatgacatccttgtatactcccaattagaagcgggcatgaacaccacctgcggatgtttcatagaaactacgagaacactagctctatgccaaatttaaaaggtggaaattttggctatcccaacagtcatttcttagacacattatcggtaacgatgggatcatggttgctacgggaatgattgaatctataagagattggcgaaggccaaagacagtcatagaagttagaagttttttgtgtttggctggttattatcgttagtttgttgagggattttctaagatttcaatactgttaacggagttaacgagaaagtatccgcagtgtttatggatagacaagtgtgaagaaaactttcaagagttaaagcagcgactgatcacaactccggtattagcattaccattagatcaagagaagttcatggtttactgtgatgcatctagataaggtatggggtgtgttttgatgcaggctgatagggttattgcctagcctcctgccagttataggagtgtgagtagcgatacccaacccatgactcagagcttgctgcagtgattttttttttccttgaagatctggcaacactatccctacgaagaaaagtgtgagatttacacttatcacaagagcctcaaatatttccttactcagaaagatttaaatatgagacagaggcagtagttggagctggtcaaagattatgattgtgaaattctttatcatctcgggaaggcaaatgtggtggaagatgccctatacacgaagggtcctggggaaatgtctagtatgattataatttcacccaagctagtcgatgacatggttagatcagggattgagtttgttgtgggtaaacttagtaatgtgacgctataatctgatctgcctggcactaccaaaatgtgtcaagacttaaaacctttctactggtggtgcgagatgaaaaaggatgtggtaggttatgtatctcggtggttgacttgtcaacaggttaagactgaacaccagagacctgtagggtttatacagcctttggctcttcctaagtgaaaatgggaggtcaacatatattttgtggttagattacctagaaccacagggatgttcgattccataggggtagttgtggatttaattttaccaagtcaacacattttctaccattgaaaacaacctttacagtggatcaatatgcggacttgtatgttaaagaaatagtcaggttacatggggctccaaagtccatcatatcaaatacagatttgaagttcacctcaaatttttggcaaagtctccagcgagccgtgagcaccacgctaaagttcagtacaactttccatcctcagacagatggaaaatttgagaggatgattcaaatattagaaaatatgttgtgagcttgtgtgatagattttgaagactcttggagtaagtatttaccacttacagagttttcatacaacaatagctatcagaatagagatggctcctgatgagatgttatctggcaggaagtgcagatcttcaattcactaggatgaaactggagaaaggaaatatttaggtctggaatcagtacagcagacaactgaggcaatagagaaaatatgggccaaatttcttgcctctcaaagtaagcaaaagagctatgtagatctgaaatggaagaatgttgaatttttggtaagagatcatgtcttcctacgagtatctctggtgaaggggattaagcgtttcggtaagaagggcaagttatgctctaggtttacagggccattcgagattcttaaaaaggttggattgattggtagcttatttattgtgtctagtagccttgcctccagcactatcagtagtccatcatatcagcaagatttgtcctatgaagagcaaccggtgctaatccttgatagaaacgataaagtcctttggaataagaccatagctttggtcaaagtaattgggagaaacactatggtggaggaagccacttaggagttggagtctaatatgagggctcaaaacctggagttattcaggttagattttgaggacgaaattctttttaatggggggataattgcaatgactgcttagctttataattttagcagataattagggtttacttttagaattagacttttaattattaattacacaattatggagatatatttaaattctagttgtgctaattacattatatatgaattttatgttttttatatttttacgtctggtaataatgcaatgtatggcctatagagtcactttattatgatttagttccttagaaatagcggggcattatgaatagacatttggtatgtcaagaatttgtggggttattaggtttgaccaaaatgccctttggtggcaagtttacttcttggtggaggaaacgtgtaacaccttaccaacttaggcgtgttagtgtgatttttaacttaacggtgcagctcattgctaatcaatgagtttaatgaaaatcgtgaataattaaaactttatttaactatttcttattaataaaataacatgctcatattgaaccgggatcccatttgacaaaatatttaaaaaaaattcactgtgcatattacaaaattttgtcgcctagcgactatacaaaataatcccagctgtcccaaagaccgtacgctcatggcctaatcacctcgacatatacaatcttcatctgctcgctctcacggctgctcaaccttggccttgcccttaccaacgcatgcaaacaatatctgtgagtcgaacgactcagtaagaaaagcataaattataacatagcaataacttggattataatcaagctcccatacccccaaccataaccctaactagtcaggaacgttctcgataaactatgactaactgcgaatcca

SEQ ID NO: 21910 - DNA, 8216 bp, Cannabis sativa
cgaaaataattctaatataatataatattaagaattgtttattggtatttttgttacattgataggtatttttgttacattgatattttttgatattttgatctttttgtgtaactttatttagttgtaacctctcaattagaatattattttcttggtccaagtatattcttgaatagagattctactattatgaatataaactaagctatatatttcaatcaaataatacaaagaaagaaatttggggtacctataaattttataacttataacaattttttatttccatattagttaagaactatctaacaagaaaactcatggattaattattaattatatgatatacatgtcatattgtagccagtcgcttgtctcaccaaacacccaacatcccattccattgcactatttcaatattattattattatgattattatgttactaaattaaatacaagttgattaacaaactcaacattttggatgcaaccatttcggactacgtggtaaacacacgtgtcaaaacaatgactctctctctccactccaccacaacaacaaacccaacactaattaattcaccttttattaatattttcacgaattaatattaaacctaatcatctttgaaaaagaaattagctaatcaattacccccgaactttaccctccaagaaattaataataatataataataattttccaaagtctctagctaggtaaataaaatatgaaaggttaagccgttttagtttaaacccaagtccatgttcttgacttgaacccaaatttctcccaacgcaaacggccaaatacctctctctttctaataagatatatatatatatatacatacacacgcaaatattacttccctcttcccataaatacttccttagattcctcgtgtttcaccagatatcattcagttccaatatggcttccgatactacttctgctaaaataaccacaagaagagcaacgacgtcgtcttcgtcttcttcgtcgccgatcggaacggtagctgaccgagcctcgtggtactgtgcagtggttttactaagcctaatcttggtggcctcggtgcgccagagctctaattctgacgattcattcagagggaacagattcttggatcgaccctgcgatgagatttatgtcgttggagaaggggaaacgctccacaccatcagcgacaagtgcagcgacccatttattgtggagcgtaacccgcatatccatgacccggatgatgtcttccctggccttgttatcaagattaccccttctaaacgcttcgactagaatcttctttctcggctccggtttgtatcatatacatacatacatatatactcgtcagttttccgatagagagagtcgattttcttgtcactttcgtttattttttttaatgtgtaaaaattgaaaaaggaaaaaaaaatagatagagatggaaattgttacgtaatatctcaaattcagtcttggaatattagagaggatctttctattaggtcccccagttcaagattgtatatgatcatgtttctcaattttcttggttcccaaacgaaataaaatttgatttttcttttctttttctgaaaaaagatatttgtttgatttgtgatttagttataaattctcgtttaaagcttgaaataattgttatgtagttgagctttttatgttttttttttttttttgttaatttaagtgattttattcgaatatatttattggagttaatgcggctgtaacattaaagaaatctttatcttaagaacaaagtaggattctaattgtattattttatatttttttttcccttttttaatttggagcagaaagaacaaaaataaatgaaatgaacaatatatgtacccaaaataaatatatttatgaaaataaaactatggcggctggaaggataagagtcttccaactaattgtttgattgaaaagtatatctgatcagccatgctgtgatggcacttatagattatataaattaattttcctgtttcctgatattaaatttttccttttatatttaatttgtttcctccaaaagtataagtatacgctttttttttttcttttgagaaaatgcaaaagtatacatgttacatatattttatttatttatttattattttttaaaattacaaacatgaccgtacatatgtaatgggaataaaaataaaaacacatatagaaaaattaacataaaattaattaaattttttctaatgatttttcttgtcattttaaaattaaattgtcattttaacaaaataataaaaaagtgaattttaataatttaaaatgtaaccaaacaaaaaaaataaaataaaagttgatttttttttttcattttattcaattttattattacctccaatcaaacactacttacaaaaattttacattaatttaattttatctataatatatttgatcaataataataataataataaagatcagtttcatatattaatttatcacacttaagacttacattccgataaaatttgatgaatgacattcataattcataagcatgaaaaattaaagagttagtgtgtttggcatcataactagaaaaatattttttgtttttaaaaatagaaaattatttttagaaaataattcgattttttagacttattttttggaaaacattttttagttaaaacaaaattacaaaaacacaagaattttgaaaacaacaaaatgttgttttctatttttaaaaataatttacttttggtcaatattgtttttagaaaacactaaccaaacacgacttctattttaaaaacttcaaaaactattttttgttctcatttctaaaaatacttttttgaaaacaaaaaaacagaaagcaataccaaacgtgctcttagtattgatttgttgactttcctttttgatgaaaaaaattagaaaaattaacgaataacaatactaaaggtttcgcaggttcctgtgttgtgactggtttactgtgactgttttgtttcttttttctggttgcggcgtttagtttttggtcaggtatggcgtcaagcagtaatgttatggaggatatggagcatagttatgggaacatataattggaggatgaggagagttttgggattgagattgacgatgatgcagaggaggaggttcttgtggatgatcgttggtgcttggtggggaggttcttgaatgcccaatcgttagactttaaagccatgaagcacacgctagctggactgtggaagcccgggaaaggtttatttgtcaaggagtacttgggtctgaatctgttcttatttcagttttaccatgaaattgatattaagagagtcatcaatggcagtccatggacattcaatcgacttcttttgattttcagtagagtgccgaggggtggagatccgaaggcggttagccttaacaaacttgatatatggggttcagattcatggtctttcaacgagatttatgacggagaaggttgtttctacagcagcaaattacatcagcactttcgttgaatcggatccaaaaaactataatggcctttggagggattatctctgagtaagggtgacggtgaacatcgatcttcctttgaaacgacgaatgaaattaaagaaaacaggtggagattggttctatgccaattttaaatatgaatttgttccgacgttttgttttatatgtggtcttataggacactcggaaaatttctgtcacaaactttttgatacgcctgaggaggagcttgttaaaccgtatgggattttcatgcgagcgccaccacagaggaagagttatttgctgagttctcaatacttacgcatgggtacggaggcggatgaacacttcgcccatcctacatcggtgcggccggaaacagaagcgccacaaatggaatcgtataattcaaaattctcctatttagaagttggagagaatcaagggtcaaagataggtaacaatatccctaatttgggggatgatgggaatattcttaataatggaaataaagttaataatgggaataatactactaattaatggtaataaaaataatgtttccaataccattgtcaatgaaaaaggaaagtctcttgtgtttggaaatcatgtgcaaagtcaaccttctctttttatttctggcccattagtgacacgtggtggacaagggggccgtgggctctctacagatacaaaaagaaggagacaaaatgaaggggttgttgggcttgattatgttgatatggatgaggatgataatgctgaaatggatattaatggactctcaaaatatgagttcgaagtgggctatggtctccagacccaccgggcattatgagtactctaagttggaactgtcgtgggatgggcaacccacggacgatacatttcctatatgatactgtggcccaaaagaagcctaattttattttcttatgtgaaactttatgtcgtaaagatgtgttggagcgggtccgaataaaattgaagtttagtggggtgtttgttgtggatgcttatggtagaagtggaggggttgctttattatggaggaataaggaggatgtcaaggtgctgaattttgctacaaactttgttcatgtggaaatcctctctagtgatgttggggcgtggcgcctaaccgggttctatgggcagtcaaaaagaagtcttcggtggtcttcatgggaacaactccgaactttggctaatggtaatactctcccttggtgtatgatcggtgatatgaacaatgttctctctcaggaagataaacgagggggacatccctatcccaactggttccttgatggttttcgtgatactatccacgtgtgtggtttgattgatttagacattgttggccatcagtttacttgggagaagagccgtggtacgaataattagatcgagtttcgtttagattgtgctctagtgacagaaagttggcttcaatgcttcccctcagctaagcttattaatcttgaggtctcttcttctaatcattgtcctattttacttgatatggttgttaaaaatattgtctctattagacgcaagttttgttttgaaaattgttggctccgtgaacctctttgtttttaagttgtaaaggagtgttgggaggagtatcatttggcgggcgttcaagagaaaatccaacagtgtggggagattctctcggattggggcaaagattactccaaaaatttttcttctcgttttaaacattggaaatctaaggtgaaacgatggaagaaaggtcgtgatcctgatgccattgctaaatacaaagaggccgagactgaacttttcgaagtgcttactcagaaggaggttttttggcgtcaatgatcgaaacaattatggttgcaagagggagataaaaatagcaaattctttcatgatacgacatcctctcggcgtgggatgaatgctattgataagcttcaatgtgaagacggaagttgggttgactgggatttgggtttatctgaggttatgtgttcttattttgaagacctgtttactagttctaactatggatgatgttcttgatggcatttcaatctcattttcatcagctcagaatgattctttactgcaacctctgactgatgaagaagtgaaagcaactcttttttagatgcacccagataagtccccaggacctgatggtatgactccggggttctaccagaagttttgggcagttgtgggcgctgatgtgataaaacaggttcgttctttcttcttatttggtcagttggcaaccggtcttaatcatactaatctggtgctgattcctaaaaagaaaaatgccaccactatgggagatctgcgccctattgctctctgcaatgttctttataaggtgtgctctaaagtgctagctaaccgtttgaggcttgttcttccttctgtgatatctgaaaatcaaagtgcctttatcccgagtcgtcttataaatgataatattatgatttcgtttgaggtaatgcattagcttaagtgaaagcgggtcggtaaggaaggttatatggctcttaagcttgatataagcaaagcttacgatcgggttgagtggctttttcttcgaaatatgatgcttaaaatgggctttcatgaccgtgtggtggatcttattatgcattgtgtttcaacggtttcatacacaattactcatggaggtagagagatggggccgattgtcccaggaagaggtattcgacaaggtgatcctctccccgcttatttgtttcctttgtgtgttgaaggtctttctgctcttattaggacgtttgaggctcggggtgctcttcatgggtgtcgtgtttgtaatggtgctccagtcatttctcacatgttgtttccagatgattgctacatttattgcaaagctattgatagggaggcttatagtgttcttttcttgctttagcttttcgaacaagcttctggtcagtgtgttaactattctaagtcaactatctttttagtttaaacactacctcggcttctagacaagatatgtgcaatttgctccgcatgaatgaagctcctgacaatagtatgtatctcggcctcccttgtgttatgggtcgaaacaagaatgcaattcttggtttcttgaaggataaaatgcagaaaagattcccgagttgggaaggtcgcttgctttctaaagcaggcaaagaggtgttgatcaaaacagtcgcccaagctctccccacttatgctatgtccgtcttcttgttgcctgtggaaacttgtaataagttggaaggaataatgagtaaatattggtggagttcgggatccaatcaaaaacgttgggaagttggtctagttggaagaatatgtgtcgtcataaacatcatggtgggcttggtttgcatcacctgagggatttcaacttagccatgctaggaaaacaagcctggaggtttgttacgaatgagcattctctggttagtcgagtttacaaggcctgatattactcacatggttcgtttttgactgcttctcttggcccgaatcatagttttatttataaaagcatcttcgaaacacaagcgttgattaaacaaggtgctcgtcgggttgttggtccaggtacaaatattagtgttcagtttgattcctagcttgatgatgtctctcatccgtgggttaccatttctgctaatggtatggagcattggaaggctagcaacctcatggtgccaggagaaatatcacgggacttggaagtagtttctgatattttcaatgatcgagataaagagctaatcttgaagaccaatatagatcaggaggctaggatagatacttggtattggcatttggatcttcatggtgcttacactatgaaggaggcctatcgtttgatgcaccatgtcgatgttattgatactagtgactttgagatgaaattttggaagattgcttggaagctacatgtccctccaaaagtacatcaacttatgtggcgtgctctgactggttgtttggccacaaaagttcaacttactaccaagcatatccctcttgaacaaatgtgtcctatgtgtaaccaaatgcctgagaccatcatccaattattggtgcaatgcccctttgcaagatcttgctggcagaggtcgagtttaaatatgggttcggtgtctttggcaacgttttgggattgattcagtcagatgctacttcagcactcaacaatggcccaggaggaattgttaatggttatttgggcgatttggcatgcccgtaatgagctggtctggagggagaaatcactgtctacgacggaggttattctattggcaagagtagtccttaatcaatggagaaatgctcaacaaaggagaatggggtctttatttgttccttcgtgatcgagtatagatttggagcattgggtgaaaccgattatgggaaagattaaggtaaatgttgattgcgcaatcttcgcaaatgacggaaaatatggagcgactggcgtggctcgggaccatgatggttggttcattgaagccttcacggttcttttagaggggcgtgtggacccagctatagctgaaatagtaggggttaaggaggctttgagttggataaaacaaacaatggggtccggttgagtttgagactgattctttggtcgttgttc

SEQ ID NO: 21911 - DNA, 3491 bp, Cannabis sativa
gccaattccaagtttggattaatgaacagatggaaatcatgagggatcaacaagaaataattgacaatcgttctaggcaagccaccgtgctgattagacgagcctatcagatcactggacaacaaccagtagcaaatgtttacatccccactggaccgcaatatggaccaaaagtgcgtccagctagacacactcagcaaacccaagtaaataagccatccaatccaaggtcatagagtcaaactgtgggccacaccgtagatgagaaagttttgctaactcgttacttgggagggaatgtgcagcataacactcgtcctcagacaaatatgtcaagccaacccattgttgataatagccagatgttaagacctctagggaaatcagtttttgacacgttaggtaccatgcatgatctcagggataatctaaattgcagaagaggattagatgggcaaaacatccctcctactattcagccaaacaatatagataactacccgaccatattgtaagagatccacatgtgacacaagtcaatcaacaggcaggtcaagttaatccattggtacaagctcaaatagatcaacttaagagcctcgttcaaggcctgaccggcctaaaactcactgatttagaacttgaccgaactagaggatcactgttctcactaaaaatcaatgctctcgatcttccgcccaagttcaaaattccaatatggaaaatgtacacgggaaaacaagatatgttgtcttacattaaatactttgaaatgcaaatggacttacaagcggtgagaggtgatgcacggtacagaattttcccaactaccttggcagaggccgcccaacagtggtactttaagttatctctagggaaatttagttcgtggaattctttcatgtcaaaatttcacccacagttctcctcttctcggtaactcccatctcatctagaagactcggtcaaagtaaaacaaatactaggagagcccttaagagcgtacatcagcagattcatgactgaagctaccaaagtgaagagattaatcgaagaagaaagatcagatgcaatcctaggaggtatcgaacctctaggagaattatgaaagtatattaaaagacttactttaaggtcagtggaataattctaagaccgagaagacagatttataaagctcaaagaagcagtccggcgtgtggacacaattggacagaagaagaaccaacaacacaccattgctgccaatgcatccatccacagaaccacagcgactcgagtcaaggtggtaaaagatcaggtaatggcaactgacatggtaatggaaagaaaaatatattcagtggaaactctgatcagcatccacgaaagaatgcctcaaagttcattgctttcactatcctaatagatagaaacaattttcacagtaacccagcctatgatgccgtacaaaaaacctactcccatgaagaaagatatgagcaagagggatacgaccaagttttgtcgctttcatgtagactacgatcacgacactaacaagtgaaataatttgaagcagaaaataaagttcctcatcaagaaaaataacccgcacttgcagaagtatgtcaaggccgaccaggaacaaaggaccgcccaaccagataacactcaaaaccaattgatgcctctgccagtgggcggacatcttcaagtcatcattggaggcccccacattgctggagactcagacaaagctagagaaaaatatgcttggaccctacaatatgaacagaaagatacaattttggccgtagaaaaaagaaagcctaagaaaccgctcattggagaaccagtcatttccttcagtgaagaagattctgaccacgttatctatcacacaatgaccctttggttgttgatgtcattgcaaataaaatggtggctcggactatgattgataagggagcctcttcaaatattttgttcaaaacaacatgtgaaaaatggggcttcacctaaaagacttagttccctgcactcagctggtgtacagcttctccggcaaaagtattgctccacttggacaaatctgcctaccacttacaatgggacaagccccaacaagcacaatggtgatggctcaattcctagtgatcgatgtgccttctgcctttaatttcatgctaggtcgaccagccctatatgacctaaaggtcgtcacttcattatatcacctgtgtgtaaatttttcaacaaaaaaatagagtgagttttctaaaagaaaaccaaagagctgcacaaatgctataaccttgctctatctaaggccaaaatggaaaaaacctctggccagagttcaaaaaaaggcaaaagtatctcccaataggaaatcgctcaagacaggaacgaagatatagatccccgccttgggaagcctaatacaaatgttggaccggtagaaaaactataaaaagttgaaattgatcccaccatgccgaccataaataaggtataatagttcaacaatattatatggttcaatgtagtatatatggctctctataatagcttaacaatattacaaatagatttttatcttttaaaatgcaataatttacacactaaaacttaaaaaaaaaatatgttagcctttaatatatatactcatattttatttttatttttttagataagacatttgaccattgttcagagtctttatataatagactaattaggatttttactctctaaattttgatatgtactaaattataccccctcaacttttctagccactaaaaatttcccccaaactattgagattgttggattttattcagttttactaattcggtgattgtccatgtactaaatcatgcttcccgaactttgatatctactaaatcatgcttctcgaattttgacatgtgtcaaatcatactccctgaactttcatccatgttagacttttcttactaaaattagacaaaagttcttaaatccaataatctcaatagttcaggaggaatttttaacagtctttaaagtttaaggaacatgatttggtacatgtcaaagttggggggcgaaaatcttaattagcctatataatatactattaaaaaataaatgatatatatttaaaataattttcaatattgttataaaaaatgtttagtaacagatttttttttataattaataaaaactaaaaaaaaaataatagaatacttgaaagaataattatataaaaatagaataataacataattaagaaaatgttaaaaaaaaaaaagataaatttgaaaataataatttaataaatcatatatttacgtttggtaattttttttctaaaaaatatattgtttaaacataaataatttatatatttatttgtttcactttaactaagttagaaacaccatattttatctaaccttttagtaattttttttttaaaatatagaaaatagttaaataaatttttcatacttatatgt

SEQ ID NO: 21912 - DNA, 4788 bp, Cannabis sativa
aatttttctaatagtttcaattttttttatatttgataaaacttaataaacaaatactatcaattatttttatcaaatgcataaaaatttagatttgaaaaaaaattaaaaatatataataaataaaatattatataaaataaattttaacatatttgtaattataataaattagattataacattatcattattattgtaataaatcttaacaacttatagcaatttaaaatttataatttactaaacattcagtttttttttcacagttttttctacacagctatagctatttttttcacaacacagctgtgtcaaattggccctaggagtgtggtaattaacctccctttttttttttaatatatataaatataaacgttgttttaaactttgtgtgttgtcatgtattacttaaattgtattgagatttaattattttttcttattaagagcaaaatggttttggttttcaattattaaaagttaagagggacgattaaagaaaatatagagaaagaataaatattctcccttagaagaatatctccaatgtacgtctaatctggtgatatatttcattgcagtaaatattctatttttatattaactttaagtcatttttaacattttattgttagatttaattattatacattagattataaattttttaaatttatttttttattgtttaatataataaaattaataataaatttattatattttatatttttaataaaattattaataaaacattaatttttcattaatattttcaattgtgtattttttgttttaagtaaatgtttaatagatagaaaaaattagatcagtgtcattacaaaatatgctcttaaaaatggatgatatagacaaatgaccaaactggttgtaggtaaagattcactttatcacattatggactataaaattacaaattcttacaatactataaaataaacagccaacaaaagaatgaaccattcttttacaaaataaaaaatatttcacaattttctatctaaaatccatgcctttgatagaattgatgactactttagaattatttttcacaataataaacttacagcctttattctttgccaactccaaagccgcgacctcaccacaaacttgcaattgtaatagagcataatgataaaaattaatacaaatatatcataaagttactttttaggccaaatataacataaatttcacatcttcattagatatatatctcattatattaatattttaattaattttattactatatttaggttttattatttttataaaaaaaattcaaattttatatctaatctttccttgtaaaatctaaaataaatgtgaatgtcagaaacattggtgttggctttcttaacagacctaaaacttctagaacgaggagagtcattttaaagctgctatattgtaaatgtgaacagaaaaataggcagcatctcatagttcacacgcaaatttgttatttgattattatttttttttttgataaaattttataaataatttaaacttacttaacctgtttggataggcaatttattattggaaatgaaagtacatcaacaagtatatacatcgaaatttgaatttaatcaaagtgcataaaacaaaacgtgcagtacattatgggatacatacatgatgcattcatgtagttattttatatttatttatttatttttttggatttttatctttatatattaaaaagaactttttttttttttggaggaagatcaaagattaaagaacaaaagctgagactaagatcttcaaggagaggaacttaaatggttccaagttatctctttgtccgttccaagggctgctcgggcaaggccgtgagctgtggtgtttgtagatcgagggatgtaatggacggaagcacctggaaaagatgacaaagaggagactatcattgcaacaagacccaagagggctgaacgatctggagagaacttctgaatacgatgcaccaaattctggcagtcggaggcaataacagcaataggaaaacggactgcttgccaccaaagtaatgctcggttgagagcttcagcttcagcataaaatggagggaggcctgaatgtgaaggagccataaaggtggcaatgacattaccacgagaattagttacagcagcaccgtacgcatgcttattggaagagtgagaaagggctgcatccacagaaagctgaaaacattgttcttgggacttgtattcttgtagaagactgatggaaggtgggaggcgatatggatatgcggttctgagcatccctgtattcctgcaaataacaactgacagaattctccaaactgaaatcagtggtactgttagaatggaatatggctctgtttctgttattccaaatggcccaaattaaacccaaaaaagaagaaaattgatctttgtcaagacattcaaaacctctgagcaagaattccttaatatcacaatttctattattaaaataaaactgatgaaaagatgagtttttccaacatttacctgccctggaacattgaataagggagtgagtgttggagtcatgatgagagtggcaaatggagcaataaggggaggatatagacttacgatgaaagagattaagattggagggaagaatgtggttgaacgctttccaaacaaagtgtttaattttaggagagatattagaggaccaaaccgaggtccaccaacgtttataggtagcaggattgaaaggaccgggagatgagaaggttgaatttgccaaatgataagcagagttaacagtgaaataacccgaatggtgatgactccagatgagagtatcatgattacacatctgctcgtcaaaataaaaacggagtttagaaaggtcccaatgtcggtcttcagtaaggaaaaaagagacatggtgggaaggaggagagaggccaggcttgaacataactttgtcgtggaaaggaagccaattggattcagaaatattaaccaaagtgccatccccaattttccaaataagacccttgatcaaaagatccctgccccaaagaatactacaccaacagaacgaaggcgagtggccagtagcagcatgcaagaaatcgtttcgcttgaagtatttagcttttaggagttcgccaactaaggaatcaggagaggtgagaatacgccaagcttgcttagcaagcatagcttggttatggtgcacaatattacgaaagcccaatactccaaaaaacttggaagtgcaaagattgtcccattttttccaatgaatcttatggctctggccgagggacccccaccagaatttagacatcaatctgctgtagtgtttgcatagagaaactgggaggcagaaacaggacatagcgtaagagggaatagcttgaataaccgattttaaaagaatttctttgcccactctagagaaaagattttgattccaaatagacagcttagagctagctttttgaagaaggaacaggaaagaggaattttttgatctagagaagcactgagggacaccgaggtatttatcaatgaaaggcttatcgtccaagttgagggtatttctaaagatgtggcaatcagaagaagtggtattaggagagaaaaggatggaggatttgtgaaaattgaccgattgtccagtggcttggtgataaagggaaagaatgtccttgattttagtgcaggtagagggagaaacctttgtgaaaagaagactgtcatcagcaaagaggaggtgagaaatggacggagcagaacgagaaatagatattccatggaaagagttagaattcgtcttagcattaataatcccagagagaccttcagcaacgaggaggaaaagatagggcgagagaggatcgccctgacggataccgcgagtggggaaaattttgtgagagaggcaattattaatgagggaaataaaaggatagggaaaaccaaaatgctgaaggatgtgcttaatataagcccattcaactttatcaaaggccttttccatatccagcttcaaagcagcccaacctactttcccatgcttacgattattgatcgcatgaataacctcgttagcaataatgatattgtcgaaaataatgcgatcactgaggaaagcgccctggttatgggaaataagatccgggagagtagatttgaggcagtttgcaatggttttggaaacgaccttgtagaaagtggaacagagactgataggccaaaaatccttgacccgagaagcatttttaattttaggaatgagaaccaaaatggtttcattgagaggggcaagatcagcattggtggtgagagtgaataaagccgcctgacagagatctctaccagcagaatcccaatttttttgaaagaaactaggattaaatccatcaggaccaggggctttatctccggcaagctggaaaagagccgctttgacttcatgaaaagtgaaaggagaggtaagaaacgcagactgatttggagtgagttgcttagagagaccttgcgtagcaatagacatagcatcaggattagtaccttgggaagcaaaaagttcagtatagaactgaacgaaagaggaggtaatatcattcagattggtgatttgagaatcgtcatccaaggtgagggacttgatgaagttggtacgtttcctcgtggaagctcggttgtggaaatatctagtattcttgtcgccagcttttagccaatttactctggagcgttgcttcctaaaaatttcttcttt

SEQ ID NO: 21913 - DNA, 3398 bp, Cannabis sativa
  modified_base (3369)..(3370): a, c, t, g, unknown or other
caataaataattgatcctcctcttcttgcacgtgtgcttgtatccacgtgccaaatcccacgtgcattcccgttggacaaattcccgcactacttttttttttcctctcaaaaaataaggaataatagtaaagtcacttcgtccaaataacataagcctggatgtttgtgaaatgtgatttttcaattttaacacaatatgattgtgtttttatctctctctcttttttttcttttataaatttctttgtagctttaaattattatattatttgtaggtagagcatgagagagcttgtcgtctgccactacatcactaataccaatatttaatttatatgagttaattattttagtattgttgggttaggtcaaaattaaccaatttccaatagaagaattataaaaataccaatattttcttcattttttttataataaaaaaaattgttatatgctttctataagaaatgttccatgtattttaagaaaattaatttaaatatataaatgtttataaatagataaatagagccctttttctgaggctcaaagctaggatagaaagacaaattacacaaaaactttgattattataaagatgaaaattagcaaagtggtgtaaaagtcactgcgtgatactacacgctttgtcccactttgtggaccctttttatttatttactgaattaaaataaataaattagttttgtctttttaatatacttaataatactaccgtcaaaatttgtagatccagactaaataattatctttttttttttttttaaatacaaaacaaataattatcttcttttaataactatctatttttttttttcaagtggttttgttactcttttttcatctagcactaaaggataatttgtgaagtacatctgctaaatgggtggtctaatagaacttttatctactttggaatctgaaaaaaaaaaattgttaattttttttatgattgcatatatgtgtatatatttagaattatacataaatttttaaaaaattctaaataatttacgtgccgaaaataaaattcaaaaaattgcttattatgcatataagaaaaataatcaccgtgtattgtttacccaaaaatttagcttgatgacgtggaaactaaatttgacacatgacacgaaaagaaacaatcacagggccctgcatcccaagataggacaatgttacctgcactttgggagcacccaagtaagcaccaagatccttcaaagtcgtttctaagttatatccatcaacaaacaagtcatcataattaccctaaaacgaagaaccatggagctgaggatgtcacgtggacatctcagagcccaacttaggaccaacattattgttgggcgcccaagttgatatcttgtgcgctgactcgcatcaattttggttccagtcaccttcttatgggcaatctgctcaaccattgtcgtaagatacatgagagacatgccccaaccaagttttatactttggggatgagtctgcatgaaacgacaccctggcacccagaagcccaagctgacatatagtcgatctaggcgcactgtgactagggtttaggtatatggggacatacttggatcccaaatctttaaatccatcaaggaacaatgcaaggacatgatatttcatcaacgacatcccgaaggagcccatacacaactatgggcacccatgttgttatttcaacttgggaattattgctttcgtttcaccaagttccgcccgtgcaaatgacaaaactgaaattcgtggagcactttttattaagaagaagattgaacatcaacgagaccaatttcagagatgtggacccccacctgggcgcttagtgcaggctcccacgccatcttgggtgcccaagttcatatatttcaacttggggcacgccgagcatcattccaaagaagtctcccatgaattttccttattttcacccacaaggaagatacaagtgctcctcgagaagcaaatgaagccatcaagctagatgaagagctgggcgcctaggttgacatcccagtcactaggtgcccaggttgacgtagccacacttttggtggttctatcaatctgattgtgatttcatcttggggattcttcttgttttgctctaaaacataagatatgatacttggaatcaggataaaatattgttcgagtagtaagttagccaccaggcatcactaggcgcgagtgtgcaagcacactaggtgcctatgttgactttggcatggggctcagtgttctgcccttcaaatagtacttccactctaggaatcagtcttatttttccccaaaaataagatttggatgcttttgcaagttaatatctcatgtacatgtgtcacgtgtaagtccaccgacacccatgtgcactagtgatcatccgagtatcacctagtcatcactagtggatcactaggaatcacccatgcatatcaagtaaaattgccaagagaacttcttcaaggtcaaagaatgaactaaggatagctatcacatcattcaagcatctcaaaatatgcctgaagcccaaaaaaccaagttatgggcacctaggttgacatttatgtcaacttgggcgaccaaaagttaggatgacgtcacaatcacttttcaacagtgcacacactgctcactaaaatagccataattctctcaagttttatccaaaatgatgaggcttaagtggtcaattaaagctcttttcaagacgaatctaagtgtgtctcgcaccctgtcgcaattttgaagattcgggcctaaaaattaacttttgagctagtgttggatttcccaacaaattttgtgtgaatttttctattattttattgtaatttaattggacctccttccttgtaaaaggagagctctgctaactcattattcacactcttcattctctctacaaggtcagagcttctctctctagaaattgtaaagtgaagctagacttagtcatgttttttgagttctcttgtaaggcaattagttttttgtgataataaaaactctaagtagatgtagcttcattaccattgtcatatggggagtgaactactataaattgtggtgttctctttattttttattatttttttatttgtcgctatcgcttatcagacgatacggagttgaccatttttcagcatcaacacgtataataaaatatttgaatcttattgttgatactgtaaagtattcacaattttcttacagacgatcctctataactgtaacgtaggcaatcttgaaaaaattagactaaaaaactttattaaatatcgaaacagataagatctactgaaataaacctttagggctcgtttggaacgcnntattaggtcgtattgtattgtattttat

SEQ ID NO: 21914 - DNA, 2274 bp, Cannabis sativa
cacttttgggtgtttgttcttcttttcttgttttgttctattctcaagttttatattgttctattgttctcttctaaacactcttatatatatacactatcatatatatatttatatcttgattatatagtattatataaattatatatacatactatatacactctctgtatacactttttatatctctactatatatcatctattatatatattctacatcatatatatatactattatttatatgattttatataatttacatttacttgtatctttgagttgtaagttgtaactcttttcttttatttatattttgtactttgggattgtctttatttaatattttgtccttgtaatattttacttagagttgtaattgtcttagtcttttattcatcttattttattcttttattgtaatctctcttttatttctaatatatatagtttgtgacgttttgtcatttgtggtgtttagccaaaaaaaaaattatttggtgataagttgtaattagggacaacataatatacaagaacttacaaagaataacaacctaaattgttttaaatctaaatctaatttctagtttttgaatgtgagtagtaaagattagtttttttattttatcttttaaaatacatcatcaaattctcatttatccattttaatatatttgtagtcaatttttttttatttctatctgtaaacacttcaccttttgattttttttttttttttttttgtaatattctcctaactttacttttatttgtaaagggtgtctattaaatttcaccatttaaatgttaactatttaaaataaattttataatatttaaataattaaatttaatttgacataaaaatatatcacgtgtgtgttagaataattttatatacggtaacaaattaaatatttgattttaggacaaagaatatagggcttttttcagttttaacaaaaaaaaaaagtaacaatattataaaaatacttccagctggccaaataaacaaatatacaccccaaataaaaaaaaattacacaaatatcacttacacacaccttcaacccatgatccatgcttcctaggaaattatcgtgcaactatcgtgtaaccacgcagcaacccaacacaaccgaaacgaaaatccaaccaaaaagaaaactaccattaatttcgacgacttcacctaagaagacgaccagaatcaatcaaaataggggctattttgacaatcccttggtgcagactaccattccaacttgtagtaagtctctcgttgatggtgttgttcgtgagcttcttccgactcaaaatagactagaatatcatcaataaacacaatcacaaagttgtcaagaaagtccttaaacaccctatttgttaagtccataaatgtttttggtgccattctatacggggccttgaaaactggttcaacccctagtaccaattatatctcaaagtcaatctttctctttggtggtaaccccggtaacttttccagaaacacatccagaaatgtacatactacttgaaccttcttcggtccatcaggtatcccatacatccttctcgcagtaatttcctgatcctaagtgctgatattattagaatctgagatccctgaacctttctcgtaaaaataaatggggtctcaccctctggttcaaaagccaccatcttcgtcttacaatctatgataaaattgtacttagtcaaccaatcgattcccaggattgcatcaaaatcttctaaatctaattcaattagatccaccaaaagttctctcccttctactaacactgggagagaccttacccacctcctagagattaccacttctccaatatgtaacaaagtaccaaatccactagacatgatatcatatggtctactcaacttctcaataattctactagaaatatatgaatgtgtggcaccagaatcgatcaaaataataaacataataccaccaatagatatctcacctgtaacagtcgaaggactggcctcagcatctgcctgggtcaaagcaaacaccctggtaggaaccatagggctctcccttttagtctcaggtttctgtaactacgggcagttgtttctgaagtggcctgctactccacattggaagcaaaccttagaccaatattcccccaactggtgtttcttacactttgaacatttggagtaagactgccaagcttcatttctacctcgacagaaaccttggttaccttaaaaccttctgtttggacccataa

SEQ ID NO: 21915 - DNA, 3060 bp, Cannabis sativa
agaatgacccttttgttaggtcctccatcatcagggaagaccacccttttgttggctctagcaggaaagttagactcaaatcttcaagtgagtttaattatttgagtactatcaactcttttaaaattcaagaattaataattgaacaaattcctgttaataattgttaggttcaaggacaagtgagttacaatggttatagggttgatgagtttgtggctaggaaaacttcggcatacattagccaaaatgatgttcatctaggagatctaactgtcaaagaaactcttgattactcagcaagattccaaggaatcggtcatcgctttggtatgatactcaattacttcagtcgtacaagttatatatgtttcagttggctaaaaacgataaaaaacaaagtaacaaactcttaacgtatcatattttaattgcagatttgttaagtgagcttactaggaaagagaaaaatactggactcttgccagatgcagaagtagatcttttcatgaaggtaactatttttttccaaaccaagaacaagacccgtatatatttatttattactaaataaaaataaaattatgttgcaggcaacagcagtagagggagccaagagcagtctaaaaactgattacattctcaaggtaataaatgctaattaagtagaaacttaagacatatagctagaagattattatgtcctgagaagtgttgattgcaatttaatttcttttgaataatttatcaagctaaaaacaagtttttctttggccatatattttatgagttggaataaaaggttgactgtaacaatctcactccgctaatttttttggtataatatgttacactaataatatatttttttgcatctactatagctgttgggactcgatatatgcaaggacacattggttggggatgaaatgaagagagggatttcgggtggacaaaggaaacgagttacaacaggttacttgtcctaattttttagtacgttaaaaattctttcaaattattaagattgttagaatatttgtttaattttattcaattttgttaatgtgacgattgttcttgtaccaaattgtatccccgaactttgatatgtaacaaatcgtacctcttgaactttgacgtgtaccaaatcgtgttccttgataacaaccttccgttggtaagattggacggaagtcgttgaatctaacaatttaaataattcagaagaatttttaatgttttaaacagttcaagtggagcaattttgtatatgtcaaatttctcgtataacattgtagttttaaataaagtttactcaaaataaaaccattggcatttggtattatgttgaaaaaaaaacaggggagatgattgttggaccttcaagaactctgttcatggatgagatctcaactggtttagatagctccacaacatttcaaattgtcaagtgtttgaaccagattgtccacctcactgaggccaccattttaatgtccctcttgcagcctgatcctgagacgtttgatctttttgacgacatcattctcttgtctgagggtcagatcgtctatcaaggccctagagaccacgttctcgagttctttgagagttgtggattcaaatgccctgaaagaaaaggcactgccgattaccttcaagaggtaaactataacacataagaatggtcaaaaattcaaaagaatcaaaccccattaagctgaaactaactctttcatcatgtataacaggttacatcaaggaaagatcaagagcaatattggtcacaaatggacaagccttatagatacatatcagtgacagaattcgcaaacagatttaaggcattccatgttggtcttcagcttgagaatgagttgttagtcccctacaataagtcacagagccataaagctgcactagcattctcaaaatattcaatttccaaaatgcagcttctcaaggtttccatggacagggagtggctcttaatcaagcgaactatgcctgtttacatcttcaaaacagttcaaatcatcattgttgccatcattgcctcgacagtgttcttaaagtctacactacatatttcatacgaagacggctccctatacatcggggcaatcatattcgccatgatagtcaacatgttcaatggttttgctgagttatccatggccatcatgagattgcctgtgttttacaagcagagggatctccttttctatcctgcttgggccttcaccataccgaatttcttgcttcgagttcctatctctatattcgagtctttggcttggacagcagtgacatattacaccataggctacgcaccagaagcaagcaggtaagcattgattatgtttcatgtgttataggccttaaatgaataatgataactatgattatgttttatcaagattgtctttattttttcaggtttgccaagcagctattggttatttttctgatacagcaaatggctgctgggctatttaggcttatggctggattgtgcagaaccatgattgttgctcacactgggggtgcactttctctgctaatattgtttttacttgggggtttcattcttccaaaaggttagtcctttaaggaaattgatcagtacccagtatgcatatttgtgctaatgagaacctactttaggctcttgtaatagtagtttttcttgtaatggaacaggacgaattcctgtatggtggtcatggggacactggctttcacctctttcttacggtttcaaagccttaactatcaatgagatgctttctccaagatggatgcataaactggtaaaaattttttctaaaaataataatagattttgagataaaggtagctgaaatttaaggttaaaaaatgcaggcaccagggaacattacaaagttgggtgtagaagtactagagaattttgatgtccctcatgaacaatattggtattggattggtgttgctgctcttttggggttcactattctctttaatgttttgtttaccttttcacttatgtacctaaatggtaagacttaaaaccaa

SEQ ID NO: 21916 - DNA, 5289 bp, Cannabis sativa
tgtttatttctttctgatggtaaattagctttatttacttcttcaagggacttaagcctagctatagattgtgttcttagtgggcaaccagtgtcttccgtgcagaaaccgaggtatcttctccttttagttagttctctgtttctagtttttccattggatatgcactgttttcctttgactacatgctctaattaaatttttatcctgtgtataagtgttggatgcagcataaagtggcaccctgagacaaatttataatctgtacttctcggttcaactttatggctatcataatatgtgagtagaacttctcccatattctgcagttggctacttacctttgaattcaagaatgaccttatctttattttctttttgtgttgtttccttactctcccacgatcatatattacttgctttggtattctaaagcataacagaacaaattggtgtaattcacaattctttttatttatttattgaccatgtaatataagttcaataagctccacattttttgtatatctatatgattatccttattgagatgaagagtacacacccatgagccatgacaatatgggctgtcctttttctgttcacacccaatcctgattgtgtaacttataagttggtttaatctgattatctaacattattagttattctaacatacttcagctataaatagaacaatcatacccaagagaggtagctcaaatgataaggtctgtagtttgctgccacaagatttgaagttggagtcctttctggatccttgtacataccaattgttatagcttcacaattgtagggttagggaatgaacctagttttgaacttaggcccgctaagcgagtttgaggcatttttgtgtatctgaaaagaaaaagaaaaaacaatcattaatgttaattgtttctgtaggttgtaatttggataaagtggttgatcctggacacttattataaatttgtaatcaaggtagttaatcccaaataaagtcttcaaaagtagttgagaaagaggtgttaagctcaaattattgcatttacatgagaagggtactaatacaatagtattggtaaccctgcttaggctgtttggatggattgataattgtaagttataagactgttaatattagtgtcagttagacatcgtaattggttactatcttttagtgaccgttaagttagttaggcacctgttccttctacttttgtctataaatactcgccctatccttttgtaaaggctatcccttgtattaaacaaaaactgattaataaaagcttttacagttttgaagaggattaagttgagacaagtcacactaacctcgttaactcattttgtgttcttggtgagactcatgcataacaataacataatgatacccacttcttgttttgattttcttgagatcatgtctaatttttgttagtccaatgattaagtcttctccattaggttcaactttggatttgtacaagattctatcttgaaaaataaccaaaaggcctagtctttgaactatgcagaactttaaacaaggagaacaaggagattttcttttaccctatgcttcatatgatgcccatgtagaatatcccaagtaaaaagaagtgaaaatcttatcactattttacatctgaaaccacacatgtttaatgattagacatgcaatctacatcgatatagacaggcaaagattttatgttttgatgtcatgtgctggaatccttgagaatgtttaagtagtttaaccttttaaaaagctgaaaatgtcatgttacctaatctacttgttacctttttatttttatttttttttaagaatagataagattttaactccctaacctatgatcatcccaatgtttttccccttaagcaattttttttggaaaataatccccgaaactataaaatcattgcaacttcccccttcacttgcattctgttcattttttaaaacaatttgcttgttcagtcatgggccacacatatagttatagtacgagaatctatttaaccaatttaaggtagttgaaatctaatttattaatattaaacatacaaatatcaactctaagaatgcatatatatatatatatattgttagaatttgttattagattgctatttatgtttgtatttttttactagattcttgaattgcaccaccagtatagcgtcacataatgctatatcatcaaattgtttagaaacatgaaccacaatgtcgaaggggaagatatgcaattgctgcgatagtttgaggggattttttttttgaaaagaaaatatttcatgtaaaactctacatggataatttggaggataaatatccaatttattcttatttttatactaagtacagtttgacacataaacttcaagatttttatttaagacctggtaaaatctaatgctgtaagagaaaatattagcattttggtttctctatctacacttatagatattgttgcacaaaaatgataatacttttctattaggttggtttctttttgtttgtcagtcagtttatattgacttacttttggattataattgagacataaatgactcttgattttgtgggagctttgtgttttttgtaggagatttatacactttctatttataatttatccaatattctaggatattacttgctctttttttttgcttttctaatagatacttagtagattaattatctatatgtctttctaattttataccacatgaattttgatgtaggagataaatttaccattcttttttagaataatcaacaattttatatttttatagggtaaatagcggcataagtacctaaagttttgagtttgtaagcggcataaacccaatattttttttagtggcataaatacccaatatttgtaaaactgtaatttttctctatttttgtcagtacaggctccgttttaaatttattaaaaaaagatttgaaagtaactgatactacatattttcgtctaaaccaaataatctagaatttgggtcttatctgtgtcctgtttaagacaataacagagtttgtactgatgaaactggaagaaagttacagttttataaacattggatacttatgccgctaaaaaaaatcattgagtttatgccgcttacaaactcaaaactttgggtacttatgccactatttatctatttttatgttatgtaatgatgttattttattatttactttatgatgttatttataaatgcccctcttactttgtaaaggaacctttggaattgaatattaaatagagtattgacagagtgttcttctatctgggggttttccccttgtttgccatggatttgctcatcattatccaatcagctatcaaattcaatcaaataaagttttttaaaaaaggaaaaaagaaaaacaaaagaaacttttgttgtagtgctttaccgaattcttaaaaaagttgtttactaggccactctattgcatgatttcctgctataattctcttattaatttcctaaagccttaacaaatttgtagtaatgtggtttattttgccatccagggaagaaacataaaaacaaatttcaccaacactatcaatgctttaaatactactttttctcttccctctttgattataataaaagctttattagcccctgtattgattcatataaatgatcattatattactgaaatgcttgttacttttataagaagatatattatataataataagatggatattttctttagtggaaggttgcttgcattgattgttttgtagtggagtttgataaggtacaatatgtatgtatcagtagtgggcctgtgagattcaatgtcacatgactaaaaccactgtatacttccaagaacatggaacatgaaatctcattatccatgggaagaaaaagaagcaagaaaaagaagcaaaaaaaaaaaaaaaattatttttgggtaaatttgaaagagagtagaacaactagtggtcctatttcattcttatatagtttcaattttcatcatatatcatattcttcattgttatgcccaaacaaaacctatgtcaccacaaccaatctttattttattttattttatttttgagttggccaagagctaataagctaactttgatgagacttgaaagcaatggtctgtttctagttggtccccacaatttgattagccacaacaatcatatttggtttactcctttgatatttcggtgtagcctagcctgtaaactctttcttttgtggattttggagtcatatgaggttgatggagacttgttattactttgtttggacattgagagtctgtaaggtctttttatagctttggagtgtagtagtactgtttaaattaaaccttgcttattaatattattatttttggtgtgatgctaagaaagatttcatggtatgtttttgtatttgaggaaagatgtaacacattgatggatgatgatcatcatatatttatgacatgggacataaataaactatagctaaatttaatagacattaagaaaaaagtgtttggttttatgtcaaattaagtatttaaaaagattagagataatttggccaagattgtttgaatatcttcatttggctaggcctttaaaggcatccaagcactgttgtttgtcacagctctttgattgatcagtagattatttagacctttcaagattcaaaagaaatataatttattttacacatactatatttcccttatattattaatctaaagcttggtttgtaaaattaagttagtaatatcatattttatttatttatttttcaaaaatttctctttctttggacagtgtaaacaaaaatgctaaatagtccaattattttttttgtcaaaagctgaggtggcaatttcgaattggtggcttgatgtgatttgacacatttgaattgattgttagccaattaataagagaaatactaaaaatcaccactagtgtctaccatcactacagggtatcatttcgccactactgtaataaagtattggatcccacatgttttaatttaataacgatagaatgtcgctagcaattcacaaggcgctactcgtggtgatgctagatacatctaatatcttaatcaataaagagagaggttgctaaattttcttgagattctcactatcctcaggaccaacaattctcttccttagactattaggtgatatttggttggaaggaatgaatggaataaaatttaaaatacatacaaaaatttaa

SEQ ID NO: 21917 - DNA, 2965 bp, Cannabis sativa
aagatatccccgaagaggattgctaccgagactagattcaaaactagggaaggtcaaaggtgctttgatggaattaccgatcccaatgaaatcaatagaggcgagattaccggtctaaggaggagcagtgggcaaatcccctggtccggaagcgaatggcttgtttgcaagaaggttttttggaattgatacagagcaaagaagagaaattctggtggtcatcgcggtgggtttggtccttggagcgttctttaatacccaagacacactcctcaattttattttttattcatttgtcacatataggtaggtataggcgaataaaagataaagacaatcgacaagtaggaaaacctaacaatggtttcccttgattttgtgacttcaatccatttaacgatattcatcattccattaccatgattataattgggttataacaataattgttgtaacttgacctgctatgtggtacagatgtagttttcttacctcaaattttgatttaggtatgttagctaacttgtatggaaaatattcaatgatcatgggccctatgtcataataataaaaagagcggttaatcacttggcctagcccattctaagtcttcaattcattaacataagtccccctataagtcactagagtaccaatactctaaacatcgggaaaacaagaaaattagggttcgaaagaccactaaaaatggtaagccatttttggggtttcctggtaggaaaaatgatagaccgtttttttaagaatggtctgccatttttcacaggaacgagaaacctcaagttttaacttctcaaaaccccaccaaaactgaaccaaattattccaaacttcacaaaacaatcatataacatccatacaacaatttctacatgacaaaaatcaaaaccatgctcgcaatcgaaatcctccatgagagacaagctttgagcttaaaaggctttatttataactccatatatatgatatatagtagaataaataagagactaataacaacagaaagtaagcaactgaaagcaaagaaaataagattattttttccactgctattctctctctctctttctctctctctctctctctctctctcacctacatatctctctctctctctcacacgattataaacctattcaggtgtgtgagatcaaaatcctaactctattacaatgtctcatgagtttaatacactctaatacctaaatttgttcctccaaattagatctaatagcccactttatccctgagtgttgagacttgcttggaagatcaatgtgtggatattcttcaacaaaattcttgaattggatgttcgataattataagaaaagaaataaggataccctaataggtctcaagaggtataatatttatttaagtagtttagatttaatctatatatattttgatgatatctttgggcttatagttcatattagataaaaactatttttatcaaactccgcttctgcttttataactctgatatggaccataaaaactaaaatttataatatacaatttgtgtttttgtaacaattatgtatatttattgtattaaaccaaattatggtgagataatttagttctcgaagagaatgtctacacgaagagactagcggagataaattattgttgttgtagatttgagataatctcagatttcgattttttatactatagccgacagttttaaaacgtgacgtatatagtagccattatatctaacggttttaaactgttggggaccactttttgctgtcattttcaaccgtcgcctattctacttagtattcgtgacactcgaataagtgataattttagggatcgataggaatacattttccgactattttaaacggttgaaaaatccatattttttcaatagtaaactatcattttttttttcggagaattgaaacttgttaatcgtatttggttgtgaataaatctttttaagttagattaatgttaattaaattacattatttaattaacacacaaaagcgtgatacatattattttgaaaaattgatattaatctataaatatgtgcaatttattatatattaaaattgatgaggatctttagattttttgtgatttggttgctttttttaatttttaatttttttttgctaattaactttttttctatttttttttttaaaaaataaatattagcagctattattagtttgtataaaaagtttttgagtaatgatatacacttgtttcataaaaaaaataaataaaaataaaataaagattagtcctccaatagatcgtgttagttttccaagacttaatttttttaatttgtttatttacatatttttttgcaaagtcttccaagacaaataaaaaagataaaaatctggccttgtatacaaaaaaatgatcctactccatactccaaacaattccaactgatgcgtttgaaattgaattacatcgaaacaataaccaaattaagctacatgtaactcgagtatgtaataatatataacacatatatccaaattttattatttattattatatcattactcaattggataataacacaatatatataaatatattatatttatatatttaggtgatcatcaattagtagctaggtggaaacttaaggagagagaggtaagagaattgaaaacgcaacaattaataacaacatgaaaggcgagctttacgtagctaaatgattaaaagcgggctattgagaaagaaacaaaaacacaagaagaaggggttgaagttggttaatatataagaaatgatcatatttgaagaccagcagagccaatcaacttagtgaggccaaaagtgatggccatagccaaccaccctccaatcagcaccctagcacaagatttcaccacaggagtcctcccaagcacagctccaacagcaccaaaaaacataagagcaaagc

SEQ ID NO: 21918 - DNA, 3944 bp, Cannabis sativa
  modified_base (329)..(330): a, c, t, g, unknown or other
cataaatcatgcatagtgaaaaaaaaaaggtactatacataaattactagatagtgaatccttaaaaataagtgtataatgtaatttgtggcgtaaatatttaagtttaactttcgcttgcagataaatatttaagtttaatttttgtcagtaataatatcaaaattatatttctggaacttctaattaatttaaatataccaataaaaaataacacgtggataataacttacacttaatggtcaggtgcctacggaaatataacttaagtattattactgtcaaaaattaaacatagctatttatctacaactgagagttaaacttanntatttatgtcacaaattactcaattaattaattaaaaactaattaccatataagcatgcatggataaaagttattagatagcaaatccttaaaaataatagtattataataactagaaataatagacaaaagaaagataagaattaagttaatcaatatgttaaaacattgttaattaaattatttatttattaattaattacctctgtattcagggacttgaagcaatttaggagctaaaagcctcatcctagcataaatctcaggtcttcttccattttcataaggctcattctcaatataacgttgtaaaagaacttgaaattgttgaaattgttgagctatttgaccagggcaacctatatcatactcatcatcactatttatattcatgttcctcctttcattattattaatactcttcattcttcttttctcttgaaatttcttgtaattccaattcaaagcttcccatgtcaaacatatttgcgccacgtaagcggcctcgagttcatgataagggttcctatgaatgtcttttggagttttattgatcattgatattctatgaacaattctctctgataccgatcttggtgacactttgattgatcttaatgattctgtaatatatacattaaaccaaactaatcatcaatatatatatttataaaactttagtaatttattaaaactatgtagttacaacgtaaaaatttaattaatttttgaaaaagtctaaatataattaattgtatcgaaaataaaattaaaataccatttgaaacttgtgttcagtaatatataccttaaacaaaatttattatcaatatataattatacattaaacaaaataaataatgactgattttgtaaaaataatatgtagctatatagcaaactttttactaattaatttctgaataattaattgtactgaaaacaaaatttaaatactattttggagtctattttaatagagtaaatatttaatattgtttaaaaactagtaaaatatatatttttacacataataatgtaattaaattttaatcctataattaaaagtgaggtgactttatttcacttaaaattatacacattattatgtgtgtaaatactaagtacaaatttaaatgtgtttctagtattatttaatcataatatcaatcgagatattaaaaataaaaaattcccaaaaatgttaaaatttttccttattaatatactaaataaataataattggataatgatataataacctgtttcatgaagcttttgagcagtgattttgtcaaagaagatcatttcttcatcatatttttgaaaaacagtgtaagattcccacttaggacaactccttcttgaagaagaagagaaaggatcgtctgttcccgaatctctataattaatcgagcttctccattcggatgagctcttcgatgttgatccaacggtacaagaatctccatacacatcaccatcatcatcatcatcatcaccaccgtttattattcctttcatttgtaacattttattattattattgtccaataatatttgaggagtagtagaagtagtactacttattggtccaaaactaataaacttattctcatcatcatcccctgaacaataaaaaaattaaattaaattatagaaaaatttacacaatatacttataaaattaagtgtatttttttatttacatttttacgatattttttacaagttttacttgttttgatgtaaaaacaaccttattttttttacaagttttacttttttgaagtatttatgaaatattctgttaattataagaatatgaatgaaagtagaacatgtgaatatagagatacgtaccatgatgagagatgggccatgcttcaattttattattatttttggaatctttttgatgttgatattgatgatcatcagtatcattgtgatcagattctgtatcggtatcatgtatagataataattcagtgacataattttgttgattttcttcttcttcaatttcttctactaaactctcttgtggggtgatgaaatattcttctgatgatgatgatgagaggttattttgatgatgatgatgatgattttgatcaataataacattgtcgtttgtgacaagatcaagatcaaaacgacaacaattattattgtcgtttggtaagaagaaaagagattcaccaccacaaataatgtcagctactaaatgatcattattattttcttcataataacaatatttatcatcattatcattatcatcatcttcttcttcttgattttcttcttcttcttcttcttcatcatcatcagaaaaagtgtactcatgattactgtattggcttctgaaaagcaataacaaaaaacatatataagtgttaatagtaaaaaagtagtaactagtaactaattgtgtacatctataatgatatggattagttactaccttgggaaaattggattggttccaatgaagtggaaaattttggtgagaaaaatgaaagagagtgatgagaaaatgaagaagagtttgaatgaagatgaggtattgtagaagagcctaagaagagcttcttcttctttagagcaataacatgccattctttcttttaatttggttattggaaaatgatgatgatgatgatgatgagtgcctcaacacttgctttttacaaagctagctaagcacatccttaggaaagcgtgttctttggtttattgcttttcttttcttttttttaagaaaagaaaaataaaataactcttccttattatgtttggtcaagtttgttccttgtgtcttgtttttctccttcttaaaatgaccattatgtcctctagcttgaagaactctttttgttagagaaaattgttaaaggacactattaatatttagagcattggtgtttaacacattttacaagtggcattttaaaaattattttcttaagttatatgggacccgatacttaattacattaatagtggtataacaccaaggaggtgctagacatcaggagtgccttttagtagttctctattgtttaacactttatatcatatatattattaaatgttattggacaccaatagtgcctagcgcttctccttgtgattagttagcaatacttcttaaaagttattatattaaattatatgagactcgatacttaattaataattatatgacatcgagagaggtgctaggcactactattaccttttagcatttctcaatgttattagtacaatttagtatattaaggaggactgttgttctgaataccactttatatgtaatattgttattagtgtaatttaatattgagtttcacatatttgaatttaaagtataatatgtgagattctctactactcaaaatgcacctatggtacgaattatacgtatcgatactattttgtggcaagattttacaagtgattttagtaatttttaataattaatattaaatctaaatatgcatgactcgatattaattaattacatcaataatagtataacatttaaaataatattagatagtactaaactttattaaacatcactcctttataacaatcctctttg

SEQ ID NO: 21919 - DNA, 3386 bp, Cannabis sativa
aaaatatttttgagcttttatttagaaaaaaaatatataatattattcaaaatcaataaaaaaaaattgtgtatttttaaaaaagaaattttttggaggattctgagctaactagaccctaagcacaggcctaacccgcttatgttcaaagtaaagcctaatgtggattcgttaaagtatttggatatattattattttccgtacaatactatagttaatataaagattgtttggtaaaattcaattatttaattttgggaggtataaataataaacatgaacaaaaaagaaaggatttattagaacatatatattgtcaaaattaagtagttcatatgtcttttaaagtagataacaataggctatatatatttagtacatgtgaagataattattaagtataagtgtagtcaatctcaaatgaataagtgatgtttttattatgtgggctaagtctttatataagacttgcacgtcacaataagtttgtggtgcaaaaaatatatagctttattttacaatctcattcactttttcttttttcttaaaaagaaaaacaatttcattttgaaatgataacgcaaagttaattgcttattacattaaattgcaataatttgtgttgatattgaagaaagaaaaaaaaaacactagagtttggccaaagatattggattttgaaatgattgaagaacaaccaataacgttgatttaatactttatagggcttaggctagacctatatttttacactttcttacatatattttgtcaaacttgtggggttgatcatgtttttaatttattttatgagaaatgttaaaatgtattagtggtgtttagtatttttttatgtgataatatagttattggtctaaatatgtatcaggtcccatataatttaatataataatttttagagtgtatcgctagccaattgcaaggtgacatatctaaaagtgttaggcatcagtaacactactagtggctaatagcaatactcttattttacttatttatttaaaaaagattaatagaattaatatcactttgatgatgtatggtcatatagcttcttcttcttttttcaaatttttcaacataaacttgttctttgaaaacaaggaattagatatttggggttatttttaaataataggttttaacaaaaataaataaataaaatatgacaattataagggaagggatgtttcacattcttttatgagtttaatttgattaattatatttgttgtaatttattttttcttgaatgcatacatgttaaaatttataagtacaaattgagtactctaaatagattgataatttttcaaatctatttaaattctatgaatgaaagaaaaaaaaatcacaattattttacgatgaggtgggacggatatgaaagaccaataacatcaccacttaaaatggaggaataatataggaataatatacttgttaaaatgtggtattttatattgtgttaaaccaatttaaatttgacatgtcagttaattttttatttattaaaaaattaaatttttaactgagtcaacaaaaatagttaatatatttaatataaattaaattagttgacatgtcaaatttaaattagtttaacacagtatgagacactaccttttaaagattttaattctcattctcgcgtattcctagtggagacaggacagagaatcccctaatgggacggggtaatgtaaaaatacagtttattttaaaaatttaaatatataaaattattaaattatgtaaaaattaaaatattacatattatttattattcaatatactaattattatacaaaaaccacaacttaataaattataaaaatgacattaatatactaaaaaaattataaatacgtattataaaatataaaatattaataaaatgataattaataaattaaacgagcgaattcccgttctgtttaatattcgagaataaaaataatctccgcccctatctcatttctcatttaggcagaaaatctctgctccattaaaggcgagtctcgagaccctttcccatgaaaaaaatatacatccctatttttcactaattataggacttgattctcatctacatattaattaatataattcaaaattatagtatttgtatcaacaataaacactagaataggggacaacaataaaaaaatcaaaacaatcacttaattagtttagttaattaagtatggaaaatttaaattgttgagaagtgaagctatatatagatatagatataggtagctataacaattgaataataaggtggtgaagtagtgaatgaaagagacatagaattttgtcttaaacggccatgattagccattcatttgggtaaatgtgtggttatgatatgattgaccctactatataagattttcattgtttttagtgacaaaacgttttcataaattcattcaatataattggcaataattgtaaatggtgttgtggccttgtaccatttcacccatatgtgtatatattttgccgacaattaactaagttattatattaattatgaatcaatttagtttataattactctctttcttttttttttttttaaataaaatagaataaaaaatctcaacctaaagttatattatatatatggtgattctcttataataaatgtatggaggaatgttttagattatgatttgtttttttaatttctttgtttattagtaagtaatagtgatgtgtgtgtgtggcatgcaatttcaatatatatatctgtcctattacaaattgaatattattttttttttttaaaaaaaaaaaaactagttgaaaaaaattaattaatattaatgattgtcacgtacatagggttgaattttgagttttgaccaagttgtagttaatgaataaatggacagcttcaaaattagctcctcacgtacgttattatatattctactttataatttatttattagttttaacgataataatttttcattgatatggtcaaataagtatgcataatgcatatggtgaaataagaaaaaaaaaatgtaaattcacattatataaatatatataaagagaatttaacatgtacatatgtaagtggtttaatacggattattatttcatttttgttgggccactagcttaccttataattcctacatttagtgacagagataagcagatagggaagtagaagtgtgatgacctcctcggattttttaaattttttaaaattatatgtaaaatattgttcaccttcacgaaattatttttgacatcttctcatactaatggagtaggtagaacacttatattgaaagtaattcttgcctaatcttgaacgtgagacttagggttgatacct

SEQ ID NO: 21920 - DNA, 6377 bp, Cannabis sativa
  modified_base (1731)..(1749): a, c, t, g, unknown or other
tcatttattccacgtgctatttatacttcttgtaaattctacaacacttatttatttcggcattcgaaaaaaaataaggacattctataaatttagataaatttaacacgtcgaaaacaaatttattacatgtatgacattggtttctatactataaattaagtaaaaattctcaaaattttgtaagatattttaaataactataacatacatcactgtgtaaaaaaaaattagactaaattttttctctgaataccgaaataaataaaaagtatattgatacatcttttttagataggtgtattgtagaaataccctatacttcatatgctttcacaaagtttcattgaatattgtcattaggtaataatagatgacaattggatcgtcgtggactcttgtaaatagttagcgatattttataatacttattacattaaattatgtgagagtgtgaaactcaatatttaattatactaataaaaatacgacactcactaatatagacacttattgacagggccggccctgagcataggcaggctaggcctgtgcctagggcccacctagtccagggcccaaaaaaaaaaattcccttttaaaattacacaatttttttttgcagattttgaaaaatactattttttttctaaataagggcccaaaaataatttttttcttataacccactaaattttaggggcagcctgcttattgactatgaggggctatacccttttctctaaataaaattctatatacatttttacatatatatattaaatatgtaaaatatatataattatttatcatttgtccaccttaaatttattaggtaaatagcgtcataagcacttaaaatttcaagtttgtaagtagcgtaaactcaatgtttatttttagcggtataagtatctgatgtttataaaactgtaatttttttctaatttcgttagtacatacttgttattgtcttaaacagggcacatataaggcccaaattctaaatcattgggttctagatagaaatatgtagtatcagttacttctaaatgttcttttaataaattcaaaatggaatctgtactgacgaaactgtaaaaaaattattattttacaaacattaggtatttatgccgctaaaaataaataatgagtttacgctgcttataaatttaaaattgagtacttatattactatttacctaaataaatttattcataatttgcccttacttcatgtattctccatccatcgccaatgatgacactaagtgatgttattgttgttaggcactagtgttttagcatttctctattacgatctaacattattgtgaagtagcactctaagaaaaattattaatatttattaaattaaaataagtaaaaatcgatagttaattgaatatattacaattcttaagtccttatagtactatacaccaccacgagtactctttaacatttatcatttttcttgggcattgctacacaataccactagtacctaacatcaccacaaagtggcatattgcaatgattagagatgtttcattgataggtgccttttagcattcaatgtaaatacttaaatttaatattcttgcagataaataattaagtttaattttttacaataataatatctaagttataatcctagaatttatttaagtaactgaccgttaaatgtcaaattattattcacatgttattttcttattggtnnnnnnnnnnnnnnnnnnnaataaaaaataaaaaattaatgacatgaataaattaaagttattaacttgacacttaacaactagatacctacagaaattttaaaaatataacttaaatattattaccgtcaaatattaaatttaagtatttctctgccatcgaaagttaaaacttaaatttatataccgcaaattattctaataaaatataaatatatattgatattgtaaataatcatttttcacctattactctatcttaatcatcaaagttctttattttgacaacacatcaagtattgtttttttgaaagcaaaagatcttgaaagttaggccaattatacataataagagcaattaaacttaagaaaaatgtcttaaaatgtttaaataaatgttaaaacttaaaagagagttaataatgtccttaacaattaacatatctgccattatacagtaattcacaatataacatacaattttataataattatcatacaaagattcacatattagatcgtgtgaagatgtaaacttcatcatatcccttcctgcaatcaaattcacatttcacattaagatcaaaattataaattaaaaaaaacaaaaagatcacttgtccaaaataatttgtagagtccaacccaacttatcaaaaattaagtagttggtggaaaaattagaacaagatctttggatagtgatcttagaataatttcgagagtatttcgggctcacccggctttcccacaaaatgtaggactgtaattgtagatgagattgtcaagaactttttgagtaggtggtctgtttagggacttcctcgcctcgctgcatagcaaatatacggttcgagtaagttgaagagaatgtatctatctttactttctttctttttgaacttataattttaagtattgttagtttaagtaacaatgctcaaatttgttcctatgtacatattggtttaataagaaaagactaaggtagcgtttggttggaggtaatgaaatagaatggaaatgaaataattttcattccattcccttgtttggtttcagtttaaagtattggaatggaatgactattccattttaaatttgattcctttccattcctattcttatgttttcattcctcccaactaaatgccatctaagttaaatggagtagaaaagtggaatgagggaatggaattaagagatttgtggctggatttgattacaaaatgataattgtccatgaacatgagtttggatactttaatgtttttttcctttctttccaaccaaatataaaattctcttcttagtttcacacttatcttaaaatgggtttctactttctaccctttttgattttctattcctctgtctgagcatggcataaacttacatgctgaactattgaatattgaacatttgattttctattctatgattttgaaaacaatagcctggaaacaagcatcgagcacagaacatgatcatgttacggttcagtgcagctagattctaacctgaccaaatagtttgccgcgtgctgtgtcacctgaatggcatcctctgagtgtggaattctagtcaagccccattcgaaagcatttttctgcacagagtatggtgtatcagagaccaaacgatattgagcatgtctattacgattttgggggaaagctaaaatggcattagctttttgaaacacataacatttggtaaacaatctagacactgcatatgacaatggagaaatgtcccgaagactcgaaaaagaaattaaaatacaaattcaagtgcacagtcaaacacatgcaactactttcctgcacaaacctcgatcgatcttaaatcttgtattgaatgaaacgtggaattaatcttatcatgcatgtaattaggtccattactcattaccctaaaaaacatagtaaaatgcccacacaatcgaagaaaagaaaagaagcttgtttcagtgcattttatacaacaagttgtttgggaacacattatagtaaaatacctctgggtgccattgaaatccagtaacaggataatggcgtccctgtactgtagacacatatacctgaaattaatgataaacaaatcagatttgctgaaaaaatatgatccttgaatgaagtaagcttcaaacaagaacacattcaagtaccttatcctcttcatctgtgcaagttgttaagatcctaaagaaactggttagttcgcggttcttctgaaatctttctggggatataccatactgttcaacattgaaacctcgaataagttttgatgagagatataattctatgcatggctaggcaaagaaacgttttcaagaattaaaacttacacgatggttttgcatgactagacaatctgtttgtaacttagcaagcaaatctgaaggaaatctgcaaaagaatttgattaccaagaaaagaaaagaaaaagtcttaactactcacaagtcacaagaatgaatgtggttgataattaagtacctattaaaaacagttccttcgatattcacattcgggaggaagtttagtggagtcgctgcatctgaagcactgaagggttcaaggattttcatgtcctattatcgaaatatttcatcccaaagtaagagaaaacagcatattacatgactgtctcgaaataaatgactaccccaagaaaaatgtttcaaaggacaagcaaaacgaaagatcaaatgttgtaatgtcacataaattagaattgaatgcacattgcaattcatctagctcaaaatgaggatattttcttacaatctgaagctctctctctcaataggccaatcccaaaatcaagaatagaaactagagaaagaataaataatagatatgagactataaaactcagtgttgcagcagaacatagttatgaaaaattaccctgctaatggacattgttagaatctcaaaacctaagcagatggcgtataatgggaaatggtccccggcatcattcttctccaaaactttctgcaaaaaacaaataatgaaacaacaaattatcttttcaaatactttacaacaaactgtcaccagggactgcaattcccatttgaaaatatcaaaaattcagtttgaatatccattgctcattccgaaacaaaccccatatatgaaatcaaaacactatgcatatcatcaactagttacacaattacctgaaatattttttgagcaacatcaaagtacaacccacttttcgcccaaccaccagtgaaaagcactccattaacaagattaagcttctgcaatgcaatgcagctggataaagtaagacgatacgtaatcattcgacactcattcacaattgcattaaatctaaatttatatcacttcatcaaacttcaccaacactattctctgcttttactaagagacattccttccttattcaatgatcttggatgatttgctagttgatgaccctatatagcaattttattatccaaatatttcaagagtatccctaatccattgtagctccacaactagtttggttgcaggattttccatattgtcttaatattcattgcttagaaagaaaaataaacgacttgattcgatgaaaccaatcagaaaattctcaaattaataaaagaaaaaagtaaactgactgtgtttataataatgctcaggataaaattttatactaaactgctctctaattaaataattaaatttgaatatgaaattaatcgaaagattctgaaattagtaaagagaaaaaaagttgacctggtaaagaacttcgataggttcgttatagataagaggaataacacgagcaccagctgattcaacgaacttcacatacgaagcagcgatgtaagaagcgttagtagcgttactaagtctaccagaggcaccatcgccgggatgactgagtattccgatgaccggtcgataataaagtttctgatcaggcgaagaacagctacgatcagtctgactaggcaagagaatggacgaagaagagtgaacggcggcctttgtggtggttggaacgatgtctttggataaggaaatcaagaacggaatccataagtaactccacatctctgaaagcttagaaatcgttcccgaagacgaagaagaagatgtagaggaagatacgacgtcgttagcgatgtcgtcggaggaggtggtgccggtagtaacggcaggggtagaatcggtattagagagaaagtgagagagcatcggaggagaatgagagcgagaagcttagcatgggagaagacgaagacgaagatgaagacgaagacgacgaagctttcaacaatggcgtttttgaagcttaattaattttattattattattattaatttttttaaaaatctatttttattaattttttaaactaatgtaaatgttaattaaattgttatcgtttagattattacatttttatttttttaaaaaaaaaaattaatttaaatatattaataaaacagtaataaattttaaaaatataatttaaatattactataaaaattaaaattaagtctttatttgtaacgaagagttaaattattttatgttttacttatttttataattaattttggtattggtagaaatttttattaattatattaaattattta

SEQ ID NO: 21921 - DNA, 1776 bp, Cannabis sativa
cctcgaaggtcttcataagcttttttctactaaaaaaaagaaaaaaattatgagattttcaaaataaataatatatatatattgggatataattttatttgttattgtacttttaatccgtgatgtactccagctatcgaatcagtaaattatttgatctatatcctattatatatattcatcgtgataacaaatacagaggtcgatatatataccttatcacataatatatatcactataatattataagctttctagaaattatttcattgatcgaactctcttaaccaccgtcaatagtatagaggctgcagagagcaaaattcttgagctttttgctcctttcgaatcggtgtgattaaccaacagttgtcattttgttgtgagattgcagttttttcactagacttgtagggatcttaccctttaattaaccttgaatgaggtttcatttttttttaaaaaaaagaagtgaagtgttttttcttattattttttttaattgtaaaatatgatattttttaaaaaagtagcatgcccatgtgcagtgtatacatgtatttgatcaaaaaaatcagtcatgtctgagttgctgttactcggtatttaatggataaataaaactgttttgtttatccaaacgaaacacaaaattatatttaattttaggaatcaatgatgccaatataatattattaatgaagttggtgagaagaagtgtttgtatatgttgaataagcccttctctgcaaagaaagagcattcttgtttgatcgaaaacatggaggagatgccccaaatccatatcccaaaagtcaaactgggtagccatggattagaggtaatacttgcttttttatccttcaccatttttatttatctaataaagtttagctgggtattattacttttactcaataatcaccaattatcagcatctgtttatattctaaaaacaaatcagtgtctgttctaatctcagttgtcaatcattatcctcaacacactgtttagtctagtggatttaggaagtggcctgggaagaaagaaaaaaaattgatctttaattggttctttattttggggctttcaggtatctagactgggttttggatgtcatggattatctggagtatacaacgctcctctctctcatgaagatggttgttctgttattaagcaagcatttaacatgggcatcacattcttcgatacttcagatagttatggtcaaagtcatgataatgaattcatggttgggaaggtgccatttctattttcattttattctatacataactagcacttgaaaaattaacacaacagaggatattggtgcccacctttgaaactacagtttgagacatgtttgccattatgagagcattccatatggaaatgaaaatattattacatttataagatcacgacttactccatgaatcttaatatagtagtaaagttcaataacccaaatgagcttcggtctaaaacaccagcgagctttaggattatgcttgagatttaaattatatataaatttcacttttttttgggcaactataaattctgctttgaatgagcagatattggtgccaaccatgtttgccatttcatttgaaatgaaatatttagtgaatagtctaactttatattaacccttcttgtatctccaggcactaaaacagcttcctcgggaaaaagttcaattggctacaaaatttggtatcatgaagtcagagggatttcagtttggtgtaaaagggaccccggaa

SEQ ID NO: 21922 - DNA, 11781 bp, Cannabis sativa
  modified_base (11306)..(11308): a, c, t, g, unknown or other
  modified_base (11361)..(11363): a, c, t, g, unknown or other
  modified_base (11661)..(11671): a, c, t, g, unknown or other
atgaggatctaaaaaaggatctaaaaatattctaaaaatattttaaaatattttttttccttttttcctatgacccactaaatttcagggccgacccagatgaccttcaaccaaacgccacattagtgcagatcggatacactatgagcaaaataatgtagattagatcagatgaacaccctacatgttattgttaactttaaagaactcggttccactcatcactaccatttacatgtatgtaaagtgtccgaatgtttcaatgagaatttttctttggttggctttggagaaggaagattcgaacttagaaactttcttgaaggaggagggtagaactactaaactatgcatatatgactaagagattttgatatgagagaaaagaagtagcaatttgtagctataaaagacatgatttttttttactacgccataattggagaaataaacttaagtttgttacttgtctatggctttttgggtggaattttattatttatttatattctaaattttgttattataaaggttattgtgaaatgaaattgtataagccacatttttttaggtcattaataattttcaatcctaaataaatttgtttaaaaatgatttcatcaaatttgtccttcatatttcctaaaataaattaaattgtgttatttagaaaaattcagaaacaaatataatttttaatttacatatacaaataaataaataattcgggtcagcccgttttcttgatgtactatttcggtcatcagtaccggcattatcacccttctttcttctacagcccagcagccctgactgaaagctatcccagttgagaattcagatccaactcccattaaattaccataataccaccgatccataattcaaaaattttcttcttttccttcatttcttcataaccaatccaatatatcaatcattactgaggtttaattaactctgtcataactcggaaccttttttcttccgggtcgactcagataatttctctttcgaaggaggaaccgccatctatgtcgattcatggaagatgttattgagaatggagtcgcagccttccctatcaggaaggtccccgaccaagcctccaagtagatctaactccgatgctaatgcctcatctgccaacactagcaccagccagagcctttcctccattcttaacaatcccaatgcttccgaatcggcctcttggatcggctggtggtattcttcttccacctccgttgcacctcccgagttcactcctctctcctctaaagcttcctccgatgtttctcgatccgatttccagccctacgttgcgtcgatctctgaaccataccatcgtttcgaagacatacggaatcattcgagcaaggagagtttggatttggatggtattggcggccaaggtgaggcgcttgttgcttgcttgagagaagttccggcattgtatttcaaagaggattttgcgttggaggaaggcgccacgttccgctcggcttgcccgttctctaacatgtcggagaatctgatgctacaagagaagctttcacattacttggacgtggtcgagcttcatttggtgaaggagatctcgctgcgctccaattcattcttcgaggctcaaggccaattgcaggacttgaatgtgaagatcgtggaaggttgtagtcggatacgggagttgaaagagaccattaggcttttggatgtggatttggttgagtccgcctcgcaaattcacgagttcaatgccaccagaagcaatctcttggctcttcagcagaagcttaggcttatattatacgtcaaccaagctctttccgctcttaaattggtacctcttattatcttctttacgatttcgtaatctaattgcacgaaagtgaagaacttacaatatagtgacaattaagacacatatttctaaaagctgagaagaaaagtaagatgctaaactagattactttaggacttgttgctcgacgtgacaaaattgtaaacgagggtggttgtgtttgatctgtacagatctttctcactaaagttataggtcatccatttgtagttgaagctcctcgtcatctacaaatatttggcttattcaattcttcctaataacttatcaatggagtaacaatctattggatgctactttagtggctaggaaatatgatatactttctaaaatatgtgaggttgagtgattgtgagaatatccagggatgttctttatgtatgacgattggtctattacttttctgcaactatacctctcagaatattaagccatagttctatttaaattgttcatttatgttctgatttttcatgtaaattatggtgtcctgggatttaaagctgaaattccgttgaaataagttctatttttctgttctacagcttgttgcatctacagattgtgcaggagccctggacgtgactgatgatttgcagcaattactggtacttttcacgcatttctctaactcaattaaataccgactggcgacttgacatattttatagcattgctgtcctccttagaatgtatttccattgttagttatttagcattgctggcttcattggaagtatttccgttgttagttatgcattaaaagtggcttcaaaaataagaaatgaaattcttaatttgagtgggtaatggttataccgacttgaatgtttctgtagagaaatgttgaaagaagccaaagtttctggttttgtaactgtgtcttaacaatgagtaggctatgattgttccagatatgaaacagtaaaatcttctaaatgaaataatggtgatgcgtttacattgaattcatgtactaatcaacaatcttagaaatgctttaataattatgcatgcctcctttgcatatttctgtctttttgtaatggccttcttagttcacatgttttccttctatttaacaggaaggggatgagcttactggtttacattgttttcgtcaccttcgggatcatgtaggagcagcaatagaatctataaacaggtactacttttctgttatgacttagcttcgtcattaatataatacatgttaccattcacaatttttttaaatgaaattcacatctttttaaggatttcttctgtaacttgaaaatacaaaaaaagaaaaaaaaaaattgaaaacgaaacgaggactctcatttgaagatacaaaatggagtatttatgtattttttaactggtaaaaaaaatatatgataacatattaaatttgttttgtagcattctttcagcagaatttttgcgtgcttcaatacatgatgccggggaaaaagactttggtatcttatcagaggctaaagcaagggcatcaatttctgcaaatggaaaagatgctgaagtaagatttagatctttatatccctttctttcttacttcttttattacagttattataacttagatttttcatgaatatcctatggttttcacttcgttcccattgaaaaaattggttggatctatcatgtggaacgtaatcttcttattttctttttctctcttaaccccttgaaatcattggaaatatatcagccattactgtgacttttgtattttgaggattatcaactttaactgaatgccactttacagtgctgtataacactataacttatttgctgcaaattgtcactgaattagcttgtttaactgacttttgagaattcattttaaaatgaaatgcattctggatttgttttaatgtcttgtcaaccattgatcatttgaaattgtaatattagtgttttttgctttctaagtttccttgttttgacatgctcttattcatctatacttgaattagattgtgcatgtgggtccttttatctcaccttgtgtcattcacctatttttgactttcagaagtctgaaaggcatgcttttcgcatgaactgattacattctaaaattattggcaggtgaaattgaatgaggaagaaacctctaattttcaagatcgtcttctccctgtcatcatcggattgctcagaactgtgagtagcttgttttgcatctttgcatgagctatacttgggtggaaacttatatagttatagtacaatggaattatctgtagtgccacaaaatgcagataagtgatcatggatggagattctgggatatcctttttttactttaccaaaaaaaaaacttggagccttgcatcatattgtggattattattatttatttatttgttttgattgaagtagattaacttttttttggttgggatttgtttagacttctaagcggtggagtagaatgctgaactctataagctatactgtttcctttcaggctcagctccctgctgttttgaggttgtaccgtgacacacttactgctgatatgaaagctgcaattaagaatgcagtggcagagctgctacctgttcttgtttctcgtcctctggagtcagagctggcccctggagagcgaacagttgatgcggatggtgagaaattcacaaatttcgctatccaatatgtattttctaataagtgcttcttaagataaatgatactactgttttttatttacaaagtagtaattccaaactttgattcttttttggctttactttttatattaacttttaacctgttttttgacaggcactggtgcatcgcttgcaagcaagttgaggagcctgtcatctgaaagctttgttcaactcttgagtgttatttttatgatcgtacgggtaatgcatgcttgaccatccttctgtagtacttgaggttttttttttttttcttattttttcaataaaatcacaccaaatgagtttagttagtatcttctctgtcttatattgaactatgtgttttttttctttcataaatttcaatttgattatttgcatcttttggcaaatatatatgcctttatgaaaatttggttgctgtagtggcaattttgttgatttactggtcaaccatccatgaatgttgtacattatttttgttttgcgtggaagagttatagtttatattttactttaggggatattagatttttttgtttggaagagttctagtttttacttgaactttaagggatattagatttgtttttggaatgctatgaattgattgtcaaaattatgttttgtctaccatatgaattagaaatacaaattagtacgaaggttagattttgaactttaagagtttatcttgaatgtgaattttaaaagtaacttcaccaacagtgcctagaaatgggatatacaagccattttcaaggattccttaaaactcggcggagtttgctgagtttcttgcatgcacacaattcacaatgttcacattccatattctgctcttactaatagtattaactatttgagtgtgatgtcatatgatttcttttagtgaatgcaggcacacttagtgcgggctgctgaagtgaaaaaagccattgagtggattttgagcaacctagatggtcactatgctgcggattcagttgctgctgcaattgctgttggtgcagcagcagcagaaacagcagaagacagtgatgtccaagttggtctggcctactcatcacagaaaagtaattcaaaggttcctttgcttcaaggaaaagtaaatgatgcagcaagcccttcaaatatgtctaaaaattttaggtagactttgtttatttttctttttgtgtaatttctgtgatgtcattgttattgagtcttgttacattgcctgatttttgaacctttttttttcttccttgttttgtttttctaaaagatcctaccatagttttcaaagaagcagttttttttcccttaaactacttctgtaactcactattggtgcatataaagttagataatgataaagaacatagttgtctgctaagttgcaacagcatattattcattacaggagttcagtcaattgtacatgttactaggagacaatttttctgttctcaattgctatttttatttttgttttaattctttttgctcagtaagcaatattgcaagttctgttttgtactttatttatctatagttaatagatcacatttaccaaggagttctttatttgatctacaagttagaattaatgtgaaatggtacaacattctaacctagtgatcctcaccagagctgatgtattgcgagaaaatacagaagctgtttttgcagcatgtgatgctgctcatggaagatgggcaaagttacttggggttcgcgctgtcctccatcctaagttgagactgcaagaatttttaagcatatacagcatgactcaagacttcattacagccacagagaaggtagtggttttatatgttttcaagagtctttatgtagcttacaccttgtggtgttaatgatgccagtctactctaaaaatgaacagataggtggaagattggggtatagcattcggggaacactgcaatctcaggcgaaagcctttgttgatttccagcacgagtctcgagttagtatttaaatgcacttgcttgaattgaattttttactgtgtcaattgcgttaccagttctaactctttctgcggtaattttagatgacaaaaatcaaggcagtgcttgaccaagagacgtgggtggaagtagatgttcctgatgaatttcaggccattgtcacttccctatctttttctgaagcattgatatctgaggatacagatgatgctcaaggtaataaggaaacgagcaatgccagctcccttgttattgtgtatcttcttaaccaattaaagcatgctaattatagtgaattatccacagagaaatctgcacctgtgtctgagacagttgaaaagaacaaagttgatgttatgaattcttcgactgaaaacaatcataccaacacaaaggagcgtggaaaatctacatctcaaacccttttgtacaaagatgttgggtatcacatggtaaactggttagttatcttatttacttagtttttgtttgttctcttgtactttgttctgtgttccacagcttctggttcccacttttcaatatgttctagttctacaaagtagcccaattaattacaatgatcggttcattgtgtatatcaatatgacctctgaattgtactttttttttgtcattttaaattgtttcattgcaacttatctatacttgctttactgttggggttatcatctttctatgtgtgtgggtggttctcattttacagagactagttttcattatttacattaaagttattgactgttgcactgtttttactttcaccagtggcttaatattgctgaagatgttgtcagagtatgttgacatgaataattctttgtcaacactttcttcagaaattgttcatcgcattgtagaaatattaaaattcttcaatacaaggacttgtcaacttgttcttggtgctggtgctatgcaggtactaatttttctagccatttcaccatgtatcgtccctgtataatttacaaaacttttaacatgtcttgattttgtcatatatgatgtaaatttgaacaattcctgaagtcgtctgttataaatcaaattacagaatcttaaagggtctttagtttgtctgacatgacttataattgaactgttcttttctgtatgtcacaggcatcagtgtattcattattgcaattatttctccattttagtcctgtgtttgtttctctgagtgattaaagccttacatttttctcatccacttgtaataggtgtctggtttgaagtctatcacttcgaaacatttggcccttgcaagtcaagtaatcagttttatatatgccattatccctggtaggttgtcttaactaatttcaatttttattttcataacgttctcttgcatcacttttcattctctggtactatcaagttttttttttcaacacatatataagaaatgatgatcaatctctacttgtgttgttaatatctggtatgtttagcgatattttgataagcgaggctccctaataaatttgggaggacgtcagtctcatacataagacctgtctcttttgaaaaaagaaatatatattgaagtattcgagtgcaacttttttccccttttgcattaacttggcagtttgttatttgtcaatgtctgttgttaattgagaatatctccttgtctgttaactgttgcccctaaggccttcacttgatataatttttgttttatttatgaaatgaatggcggagatcttgtcaagttgttaattgagaatatctcctccaatctcttttgcttagtgaaaatcaaaggaaattcgttaatatttttctctttcataaaaaaacaaacatctctctgctggttgcatgatgtatcgtgtatctgctagttattttaaaggatagtaagttcttgagtaatatcacttatttatttggtttatatgaagatatcagacaaattctttttatgaaagtacctgatactcgaaaggcaatgctgctaatggagatagatcgagtggctcaggtatgtgattttctactatttcgactactactaccgtattgcaactagactaaattaacattattattttagttaattaacagcaacaccagaaatattatttcttagaaattgtaacaaatttaaaagaacaaaaattatctaaaatatcagttagtaggaagaatttttattgagttttcctattgtagaaaacaaatttcctgacttgttcttgtcagggatttttttgcatgtattttattagcagtattttatgattatataatagacctttcttactacggttctccaccataagtgaggatactcaaaaaaaatgggaggccggccagtctaggacaagtgacctatgtctctttttccaaaaaaaaaaaaattcccaaccaagaaaagcaagaagatttgcttgtcaaggacttgcatgttttgcttcccaactcaaggatccacaatcacttacacataacaagggtgctaatataatttgtgaaattggttttcatgtgcgcaccagagtttaataaatatggttttcaggcatgggtgcgtttaaatttatatgattgttaagaaaactcgtgtttgttgtaaatgttaaaagcaattataaatatggctccgtggtcttgactcttctgacaattgtatattttaacatgttaactctgtcctcatctgctgtggtattacaaatcctttcagatgaaagttgattgaaggcagtttcagctacactgaaatttgctttactaattcagttatttctaatattagttcatctgcattctctgacaggattataaggttcaccgagatgaaatacatacaaaactggttcaaataatgagagaaaggttattggtacatcttcgtggcttaccacaaatagtggagagttggaatagacctgaagatgctgatccacagcccagtcaatttgctcgttcacttactaaggtcagtactgttttgctgatttatattttttactgctaactctttattatgcaagatgaccacccctaactcttgtttgacctgatctgtggttcaatttatttccaggaagttggattcttgcaacgtgttttatctcgaactttgcatgttgttgatgttcaggcaatttttaggtgagggttaagcagagggttatttgtctatttactaatttgaatttaggcagctagtaggtactatgtacatatatatttttcttaaaaaaaaggttcaaatgaggatgtaaatgtaattgctgaaagatcttgaggttttgaaagactatgtatttgttattcttcgtttgaccagggccaaaaaggattttccattctcatgtcaatgtcattcttctaactttatcacttgtatggtttactttcaggcaagtagtcataatcttccactctcaaatttcggacgcattcttgcgcatggagataaacactccacaagccaaggacaggtacatatcttgtcacaattacattattccagcatctttctgtcaacttcacattgaaacaactttgattcatttatactttaaatttccaggctacatcgggatgtgaaacacattcttggatgcattcgatcgttaccaactgataattcgagtgaatccactactccaaactggggtcaactagatgaattcttggcgcagagatttggaactgaagatggttaaagtgttagtatgaagtaaattggttaattgttttgataaggctaatcatacacaaggcaaggtgttggggatgttacaaccagttttgccctttgcatttgtcttgtacgattaaattcaggtgtcaaggctcgggacacattttcgctttatggagtgtaaattatactaaaccctcttaagtttccattttttcaatcccacaaatttgtaagaattcgtgtaaaagattcatagaaaagatcagaaaaaattgctgggttgtgctgtcctgtgtccaatcaaattccttttttgtagttactaatatggttttcttttcctccaggttttccatttgttcttcggtagagtaggtgtataaaatcctgtatttgaattcaatattgtggttagaagtgtttctcttttgcagctgccacagcttaattggtcgacattttgtattttgacttagggaggttgttagtctttttggccctttggttgtaattttgtttgcagtggaatacttgattattttcaatttaaattttagtgataaaaataaatgcatggtagtccacaccaaagttgtaaatagggtcctgacgggttgacttgtattttcaaatgctcgtaaaattatgaattgtgctgtattggttcgtaaaaggatgtaatgtgggtttgtttaaccactacattcccatcttgctggaattagtattgaaccgacctgttcaaattcgggctctactttcttgccttatcttttatggacaaaccaccaaatagtatgtgtttcttatagtttcaattcaattattattttttaacaacattctacacaaaagtatataaaaaataattatagtaagtagaatttaaatacttactaataaatattagagttttcaactcaatttttttttttaaaaaaaacatgaattcatatatatagttatagaattattaatactcaatgttatgttagaaggtttattatcatattaatttatatataattgttaagtaagtatttttttttttttgggaattaccgcatatattatttttttaatttttnnntttcaaatttacggtttgagtttccaaagtgattgcaacgctagttgcaatannngtttctatacgattttttgttgtagttgaaataggggtttctatacgattttttgttgctatttaggttgcagcgctagttgcaataggagtttgtatggagaatttcgtaaaatgcaaaaaaactgttttgaagtgtaaaaatgaaaaaaaaaaacctttttttttttgctgtatttaaattttattatcatcaaattattgcactttaaaaaatatcgtgtttttagatgggaaatttgaaattctatatttacaatacccaaaaattttatccctaaatgcatagttattaaaannnnnnnnnnntgaccacattcctaatatcccacaaatacccctcccatttgaaaaaatcaaaaactcaactttctctctccctctcactgaacacgcacgcacaaacaaccaacacccac

SEQ ID NO: 21923 - DNA, 4902 bp, Cannabis sativa
acctgcgtgcgtgagtgtgagtttagagtttactatactacttgatacttgattcttgattattatgtgcacttgcgtattgttcataattttcgcagcacctcacctcaatcacaatttggaaatatgcttagaattacaagcaaactcactctagatgtatgatgatacaatgaagaacctagagtgattatcaaacacacttaggagaaataaatacaaatttttgggccaaataagtgtgtgaaaagtgttttattgaattttaaacttagaagctcttaaaatcacttgaatatgtttgatatatggaataaaggctcaaccaacctaaatttttgagtgaaaaatgaatttttatagtgaatgaacaaaaactagccatttatacccgttagcacacttttcaaaaaggaatcttgggaaaaaggatctgccattttttaagcggtctattgtttttgtgaaaaacggtagaccgaaaacagagtaggggcaaagtcccattttatcggctctaaaacacgcataactttctacttattcattcgatttcaaaaattaaaattttgttctcttagttaaatgatatgtgatcttaaaaatcaatttagaaactttagatatcatttttgttaaataaaatgtcgcacaagttagtggcccaaaattcgtacttagaacttgttgagtatggatttgaaaattattgtacaaaactaggaagcataaataaatcttcatagagaattatcttgagttccttgagcttttgagttcgcttttgctcacttttgagagtttcgataaaattaccatttttttcttggagttaattttgccttaaaaatcttattttatctttaattatgctacaaaatcaaataactcataattgacaaataataaaatatttgttaatcatcaaaacaagaagacttaagagattgagtcaacaaaaataaataaatttctacgttctttttctcttttctctttcctttatgttatatcatagcaaataaatcaatacaccacaaacgagacaagactgagaagggatagaaaactagggtaaaacttttaagattataattgtacattcatattgttaaatttttaacagttgaaccattttcctaaatatttgaaaatggagacatttacttaattttaagatttatggtcattttgtatttcagccctatccctaatgcaaccattggccacaatcccaacccggccatgttatgtgctggctagcaaagccaagttgctactcaccatcccacaacgcgggctgactccaccattgacctccaaccacggcctgtccaacagtagggcaggttgggtctttgcccaaagccttttattttggcgcaaaaagttttttagaaaagaaattctcaattcattttttttaaatatcatattttgtattttctctgctacttaattttataataacactaccaattattttttcaaactacccaagttgccaccagcaaccttccaactttcctgggtgttctctttgaacatctcgagagtcattatgggccctaagaatattttcctctattcgtacatcttgcataactctaagctcaccacttccaaaagccctaagtttttgtcacaaagctcagtggttgccaacttcgggtcatctcaatctctcatttttgtaagaaaggaacaaatagggatgagatgatatctcacaacacaattcgttttcttcttctttacacacaacaactatattttctttaaccatctccaatgggatcttactaatttctttcacacaacattcacttcttatgttgctactaaaagtgtataataaagttgtcgaaagtatttaaaaacatacatatgaaaatatacttaagaaaaaacatacactattgatttgcaaattaataaccatctctttacatattgtacattttattttccttatgagaaataactttcattttattttacaaataatattgctgtatacattagcatatacttacatataatagtaagtagaagaagcttctacaataatgaagtgcccatacaaagatatatatttgtatgtatcgatctctagctagctagctcatcattctcttgacctttctcccaacatcttaagcccaatgtacctgctcaattaaattattaagacacttatacaatatttcaaaacaaaaataatgtgcatttgcaatgaaacatatagtaattaactaaaactcaccggcctaacatcataagagtggcctgaggatttgtaccaggagagatattaaaagtcgagccatccacaactcgaactgacttaattcccatcacattgaaatcaccatcgaccaccttccccacaacgcatccaccatgataatgataaaacgtacccacagttgttcgacaaaacgattcccattcccaattattactattattattaggtaaagatggtccagagaacaataactctccattgtgtttaaattgattcattgcctcagtttccaacatttcaccaatttttctcattcccataacgcaacgcgagaggtcaattggattatcaaagtagttgaatcgaacatttggtgtgactttcacatcggtcgaattggccaaccacaaagagccaattgacaagggtcctggtattttttcagcaaggctacctgaagtcatatttagttgtggttgaaagatgacaggctctatgaaatagttgtcattaattcctacaacttttgttatggaaggctccatagaagaatttgggagtaggatgttgatgatgttcataggattatcagccatgaattttccaacatttgggtgttgggattgtggaccgattccgctaagtagtaatagttgagggcttccaatggcaccagcactcaatatgatttcaccttttcgccgtagaaatgctttgtgagattttccttttgaatcactatatttcactccaattgctgagggttctgtgtgtatgttatataccatcatcattaattaattagtttatgtatgtagttattaatatactgaataataaaccaactttatgtatttaataaaaatttaacaaaaaagctattgtagagcataaaaaagagggggtgtgtatccgctgcattttttttttctcctattataaatagctatttttttagggaatttttagaaaaaaatttcatttatactcttataattgactttttattatgagaaaagcataattttatggcttaaaattttttgtttataaaatacacttgtaaagttttagaaaataaaaatacactttattcatcaaaaaataagaaaacaattaaaaaaataacgagaaatcaacttcacgataactataaaacaactaaaaataacacaactataatacaactataaataaactataaaataaaaaaaaatataatttatttttttactgaaaatgtatttttataatgaaaaagttgaaagtgtaaaaataattttttttccccattgatatatttttctatttttttttttcaattttttatttttcttcttaaaaaattcttttacattagagttatttaattttttttttaaataatttaagtgaaaaaaacatggttcaatatgttataatgtttgtgactatttttcttatgtatatggaaaatattaaaataatttgtttgaactttatcttttatattgtaattttttttttcaaaatttgtataaatactttaaataattacaatgttaaaaactatattttatataaaattaataaaaaaatgtaccaaatgcctattttatagaggtgcacaatataataagcagcctagatatatgtatatatttatgtaaaaacaaacatacttgatgatgatgagggtttggtagtggtggaatcaaagatgattctgtctacagtggcctgcacaacaactcgtaagttatccaaatttgctcgattgagaagctgaacagctccatgccttgtcccaaattgatcaaaaagagagccagaagttttggtaccaactttgtgattcaaactaaacccattatcaggaccaacaccagcttccaaaagagcttctctcatagaagattgccacacatccaatcttggatgagttgaaaccacactctcttcaacccattcatacgccttctccaccaaatccatctcccattccacgcccgatttcgcaaagaattcatcatcggctctcgagtagaaaccgccgttgatcatgctcgacccacctagaactcttcctcttcggtttccaactccgtctttggaggtgaaactctgaaacggtgtcgttccgtcgtcttgtttttggagatcagagaagaacccagctaatgtgaagacagttgggtgtgattgtggagcattgcctctttcaaggacaagaacagagtagttttcggataaagttgctgctaaagggcaacctgctgtgcctcctccaataataatatagtcataataattatcattatagtttgatgatccaatttcttcttcgccattaatattgtgtactgatttcatgtaactaaaatcttgatcaaaaggattatttgccagaactaattgcagttgatgatgattaaaactacatgacattagtagtacaaccaacaataatattggcgccattatattatgattgttggatattggatataataattgcaatgagaactaaacctaaatttatagaataatgaaaattgactttctcttaacaaattaataaagtcaaaattttcattttcattcttcaaatacagcttttgtttccgtaaggacttaacattcctagcatacatcaagactttgtttataag

SEQ ID NO: 21924 - DNA, 2178 bp, Cannabis sativa
tttttataagtttatgtaattttaatacttagatattttattaaatacatatatttcgaataattaaaataactatataattttcactcaaatgaaaaaagaaacaaaatcattaatctatcactaatatatccaatatctagcatagactttcccacataaaaataaaatattaagaagtgtaaatatatctaaatatacatacatatatatatatactagctagtactagtagtggtgtgtctagatctatgtgatgatcacatgcatttgtgccttaaaagcacatcataaaatcaaatggtctataatttaatttactaatttggatttcaaacttcaaaccacaaaccacaaaccacaaacaaagagaaatacatcattttgtttcacatagaatttcgaaaattaattaatttattttttatcttttgggggggatatataatggtgtggttaccaattcaaaattgacacgtttcccacttgcaaaatttgataataaattatagacatttcaacagtatgggattctgtaccacactacccagcagtaaatgaattatatataatatatactatatgttatgttcgtttaccctttttactgttttttatctctgaaaattgttcttcaacaaaggtggaccaccaaacacaaccaaaaatttcaaaataattcatttcaatctttttcctctggccaagaatctttgcagagttttttttgttcctttcttctccccccacaaatgggcctccccttaatattaatttaaatcaattatcccaaactttgtaaatgattgatttccctaaatgggttattcaagtttacacgaatcaacaaagtgatttatcataagcacaaaaccatactactatacatacattatcaactcatcaaagatttttctcactatgtttgtatttagctaatatatacacataaattataataatatatttgcatgtgtcattttatatattatgtataaaaaaaattctctcctagtattcctgccacttatctaaacttgggttcttataattattccatttggagcatgagaggtctcactagtcacatcaaaccctttttttctcaatctatatgtatacaatatttgtattgtgaagtttatattattattaggttattgctggtaattgtcacattttttttttttggctcttactatacagtaaattcaaactactcttttatatattcgattcgatataatttatttattacatgataggaataataataatagagagatagtacttttgttttgatgtgtatataaataacttattcattggctaggtagtgcgtactattttgtatatggaataattaatcaaataagacataaattatgacattgtaattagtagtactgatattgatgagaacaattttgttgtgaatatatatattcagacttgtcttaaaagaaaaaggaatatttaataagaaaacaaaaaggatgaaagagagagatgatgagatacaatgttttgtgtgtggtgatgaagaaaaaaagatttaattttttttgggtcagaaccaaaaataaaaagaaaaaactagtgagaataagtatgagcagggaatggacagtgaattaggtcaactatgtatgtatatatatgtatagatatatatatatatataggtatactctgagtcatatttagtgatcagtagctactatactgtggtgttgtgtaactgtctcagccgcacatctcataaatattcttcttagtcctttctgccttctgcacacactctcacatgtagtcttcaatcccatttgccctttccttcattcaattatatcatgttacaaaatatcataagagataattaatgtttggtgcaactcttaaagatatagatgtctttttatttggggcaggatgagaaattatgtatatatttaatgataatataatctattaattatagttaaacaattcccgctacaaaaaactactatttttagtgacaatcctttagtcacaatataaaatttttgtgactaaatttttgtataaaattatgtatatatacaaaaattatttgtgactaaaacataatatttagttacaagttgtcactaatttcgttttagtcacaataaattgttatttttgtgactaata

SEQ ID NO: 21925 - DNA, 10404 bp, Cannabis sativa
agtttcactcagtatctacttagattcaactccatggcttagatttatactgggtgaacatgctatatttttcaaaattatcagccaagttggaatgctatgcattgacactggatcaaactactaagaacaaggagaggctactccagggtaattgtggaagttcaattgtatcaagattttttgtaagaaaatttaatttagtaatgagattgatcacaaaattgtcttttcttgttactttatccaattcattattcaagaaaagagtaaggcatccacttgagaaattgtgataacatctctctacgaattaattaaatttctcccaagcaacatcaaatggttgattgtgttgttggaaaaaattcacaagaaaatcctgatgtaaaatttttcatgtaccttggcaacataaacttatacaataaatttttttgtaaaattaaataaatgaacaaaaaaattaaaaaaaaaaataactatttcaatatagataatttttagtccacgacaatggcgccaaaaacttgttgcaaaaattatagctatgcaaatatacacatttacttgtagttttttttttcgataagactgatatcgttcccacgagtattgactatcaagttccaatagcctattttattttctatttggttattgataatagagtttttaaaactaggaataaaaattgcacaatttatgagaagaaacactaaagaacaattgattgaattcaatatttatgaaaataagattcctaatcttctcactatgcactctattattctttaatggaacaactaacaaatttttctaaactaaaataatagacatacaaaagtgtcaactatttgggttaggaaatagaaaactcgacttacaaattctctatatctctatgagaaatttaaacaaaaatgaagtaataaattcaactcaaatcacttagaccaatttgatactcccattctaaattgaaatctacgtcttctcctttttaacataatcaaatcttacttctcagattttgattcaattttatagatcgtatgtaagagatgcgcaatcaatcacatacataaacatgaaataaataaatattagttgaaaaataaatataaaattgaattaaatcataatagagtttcaagagagtcaattaaaaaacttaatgaactctaggtttgtctttttcaacctcctcctctgtattctcttctccaagtaccattattattaacctataaacatttaaaacctaatttccctataattttagaacaaaaattaccctaaacaaatgtctgaacgcgtcgacgcactatagcaccacttaactcatttctttaaattggtagtgttgtagcacatcaaaggggcactggagcacctggatagttttcttgtctttaaaatcttgttacaataattgatggtattcttgcaataactctctcagtataacttagaattagacgattcaagatatttttgaaagttgaaagaaatatctaaaatttaatttattcataatatttttcgtgaaagtgaatgttgttggaaactcattttactaggattagatttactaacatttatgttgattataactttataatctaacatcctaaatatgaaattcctaaaaaacgataaataaacacattaaggtatgtaaatccttatattaatggcagtaaaataaaatgactccttccgtttaaatctctcgcccttgattcttgtctgtagcagagcattattaagatatgaacctggatcttctcctccttcgattgtgttcattacagtcttacacaagggcctaagtatcaccttgaatagagtggattgatggatcgatatgatgtgagtatctaataaacccaaaaggattcaactaacaagaagtttcgaggataccctgatagtcctcaagaggtatatattcctttcatgtaatttgtgttttgatttaatgttcatacatctagggatccaatggagatatggtacaacaataatcaaatatacaaatcttccgttgcatacctaatttagtaccataaaataaacatgtatttcatcttattaaagagacttttctttgtatttcaaaaatacatattcattatattgagaggtgaggttgacaacggtagaaaaataattcagttgtaggtatggttgacaccggtcttttaaacaaccatagaagagtgagattgtgactacaataatctaagagtgagattggaattttaaaaattcgaacagattgataatccttttgaaaactattagttgaagtgaagttgacacccttagaaaaataacttggttagttagatttgaacttcaacaatcttgtgaggttgataatacttggaagataattattgtgagaggtttgggaaaaaccttagtgaaaatttcttcggttataagggttcgtcaagcctgttaacttgactcgatagttgaactcaaagctaagtccatagctttgaagaccaatgatataggtggcttagttttactgaaccttgtaaaaatcaagagtttgcaatttctatccctaaactatttacatttcaagtttgctatttgttcatacttgtgtttatatatgtgattgcattaaatttaaatattaatgtaaattttctttgggtttttaaatttcaaaattagtttaaattttcaattcacccccttatttgaagcatatcttgggtttaacaactttgagaacgccaaataagaattcttttggtgatattcaaggaagagatcaactagcttatttgttgttaactgatgctcatgaagagttacggaaagacccattgtacaaacattttataatcaagagctttaagctagccttagatatagagatatacagaaagccttacttgcttttcttcatgaaaaggcaaagctttattggataaaatggagggggatggaaattctgtttcgttccaagtaagcattagagctcaaaaagaagccaaccagatttattcagtaacagatatggatggagcatggtttgataatctgaatgaggttagtgaaggtttcttgaattttataatcatcttcttagactttaaatgggtaataggagacttgtcactcgatgaattgcttcgctagctccactggtcactaaagcttaaagtaatacattattagtgggtacactaaagaggaagtgcaacaagctatttttggaatccatggaagtaagactctgaggccagatgcgtttggtacttacttcttttaagatagctgtgacgtgattgacaatgaagtatagtggagttattccctcttttttgcgtttggtagaagttgctgaaggaaattaataacacggtaatatctcttattccttaaagtaaatgtcaagcaaatattagtgattataaaccaatctcttattgtaatatgctttaaaaagttgctacaaaaataatttatgcaagattgaggggaattcttctataattgatttctcaaaatcgtagtggttttgcgcaagggaggtatatagcttataatgtgatggtttgtcaagatttgatcaggcattatgggataaataatgcaatacctgattggatgataaatctagatctccataaggcttattataacactatggagtgagattttattgatgaaatattgagagacttcaagtttctaatgaattatatccaacatgctatgatatgtattcacacttcaagatttagtctaatactaaatggaagaatggatggttttttgaagctaggaggggtttgcgctaaggatatgtcatgtctcctttacatttggttcttggaatggagtacttgtcaagtatcatgaccaaagtgcgcaacccagtaaaatttacgtttcatgagatgtgtcgtaatcttcaactaaataaccttttactttgtagatgatgtatgcaattgtaatttctgatctatctatataattataagggctaaatctgttttctcaaacttatgggttataagaaagtgaacctaaatcaataatatattgttgtggggcatggagcaaagtgaagtccaaagaattttggatgcattaatttttgagaagcgaatttccattttgatatttgggtatttcaatctgtgctaaaagacttacaatggctaattgctcaaaattgttggaaaagatgatagggcggatgagaacatggagtacccaaaatattttctaagcgtgtagagtgacattaatcaatttagttttagtgtccattcacttatattgggcatgtattatattattgcctaaaaagtatcttgaagcaagtaaatgctatatgtatatcaatcttatggaagggggtagaagattagggagtcctagttgtgtttcattggggcaactttgtaagtttgaagaagaaggtggttttggatttcaaaaattataataatagaatcaagttgttcttgggaatgaaagaatgggtgcacaatgtttatttaaaatgaaagaattggtgggattataagtccactgcataaggtagctggtattagaggcaaattatcagagtgaaggagaagattcagcaagtaatgaatttacaacaatttgtgagttttaagtattcaattagttgatatgttgttctaaataaagtaggtggaaatgtgaaatggtatgtctagagtccttagttggtatatttggtaaagatgacaaaattaattatatttagtattttcaaaattagttgtttattacatttaatatttttcaaaactagtttctcttttctcaatgtgaaaagtctttcgaatcagattgtgactttattggtgaataaatatgtgatttttttttatttagattatttagtatttattacttgtaatttttaaggaaagtcttattatttattttattaatttttatctgatttcctagtcaagaaaatgtatagagctatgcctttaatgtatattttatttccttatttatataaagaaactttgctgaaaatctgtctaggtatagtaaatctgtttgagtggattgactgtctatttgaatagattctgactttcatttttgggattatgatttcatctgcacactttccatatctgtttagacaaaatttcgtcatttaatgaatttttgtaaaaaaactaattaatattttctctttgtactcagacctttggagctcgatttaaaggttatttatcactataaatatggcctaaaccagcaacaaaagttcaactcttctacttcttaatttttaatatttttagaagagagtgtttcttttgtaaatgatagttgttctactattccctggtgagtttgtgtgtctttgagattactgttgacatagattttcgttaacagaaaataaatagccttttagtaataaattctctacagtaattaataagtaataaatgatacaataactccagatattattacgtaattttgtagttaaaatctacatacttcatgagtccttattattatggatatttattgattacagaatactatttcaaaatttgaataatattttcactcttaaatttttgtcgtccctcttcccatgggatctgcccctatttaaatgaatataggttggcagttaccctatttgggattgattcaaatataacagttcatgaaatgtggacaatctccacgttttattttaatcttatgtgggatgatatctaattactacccaaccgctctttacttttatcctttagacagttattgctgacttagaaggttgtgtcttgcttgatacgagttatcctccttgtccgtcttaataagaaaaaatgctaagtattgggaagtagttcatctcatcatatattctcttattgacattaacaatgcgaggtgatcttctcgctatgtagtgtgaggtagttacattgttacattaattctactcgagtggatgaacatcccccttcttgcctatatattttgaggtatgcatatggctcgttaacctcagctcaatagttattatccttgtcttgcttttgactataaaatcaacaagttttgaatattatctatcagacttttatttaataataacgggttatttaatatgcatttattggtataatattattatatcattcaaaattgattcatattccttctgttggaaacatgtcaacttctgaagtgtagctaaattttaggtataacaattgccccttaaaaagtactttttaattaaaatgaactttttaaatgattacaagggtataatcgtattacccagttttaaaaaattgcatgccttgagtttttgatggtttagaactttgaggaacatcattagcattaaatgcttcgtctctttcaatttgcaatgtaaccatccgttagatcatatttcttttgatctaacagtgttttataataaggtataaaaatcaaaagtatcagtctttttgccatttttaaattttagaccttcaaatttcctctgtaacctacgattactcccctttcatcttgcatgccctcaatatctttaacttatttcttgcatatttcttcatattacatttccaacctcaaagaatttcaaaacccattgttttagtcatcaaaatatcaatcccaaagttcttcattgcccaaaaatcttcgtcaaaacagtaagtggctcattctcttattcctgccatttttattttttgtttttataatcttgtctttgtgattgatagcttcattattcgctttgtttgattattttttaggtaatttttgttttgtttgtttggataattttagggttaagaaatttttttaggttattagattcatagatttctgggttaggttgaatttttcttttctagaaattgggattacactcgtccactagtatgacccaatttatttcaaaaattacaaccctagaattcttagaaactgaatgccctgaaaatttagcccttccacttgaatccaaaacttatgtacctaaaaccattcttgagataaatgatgcaaaaattagagattatctaataaaaatcaatcaggatgaaatttcaagttgctatgggcaatttttgcaagaaataactgagggtaaacgtcgttttctgtgagatatagcttggcatgaaccctggactttatcttctattcctttagcgagacctttgttttacctcgagttactgttgctttttcaccaggtgacttagatttcaaaattataactacataagcttaaaaatccaagacataggagcatatgtgggcgaggtactaaaatcttgtggcatcaaatacagacgaggatgccgagttaggtctgtcgctaaaggggaatttagttattatccccctcaaaggataatacgagaagaagggtgtaacaccagcgaaccatctagtataggcgcttggagcctagagaatataaaggctgaagcagtacttcctttaaaagattacaataaggaattctgtaattaccttaaaattgccccttttcaattaattccaacctcctatagaattctggcgtgtttgaaggtcttatatcacattttagggtgggagtgtccaactccactcaaaattttatacttttactcaataaaggcctaccccacaaggaagtgaggagcaggtggtttttattacctccggacctacacgaatgatcctaagatcattgtgaggctgcccaacaagactgagttcaaagatgatttcttctagacgtccggtcttgccccaataaatacaaccacatgttgcatcatacgtaagtatttctatctcaaaacatggtttcaattttttaatttagtaactgtagatatttgcttacttttcttattgcattaacaatgattttgaagagacctatccaactcctgaaatggaagcgagacacagaactctcttgggtcttttgtttggactgcaataaattgatttttaactgaacaaggcaaacctgcagacctgcaatctccttggcagcaatcaatctacttttgacattaagaatccaaactactccaagtgggaacaggttctagtcccggctgacgaggaagacagggattatgtggctcgcatccactacttgaaaaaaatatcccctcaggaagctgaagaagaagcatcccgaggtaataattgtggatggtcccctaatgtgcttagagttgatcgtacttcgttagttaagttcaaggatagccagtataacttttatacatggaattgcgtagatcgcctagctcataggtttgacagtttgtatcttaaatttcatgttcaactaagttgtaatagctcctacttcggaatttctaaacagtatggtactaatttggatagagcgagccatccagactcaaactgggatagacctccaataaatccttatgatatatattatcacaatggctctacggagtttagtaattacaatcattcctcttcgtcattagatggtgattatggtaattttcttaagtgggagattacctctccacatttctcttatttactttgttgtcagtgctaactgcttttggcctcgcagatatggacttcaagagtcttgttaatacctcgggaaaaaagggaaagaaaaggattgttgcatcagacactttgttgggacaaaattcagaacccttgaagagatcaaggaaaatcacggctaacaaaaagcttgcctcgaaccaattaattatcgagccagccaatgatcaagttcactccccaatcccaactactgagggcactgatgagaaggtctaaggatcagttcaccaggtcaaattctcgggtttggaacccaagatggtctttttggagccctcctggcccttgccacgagatgcaaggatcactagctcgcaggcttgctcgcagtatgccacctcctgttggcatcattacaaatccttccaatcgggtgattacaattttatcaacaatgggaattttgaggagctgtttgagaggagcttgaatctcagtctctcggttagttcctttcttcatttcctatttcattatatgttcttccttatccttcttctgactaggcatctctattgtctcacgtggcacaccaaataggcctttaaaaaatcaaatagttggaatccgagcttcgcaaatccattgaacaacgtgaggttattgcaaagcaatggactgatggccaaaaggagaacatctatttgacgaaagaagccaaggaacagaagagagatctcaagactgagcttgaaaattctcaaaaagaagccaaaaatcaccaagaggcccacaagaaggttttagaggagcttaacgaagccaataaaaaacttgaaggtgctgaggccaatgccaaggataggtgcaacatagttgcaaaacgttctatctatagagcttggctagccaatcccaatatggatttaagcttcctggagagtggtgttgcggagatgctgacttatggcgagcaggcaaagaaagatgaagttgtggatactaaggaagaagaagaagatgaagaagaagaagaattatccaagtctctaaccatgtagatttggttatcattattatatatttttttatttaaaaaaatggccattaggctgagacaatggttgcctcttgtgacattttgtaaaaacttttacattgttggatgaccaactttgcttatttatatatttttactttttatgcctcgcatcttgcttttgagttaaacatgtttatttattgcgtttaatttcgcaatttaaacatttatatctcgatttagcttaagatactttgagttgaatacatttccaaagccattttctttgagatagacaagtagttaataatctaccatgtcttttgcgagcagctttcagtctgccatattttatgagagcagttctaatctgcttggttatacagaagcagttgataatctgctatacacattttttttaaagtaaacttaaaatattttgaatagttcaccttactaactattttaaatatctattaattgagtgggtccaggcaaactgatcctagtttgccttaaaaaatctattaattgctattttagtttttctttcaaatttttcccaatatatacacattttgtgggattattaattgaatccaaaacaacttcttccagttctcaatagatttgagctggttattcttgtcttagattctaggatccagatcttcttctgtcctctcaccttcttctgttagaattaccatcaattgatgactggctctcctattctgaagttctattcgataacactc

SEQ ID NO: 21926 - DNA, 5143 bp, Cannabis sativa
aagtgtggtttagttaaaatttttggattaaactacaagataaattttcattcaaaacactaatggatttggggaacctctgtttgcaaacttttacatttttgtcacaaaatcggcattacaaaaataggattacaatttagtacataattaacgggaggatcttatccactggaagccaaaactccgcagttgatatgtacatcactgagagacctctgactcatggctgaacacagattctttccacctcctgcaccacaaagcactcgtgagtcacaaaggctaagcaaaaaaaaggagtacaaatacatatattacacataataaagaaatcagagtaactcataattaacaacttcatcaatttaaacaaaataccatggttgagtagaagtttagctcactaaccctcattttacaaattcaagtcaaacagctcctatttctaatcaattaaagcttaaacaaactttaaatctaacattaacacatgttctaacttcaatttataccccagctccgaagtcattcaaacctaccctaaaacctaacttaaatatataaaaatcgttaaacaaagatggagaaatcttacctcaaagtttggatatcctctaacccttgctaaaccaacagaaagtgatcaattttatgaagaaatctccttgtgctactggttcttaggatttgaagagagagaagaagaaagaaggtgatgttgtggaattcttaagtttctagattttctagcattttctatacttaagtatataatctaattcttatattaatctctttcagctaaacataatgccacaaaagaaaaaattcaaatcccaccaaattactaatttgccccctcttaagtactaaaacttaaaatcaatcttaggcgtgttttggtcatttttaatttgcttgatttaacctacgtctcaacattttaacctagtccagtataattataatataacacaatttcaaccactatgacatttctgaccactccgtcgagttttccacagtcaccgaaccttaaaatattttattctaaaaatggtatccacgatacccccatagttcaataaaatctttgtaattaataaattacgctttatttattcatttactcatatttccttcattaactcgtaattagtttaagtagaattataatcctactctaattgccacttaatcacatatttaataaaatatgtccaattaaactatcattatattttttgggatattaaatatcttaaataattgcatggcatgacaaggaccatacaagcttttttaagaagtttggggattagaaaatgtatatgcaatataaattgatttaagtcaaagtgtaagaaaatgatactacaatccagatatgatttactttatagacaatagtataagtattttggagtatcatcataagaagagatcaagaagaaaactcacaaagagaactaattttggttaaaagaatggcatttttaggcaatatagtgtctgagaaaataatggcaatagatttgtcaaaactcaaatttaaagagctaagaattttaataaatattggattttttttaaccaatagggctcgtaaaggagatatctagaaggactcttctaagcctaaagaagagaataaccaatatcttgcaaataattaaagctcgtactcttagaggtgagaaagttagacgaaaagagcaaaagagttattgataatttgagtgcgtttagacacagaatgaaacatttaagacttaaacttaaaggtagttttggaagtacaagtcaaagagttctcactaaataattttaaatagtgagtttctagtagcaaagcaaatataagttgggtgtagtaggtataatattgatggatttagtaaggtctgttcggtaaggtttgccaattatgcatattgtatccttatcctagaaacctgactgattaatatattatgagattatatggctaccctatcattaaaagtcattgacgaataaatagttgtgctacgctaacccatgatagggttgaactcttttaaattgtaactagtgtgcttataatgttttaacgcatatatgacataattttaattaactaaaatgaaatagtttttactgaaatgtacgttggtttctgagatttagagattttagcagtggaattacgaagctagcgtttatttttgttaattaaagtggtgtgtaatatgcaagacataaatatatctagaataatatatggtattacaaatatgaagtgatgagatacccagatagttaatacaataaaagaaagaaatcattgaacataactatagaattatatcaatattacacatttaaacttcaccattgtagcaaggtaacaatagaccagaaaaatttagtgtggaaaactagctaatctcacaattaagttatccttaactgaaaggagtaacggaggaccagacaccagaagagcgattagaaaagaagatacaataaagtagtacaaaaataaagagactacaaaaggaacccaagcctattatccagaataataaaaacgcatgacaagtgcaataaatacgtggataaaagaaattaagatgtgcacattagataaaaaaaattagttgaaatggatcattaaatatatatagaagaccttttaaaattcttccatattttcctaatgtaatggaacaagtatatattgatgattgagtagcaattatgaaatgacagaaatgacattgtagctttacgatgaaaaactaaatagagaagtatattttctatatataataacatttaatggaaaaatagaaatagttaaagagaaattagcataaagacttataacctactattcgttgtttattatttttctattttgtaatgcattctcaacatgcatgtaaggattttcagaagggagtaaatagttttactcttagtggcatgcaagatgttcataagtgaataaatagttgttacttttaatggcatgtaagaatgttcatttaaaaaaaaaatgaaactttatagtactatatatgagtgtaatattgccaaacctatgtatttgaagaattcattgtaagttaccgtcatttaaattatgagaagcacatgaaggcacaattcctagagggtttggtagttaaatttgagggcaaaatttctgtaaggagactaaaatgtaatactcagttcgaaattagtattcaagagttattgagatattaattatgtgagaataattatcttatttattaatgttattggtagtagagataattacttaattagggtagtagtaataaatttttaaagatagttaaagttgtattggttgcgaaggtagacaattatggtattttaacaagttaacaaattatttaattagtacccaatatgaagcccattagagtttagaaataatttagtaggtttactaaataaattattatagaattaatattaaaaaatttgtaaactaaaagaaattcacatgtttagaaactcttttagtaaatcaatcatatttggagttttataactctgatttaggtgattttaatagtgttggaaggataattcaaaaatctaaacaacatgtaaaaatagctttatctaaattcaaatatttaaggtcaaaattaagctttaaagttataagatgaaagacttagaattaaatattaaaaattagataagaatttacataataatatgttaagtattgtgagtgttattattattattattattcataaaaataaatctaataaaagttagtacggactttattcaaacaactctaaaagttatattgttctattcatttcactcaactaagaaagccaatccataaaaaatttcatgtcatcttcctcgaggttaaatccttagccaaatctatagcacttgcactctcatattccatccctattattctgtgtttcttgatttatgaagctttaagtacttgggggagtagtgatgggataacaatagttttagcagcaagacttaaagtaagaaaattaggtagttttatatgtgttcaattttgtaacataactctttgtgtattggaatatgattcacaatttattattattaatgtttatatgatactaagaatgtatgattttagagacaatataaactatttaaaatgatatagattatggttgttatgaattatatatgttgcatgtatgttgtatattgtatgttgacgacttggttacaaataaggggccacggtagggtatgatatagtgtgagaccgttgaatattgagatactctaccctgtctttttttaattcatgtatgaaattattatggtaggtatgatgtaatgatgttattattgaatgtgtagatactctatccaacattgtcttattcgtatatgacatttattagatactcaacaaaggattctttcagaacgaactcaatccggctctgatacctcatgttgaacacgacaacacataaaaaatataattacatttattattgtaaaagtaattacactaataatttctctcacacttatatatttatcactctcaaagacacttaaaattaaacaactaactctcacttttaaacactacactttatacttgaatacaaatttgcatgatgctccttaaaagaccaaagttttcatacatatacataccactcaaagtcggttttgcacttattgactgtaatatgctagataattctagtaattatttttgagtatttatttaaggctcaagtgctagaaaacacttctctaaatatatcttgatttttcttaaagggtcaatggtaattttcaatgctagaaattatctgttaacttgattatattaaaaaaaaatcattaaaaatagagttcagagtattattttgtactattttaaaatatgcagggtctaatttaatatgttacagaaaaaaatcgataaattttataaaatatagaatctaaattgatatttaatctttatatatttattaaggagatgagaaacccctttcaaaataacaacacaaattaatatgagaaaaaagaaaaaagtaaacacccaatagaatattcttccaggaaaaaaaaa

SEQ ID NO: 21927 - DNA, 5873 bp, Cannabis sativa
tttattaaagaatgttttgggcctggttgggggccttaggcgtgggccgtactcttgacccgatcctgagtatgatataatatgggaaacttacaaaaatactggaatttcggttaacttttacaaaaatactattacacggaaaatttttcaaaaatgctgtgtttttataaaacaccagtaaaacacagagcagaacaactcaaaacaacagtagaacaccagtaaaacaccagtagaatactagtgaaaacttaacacagtatactgcagtatgaaacttataaaaaaacatagtaaaaaaataaaaaataccgcctgacagtatttttataagaaaatggcaaaagttagtataccatgttaatttccctataatatcgctttttgatttgttggtaatttttcgcagctttgccaataacatcaatgttccctttcatgtatttcatggtgagtatataagtttatttatttatttttgtttgaaattattttaattaatttatagtatatgtttgattattcatgattatcaaattgatgtttttattaattagataagggatttcggtattgcaaaaaaagaagaagacattggttattatgctggctttctaggtaattaaatacgtattaatattaatatataaaagattaaatattaagtgtatgattcgattaaaaacaaatttaaatggattatatgattaattaagtaattatttgtgttaatttttggtttgaaggatgtgcattcttgttaggaagaggtctcacttctattctttggggaataacggctgatcgatatggtcgcaaaccggttatgctttgtggcataattgcagtgttagtatttttatgagtttttataaaatgattttaatttaaagtgttaacaatttttcttatatatgtattatgatgatgatgatgattatagggtaattttcaacacattttttgggcttagtataaactattggatggcactttcaacaagatttctccttggaagtatgtgtggaatacttggttctatgatggtacaaatattacattattatgctcttcatttttattttggtttgatatgtttcaattcatatgcatgtattaattttaataatgtaattttcttgtaggcatatatttcagaaatttgccgtaaagaatatcaagctttgggaatatcaatggtaagaagttatatatacacatacattcatatataggttaattatgattttctcttataaactttgacatgtactaaattataatacacctttaattaatttttcaatcgttaattttttttttaactattgagattgttgaattcatgaacttttatccaatgaaaagttgatgtgaatgaaaattcaagaggtacaatttttggtacatgtcaaaattcgagaaacatgattcagtacatattaaaattcggggagcataatttgatacaaagacatcgtcacattattaattttgaatgaaattagacataattctttgaatcttacaatttcaatagtttaggagagtttttaattaatggtgaaaaatttaaagtataatttagtatatgtcaaaattcagataaaaaatcctataattagccataccttttgttaatttgtttgaattaataccactgtataaaataaggagtgtttgtaaacttaatttttaaataattaataagagaaataataattaattttcagcttagcacagcttgggggattggattagtaattggtccagctcttggaggtttcctagcacaggtatacaaaattcttcttcttattattatttttttctttataataacactaattttataaaatgaaaccaaattcattatataaatccacaatgattttttttttttcattttaatgataaaattgaattatagcctgcagagaaattcccagaaatattctctaaagaatctatatttgggaggtaagaattaatttcaatttttttttaaattgttttttgtttgtggttaaaataaataaaatattgtgaaattaataatgacaggtttccatactttctacctagcttgttcatatcagtatttgctttgattgtaacttttttgggccaatggttaccggtatgttcattaataattataataataatggtgatgatgatgattttcatgtttattaataatgttattaattatggatgattatatatttttacaggaaacacttcactttcatactaaaaatgatgaagaaaaagaaaattatgatggtccaaaagaagatttattggaagaagatgagaaaaaatcaaaacaaagtcttttaaagaattggccattaatgtcatctattatgctctattgtgttttccaacttcatgacatggcttatgtagaggtaattaaactaactaaataatgaaaaattcttccattataaatttgatcaaattaattcatcattaaatctcaattttgttagatttttccattatgggctgttagtcctaagaagtatggagggctaagctattcaagtgatgatattggtgaaattcttgcccttgcaggtacactaccactttatattttttagatatcttaggatcttttatgtaattatttcaagtcgattacgcattaaggtgggctaagcccatgtctaggacccacctaaatacaaggcccaaaactgttatacattatatgaatatatgggaaaaaatatgataatttgtaaaattttgagaaatagactcgctaatacccaaatccactcttacctagactaaatctatacctaagacagctatctttctcatacaaaaatattatttgttttcaaattgtaaaaagataatattatttcgtttatataataatattgtataatagaatatcatattttactctcgtaaatttagggtaaatatgttacatgtttgtctaaatataagactagtaatttattttgagacaatgtcttagcaaacaactaataacatgtatgacatgaatttagtatgtaaaattgcatatgattctcttaactaaaacaattgttttaataacattttattgttgttattattttctagggtttgttatgcttgtgtttcaactatttttgtaccctccaattgagaggatttttggacctgtacacttggcaagaattggagctgtatgtctctctctaaaagtactcttcatctatatatattttaaattttattatattctaataattttcttttatttcttgctaataattatttattaaggtcatcacaatagctttgctatcaagttacccttttatagcaaagctttccggactcacactcactctattagttgatcttgcagttgtcttaaaaaatttagtttcagtaagtattttttttcaattttaatttactttcttgtataattccatacattttaacttgttttcaaatattaataaagatttgatactaaaatatatattttttttattatttattttgctaaatgtcaacatcgaaatatatactctgcattaaaaaatttcgatatgctattttacatagaaaatttttgacccactcccaaaagttcttaacaccttttactaattattcttgaaattattaggcaatattaattactggcttaactaatttttttttatttgttaaaacatgattagatatgtattacaacaggattatttctactacaaaacaaagctgtggtaatttttctctcttactttgctaaatacatgtatgaaatttgtatgtttaatctaataattaacatttcaaattaagttaaagttagtaagttttattattgggaaaatgatgaatttttgtttgaagggtcaaagccaaagaggagctgcaaatggcatgtctatggcggcaatgtctctattcaaagcggccggtccggctggcggaggtgccatgtaagtttttatccatataaccatatatgaaatattactatatgatcagcagttaaatttaaaattaagtcttgcttaattagttataattaatttaatttatttattaaattaatttctttaattttgtttgaagttttaatattgcactgttgatcaacataacttattatctcatagtgaagctaataattattatttattttcctctttatttatttatttatttcagatttgcttgggtacaaaatcatcaaaatgcattatttctccctggtaattatctaattgaatctccttttatggcttcaataactaattcttctttatttgtaaacttattactatattatcaagctcttagaccatttaaattaatttttgtattttaattaatttggtgcaggtgatcatatggttttcttcattctaaatattatcgagtttattgcacttataatgactttcaagccttttctagccttaactaataatgatgtcatttaagtattttaaatatttaatttattatattattggatttattttattatattaaatataggatcggattggatgttgaaaaaataataacagaattggatgttgaccttgtctcgatattttttttaaagtttaatgtttctctatactagctagtttcatgctttttcattgttatgattttttttacttttaaaataaattctattattaattaatttttgcaatattatggtgttattatgatttatttcatctataaaatataatttttacttatttataatgaaaaaaggtcttaattttgaaagatactaccatatataaaatactataactagtatacaagtaaaatttagcgggtaattaaatatagttttttctatatatataatttgatcataaaaaaattagtgactaacatttaccatattgtagcattactaaaacaagaaaatgcagagaacctacattgtggatttcagttaaaaaaaaaaacatatagaattcaaaatagtataaactatgtattgatccaatccatgcatgtgatgttttttaatttaatgagttttttctatttgaaattcagtatttaattactttattatttaagttttgattaattcgaaatacgatccgttcttgatcaaatacacaaattaattaatttacattgtgatctacataattaattattagcatagagtaagaaaattaatcgctaaacacaaaaaaataagaataaattaaagttagattaataaaataaaaaacttgaaattcatttttcctaactcattcccttatatatatatcactagtggactagtgtcaatattcttttgtttaatctttaatggttgaaaatctcgagccatatatctaagtgcacatatatataataacactttaacattaattacatggataatggtggtggattgttattatcagacttgatacttaattgcgtcaaaaatattatgacactgaaaaaagagtattgctataaggcactagtagtgcctagcaccttctcacgttgcgattggttagcaatactccctaaaaactattatattaaattatatgggactcgatatttagttgaaccaatagcgatactgatacataggagggtgctagacactactggtacccgatacttgttgttgtattaaatatcagtaatatcttatagcttggtcactatcacattgtatatacttattaggcacaattgatgtgtaactaatctaaactacccaattaaggctgatataataattaagtgtgtatttaatattactaaatatatttatataacaacacaacaacaacaacaacagcaataatagtaactagtaacaaattaaatgggtgatg

SEQ ID NO: 21928 - DNA, 3529 bp, Cannabis sativa
  modified_base (3095)..(3096): a, c, t, g, unknown or other
tttttttttttttttttatttattcaagcgtttatatattacacaatacataacctaggactcgaacccaggacctccaacacaccttcctatggtcacttgaggttaagttagaaattcatatttaattagaattgaaaaggtctacatatgtaccaccaccattgaatgttcaaacaaataatcacattaatctacttcaattcaattaacaaataataattacgatcaatcggttctgaaaataaacaataataaaccaagatcaatgggtttctttgatcattgctaattgggggaggggcattcttataaattaggttttcttattattattattgattgggcttatatcttctagttcttctttggcgcatttagtatcgtcaaaattattgggttcatgaccaaacgcttcttgttttcaaaggtatatagagcttgatcttttcgtttgctcggacctatcaagaagctcaggtgagaattggatttgtggcttttggtcatatatatttcaactgttgatctgactatatagtcagcccccaaaggcacacatagtctccaactgaagggcaaggccggcccttatggtgtgcaagttggactactgtacagggcctctaaaaaataaaagacccaatacattttttctttaatgcatttcagttttgattaatgaaactaacttttcaagaggttaataacttgtcattaatggacacttccatcctgatttctaaaagctcattttcaattctattactgttttaagcataaaaaaaaattattatttattacttttattaaataatttatattcattttttctattatttttttattgtattagaatcaataacaattttaataaaataattagaatttttggtgttttgtaaaatatataaccgtatgataatatttaaaaatattttttataaattatactttttttgtaagggcctaattttaaaaattagaacagggcctctgaagtatttaagatggctctgctgaagagtagttcaaacttagcagtgttcacggattggtttggtctggattttcaattttttcaaatcgaaccactattacggttttttaaaaattcaaaaccaaaccagactaataaaatgatcaaaccaaaccaaaccactcaaaaacagattggtttggttcaaaccgtgtattttgtaattgttctaattttttttttacaataattgttcattttttggcattttttttacttttaataagtttatataatacataagtaaaaataaaaaattattatcataacaatataaactcaatatcaatattacttcaagttattctcaaatatcaacattttatccaaaaataatatataaaatatatataataattatacgaattggtttggtttgaacccgctttcgagatttctaaaactgtgaccgaaccagagactttaaaacggtccggatgattaaatcattcacaccggattcatttggtccaatctcaaagggtttgatccaaattggttgggatttgaaaccacggattgcagattatatgaacaccccttaatattaatgttgggttgcgatcttctgagtgttgtaatatgggtttttgagagattattttgggactttacaggatattgagtagcgtctgcagcgatctcggcggtgggtcttttagctccacctgttgccaaagctattgctatactggttgggtttgcaattgtgctctcgtcttagatattataatatatattgaggtagagacagattattaaattattacaaaactcgtaaataaaagaaaggcttgtctgcggtggtttggttttacaagatataattatttagtttgagataaagcttaatgtttttaaggttttattttgtaatattctgtgaactctatagctcataattttgccaaacctacttttttttatatagatgaagcaagagtttggaggtcggattttttcgacttattattttagcgtttgtctaataataatttttttatattaaaaaaaataactaattatattagatgcctttttgggcccatatatagtgctgtttggtaattagtattgagtagtggttgcgtcccattccaattttactattgtttatatacaattataattacgtgtaactgatttcaatcatatagtgtagttttacttaaaattatttataacgacaattaaatgcaccttatttgtgtgtaaaaaaaatgtgtaatttatgtatttaacatttggtattttcataagccaaatttatatcttgctacgacaaaaataaatgatttaagtgatcatcatataataccccatatagcaatagcaataatactgtatttcatcgtatatatgtatttatatattaattaaccttatttcttggcattcaatatcctcatgaccaggtatggtttgcagttgaactccactttcttggatcagcaaagctaattaaggctcttcacatggcctttggtcagtattttctcagtctttcctagggtataaggaaatacatatctataatttatactaactataattcatattttatcagtaatattttcaagtttagaattatatgaacatttttacttgtaatttataatttatattacatgtgttaatattgtatttttgttttttggctaaccaataattgatagatctagctcattttcttctcatatgtttttggcactgaatttttttttgtgtaacatgtgtttcaataatttatgtatgtgtcaccaatatctagcttgtatcatgtattttactataaattaagttatcaaggggattctcaaacaaacaaacaaataaaaaggttagggctactaattaaatgaacaaccgtaatacaagccaatttttaaggtgtgtatatatgtgtgataattggaatagcccttctaagaagttaaataatgtgcatatatatctataataggttgatgttacgtaccgtgcacgtataattagttttttttaattacgttcaattaagtgatgttaagtgcaatatatgtatgtttaatttttnnttaattaggtaatatattttttttaatttttaaatggggtttgagattttaatctttaagaaaaaaaaaatttatctattgctacattggagtgtcatttgaataggattatatatatacgtatttttcaaatatttttaattaggtaacgtatctaataatgcatatattgtaatttattatattcttaaccaaaagtcacataatcaaatttgagtgagtctatatatagactggattcataaatttgatataaagattttttatttccaaactttacgaaaaatatgaatcagtttactataactaaaatggaaaacagccaatttcttattacatccatttcaacttataaaataaataataataaaattaaaaatatggttaaaaatatttataatattttatatttaaatttttttatataaaatat

SEQ ID NO: 21929 - DNA, 2110 bp, Cannabis sativa
ttttaaaaaaataaaaaaatataagctcattatttttttatttttttttgagataacaaattaagcttatgagaatgagcaaaatttgtgaaaatacatttataaatttttattttaagtgattaaagagaatagacattttttttttctgcccaagtcatcagcttctcgtaacatattatcataatgaaaagaaagaaaaataaatatctttaaggcagatttttaaaagaaaatgtttcatgggagaattcttttgagaaaagagaacattaagaaagtataggaaaatattatttattaatgttatgagttcacattagtttaactctgaaattaaattaaaaatgtgaatcatttaaaaaaaaatgtaaatatttattatctttgtttgatcttggaaaaataaaaaaaataataaaaattatgaaattccaataagagattaagagggtagaaatttattattatgtacggttaaatatacgctccaaataataataccatttatgcattgatttatatatatgggtccaaaaataattatttgatatataaactcataataatttcctctttttgtttttgttttcttttttccttttttagaagaagaatagaaattgtttgaagctccattatcagttcttcacaactgaaaacccaaccatctctcttttcatatatattattcccttttatataattaaaataataattaaagtaagcattattggtgaccacactagctctttaatttttaagccaaaaaaaataggaagaaaaaaaaatattgaccagctcaaatgacaaaattttatcagatatcttttttgaaagggaggcccagtgttaaaaagtaccagtttctacaatacataatggccatttatttatttatttatttttctctttcatgaagggaaatggggtaaatatagatatatattattacaagaaaaacaaaaaattaagctatatatttttatgatgatataattattatttatttagaagtgatcatgagtaacatttaaggtgatttactagcactcttttcttcttttgccttctttttaaataaataacttaattttattttttttaaagaaaaagaaagaaaaaactgaactctaatataattttgataaatataatctcatagtgttctttgagccttgtttaattaaccctttgagttgttcttgaacttctcttttctttgtttaattaatcttattttttctttttcttttatatgttgaattatgttcttatttgtattttattttagtttagttctaaccacaccattcccctttctgagtgtaatatctccaataaagtggtacatagttttaaaaagtgttatatatattttttttttgttttaaaaatggttatatcatttttttgttgagtaagtgttatattatacttattatctcaacaaaataaaataaaaattgaatgtctttatagtagatatttaccccaattatttactttaaaaaaatatacgctccaatgcataacttcttcatgtatatgggtccaaaattaattggggttttagttgtacaaaacaaattgaagaggctctctcaaaaaaaaaaaaaaagaaaaaaaaatactcctatataaagctcttaaaaataaaaagattttttttgttgaagtaaatgtatgttttaaattgttgaaaaataataaaagtgttcattaaactactcttattgtataagccgcactacagtgtataaaaaaaatacaattttaaattttttgtggtgtacttgtgagtcgcatttttatcaaaccatatagtatagtgtggtttacagttttgaattcaataattgcagtttaaacaattcatcacactaatttttgtaattttatatggccaatcacatatttatacattaataattatcatgatgagattttaactttgtacataatttttatgtgttaaaagattgtttgaatatatattagtttaaaactttgttgtatttttattaggtgtatttctcgttagaattttaataagatattgtgtttttaaaattttacatagtgttacatttatttggcgataatttaa

SEQ ID NO: 21930 - DNA, 1579 bp, Cannabis sativa
gatccgaccaggtgctctaagtagatgccacgtgtcaccattcttgcgatgccacgttagagtgccaattttgggataacaatgacatttctagttttaaagagtatgcttccttttgaatactttggcatgaaatttttttcgaaaaagatttccaagggtaattgtgattgtttggaggataaaatgatcaaaagaatttgagtttggagtagtagccaggaatttgtcttatgcgggtagaattgtgttaattaactcaattctactgacgactaattcctgttggtcccaaattataattcatcccaaattgatgattcaaaaaattaaccaagtgtgtcgagtctatctttggaaaggtagtgagatgttaaagggctagggagtgtctcttggatagatgtttgtagacacaaataggaagggggattaggtttaaagatatagctttgtggaaccttggtgccatgggcaagcatgtttgggccatcttaaataagaaagaaaatttggttaaatggattaattcagtgtacattaaacaaggagattggtgtaactagggagtgttcatccaatccaatccatactattttgctcatagtgcatctgatccgtactaagtacgaattttatatttttgattcaattcaatccgcacaagagttcaaatccaattcaatccaatttgcaatagtgcgaacttgatcaattattttagattgttacttttttaatatcaaattacttaatatttattaaaatataaattattttcatataaccaacaacaaaataaaataaattattgttgttttatgtctccaacaacaaattaaaataaataaataataaattccaggaaagatgaaaaaaaaatgtatgagaaattttttttagtttaatttagattatatttttcttatatatatatttattgatatgttaaattttaaaatatctatataccatatgtattatacatttgtaatattttaaatatatatgaataagtgtggattagattagatcgattatttttgcacataaatgttcaacatcctatctgcacaagtgtaaattttaaatttctcaattcgatttgcacaaatgctgatatccatactttgcggattgaattgaattagatagtgcattgaatattgaattggattaggtatttataaacttggtggaacaatgaagttctatcatatgctatagttggtatatgcatatagtgcaaactaaagataaaatcaagacgttgttttcacacagtgagttccaaaaatttataacttctccatctcggctctctgtcttaagttgtagaattttcagattaatagatggaagtctcctatgatttgggacaaatgtagtgtggttaatcatggagtcatcacttggcttactttgcctggcaagcttcccattagggatagactttaaaggtttggaatgactcaaaatacataatgtttattgtgtggaaatgctattgaaaactacaaccacttcttaatttcttgttgatcaagcaggaaaatctcactacaaaaactgctacttt

SEQ ID NO: 21931 - DNA, 1943 bp, Cannabis sativa
aaaaaaaaaaaaaaaaaaggttgtttaaacaaatttttttataatcatgtatattatagttatatatgactatttgtaaattttcaaaaaatttacaataccaaaaataaaatttgtatattttattgcacaattattatttttataaatttagtaagtaactatttagttctaatttttggttctgtaaattattcaaattttttgaaaatttacaaataattaagatataggtgattataaaattaaaccatttttctcttaatgtcgaaagagacagaaatctaccaaaacaatctaaaattaattactttcctaagttatatgatcagataactaacatgagcagtagtgttacttacaaaattaaaggtaagcttcaaaatactcaaagctcaacaaataaatcaagtgaacttagataaaaaataaaaaaaaattatttagtagatcaaatgaaacctccagcaaaaattcaatcttcttcttcgtcttcttcctctgattccttggtcaatgaacgctgttgggcgaagacgtacagccgtgtgacgatcatggctaggccaagacgattgttggcggtttcccaattaattgtgatggaaaattatgccactcttgttctccaaggaaaatgaagagtaaaaatatacaatctgtcaataatgtatttattcacaacggacgatctttgatcctttgttcctatatacatgtgtacgtagaacactattttgctgagatttgttatgatcatttttttcttttttctttttttttataaatttcaatcagattactaatagtattgattcaattacaaaaactctctcatggttatgatcataattgagtagtcatcatgttctactaacatgtatatcatcaattttgatgtttgtatttttttttatttgtcccaaggttcataattattgttataaaatttatgtatttacaccctaaataattataaatacatttaaaaaaattaaatacatttttttcctttcataaaatgacttaaatagacacttctaaaagtaagtttcttatccctttcaaaaaaaaaaaaagtaagtttcttatcaaatttattcttaataaatacaccccaaccttctaaaattaaatgttttttcaactatctaaacaaatcatcaattgaacattacaattacaaagattttatatcatcgatcatatataatataatgatatgtaggaagagttttgatttttggaatggattccatcaatgactctctcttatgttaatggagatttttctctcgctatttgatgtggtttatgatactgtaacatttccttaaaaaaacaattcttctaattttatggtgtagagtctgcaaatatttgatcttctgtaattagtttttttttaagattttttttgttggaaatagttaaagactcgtaagttttatatataaatgataacagtccatataaaaaaaaaactaatactctgcttaatagttaatggtgtttactgtttaatggtaagagagaaagagattaagaagaaaatttaatgatagagaagggggtccttaaagaaaaatctagatgtgggtggggtgtattcttgattcaatgcctataattataaatagatagtgtttttatcaaaaaaataatattttagttaatcaaataggatgaagttaaatattgggtgtaattataattatttgggatggaaatataattgcctaaatttattttgttcttatttttaagcatgttggtttttattttatttttaatgagtatgtgtgcctatgtcaagtctataatttacgcttttaacacttttgaaattcattaatcttattatcttgcctttaggggctagtggcattgacaacatctgcttctatatgggcccggtctgctgctaaccaaacaagatctac

SEQ ID NO: 21932 - DNA, 910 bp, Cannabis sativa
ttcaaattttaaattaaatatgtgataccacacatgttattgcaatatatttttgagttttttaatgttgacctagctaagtattattttatttgctaagatatacaaatttctatattttcttagtgtaacagcttgtatattttacaatattaaaacattttataagaaaacctctaatacagttacaatgggaagtaattttagttttatcatatgttcggtttatgtcatcttatgttggagagttttagttaaaatagaagatataacactaaatttttgttaaagttttgtaacttgtgatttccagaacaagagaggagagggcattgtcccaaaatacccttattttttttttttaactcttatctctaattttgaatttgtttgattgttatataattttgttgcaagtgtaactcaaaaagacaaaaaaaataattgaatttgaaattcagtgggtctttcctgaattggtcaaccatatgatagttagcaaattgggtggaagttgaaaaaagacctgcttatggagaactgcaagaattgcagttctatgggctgtttggttagagagaaatgacagaatttttcaaggtgcggagagctcaccaaatgtcttatgggataagatttgattttggacagctactggggtatataagaatttttagagcagttctcatttctagacttaagtagagaatggagagtcttgtggtaatttattatgattatgggttatagtttttccgtttactggttttgtttttcggctcaagtatagttttgatgtttttgtattttgttgttttgagttatagtgtttgtatccaaggctttcaggaaaatatcgggggaaggatcagtctaagacaagtgatctctttctcttttttcaaaaaaa

SEQ ID NO: 21933 - DNA, 2688 bp, Cannabis sativa
taaaggagattgaacctataattaaagggaaagatcctatgaagtggttttaactaaaaatttagttacatttgatgcttactcgacaagtgatgattttgatttggtgactgaagcagcacccatcctcaatgaagaagttatggaagatcaaatcacagacagtcaaggttgtagatggtcatgagcaaagtgggaaagcatgttattggagggtgaaacacttgtagttattgatttgagttagtcaacgctattatattatgagctaccaatggatccttattttccattaataccacctgtaccatattacatcctctacgagctactgaatgttttttcacaaacatatcatacaaagtctagtgtacgtaattggtgctacttttggaacaaactcatgtcattccaagcttgagggcatttacgatgacaacttttaagttgtcttgtaagacacttattatgtgtgttaaccgattggtgatgtggcatggacctaagataagttttcttctctttaaattttttgtatcacattgggtacattgtgtcaaataagttttggggaggggatttatgtttatttagataattttagtgtttcttttagtattgtgtatgtgtatcgtaagtaagccttaaaaaaaactatctatcgttgcttttttaatatagactattaataaccgtgtgcttggtctaattgctcttttactaaattttcaatgcttgttaggaaattaagtatgatttataaatatgaataattgaattttttttatacatgcttgactagggttagaggtttgatgggttaaattagatagaacttgcattgtttgacctttgaggcaaaatccttgatgatacgtgctttcagaaataatttaggcaatttttagaacatttgtgtctttcaagccacccttgtatgatttttccctggtttaccctcattgtgccttggcttgttattcttgtttcgacacatattatgagctagaaatgacttcattattatctttccttgtccctatctatgccataagcttaacacaagtttgggggaggaatgtaatttggaatacttggggtatgatatgtgaggaataaaaaatatttatgacaaaattttaagaaataaagttagttgtaactactaaaaaaaagagtaaaagaaaaaaaaatagatacatatacattttgcaattttagtgttgcattaaaaaatagaagagaaaaaaagtgttgttgcaaggttaatgaagaaaggttctcttatgtgctttaaaagaaagggggtttgggggtaataattgaatgtaatggggtgagttgattgaaatgtaaaacattatggtataggtgagtctaaatgatattttccatctacatttacctaaacttaaatgttaaaacccactaatatccttttgatttcaaagaatatgttgttgatattagtggagaaggttaagtgatgcaagcttattgataattagtttttggaattgtatggattgagtcaagcatgtatagtgatttctaattttttattttcaattatgagtcatagtccttttttccaatttgagtgttaaggttaggtgttggagtaattggactaaaaatctagttttgaaacagttgagtcttgcaagtgatggcagtgtggtatgaataaaagttaaggcttaatttgtttgtctttgttcatttatttttagtttagtgtcgatctttactcgagggcaagtaaaggttaagtttggaggagtttgatgagctagttttaggttcattatatgaagtgttttagatgtgtgtttcgattgattgtattctttttatgcagaattatacttgtttatttacttgtttcaagtttaaatggtgaaactcataatatgagttgaaaatgaaaagaaacatcttaaatgagataaatatgatgaatttatcatagaattaggagttctaagatataatggtgtgaaaaattttaagttttggatgctcaacacgctctgtttgagatcaaaaatcaagtatgaagcttcaagctaattttttactttgatgcgttcaactttcagaaaaaatgttgtcaataaaagttctagatctttttttttttatttttttcaaaacatcttgagtcgtctaattccgaacaccattgaaagagttatggccaaaacattatcagtcgtcgcaccaagaagtttgctgcccaaaaaatgggtacttggccgcgacactgaaattcaatgttgcagctcctggagcaaaagcagcgtatgtttatgcaaatgtgaagacatgggtcgcgacattcaaaacccaatgtcgcggctcgctaaggcgattgggcagtaaaaggtgtttttaaaccctaatttcgtgtggaatgggagacttttgaatctagagacttttggagggcaaaaatagagagaggaaataagcttggaggctacaactattgatcttcaaagagtttttttcttctatctttaattttatgtttctaattagtttttatcaattgttcacaatgacaatgagtagttaaacttttaattagggtgttaatgaatattgtttgagatttatttatgattttaatgaaattttagttctttcccaattttttatatgcatctatttcatttatgttta

SEQ ID NO: 21934 - DNA, 2315 bp, Cannabis sativa
  modified_base (788)..(788): a, c, t, g, unknown or other
ttactatttgttttgcttttgaactaaagcaaaaatcatttttttataaaaaattaattagcatcggttcataaccgaagcaaaaaatatcactatttgtgtctacgactatagcgtcagttgcaccaaccaaagtaaattttttatataccacttaaaaactaatgtgaaaaatcctttttacagtagtgagaggaccaaattttgaaaaacacatcccacaaatgtagtgcatgttaccaaccgtgtaggagtgaatcatgaggcagaaatctgttggtaaaaaagtagaaatcattcccctttgattgtataacatttttcaacgtttatctcaaaagtgctctaggcaatatgtcacctgtagtgaaactctgagcccctcgagatatgatgtttaacatcaaaaaccatgcgaaacttcatctaggcaacatgtcgcccggtacgaggtgacatgttgcctgaaactgttttaaaaaaattcttttgagttttcaaaactcttttccaaaccaattccaaatgtgttaaaagtcatttatgtgataaacaagttttgtaatagtttctaactctgagaaacttccccacatcaattcttaacttccatgtgtattctctagttgcacattatcgagcaagattcataggttacaaattttatttttaaattcgtctctccatgttacaactttatgtgattattataagtaaataggggcataagtacccaaagttctatgtttgtcagcggcataaatccaatatttatttttagcggcatnagtacccaatgtttgtaaaattagcatttttctctaattttgtgagtgtagactctgatattgtcttaaacagggcacatagaaagcctaaatttttcatcatcgagtctagatagaaatatatagtatcagttacttcaaaatgttcttttaataaattcaaaacaaagtatgtactgacgaaattagaagaaaattacagttttataaacattaggtacgtatgccgctaaaaataaatattgggtttatgccgcttacaaacataagactttagtatttatgtcgctatttaccctaagtaaatattataagtatattatatattatatttataataatatataatatattataattttaaatatcatattatttaataagtaatataacaccaacatgctaattaataagattaggtcgaattaacctaaaaaatataagtatgattgtcatatataatgtgagagtattgatattggacatcattaattggtgtctagtaccttctagatgtgttatcttatagttggttagctatactccctaaaaattattacattaaatttaatgagatttcatacttaattacactaataacaatattaatacataaaaaaaatactaaacactgctagtcttgacttacgttaattaaattgatcaaaacccaacatcctactttttttgtattatacattagcaacccttatttattgtttgtgcgtttgatatcttcctaaaataagttttagacattttccaaatattgatggtaataataatgaatcaaaacatctttttttaaaaaaaaacacatctatataataaatatatagagaatcacaaggaggtcacgtggtattttctcttttttttaattttttcattttattttctctttttcaacaatctctatacttttaataatagttgagtccttttgaaaaaatctcaaataaaaacagtcaaatttcgtctctcacgccgttcatagtttttgacagttactggcttaggttcttcttcttttatatctttagtattgtgaatacgtataaaattaagtaataggaatcattcttcaagacactgctttctccaattctatattaggtttaggtgtgttcattctattttctctagacaaaaagaaaaagaaaaatcatatttggcagcttcttaaaataataaaagaataataacaaatttatcaaaataaagaataatataataatcattttttgtgtgatgataatactatttgatttttggtcaaactacgccacctctctctctctctcgataagaatttttgcttacgttttttcaatattttgctacaataaaaaaatcttcattgtaggcacgtgctttattccgccaaagccaggcgcgtaaatgggggattttatgtcacacgtgcaaagtgcattgttttttgttttgtatttttggaaaataacatgttttgcttgtgttcctctacattccgctctgtttaaatttataattggcgttatattt

SEQ ID NO: 21935 - DNA, 8901 bp, Cannabis sativa
attacttttcatctgttttttctcttaaatcaattgagctagtgaggaggagaatcatccatggctgtagaattggtggttggacctgttatctctgcttcagttgagtttctcctgaagaagatcacttcttctgaagtgacaagcttcttaaggggaaagaaagattctggttttgatagtcttcttgagaagctcaagacaatgtttctctctcttgctgaggtacttggtgatgcagatcagaaacagatgagaaaccctagagtggaggagtggctggaaaagcttcaagatgctgtggaagatgctgaggatctctttgatgaaattgaatatgatgctctcaaactcaaggtggatgaacagtataaaaccaaagtaagaaagttcttatctaatttcaacttaattgatagagataggaagattggtatggagaagattcttgagaggttggagaattttgagaaacaaaagtacatccttaatttgcaaaagagtgttgagaaaatccaatcaaagagaccaccttcagtatcatccatagatgattatgaattttatggtagagatgatgaaaagaaaaatttgaaagaaattttgatgtttgatgaggtgggtagtgaaaagatttgtgtgattccaatagtgggtttaggtgggattggtaaaactgctcttgctcaagctgtttataatgatgatgaagttaagaaacattttgaactcaaggcatgggtttgtgtttcggatgagtttgatgtttgtaaagtaacgaaaactgttcttgaagcagtgactagagatgcttgtactgttgagaatttgaatgtgatgcaagagaggatacaagaaaggttgaaggaaaagaagttcttggtaattttggatgatgtttggtgtgaacaatatgatttttgggatacaatgaggatgattttcaaagttggagctcaaggtagcaaaataatcgtcacaacaagaagtcgtaaagttgcatctgtgattggaacaactgaagttcgtcatcttaatgagttgaatgaagtagcatgcttgaagttgtttgtaaaagttgtatcgcgcaatgaagaatttagtatggattcagagttggaaaaaattggcaaagaaattgttaagaaatgcaaaggcttaccgttagctgtgaaagcgcttgcgagtctgttgtgttttacggatgttaagcaatgggagagaattgctaagagtgatatattggatttgccaattggaggagaaaatattcttccagctttgaggttaagttattattatcttcctttatacttaaagcgttgctttgtttattgttctatgtttcccaaaggttatgcatttacaaaggatgagttagtctcgttgtggatggtagataatttattggagtactcgagtacaagagaagaggtaggatgtgagtattttaatgatttagtgtcaagatcattttttcaacctttggatcataaaaaagatcattttgtgatgcatgatcttatggttgatttagctaatgttgtctctagaaaaaagtttattcacttagagataaacaagtcgtatgaaattgaattgataaagcgatcacgacacattgccatagatgggcataaagatttccatgagatattcaagtcagtttctaaaccaattcctttgcgtacatttctgcctattgtctcattgttatacgaagcgagcaaattgcagcaatttgtgttggaagatttgttgaagttgaagcgtttgagatttttatctctaaagggatatatacatgtcagtgaattgcctaagtcagtaggtgaattaaagcaccttcgctacgtggatgtctcgtacacttcaatcaaagagttgcccaaatctttttccaagctgttcaatttacagacattaaagttacttggctgcaaggatctcaccaagctccccaaaaatttccatcatctcattagtttgagatatcttgacatcaattgtcctagactttgtagtttgccaccacttgggcagttacctgctcttgaaactctttggattgaacactgtgatgcaatggggactgtaggtcttgagttttatgggacaacttctacaccatttccatcattggaaatcttggaattgagaggaatgtcaaagtggaaggaatggtcaatgccaaaagaaaatgttcaagctttcccaaagctaaaatcacttgtaataagcatgtgtcaaagcctcacaggagatttgccttacctcttaccgtctttaatagaacttgatatttttaaatgcccagagcttggttcttcgcttccaatgatgccgaatgtaagtacagtgaaaatcgacatgtgtgagaagcttgcaggattcaaatcatgctatggtcttcaaaattttgataaaaggtgtgttcctaccaacttgagaagcctatttatcagagattgtgacaatatagaatttttaccaccctacaaatatgaatccctccaacaactttcaattgaaaatttttccagctccttcgaattgcttcatatagattcctttcccaacatcaagaaggttgaaattgagaactgtgaaaatgtggagtctttctcacaatttcatagccctgtaacttctctatcaactctctctatctatggctgccccaacttcacattattacctgatagcaacctccattgtccaattctgactcaattggagctctcagattgcagcaaactaaggtttctccctgagaaactgtccactctcctcccttctctacaagaactagttatctatgattgtccagagttggagtctcttccgaggtttgggctgcctcttagtttgcgtgagctcaccgttaaacactgtgacaaggtgattgcatctcgaaagaattggaatttgcaagcacttcccaatctgataagctttgattttggatggtataaaggtgaagatatggtgtcctttctagagcaaggattgctgcccacaagtcttaacttccttaaaattgacggtgttgcttgtcttgaaaccttagacgacaaagggtttcaagagctcacatccttgaaagaactgcacatctatggctcccccaacttgcaggaacttccagtaaaagggctgccgccctcttttgaaagttcattgccaccttcttttgaaagttttatcatatgtggttgctctttgttggaagcaaactatgaatggaaggaagaagagtactacaagaagatttgttgcatccctcagcagtcagcctcaagttcatattagatggaatggactctagcggtacgtctttgcacttttattgctttgaaatctgcattttttatttccattcgtatgttctttgattgatatttataatggtgacagaaatgcattagtaaatgataatatcaatgtcatggtcctttaaaattttttatgcaagttaatgtgcttcaattccaagatggatcttctcatgactttttgttggttattggatctttgacagtaattgcacaattgagatttgagcaataggttgatctgaacttgcttaatcttataatcatttgaagccatagttatatgttttagaatctagagttatattatagttcaaaacctgtttccttcatactgattttgtgaagtttggtttgactcttgctgaactatatcttgtttggtagtctaaggacaatgagaagattgggaaatgttggaaaaagctgaaacattttgaattctgattctttaactgaaatttgataccctgagcattatcttgtattaggcatattaataaacacaatattattatttatgagcatcataatatatatacagacattagtgagatgaaaatacttgtttcttttgtgattttttttcctttctaaaagggaagcaatctgttatttgggactcattatatgatatggtattgcttgcagagatgtacaagaacacaagttcaatttaaaagttgagcaatgaaacgacatgtcgtctacaatatcttctgcttggcaaattgcatcttgtccagtacttaagttgggcaagtttatacagaaactcataatcgtccgaacccaacattagcctaatgtgaaacgcctctagacgcaaacaggccatatcttaaggctcctcaaactttgtttctgtgatttttgttggagaacagaattaatagctaaagatgaagagtttgatatacactctgtattggtttttgagtaagtattgctttactctttggaccaagcagtacaagtttttgcttggcattgatttttagtatattactagtggctgttgcagtgttgcttgctttaattaagtcaagttttgttttttcttttttttttttttctttttaagaatgggaacatttttttggaatgtgcttttcttattctaaaaacatcttttttaaaagataattatgttaattaagttgtcaaaatgaacatttaattcatatgatgagaaatatctacattatagaataaaataaaataaaatagagcatgcatatgatgaaaagaaatattactatacttgtgataaatgtgagtgtacccattatacacgccattttactaatgcattactaaacaacacgtaattaattatctctaatgcatggtgcattatgcatgctaccctttactcataataataataataatgataataaagaaatacaaatacaaccaaataaaatgtcacattcatgcatgatgcatgtcatgtctccatatgtaaaattgctcataaagtgttatcatttggtatgtgtttgcatagaattagatgataatgatgagtggaatagagaaggtggtgtgtgtgagtggtggttcaggctacatagcttcatggcttgtcaacctcttactccaacatggttacactgtcaaagccactgttagagatctcagtttgtattctatttttcaattcaaaacatgatattgcttcattttgggttgtgtttatgaatattaattaatttcaatacagatgattcaaagaaaatacaacacttgctttcgtttgatggagctaaggagagacttcacttgttcaaagcaaatttgttagaagaagggtcctttgattatgttgttgatggatgtgaaggtgttttccacactgcttcccctgttcttgtttcagtgaataatccacaggttcatctattgctttagtattgaaaatttgggtaaaattagtttcataatttgcttatttaaaagttataataaactaaagtatcaaaatttagccatgacaagactcacataaaaacgaggtgagaaagtcgctttccttaaaaaaaaaaaaaattagaaaaaaatatatatgcatttcagttagttacgacatatatttttaataaaagataatatttataaacataatattaattttagtgtaatagttaagttagattatatataagatagaggtgaatgttcaaatcccactaaaagtatttttgtttaattttgcccttgccttgaaaaataaaaaaattacgcccccttactttaaatcttgggtccgtcacttgacaggttgtatatttttgttttgaatattaacagaggttctatttcaggccgaattgatcgatcctgcggtgaagggaacgcttaatgtgctgaaatcatgtgcaaaagctggttgtgtaaagagagtagtttttacatcttcaagcagagcagtttttgccaatgggagacttgtcacaccagatgttgtagctgatgaaacttggttttcggatactaatttctgcgaaaaatcgaaggtgagatttaccacaatgaagaaatgacattattatcttctagtataataatataattaagtcatttttgttgtttaaggattggtatgcacttgcaaaaactttagctgaagagggtgcttggaagtttgcaaaagagaatgggattgatttggtgactataaatccaggagttgtgattggtcctgccttacaatcaactcttaacattactgtgaaaaatattcttaatcaagtaaatggtatactttttagaatctaattcttctttactaagttattacatattaaaggaaaatctataagtttttgttcatttggatgtaggagttgatcaaacttttcccaacagaatctatagatttgttgatgttagagatgttgcattggcacatattcaagcatttgaagttgtttcggctagtggaagatattgtctaattggacatgttgtgcatagctctgagcttattaatattttacaacagctttatccaactttgaccattcctaaaatgtaagttacattacactacaacacgtaaaaaatatacttactttattaatgaaaagtaattacattaagactttaatattttttgttagaccacaatatcctaattactgttgtggacattgtcccacatagaataaatgttagaaaattattgagccatatataagaacatggactactccattcattgccaattgattttgagatggaaccccatgattctcaacatagtatcagaacgatatctcttgcgggtaagtgattctatccgatccgcactagatagtgaccatgtccactctgatacggttcaagattgataagcaaaaaatagtcatcatcttgaaagagaatgttgtggaaattgttccacatagaataaatggtagagaattattgagccatatagaagagcatgagctactccactcattgtcaattggttttgagatggaaccccatgattctcaacgataactcacacttttactttactacaaaaaatatttacaacacacttttggacactttgcaacacacttgagaactgttactcaattccacaaactttatactcctcaaggatgtggtggattattgtgctagaatgttgtatcgaattttactttattatagacaaactttcttgaaacttctatatgattctaaatagttttatagtattaccaaaatgattagaaagttctaaatacttataaaggatgcgttaattttttaacatcatcttgttatacatacaatagcattttaaggctgggttttcatgttgttggttagttttatttcaaattcatgatattctgtgcagatgtgccgatgagaaaccgcaggtaccaactcaccaagtatcaaaggacaaagccaaaagtttgggggttaaattcactcctttagaagtgagtctaagggacactgttgaattcttcaaggagaagggttttgtgaattattaagtattgtacttttacatgttttttttattattactactaaataaaataaaaagaatcaattttttctgtaaccatttgaattcttaggacatggtgttatgcctttgtcaaggttgtaggcctcaattaaaatgactactttgttctactcctcttacggttcaagattatatcaatatgtaatgaaaagatggctcaaatttactatgataataggctgttggcatcatcatatatcaacattggaacaactaatatttgtactgcagtgaagaaaaaagggtacaaatgttatcatattagtttgttgaggctgtatctaccacatatgatgtaaccatgtcaagctagcatgatctaaaattaaataaataattaactctaataatttaatattagctataacacagaattgagaatatcacagctactattagttgagtgtgttactaaaaaagagtagtttcttatcagttaagaaatagagagataatttacactaccaaaaaaaacatattaatagaattattgaaaaccaatagagattgattggcaaatcattagattatggtattgtgagaagccgcataagctaaagtctaagatgacatataagtctaagacatgattatgtaagagaattgattatcaaaattcatgttcattacatgaatgtgattcttaatcatcatcttggttattgacaggggagctagcaatagttaaggcattaaagatggactgaaccttatcgacatagtcagaaatggtaagattatctttctgaatttgagaagttgacctttttcagctaaagtcgattagccttggtttgactcgagaatttaagttcaagacaacaccaaacaatgtaggaggtgtggtaatttgccacaaattccaaaataccctcgatcatggaagaacaaattcgagagagtataagttgataattttcatttcctttgagaataagagggattgattgcgcttgtgacatgggtttaaggaggaggaacacctgtgaatagaatgtcatcaagatcgtggcctatgacccttggtgccacttgcaatgtggatatcaaaagtttagttaatggacgctactcaaaagtgattgatacaaaaatagcagagccaagaacaaaaaatttgcatagagacaatcttggtgtgggctaaacttaaagcttagccataaacaatagagctgaactttatttatatgaagaaattttttacaagagtaagcaagaaaacaagaaaatcaacaactcataatagctaactaattaacaaaaaataaataactaatgcttacaatactttatattgcattacaacccaacacaatatggtgtactaaaggagcacgtaataaattaggtgaatctagtacctacaaaatcactcactaggatatattgaaaatatgccatattttttttatttaaatttaaatttgtgtgtcaaatctcaatattttttttttatcatttaaatctgaaaattaaaaaaaaaaagtagaatcttttatcttctaattttaa

SEQ ID NO: 21936 - DNA, 5685 bp, Cannabis sativa
taaatgtctatgcagaggcagagttttgcctttccccttccctttggatttcacgactatcccgtatggagtagcctctaggataggcccaagggcagtgccctattgaagtcgtccaggaggaacttctgcccgagcttcctcaatgaccatttcatccataggagcgactatagggttttcttcaatttccacaacttagagatggaattctttgttcaaatccatcactagaaaatttgagaggaaagataaagtgaagcaattaaacacccaatatctaaatgacaaaataggtatcccgaaaggcctatcctaaaatttcttagagaggtccccaccggacccatcactcctagaagcgtatctttgcaggaaactcaaagtgatagatctagaacccatggaaaatttatgtgaacaaaatttaaagaaaattctagaaatttagtccattcgaagtcctagcaactccaaatcgatgcacagaagatggatgaacctaatattcacttaaaagtgcatcgcacatggttccaaccctaaagcatgaatcataaatacatgcaactgtctagggagttcagacgaccataccctatctatgcacacagtatcaacactcccatggtgcaataaacttctcattatcctttcctagaaatatatttatatgggcgacgtttcaccattcaaacatactagatatcctagacttatctcgaactaagaaactctatcctagatacaaaatggaaaattttcaataaagtattgggatacttacttcgtatatgagtggagaatgaaagattctcgtggaaatctacaaaagtgtgttgaccctagtcgatcaagtgattgtagctgacctgagcgttgaagttctcatctacctgaggttcgatcagctcaaggtctaatggctgtacatttggaaagtaggttgaatgaaggtttaggaagtactaaatcaagaagtcgaaagcctcttgcattcaccaatggaaacaagtgcgatatgggagttgtttggaaaatgaaaagctttggtttgaaattcgaaaaattgtgtttttgaagatcttatgtagtgaaaaaaagaaaaatgggcttgatgaacctatttatactttgaacatgtccatgcaatttgaaatgaatggtctagattttctctccaaatagaacaatttgaaccgatggatgggaagttgaaaagatgacatttaaaacttgctcatggtgtttctttttcatcatttcccaccttgattattgtatgcactaaagagaggtcattttaattgacctgccatcaatgttattttttataagaaatgcgccccctgcatgcgcgtgttatcaatagatgcattgaaggttcaacatgcatgccatgcctatggttccttgagttttgggtcctttaattgatgatagctcacaggatacatctatgatcccaacaatgaccacgtgttaaagatttttctctaagaaacgaatgatgattgaaagctcccaaaactagaagagtctcaaaagcttagggggtaaatggtatctgtgtttctaagcaattgacaagtggcataaaagtgaagagataatcccataatctcactaattaaaatcccccattacaatcctatcatagagaagcctcatagaatcgggaacaagtcaaggctaagagataattagaggtctacctcaccttatcctagctacctgaacacaaaagagatattgtctctgcaggagcgaaagaggtcttaactcagaatctgcttagctgatacccagtttggtaatcaatgggcctatcgtggatactcattctaagattgtcgtggacatcttcctttaatgcaatccagatcacccagtgagttttatgcattttcttacacaaaaatagatattctcccctatgtccagacatggtagtgcatgcacctcatttaccttttcaccgaaaggttattctaggcctttacttttaaaggttcaaccttttgatacacgtgtccactatgtacaatggtccccaaatgtccagctgctacacacacaagcagaattgtttcaagggccccaatagtcagctcctttttagaagtaattagcccattagtgggcttttggcagaaaccctaggcatgtcatgggcatatccattcccgccctaagcatataaatacccttatgtttctatacgaagggggaattttaaccttaatagccaaatctctgccaatattattctaagtcttcttcttcttcaagaaaaattaagaacacagagttagagtttcctacaaaaaattgtaaacacattaaagacttccttagaggctaatagactgagtcatgcactaagtttaattaacacgtgaaccacgtaaaaatctccatctcatttattttggcattttattatttgtttagttctcaaattttttagtttttgagaacctcgataaacactttgggaccaatacttgattgaccagtcaaactagaagaagagaaaagagttagggtttctcattgaaacaccaacgtaatacattatacaagccttctaaggccaatatactgactcgtggactagggatcattaacgtccaaaccatgtgaaaaaaatcattgtgaattttatttgatgcttctttcatttctgaagctcttatttaaaatctcagtaaacattttagtgcattcattaagagctgatgaaagacccaagctattagtttgcttaaaccatggtagctacacaaaaaataataacaaagaagactcctcaggtagacgttgaggtcatcatggatgatgtagaccctctttcttcaaaggatgcccaataagaaatgcgagaggatgggattcatctgaagctaatgctagaagggatgacctagattgatgtagtaaacaagttgaagcagaagaccttgatgacgaaaaagacgacgacgatgatgatggatatgtcaatgacgagtattataaagatgggtatttctatgaacaatatccaaatttggcttggcgatccaatgagttatataagaccaagcaaaacttggatcgtcaagagatgttttctcaaaagatggtgaggacaatgacaccgcctccaacaaagttcagagacttggaatttgtcaacagattgaatagagaaaaccctactaacgcagaaacctcagctcctgcaaaggataggggaaggaaaatgtaggtgatcctcgaaacccgacaactcctttacctctaagacaaaacgtgaatccagacaaccagcccttccagacgcagaaggccattgacgattgtgggctcaaatgcccttctaatccaataattcaaacttacgcaaaaagggcctgaatggaagtgccatgccaaggcaaggataaattgcccctctgattttgttaaccaggatgttaggataggaggacagtactctgatgatatttggaccactgtggacaaccaaaggtgtcatgatgcgaagtacaaaaaagctaaagaggaaaaggcgaggccacgtggcaatgatctttggaaccatttgaatcataaaacttgcagaaaggaccttccagaaagtgaaacaaaaagggtagagaagaaaatttcttcaccaaccaagcatatcttaaagtagggtggggccctcccaaacacaaaagatgagaacctaaaaccttgtgtcacagagatcgtagaaccccagtcatggagaacttaaagataccacaaattgagttgtatgatcgttgtgcagacataagaaccacctgtccaagtaaaaaaaaatgatggaggtggcaagagtgagtgatgatgccaagttcttgtgtttttcattagcacttaccatgtttgcagaggattggtggaaaaggctagcttttagattaattaatagtttgaaagaattatgttgatgtgagatttggccaaccaatataagagttgtattaatacttatgcttaccacatgttacacaataagaataagaaaataaaagaagagaagattttttagaggttcaactccattagttagcggggaacgacctactccctttttcgttgtattaatattgatagataatactattaagatcactataggtgggtctgagatagctatcttaaggttacaatgtaggaataaaagatggtaaatcttaagttaagaaataagcaatgggggtatgtgagagaaagagagtttagacttagagcttagggtttagctagagcgcagggttttagggtttagttaaggtaattcatacagggcagtttaaaacctttaattaggtaaaataagcaagcttttaaggactaactcgcagtgtagcttgcaaaccacgcatgatgctgtacaccaaagtcttgccatgccaatgtctagctggccatgcatctgcaggatgtagggtggccaaactttttctgtctagaagctagctgacctgtgctggccatcaggccggccaggggttgttggccatccatcttgaggtggctggtccttcattcgtcatcccatttgagagcttggactcttcactcatttaagtgctgagtagatgacttgcccttttacttaaacatggcgctgatattggccatgtagacatgccatgtcacgtggaaaaacatcacgataacatttccacccaagttcctgtgtagaagtttatgcagatagggacttttcaacttagctgggactgaagtcgccttcactgaataaatatggatgcatttttagtctttgaaataacttttcttgactatttgatctcatttgttgtagtaagttaacgacattgcttctacatgttttttagttaaacactacgtggcatgtgaagaagtggttccatagatgtatataagccttaaggagggaaactcatcttcatttttcatttttcactctctcactagaaaatgtaactttgaaaacctcctccttctctctagaggctgaaacccacatcgctccatctcttgagatttcacgctatttcgatgatccaagcttcccattcccttcgtgaaaggtttctcttagtgggtaagctttctattccttctatttacttgatttatttgattttgccatgattgcattaaccttttctttgctttgaaatttttttgattcccacataagattgtagtcatttcaatatttttatccgcatgatagtcttaagatgtattatgtgtgatttcttgataaaaaagatctacttctgactttcattgtgattattggctctttgacgaggaacatgaagaacatgtttaagttcttgaaaaacacatgtttagatccttcgtatttcgtggtcagccatggaggtcttgtttaagatctggccaaccatggggtctagcaggccatagggggtaccctatgagctggttgacctatgcttcgaaatacaactcctggttggccctaggcgttgtcatgggacctacccaaccctctaaggcttgggaagcctggctagccaaggctagggttccaagcaggcgaccagtcttttgtcctcttcagacatcagctagggtctcgtagcaaccttggtatgcatatacaaccataaacttatgtgtggttcccttgaaaactct

SEQ ID NO: 21937 - DNA, 4615 bp, Cannabis sativa
agaagctaatggaagtggatcaagaacaaacaggctactagatggtgatcaattagctaaagtaatagtagaagtgggactatgagattgaaaagtaaaaaagagactggaattacctgtcatatgatatgtagtactagaatcaatgacccactttgaggatgtggaaagaaggcatgtattagggttacctgaattagctatcgtagtgacagaaggagatgaacaattaaatcactcctaatacctcgagaacttggcaaattcatcaggagaaataaggactcatttgttagatgcatcactagtgcttgcaatattagcagaatgtttttgttgatttgttagatgcggcttggtttcttacaatagttgcacattctcaaaatttggtattcaagaggtccttgtgaattacttcttttgtatccacttggggtagagttttttcctagtgcagaattgttacgacacaccaaggcgctattaaaaggaactgaagaggtagtttttgtacgaagaacacgagtaaacacatcttgtaaagaggagacatcaacaccagagaaaactcttgactttgtagagtcaaattcaaatgaaagtcctgcaagaaaacttataatagtcatctgctctcattggcgctattaagagactaatcttgtttctccgcataataaaaggcttcgccaaaatacaaaaactcctactaatccattaattctttaaccaattcacaatgattaataaaactaattacctcattatctatagaattttgaattagaaagaacaagcgagcatcctcacaaagccatattttccatgaatcgactttctctttgggagaattgtcagtcaagtgatcatctttgtcaataccctccaaatacagtcgaatcgtcttactccattccaaataattcgaaccaatcaatttatggtccgtaattttagacatcacgagaaccacatcagaaacaaccactgatttcaaatctgattttatccctaccataatcttgaaagcaaaaacaattgaaagagaaaaggaaaaaagcaaacaccaaagaatgaacacccaaacacgaaggtaaaaatatcaaaccacaaaatgagaagaaccgtcgaaaaccgatgcaaggaggatgggaaagggctgggaacatgacgaatgttgacaatctccaaaaagcagcccgaacgcgcccgaacgcatcggcacgtgggagtcatttattcttctgtttcactcattgatcctcattcttcttcttctgacaacatcattacttcaaaaactcctcatccgtctgttactcatactccaaaccattcaatctaatcacataagccaagaaacccttatcaaaatccttaagtcttgtccccatcaacgaggaccaacccaaccattcagccaattcacatgagccaaaaactcctcagccaatcttttcaaatcttgtcgacatcccaaacacaaaaatccgggttgactcaaggaaaaataagaatctagcaaacactgaacaagcttccactcgaactcaacaaagtcaagaatataatccgattccattcattcttgaacaaacacaggaagatgctcaagctgaacctattgtggaagaaaatatgtttgacgatctaagcattcccattgctcttaggaaagggtttgctcttgcactcaacatcccattcccagctatttgagttactcaagcaaagtcaagaatataatctgattcccttcattcttgaactaacataagaagatgctcaagttgaacctattgtagaagaagatgtgtctgacgatctaagcattcccattactctcaggaaagggttcgctcttgcactcaacatcccattcccagctatttgagttactcaagcaaagtcaagaatataatctgattccattcattcttgaacaaacataagaagatgctcaagttgaacctattgtagaagaagatgtgtctgacgatttaagcattcacatcgctctcaggaaaggggttcccctgcactcaacatcccattcacaactatttgagttactcaagcttatctcctacctatagagcttttatcactgctctggaccaagttcaaatttccaattcagttcaagaagctctacaggataccaattggaatgctgccacaatggaggaaccaggagcactcgaaaaagaataaaacatggattatcacagatctacctaatggcaagcgcatagttggttgtaaatggatcttcttggtcaaatataaggttgatgggagcattgaaagatttaaagctcgattagtggctaaaggattcacccaatcatatggcattagtcaccaagagacatttgctccttttgctaagttgaacaacatccgaatactcttatctattgcggtaaacaatgaatggtcgttattcaagcttgacgtgaagaatgtttttcttaacgacgaccttgtggaagacgtatacatagacattcctccaaaatttgaggaaccattattaaaggaaaaagtgtgcaaactaaaaaaatctctctacctcctcaagcaatcccctcgagcctgatttaataggtttacaaaaagtgtagaaaggagatggttacactcaatgtttaaaattgcgttttcgaggagcgcctcattgcgcgcagtagattgaggcgaaagaaaaacgctttattgtgtgcaccttagctgggagaagagacgcgtacgcctcaactatgtgagacagttagatatgatctgaggcggtacaaacagtgaggcacacgcctcaattaaaaaacctgaattttagggctttgtctaacccaaattcattcataaactaaaaaatagcccattaacatttaatttttaaaaagacccaataaaacacaataagcacaagaaaactcaaatcacttaaataaagcccaataaaacactataagaagcacgagcaaggccttcttgggacttagctcgagatggtgccgactcttcttctagaagttctattgatgttgtttgcaactaaatgtactccatattataagaaaatgataggtatttctattaaattatttcatatataatgtttaaattcaattagcctaagaaaaaattacttttcctaaaaacatgggaaaaatgttgttcgtcattattacaaatagggctgtcaatatgattaaaacacatatgttttcacatacacaaactttaaagaaattatattagaactcacaatgaatagcttctataaaacccgtggactagactttgttaatagattaaccatgttataaatatcttatgttcacattttttcttaattgcttaacaattcactaaattttcgttgatgaaacactgagtaaatacacataataatagccaacaaagttaaataaggacaagagatgatacctgaagatgatactgagctagaaatgtcatgaacgtcttacattcataaagcacttttatagtatatggcttcaaggtaatgaacgttttgcttaaaagagattttgctaccatggcagcatgatacaagtaagactctataagattctttacttcctagaacaatcaaaagcaatgacacatgagaaaaagtaccaatcagctaatactaggtttaaataagtgaatcagcttacccaagtgtgaaaataaagatcttttagagccttgatggcacatggtgcaatataattctttgctacatggtacacatccacaaatttttccatcagtagttgaacacgtggcatgacaaaggttacaaatgccaaccattgttccttcagaattggcgcccaatcctgcaaagtaatttcaattacaaaagtacgaattagtcataatttaaaaagcgagggaaagatagaatatacaaacaaaagatcctataaatataaaaatgagagatttttttaattagacaaaaaaataaggataaaaactcaaaattttctaattttacccattcatgggtattacccattaaaagtgcacccttatatgtatatatatagatggaagatggcattgaaaatttaaaattaaaacatgaaagaagaatgtttagaagtatattgcttgagagtattatgtattacaaaattttccaactccttacatctaagaattgagtatttataggctctaacggcctaagatacacatgtggtctccaagggacaagctagcctcattgggttgaaaatctaggtgcaggaggtagtcttgcaccttgtaccaatatataatgccaggtggccttgagttgcaaaggtggtggttgcagggacgtcaggggctgcgaacaaagtgccttcacaacttgtaccctctcgtcaccaagtcacgctgaaactgtggccatactctgttacatgcccttccgcgtgcatgtcttctcctttgattccactcttaatagtcttctctctccactcttaatagttttctctctccaacacttaggcaaactttgccttcatctctctcccacaccctccccttctcgcactttctccttgcactccctatctctcgcaccctcttccttctcgcaccc

SEQ ID NO: 21938 - DNA, 2129 bp, Cannabis sativa
aagtttataccacatatatttttacaaaaaaaaattgcataaaatatagttcaatataatacaatacaatacaatacaacctaatacggcgttccaaacgaaccctaaggtaataatttaagatggaatgatggtttaattattctcaaattttgatagtttatatcaatgcccgatgatcgatactatgagtacataagaagtccaggctttataaaagaatacattttccctggtggaagtctaccttcattgagtagagtaacatcagccatggctacttcatctacactctggtacatatatatatatatacatatattatgttgattcaatttgtctctttttattaatttttactaattattgttgatggagtgtcctgtagtgtggagcacgttgaaaatattggaattcattactaccaaacactgaagatttggagaaagaattttctagaaaaccaaaggttagtaaaattatgtgtattatcatttacagcattgttattggacgttaatggtgcttagcacttctaaacatgtcatattgcgattgactagcgataatctttaaaaattattacattaaactatatgtgacttgatacttaatttgaccaatagcaatattgacacataaaaaaatgctaagcaccattggtaacttttagcatttctctataatttatcaatattctaggatcatttgttattggatatcagtggtacctagcaccttctagacgtgttactttacaattagctagtgatactatctaaaaattattacactaaattatatgggacccgatacttaattggaccaatagcgatgatattaacacgtagaaatgtattaggcaccactaatatcttttaacatttctcatatataacatattctagctaagacattggtgtttgatcattaatttgagtgtgttttgacagtaaaattaaggcccttggattcaacgacaagtttattaggacttgggagtactattttgattattgtgcatcgggtttcaaatcacgcactattggtgattatcaggtttaaatttcatacatatcaactactaattaatctattaattaagaagattttaattaatcttaattaatattgaagacatatttattttggttgcagattgtgttttctcgtcctggcaatgtaacaacttttaccaatccatataggggctttccttctgcctatggggatgactttaattaatgttgatcttagactaaaaggcttttaatttattcatattactgtttttatctttattttatacttattgggatgttctattttatctatgactcattctccaacatttgaaataaaatcaaacttattattagatatattatttatttttaaaatagataatctaaactttatagatacttcattacaaaaataacgtaaggtgtggccgtgtttattagttatcaaaaatatatatttggtatttttaaaagcaaacttttactaatcatacttaaaaatttaaccattatcaattttaacctattctccatctctttctctccaacccaccgacgacccactccatcattcgaccattcaatgacccaaagctcccaaccaccaccattccccaccgtcgacccactccctcagcgaaaggttaaattttagttgttttttttaaaaaaaagtgtgagttaagaatttgtttgatcgatttagtttaatttgatcattgtatatattgtgatatgtgtttcttagatttccatgagtttttttgaatttgtgtttgtttgatattagatggtggtgggtatgcttttttagccaaaacgtgattatcgatgggtcatcgattctgtgcaccattattttgtgtacaaacagaaatcatcgataaactattgataaacctatcgataaatgtcaaattgtctatcacaagtagaaatcatcgataaactatcgataacatattgataaatgccaaattgacaaaactgtgatgcataaacacaatcatcgataatctatcaataagcacgttttggctagaaaacaccataaccaccatcatctaaggtcttaaacaaacacaaatctaaaaaaacaaacaa

SEQ ID NO: 21939 - DNA, 2386 bp, Cannabis sativa
  modified_base (877)..(886): a, c, t, g, unknown or other
tttttttttttttttctacattgcataacatgttaaaaattaatgtaaatttatattttagtattaaatatagtataaagtaaaaaaaaataaaaaaaaaatatatttggttcaataataagacattaaatataagtattattggtagatgttcaaaaagtaaaataaaaatactaaagtaaacatgattttattgggattagaactcgacctcctttaaataaatgaaatgactttactattataccaaagcttatttaatgtgtgtagatattacttttatttataaataaatgttgtaactaactaaaatgcatacatattttttttccgattttttttcagagtgggcgactgccccacctcgcctctacgtgggtccgccctggttgtactcacattgaaaattttagctagaagagaatgtgccaactaccagaccttcgttgccctttgcttaaacaaaaacatatatctttagtcatttttcaataataccaatcatatatatcactcccaaacaattctacaatacatacattacataatacaactatcacaacccactatatacatatacaatataatttaaaaactatccacccaaatttcaaagaaagaccttttatttttatccaaattaaatatcacttaataccaagaaattttactgcacaaatcatatagaattattgaaattcaatgaaataaaatacaaaaatctaactttaagtcccaaatttaaatgttctattaaaggcccacgacctcaactctaaaaaaactaataacccaaaattaaaaggtttactttcacaaatgtacaaaaacaacaaaaaaataataaaaatacggttttatagaattttaaatattnnnnnnnnnnttttaattttatttacataaaatacagtctttttatgttaaaattttgttcatttgttgttaattttttgttatatgtatattattttttggttatttttattgttatttttatgttacttttatgttgttttcatgttaattttatgttgttttcgttttattttttaaaaaaccgtaaaaatgtaaaaaaaacattctttaaacgtaaaaatgtaaatattttacaagaaatgatgcatgattattccaaattaaaaaccacataaaccactttctcgcatccggttaaagacggaatatcaagcaacaaaaccaaatgaaagatcatattcatgacatttattgatcattgaaaatgaaagaaatcaaatatttctagagctaggaacaaaaaacatgtccactaaacgaatcttaaaaaaaaataaaaaccacataaactactttattatatgcttagtaattaaataataaaaaatatgttcactatatgaatccttaaaaaaaattggacaatgtttctttatttcaacaatatttcccaatttaataactatataagaatgcaacaaacaacgcaagcgaatttcgtatcaagacaaaaatcagaaaagcaattaagaatataataatttaccactcatctgaccgcagtatatgtgtttcacaaaacttacttcactacggatgaatatttaagatattcaaactcttctaacatgcatattaattctctattcaccgcaatacaataaatcgcataacctactttactacggatgaatttctaagatattcaaactcctataacagttttataattagtaaaaagaaataagtcaataacgtacctctagctagcaatcaatgatcaccaaaattttactttattttccaataacaatccacaacctacaatattaaaatataatataaaaaatttcaaaataaatattaagttagaatagtaacaagtaactaatacatatataactagtatctacatactaagtaaatatagtaactagtaactcattacaattatgttcttgaaacttcttagaaatcaaaccaaattcacccaatagatcaacaattaagtataaacaagcaaaaaaaaaaaaatttatataattagtagaatatagttactaagactttctcaatattaatatattaattagaagattgaagactaattaatcgctcttctaaataaaaaatgtgtaaaatttctcaatatcaatatttatctaccaatttcaagccaaaaatacaccaacagacttagtactaaaatattactattaattttggtataaataaaaaaaaaaaatcaacaaactttcattcaacaaattttattaaaaaaattagcaaaaaatatgtatctacctatttcaatacgcatagaactctaatgttactatttaattcacattaaataaaaaaaaatcaagtatctttatatattaaaagtgcttatttaacggcattt

SEQ ID NO: 21940 - DNA, 2068 bp, Cannabis sativa
tttgtttaaacgtctgggaacaaccaacaagcggctaattggttagctcgttcttcgggtttatgtcctgaccgtctttccagtaggggggttgtccctgactttttagaagctattttaataggtgatttgctttaatgaaagttgaaatctttgtttcaagaaaaaaatcaacagcaagtaccataaacaattaacaagagaaaactgattataaagttgagaaacgaaaattaaccctaaaaccaactaatgtgaaatacaaatgaatctcaaatgaccaaagcaacatatcagacctaaaacaaactaagaaacaacatttttcgaaacacgtgaaccataccttaaagcgataaaacctaaaatagggaaaaaaactaaaaaaaaaatgtaatacaaacctcaattaaataaggagcttgattcttcccctttttaccaacaataataggactcccctcaattttcactccttttcatgcttttagattttttcttagcaggagtctttctctgtttgggtatggcctaacaaaatcattatcagagaaatcttcatctaatttccttttcttttctctttttttttggaaatagatttcaaacccatttttgaagctttagggtgtttaactggaagtttttccatagaaggagatggagaagaggaggaatgagtgatagccatctacataaaaaattatagaagataaaaaaaatatgggttgaagcttcaatggtagttgaagatcgtaggaaatcaattttttggagagacttcttttaattttgttgagaagattcaaaatgaaactgaaaatgaaagaaaaactaaataacatggagaaatggtataaaaaatagagggaaaatagttgagtgttattgaacaacattgacatcaacatcatatgatttatgtgtacaagaggtattttggtaaataaaataactaaagaggtataaaagttgtctcacccttgtaaaggtaaaattgtaataaaagattattttttttttttttgtattttttatgtaaatttttctattatatatttgaaataaataaaatatattaaaatttaaaaaagtggtgtaatgtaaaagttggagttaaaatatataaaaaaaaaaaagaaaaaaaaagagtaaggttttggtgatgcattttaagagatagtgtacaaaagcttatgagagtgttggttgaggttagtgacgtaatttcgtgcatgttgtactggctggcatatattttttttcgtgtttttcaaaatatgaattgtatcatgtcgtgctataaaaaaatatcggtcgtatcgtgccgtgccaatatttttaaagggtaggcccggcatgacctgtaggcttcgtatttttctattgtactttactcgagttggcccatttttcttaaggtcaacccgcttccatagtgaggctcaaattcgtgctttattttttttatattttttttatataattattgaactaattattaaaaaactatatgtatttttattattttattttttatataattttttaacaatagtttgctaacggtcatataaaaaaaattattagaattattagaatttaaatatttattttttaaatactcaaatttttaagtcacacactataaataaattaatagatagttttaattttacatttgtgtaataattttaataatagaattataatattcaatattatattaaagatttatttctattttaatttatttataattgaaaaatacatatttattattactattattatcaaattatagaattttttttaatgtgtcatgtcatactttttcatactttttgtattgtgtttttttgactattctattcgtacatacatgacgtgctttttagatttgttgtgttgtgtttaagtacatatttttcataatatgtcgtgtcaatttgtaagaccatactatattgtgtttgggtaaattgcggcataaatacttaatgtttccgattttatacacttaaatacctaatgtttatttttggtggcaaaaatacctaatgttaca

SEQ ID NO: 21941 - DNA, 3902 bp, Cannabis sativa
ctatacctgttgttacttgttccttcgccatgagatttatagtactgagcaagttcaccatttacgcgagaaagaagcttctcagactgttcaagcctcttgctaaaatcaccaccatcatcaacaaccgatttcaatttcttctgctaccaaacagaccccattagttgaatctcaaaaaacactgtaaattaagtgtttatatatgttcaacatatcaaagcataacgccctataagccataccttggtcaatgaagtttggtgagagtgagttggctcttgtttagattttgttccaagaagtgtcttcaccatttcatccagttctgtaatcttttccttcagtttggccttgtccctctatagataaaaacatttgcagataagatcagacccaatatttttttattcaaaagcatattcagtacataccttcagcatctcattctgcttagaaagaaagctctgtcgttcttgtagttgttcagcagttatttgggcattaagtaaattgtcttccttcatattcatttccagtatgcagctacaatgaaaagaacattgctttgtttgtgttacttgaaaatattatttctcattgatgaaattctaacacaagacaatagcttcgtttgagtagttgaaacacaagaagttgttgcttaaggactcattcctttgctactgacaatgtcgacatgcatttaccatgtaaatgatccaactactcagtcatcattacacattatcacaagtttcaataactgtgaaggtgactttttcaccaacctagaggagcaatctagttgataaaggaattaaatatgtagctcaccaattacattcttcatttttttttttgtatgattaacaaatttggtgcttataaccaaaattaaataaataacaaggaggtccctgatcaaaacttaaaacctatcagtattaacgtagatataacgtagataaaacgagaagtgaaatatgttgaagagttttttttttagtgatgagtaaagtcattcatgttcttactactcaaggctatttttcttcaccaataattgaagtcgtgagtctttcttagattagatcactactattggattttaattgactttgcactaggtaggctgatttcaattgaagttgcttgctaaaactacttgactctaatactttgttaagaatgatgagatatgggtgataagtggagctcactatatgtggaacaccctattgagaaatatatttgtagaaatcatcttaaaatggctagtaaattgatggaatggaactcacctttctctttcgtcatttaaatctttaatttgcttccttaagcgggctagttcttcctccttttcctgaaagtcttcggtttgctgatggacatcctccacaagcttcttaatttggtaatggtccatcaaattctagaatattttaaaaccaaaatgcaaacaagtgagagatgcagttgttgatgtctatctttgagagtttcaagtcttaaacttactgcaaagttattcatgtccaatttcacaccaagcaaatcacgaatcacatcatgtgtcatgctttctgctgcggcgagtctagtattcagcatacacacctgattcagtgcgatggagtaagtatttttcttctagtaatggttattctgaaccatgaatactcatacacatgtccaattatgcagtgcatttatgtatttgattatgtgtaaaagacttgtagagaagaaatgtattttacaatgacagcttcgttacctctttctgccgactagcagcaattgcctctagctcctcaatacggaacctggctgatgacaattcctgatccctctccacactcatttgttgaacgatgctagaaatgcatttgaatggtgagcttgagccccttgttcttactgagcttttatctgctttgttcaatgttggaactgtagatgttgaacttgttgaatctatttttacttcacgaaccatggcctccagtgtcttatactgtcagaaggaagcagatgacagttcaaaacttcaaatagttatgccaaataagaaatgtaaaaccatgtgtgatcagagcctaactaatggaacttggatcctcttgaaatcaaatagcaacatcataatttttttaggctaacttcttgagcacaacatgagtatattatgtctctttagcaaaacacttgagagaagtcttcagaggtgaattctgaaggacagtgaaacttttgggaaatgcatttatatagctttcagttttagaatctccaccattattctgtttgataaagtagcataccgaatccgaatatctaaaaattttcttttcattttatatggaaaaatcacatctaggttttcggtcatagaagcaaaaattcaggtaaccaataattactactagtaccttttgttggtattgagaagcttgggcgtctgcatgcaacatgagttcagtgatatactccttgtattggttgatcttcaaatagttacaacaaattgttaaaataaagcaaatcaacaaataaacagttggtaacaaacactacataacaagatggtacctctttatcttgttcatctctttcctcttcaagaagctttattcgactttgagcttggtgaagttccaaggctttattatgcagttgcctgcattaaaactagcttattagacctacaaaaaataaagtatttatttaattaagatataagggcatacttctaacctatatatctgattttcagaatgttcaacattcaagttttctgaatccaaatcttccgttaagttttccactgttagcaatctctgctttagagctttgagttccaattccaatgagtctctgctcaaccgatgctgttctacctcatcatccatctcaaacacctaaaaccacagataaatgctagtttttaattttctatgataaaggttttatcatttaacaagtagaccatgtgaaatgttcaacaaacacgttttttttgtatgtgtcgatgattacatgtcagaagtaatttatattagttcatatataaatacatatgtatgataaaacatgaattgtctaggaagagattaactaaaaactcaaataaaaatgtagcataccttcttttcaagtacatttatggtagactcaagctcctcaatggaacgttctaaaattttaacctcgtcttccttctgttcagcatatatcttacatgcttcagacacctaaaaagattttagtttgtaagaggtgcaatctaccttcaaggatgtcttcgaaaaaagaaagaaacagaattgctgaaatgtttacctggcgggcttcaactattatagcttctttttcatcaactaatgcataggccatctctagtttatcattcaaggattgaacttcgtcttgaagttggtctttctcactagtgacccttcttagattatcttcaattcttctgtctattgaagaagtgagctgaagcagctcctcttccaaactactaactatctctttctgttcttccagttgtccttcaacctcggattttttgagataaagttcttttagaatcatcttcaactcagcattttgatctgataggatatcaattgtgccattagcgtcagcaagattagaatccgacaaaacaagagcctcttcggtatcaatgagacgaccttcaagttttttatgttgcaccaacaactcatcaagttgtcttgacttagcctctagctcaagttgaacttgacttaaagaacaaacaattttctcagattcttccttgatatcctttttgtctgatgttaattcctgcaacaaactaaaatcaaatagcaaaccctccagtacaacttctttccgttcca

SEQ ID NO: 21942 - DNA, 2545 bp, Cannabis sativa
ggattcaacacaaagtatttgaaggaggacagcaagttgttattcaattcaaggctgaagttatttcctggaaagttaaaatctcgttggtcggaaccattcgtcattgccaaagtgtatcctttcgacgctgtggatgtcaaggatgaatagtgtgggagggtatttaaagtgaatgggcagcgactaaaacactatatcggaggggaggtcaatcgagtaaagacctccatcacattggaagaggcttgtggaagaaggacctcaggttgtcatggctttagtgtatcacatttgggcaacccgggaatggaggaacaagattatatctagttatatatatgttatatagtaagtttgggggtgtgccaccccttgaaaaaaaaaaggaaaaaagaaaaagagtatttagaattaagtttggggtgtgcccccccttgttaaaaaaaaaaaaaagagagaaaaaaataaatatatatactcatataatcacatatatatacatttcaatttcctacagttactaattgttttgctatggtgtagtgatctttattgcaggtgcaaggcagggaatggtagaaaatagagttgttttaatatggtgaaaagcagaatttattttctgaagcagtaggtctcagaaattatagcattgcttcagcattttgaaacagggatacataagaaaatgaattgttaaagcaatattgtaacaactgggaggattgggttctaaaaaaaatactgaaagtggacataaatctcattgatcagaaattttccccaaaaaaaaatcatatacatatacatatatatatacatacacatataataatatatatcacaaaaaaatattaatagtatataaatatctttaaatagataaatatatataaatatagataaatatatataatgataaataaataattttttttttatttttatttaccttaaaaatctcattaacccagtcgcctcttctcctgcataaatctagccgacccaccattcccatccccaccaaatcaccatctccgtccaccattaccagtcaacatccgaagtacctccaccaacgagttccacgcacgccaactaccatcacttttccccaatccgcgcgacctacctccgtttcaccagaccaccatctccgtccacatccgaaccactacccagctccgcccatcgtcaccactttcctctctgcaggaagcacatcagccaccttcttctacacatgagatcaactgccattttcggaggagaatcaatggtagaaaaatgaagtacagaagaggaaggagaaagaagggggaccaaagtacaaaaagagaaggacacaagctctatttgtttgattttcttttacctttcttttactttcttttcttttctttaaatattagaaacttgttgaattgtaaaaaattgcagcagccatggatgaacaatttcgattttggattttattttctgatttgaacatgagctaaatttcttgaggctttgaatgactatcaacccctatgtttggtatgattaatttttaagcatattttagcatatttacccttgttcattcaagtgagctttttattttctttgattgttatttcttggccatgagtaacaatttactaagctagatttggttccggaagggctagatctagtagttttaacttggatgaagcaaataaattcctagatttaagtttttctagtaaatggagtaggaatattttatttaccttgcacaactttagaattgatgtttaaatgttgttctgcaatttggtttggtataagaatatattgatctaggtggtagagctgatattgtgagttttggaaaattctcataaatacaagaaaatcctattatctctgtgcaaaaatgctgaagtaatgctatagcaactggaaaaaacctgactaggggggattagttattcaagccactttttaccatattacacttcttgcaagtaatttcctagtaacagtagcatttatttacagtccttttaaatttgaattattgctcaatcactctcatgtttttttttcttttactttaaattgtaattaattagttttacatcatattttgtttgtaatccctgtggagacgatcttatttaccactttattacttgtttgacttcgtatacatgcatatattaattttcacaataagtttttatcgctgttgctggggatcgaacccaggtcacccgcgtaacaggcgggaatacttaccactatactacaatgaccatttctgtagcattaatcctctactgtgattttggcattgttcgagaacctctactgtgttcgagatgcaaatcttgcagcattaatcctcgaccatttctgtcaatcaatgaaaatgttagcaattaaccaataataagttcatcctgatatcgggagaaggagaaaggggatcgaggttttttggcttggagggaaaaaacttggagttcattagaggtaggtgtgttggactttattttaccaggatcttaga

SEQ ID NO: 21943 - DNA, 6828 bp, Cannabis sativa
aagcaccgggtcatgggtcaagatccagatcccaatcttaggtcctggtctcgttccgattcggatcctgggtctcagtccctgtccatgtccgggtccaggttttggacagaaactggggtcgggtcttgggtcccattccatgtcctgggtcctgattctggttctaattttttgtttgggtccccaatcgaggtttgggacctgggtccaggtctgagtctccaatcccaatccaagtcctgcgtccgagtctagatccaagtccgtgtgtaggttcgggttcgtgtcttgagtcctgatctgatttttgatttgagtccacatcccggtttgtgtttgggtctgggtcctagacagattccagttctgggaccgagatcaggtcctagtcctctagtctttttcccaagtcctggcccgcttccagttttgagtcacggggtacaggttcgggtctgggcctgggttagggtccaagttcgggtttgggtttgagtcccatatccaaacatcgactatcggtcaggtccaagctttgggtcgaaatcatgatcctggtctcgggtcctagtctatttccacttcgagtcaaaggttctggtctgggtcctagttcagggtgtgggtccggggttaggtccagggtgtcagtgccagttccgaagcccgagtcccgggtctaggttccccatccaagtttgggtcttaagtcccagtctgagtataggacccggtcaaggttcaagtcctagtccgagttcaggttcgggtttcatatcccggttcaggtccagatcttggttcgtgtccagatcctagtccgggtgttagtctaaggttttgatctttgtccgggttccgaggcccgggtcaaggtcccccaatccaggtacggatcctcagtcccagtcagggtccatgtttgggttcgggtcctagtcccaattctcatttcgattccgtgtctggcttcgggtacgggttcgagtctaggtcggggtttgagtcctggtccgagttttgtgttgggtctgggtccaagttcagatcccgatctgggtctgggttcaggtccaggtccgagtccaagtcttgggtacgggtccagttttgggtctgggtctcgctccagatccaggtcccacgtttcgatctcggtctggcttcggctccgcattcgagtctaggtttgtatgtagatccatgtctaagtctaagtctgggtctgggattgggtcccaagttcaggaccgacatgataccggacctcgacctagactaaaaccaagactcgggaattgaacccgaacctagacccaaaccaagacctaggaaccaaacttggatgggggacctagaccaaagacctaggcgctgaaacccagacctagatctaaatccgagactcaaaactgaacctggacctgaccttgacctgggaattcgaagtcggacccaaacccagacccaaaacttgccccggacccaaaccacgacaggaacctggactcgaacccatgtcacgaccaaacccgaacctgggacccaaaatcagacccagacccagaatcaaacccaaacatggacttgcacccggacccaaactcgaacccagatcgggatcggaacccaagacttagacccagaactaaacacggactcagatcgagatcaaaacctcaaactcagacccgaacctagagctagacccaggaccctaacccacacccggggcctaatccgaacctagccgagatctggactcgaacccaaactcggactacgactcgaacccagacgcgagacccgaactgagacctggacccaaactaaaacccagaccgagatctagacctgaacccagacccgaatctagactcagaccaggaatcaaaccccaaccaagacccacacccaaactcgaaccccaacactgaatcaaaatcaaaactgggacttggacccaaacttgaacatggacccagaccgggaccatagacttggacctagatgggggacctagacttgggccttagaacccagacaatcgaaactcgagacttggacccgacctagactcgaacccagatcttgacccagatcgatatcagaacccaaacccaaactcgaacaagaacttgaaccccgaccgggtccttgacccagaccttgacctaggatccaaactgggtcttcggacccgaagtgcaactagactgggacccgagactgtgaaccagatctggacacggggcttggacctgacccgtagtcagtgtttgcatctgggatccatacctaaacactcaaaccaagactcagactcagacctagaccctgaccagacccgtaacccagacttgggtccaagtccgagtctgggtttgagtctaggaactggaatatagctaagacccagacccagacctagacctagaccaggactaggatgcggacccaaatcaatactcggatcaggactcgagacacgaacccaaacccaaacaaggacttggacctagactcggaccttagacaaggaccaggattcgagactcaaacctggacccaagactcagacccgggatcccagaactggggcttggacaagacccatagtcggtgtcttgatctggaacttgaagaaggaccaaaagctggaccaggacctagacccagacctagaacggggacccgaaaccaaaaaatgaaacaaaacgtgactaggaccctagaacaggattgggaccgtgaccccaacctggacctggaccgggacctagaactagaccagaacacagccccgaaactagggctcagacccggtcctagacctggtctcgcacccagactaggattgagactcgagcctgaacccaaacccaaacttggaactcgatcccggacccaaacaaagcccctgacctaaattgggattcggacttgaacatggacacgaacccagacctggacccgaataccgaccaagaccctgagccagaccgggatcgaaacacgggacctggacccagaccaagacgcaaacccagaaccgaacctaggacccagacccaagaccagaacttggacccggactctgacttagatccagaccggtatctaaaaaacccgtacccagactcggactaagacttggacccgaccccaacctggacccatacccggacccggaaccaaacccagacccagaatcagaattagaactgtgactaggacctggacttgagataagaactgaacccaaaccataaccaacactaggaccagaacctggaccgagagcttgactaggatagggacctgacacctgggacccgaacttggaccgagacccgaactgggacctggtcataaaccctcgccgggacctaagacctgcgagccaaacaaggatctagaacctgacaaggacccaaacctgaactcggaccaagattgggaccgagacctagacccaaacctagactgggacctggactaataccaagactcaggacccgaacccgaacctggacccagaccaggacctaggaatcgaacttggatgggggacctagacaagggacataagctttggaacatagatctagatctaaatccaggattgaaacccgaaccaggacctatcctggacccgggaatctatagtcacacgcagacccaaatccaaaacctaccccagacccagacgaggataggaacatagacacgaagccatactaggaccaaacccgaacccatactcgaacccaaaatcaaacccaaacccgatacccgaactcaaacccatacccaaaatcagacccaaacctaggcctgtacccagaccagaactcgaacccagaccgagatcgaaacccaggacttatacgcaaaactacaccaggactcaaattgagatcaaaacttgggactcgaaactgaacattaacccagacccaggaccctaacccaccgtaatatcccaaaaaataaataatatttaaatagacatattttattaaatatgtcattattttggaatcgaggtaagattatgatcttacttagggtaattgttgagaatttatttaatgaaataaaatattttcgggcccggcaattgtgagaatttagcaatgtggttaataatgtaacgacgttaatgaaagaattattttgagaatatttcggattaggttagaattttattagaatgtcgggttggtgaattagtgaaactaccaaaatgcccctaggtttttttttagaaaaaaaattatgaaaggggggtaaattagtctttggtaaattcaaatagtgcctttgacttttcaggctgccgatttttttttataaaagaaatgaaatgaaaagaaaagaaataaaaaaaaaacctcatttaggaagaaaacttccaaggcaaggaagccacttttcttcttcctctctctctttcgtgacctagagctagccaaaaccaggggattcatcttgatttctctcaactactgagaagattggatacccaagatcatcctagaagctttggaggtaagttcttttccttgaggattaaaaatttcactattttagttttgttttggatgaaggttttgggatttcgtggctgtaggtttagtttgggttaagatggtgttttaaggtctgttttggagtgtgttgaagtttgaatcaagtgattttaatggctgtttagattgaatgtatttgattaagcaatttgagcttaattttcatgtgagatggttattttgagctaattgatgaattgtgattaattgatgtgttagatatgttgtgtttggtatattgaactgttctggaaatgcaatttaggtctgtgatggttttggttcgagctagggaagaaaacccataaattttcttgtctgacagcaaccggtcgaccggttggttctggtgtaccagaactgttcgaccggttaccagcaggagaaaattctcgagttttctctaaaccctattttaactcggggtggaacttagtacctgcttttgattgtttttgagttatttgggctattttaaaatggtttaaggctaagtctaatcgattttaaattagggttttaatccgaaaaatttctagttaaggtattcatttgatttcaattgtcgtgacataggagcgggatcgcctaggttgttttccacccaggtcggcccgtacgtttaaattctgaaccaaggtaagaaaagtattatgcaccgtttatggttaatgactaaaattgtgatagtcacgattttgatcgagattttgacatgcatttgatgtgacttgattatcatcgaggtaatggtatgaaatgattattatcgttgtgactcgattatgatcgagtaaaagatacggtcattactgttatgagtaattactcttgaaactgcagttaggtttcttacttatcgttcgctttattgggcagcgatagtgacatattcagctcgtagttaacgagttgtaaaaaggggtacccggactgtatgtttatgatattgtgttaacgtgtaatcatattgatatgagacctattcaatagttattttttatttcacttttcttgcagagtctctgtgactcacgagtgctttatggtgcaggtaaagggaagacaaaggttaagcagccatgagtttgtggtcatagcagcgatgtacatatcagtcgcagcggcacggcccagtgaacaggatgctctctttttaaaatattttgggattacaaagtttatgttgtaaaagcactattgaaccagtttatgaatattttgaaaacagggggaccccgtagttaatatcacttatcttatttaaattattttttttatattttgaattttaactattaaaaatttaattacccacacttttagtataattatacagtatataaaataagaatttttttaaaacgcacacacgtggcgttcctgttgattagggcgttacaacatggtatcagagcaccaaggtttttaaatccttaagactggtttgatatgtacattggctgcaaggacctgatcgactcatggtttagtaagtttttagttaaaagatagtttgttaatttttttgattgcctgattatgtaaattgtgtttatattggaatggtgtgggcaagataataatatatggaaatacttatcagtattgttattacctggaatgtgaccgcaggtgtatagattatgcacccgaggcggactggtaggggtacccgcgagctagctcggctcggggctgctagtgagggcgagaaccctccaccacaaccaaactgggaagaattatacgctgcaatgcaagagactattcggcagcagggtgagcaaatcagagaattgagagagcagcgagctcagcctgctctaaaccctaatcctgatcctctggcacctctggtagtgccaccggatgcaaggaatcgtttggaaccattgtatgagcggttttggaagcagaacccgccagtgtttgagggtggtcctgatccactcaaggcagagcaatggatgagtatgataacatccattgtttagtttatgtgggttaaagataatgacctggttaggtgtgctatttatatgctgcgacatgatgcccgtatttggtgggagattgtatctcagggtcatgatctaaataacatgacctgggaagcattctgggccttgttttatgagaagtattataatgagtctattcgggcggcaaaggcaaaagagtttacacgattgactcagggcagcatgactgtgacagagtatgccac

SEQ ID NO: 21944 - DNA, 4916 bp, Cannabis sativa
gcacattaaaagacctaaaattttgcaactcttgtcaattaggtaaaagccacactcttccctttcctatttcacaaagtagagccaaccaaccacttgcactcatccacactgatctctggggtccatcccatgatctttctatttatggttactatgttcattttcttgatgactatagcaggtacacttggatctttcctttaactttaagatcccaagcctttgaggtgtttataaaatggagagcattaattgaaaagcaattcaatttgcccattaaatctgtacaagctgattggggaggtgaatatagaccctttatacaatttcttgaagatcaagggttacattttcaacatccatgtccccacactcatgaaaaaaatggaagggcaaattggaaacatagacacattaatgaaatcggtctcacattattggcaaaagctggtttgggaatgcacaattggtggcatgcctttagttgtgttgttttcaccataaaccagttaccaaaaagatttctagattggtcatctcctcttgaaacactatttcacaataagcctgattactctatcctcaagccatttggatgtccatgctttccacatttgaggccatacaacaaacataagttggactttagaacccaacaatgtctctttttgggctattcatctcatcacaaaggctacatttttcaagcaccagagggaagaatctatatagctcgcaatgtcatttttaatgaagaaagcttccatggtgcaaactttgcttgaacatcattctctgatgcaccaaaccaggtaccttctcacacaaatatacctatttttgttcctaatattggtatacaatctcagactgatgttgttgttacttctgatcccgatgttggtgcttcacctgctgaggctgctggtgtaactcccactgctgttgctggtgcaacatctgatcttgttgctggtgcaacacctagtgcagatactgatgcacaatcagctgcagttgctgataacactcatggtatgcaagttgaaccatcacaaatcccactagaaaatacccctctacaacatccagcaaccaccacaacatgccctatccctctagaatctgaacctcctacccaatccaatattcacccaatgcagactagatcaaggattggtattcacaaacccaaagcttaccttcccacaagacatcccctacctgaatccctcttacctactaaaccaagaaacataaaagaagctctcaaaaatcccaaatggcttgctgctatgacatctgaatttcaggctctcaagagacaaggaacttggacattagttccatacaatccatcaatgcatgtcattgataacaagtagatttacagagtaaagttgaatgctgatggttctttggacaaatacaagtcacggttagttgctaaagggtatcttcaaactctgagaattgattatgaagatacgttcagttcggttgtcaaacaaaccactgttcgcattatcttaagcattgttgtatcctcaaattggccagtgaaacaactagatgtcaacaatacttttctctatggcaatcttgaagaaacagtgtttatgaaacaaacacaagggtttgtagatcctgagcatccaaatcatgttttccttcttcataaggccttatactgattgaaacaagcccctcgggcatggaatggctgacttaaaagcacataattttagtggggttttcaagcctcacggtctgataatagcctattcatctatggctcgggcaactcattagtaaatcttctagtatacgttgatgatatcttgatcacagtgtcgaattcctcattcatttgttgatctcaacagggaattttcactcaaggacatgggtcttattcattattttttgggggtagagatacatagagatgatactggcatgtacctcactcaacgctagtacataatagacattctaactcgacttcatatggaaggagccaagtcatgtcctaatcctacaagctctacaaccaaactcagccttagtgatggagaacgtctagaagatatcactctttacgaaagcaccttgggggctttacaatacctcagccttacaagacctgatgttgcatacattatcaataaacttagtaaatttcttcatgcacccaccaccaaacattgggaagcatgtaaacagctactacgatatctcaaagggacgaaaactgatggtttatggctctcaccatcagattcgatgactcttcatggctatagtgacgctgattgggcaagttgtctagacaattaacgttccacgggaggctatgtaatgttcttgggcaataatctggtatcttggtccgccaaaaaggagcaggtggttgctcgttcatcaactgaaagtgaattcagagcattagctaatgctgctgctaaaatcaagtggatcacttccctgttgtctgagctacaggtctcgattattcaaccacctattctatgggttgataatcaaagtgcaacctcactagctgccaatcttgtgtttcatgcccgaagcaaacacattgaaattgatctgcattttgtctgagatcaaatacttgcacgacaactttcagttcgttatgtaccttcattagatcaagtagccgatgctttgacataaccattttctacaaaataatttttgtacttaaagaacaaacttcacttagctacttccaagtttcgtttgaggggggatataaacatattaactaattagttagttaaacggttatgttagttagtagttaattttagtttgtgaaaatatgttaggcatttttcttgtatcttgatctgtactaaacactataaataaagaggttaaagccaactattttggttaagctttctttgcattattttctctccttttactccgtttctctattttctggtttgtaccatctgatatgtaccatttcaacaagctggcattgcaaagctttacaacgtattctatatttatatatttttatggaagaataccttaaattattcaaatttgtatgtaattttaataatatacatgattattcaatatacttttctttttcttttttcttaacaactgaaaaattctttcgaaaccgaaaatagaagagccactaaattaacttatctatttatctttttgtcatagagtcatctttgtttttaatatttgaaaaaattacaattcaattctttattaacgtaacgataccaagtatatatagacttataaatatgtgtgtatgcatcaaacttgtctagtttgtattttcgaaagttcccaaaaatatgaattatgcagtgtgcgggcaacaaaaaatttaggtcgtgccaataataatttatatgatagggctagtatatcttataaacttgatattttcttttcgtccttaaattcgtgttgtactttaattcaacaggcttgtttttcaagccatttttaaatgcaatttgtatgtctattcttttgcttaattttttttcttacaattatgctaattattaaatatatatatatatataaatataaaaataatttaaacaacatttatataatttttcaacaaaaaaattatataaaagaaacttatattaaaatgtaaatatttgctagtacttatatttttcacttaaggctcttaaattaaattagtttatagtctttgttaaattcgaatttggtcaattgataatggaactttatttataatcgacaatcaccacgtgtaattaatgtaagcaaataatgaaatagacacatcgatagaagttcgaccctttgattagcgggtaatgacctactctcatttttgttgtattgattcaagagataataccacccaagttacaagctcttactatataatttctagtgtggctctttatgaacgttacaattgtgagaacaaggtaagatagatctcgaacaagtgaaataaggagacaaacttagtgtcatttcaaaggacacacgagtgagagagagagagctagggttttgagattagaagttagatttttgatcttgacctaatgatttttatatagtttagagcttacaaaagatccacattcaaaatggactaatatccctcaagaaggggaaatatcatattttatcatatatttaaatatacaaaaatatcgctaattaattgctccaaaagaataggtaaatatttggggttgtatccctagttttgtgggttgatgaagtggtttcatagctgaaaatgagctacaatctgtcaagagtgaaagctgcagaaacaccaatagatcaatcattatgggcactagccgacctaccctttgtcaagggttggccggcacatgccatatattggccgagcaggggtgattgggccataccctactagttggccattttcttgtaactttgttttgctcaagcatttggacccttagtcaattgagaagttgtgcatggtgacttggctcattattgacaggttgtactacacgtggcagaatcctgcatatgtggacatgccacatcatgtgggaaaaaattgggataaaattttctacctaaggccatgtgtggacgtttgtatggatagtgactttccaactccaggtctgagtgttgaagtcttaaccgggtagttgatggctggccatgtacttggcctttcatacaacccatttcatgacaaaaaattgcttttttgcgcatattcctattgagcaactcttgatcttctacaaggccaattagtaagtttatgggaggaaatgcatagaaaaacctatataaggtttatttgaacaattttttatttctattctcattccactctctctctctctctc

SEQ ID NO: 21945 - DNA, 2235 bp, Cannabis sativa
ttttagtatttcttcaatactttgtaacttgcccgatgatgtaagtcctcttctgcaacttgttctgtttgatatggcagcaatagcagcaaacatttcaacataaagatttcaatacagtagctaagatcaagataatgtgctcctaataagaaatcttccagcaagtatagctacacccaacacaaaaccaacaatcaaatattaataagagttacaaaaaatgtattattacaagagttaacacactaaaaatattagttacaagaaaaactaaacaaaatcataggctataagataccaaatttgctactacaaataaattttgataattactatgcagagaaaataacaaaaatgatcctcatctccgatccaaatgacaatgaaaatggtatgaaacttttaaaggacctaaccacaaatgcataccattttcaacaacaagcattgaaagagatacaactatcaaataatggtaccaacttaccactgaatatctaagacaaatatacatagatatgcacgcatatatctttacaccatacatgttactaacggaacaaaatggaagccatgatggttggggtgcctgttgtattccccccattctacataaatcaaatttagaaatgatattttaaaacaaaaagaaaaaaataattgtattgtttgtcttactataattcttacaaaccatgtttacaagttcttaaaatgactatttagtcaaaaatataatagcattttgacatatatgcgcaacactcaacagaaacttcaatattttattttaaagagagactaaagaattatcttgtaatgaatcttaataaaagaagataaaagcacgtcaaaaaaaaaaaaaagaagataaaagtaattacacaaaatgtatttgaagttttacaaaaataccaaagaagagttttcaccataccttctcaagttcatctgacacaaatttggcaacctcacccttttgttcaaatagctcatccaggtaatggaagaaaatgggtttagtggaagggctccagagaagcagcggagacctgaagactgctgagattggaaacaagaatttccactcctccaacaagtccattgttggctgtcattgtagtcctaagagttccatgcagtgaacaatctgaaaccatagaaaatatttaagtctattcaataactcacatgttattagttaatacagtctgaatcctaaaaaccaggaacatttaaattcaaagtaaatcaaatgtagaaatcttctataaccaaatcaaaattgcagtttgtttcaaaaaaaaaaaatcaaaattgcagtaattaatatagttgaatatcatcccatccaagattttcttctatgaatctaataatcatgcatacttcactagtcatatcatccaaattatgctgaaagattttataagttaacatcatattgaatttaaatagctctataatacccgaaatcattggcactaaaatttaaattttgataagattagtaataacaaactattcatctcctactgattaaactaaatcacattgagatttttttcttttgagcaatagagtatcaatctaaagtacgaagacataaagttggaaactttccggaggaaattaataacaaaatacatacatttgtggtggtatgtggcttggattaggagcatgatatggtggttttgacttcacacatgcattttatcaaacaatatacatacaacttcaacactatagacatagatctataaaatgacaaaaatgattccaaggagtataatttcaataataataatattataaactaacaattacttaaaatattataaacacataagtggatgaaaactcaccttgaattctattgtgagagagagacttgagtccctttggttacgttcagagagagttggagttgctctgcaattttaataaattcagagtttaaaaatcacaatatcaatgagacaaatattacttactctggaaatggaagtggttgttgctggacggcaaggatgatgagcggcggagcaactggtgcacaattgagaaatcgtcgaggaccaggacctacgaaattgcaccagattcattgctggatttcgaaatagcaccggaagtaactactgaacttcggccaaggagaaatggcgcttaatcgattgttgacctaatcccaatttttctaaagctcttaatcgattaactgtagta

SEQ ID NO: 21946 - DNA, 2574 bp, Cannabis sativa
  modified_base (2295)..(2296): a, c, t, g, unknown or other
aacagccacatgaatatatgctatattgctatatacagaactagccaaccagtttgacctaaaacattatagcattgctattaattaagcattttaaggcatgactttatacatatatatataatagttatcttattttaattatcaaataattactaaattaaaaacatatataatacataaatattatttataattagttacaaattttttacttttaatcacaactaattttttttaactaaaagtgagattttttttattaagctttgttgatgatttaggcagatgttggtcattagtataaagactcagtacatatatatttattaaatgttaagcttaatttttttattaatccatcaaacaaataaataaatatatatatgtaattaaaaggagacgtattttacaagcccaataacgtacatgccaagtagctagggttttacttgcttgaatctgctcttaatatataaactacatttaacctctaaaaactcaatatttaattctaattaactagagacactttcaaccaattatataaataaaagtataacgtataactctacctttattaatgatcatatcacacccatcaatatatcaatatcataatatagattgttgaatattaattcattattgttatttttttctaaataggaatattaaattatctctaaatataacaattcgttgatgagtgtgactcatgatcacagtaaaaaaaaacagaaaaaaaacgtttcttataatttgtgtgtttaaactagaggagacgaccatgggaaatgggaatgatataaataaataaatatgttaattttcaaaaccgagtatgaattgttcaatgtgtaaataaaaccattttatacaaatagtcaagagtcaaactatagaataaactttcctatttttatgctttaataaatatatacataagtagagtactacattatatatatagcttaatagtactgtgtttggctttgtctactatatatataaacccaaccaacctccacattattaataagttcatctatactataccataacatataatattgtatctagagagagagagagagagagagagagattaaagatgatgagaaaagagttagtggttttggtgagagtgttgggcattgtgaacttattactattattgttgtgtgttgatgggattgaaggttgtagagttttgaatttgaattatgtgaaacaaaataatgttaaacataataatattttgatgtcttctttggagagaggtggcaatactccacctgcacccaatccaaccaagcccggcgccaccctcaaccacaggaactttgccggaagtagtcgtcgtcatcctccacacctacctcactcagctacctaatattctacccaattcctcaacatactaacaaattagataaattatttttggaaaattaaacaaattattttgattttttcagctgatcatgatgtgcttgtaatatattttttgtaatatttaaatgataacctttatattgttactttttattatttattttgttacacaatctctttagttttgtcaaattcggaccaaaaatgccatcttaattaatttggacagtttaaggaggacacaatcaattctatcaaatattgtttattgtataaacttttgtaacaacatacaaaaatatatatcaatatcgtacgcgtctaattggtacatcattaaatatagaatattttaattaaaaaaatatataattaaattaaattaataatagaatttgtatattaattggtatagaacactacgtactaactaataatatcgattacctagcaatatactagctcttatacttttagatattttatagcaactacgagatgagcatttgttcatataacatttttagtttttttttttgggggggaatcaaagagtgcaaaactgcaaactgtaaatacaattgtaaggcagccgtgagattagatgggctttaaaaaaattattaaaccttttattcaaaatatatgtggtacttttaaaatataaaaaaaatatgtatattttcaaaggaaaaatatttatttgagcctttaggttgggtgagccttaggcgcgcgggcctagcctgcttagcccaaacctaactttgtaagaatgatttaaggaaaatttacatggtatattagctaacttttactatttttttacaaagtactgcaagtggtattttttacttttttactgtgtttttttaataagtttcatactgcagtatnntgtgttaagttttcactgttgttctacttgtgttttttagttgttctactgttgttttgagttattctgttttgtgttttaatggtgttttataaaaacacattattttttgaaaagattttcgtgacagtatttttataaaagttaaccaaaattctagtatttttgtaagtttttcaagattaaagctgttgaccgaggttttcggcaactactaaaatatgaatataataatgagctgtaagaaagcgagatgaagactttttacgtggttgggg

SEQ ID NO: 21947 - DNA, 3582 bp, Cannabis sativa
gttcgattgggtttcaccaatgattgttttatccttaatgcacttgttgacatgtatgctaagtgtggtgacattttgaaggctcgaagggtctttgatctaattagtagtcgagattcggtttcatggaattcgattctcaccagctatattcatcacgggctttttttgcaagcattagatatattccatggcatgcttcaagaagggcatcagcctgattcgattgctgtatctgctattctgagcagggtgacaacattgaagcttggggttcagattcatggatgggcatttcgacaaggaatgggatggaacttgtccattgctaattccttaattgttctctatgccaagcatggcgagttggatagagcgcaacaggtgtttgatcagatgtctgagagggatgttgtttcttggaattctatcatttcggctcattctaaagacccaaaagcattggtttattttcagcagatggagagtgctggtgcactgcctgacaatattacattcgtgtcattactatcaacttgtgcacatttgggtttagtgaatgatggcaagaaaatatttactatcatgacaaacaagtacagagtaaaaccgatcatggaacattacagttgcatggtgaaccttttcggaagggcaggcctaatcgaagaggcttataatgtgatagtggagcaaatggagtttgaggcgggtccaactgtatggggggctctgctctatgcttgctaccttcataaaaatgtaggagtcggggagattgctgctgaacgacttttcgagcttgagcctgacaatgaacggaatttcgagcttttaatgaagatttatgccaatgcagacagattagaggatgttgagagagtgaaaaagatgatggtagacaggggattagactcgtaactatctttatggtttgtcttcaatattgagtcattttcggccgagattcatggtacaatcacagatcaactttggtttataagccactattatgggagctccaacaattgatattgaccaaatagggagaagtaaaattgttctttgaacgagtagcttcacctatatattcatctacgtaatctacatacatgccagaagataatctggatatatgtctcgttcagttagaacagtactcccaagaacaatgtattgcaaacacacatgggcaagctaaataccaaaataacagaagaataaatgtaattttttcaacggttaaaaattctcttggaactatacttattgtgggactttaaataccaaaataacagaagaataaatgtaattttttcaacggttaaaaattctatcggaactatgcttattgtgggacttttgttagtttttcatgtgacaaattaatagagtaatttgcggctaattctttatattttaatttgtatatactagtatctccagtgaagatgcaagtaagtattgtgaagttaaaatatagctcatttaataaaaagtgtgcttcaatagtgtaccaaaaagtgatgtaaatttgacacatagtaaattttgtaccaaatttgccacaatatttgttataatgtaaaatttacatcacaataaatgcactacttttttatatatatttatgtcatttgtattattttattaatataattaattatagcattaaattatgaagtatttatattattattttattgtatcatattaaaataataataaaattgataataaagttattagtttattttttttaataaaaacattaactagatattaaattttacatcaaaattttacaattgtgcattgaagcataatactaaaattgatgtaaatctaccacaaaactactttctgtgctaaatataacacaatttttacatcttcgattggagatggtcttaggtggtgtttcgttggaggtaatgaaatgaaatgaaaaagaatggaaataattttaattttatttttttgttcagttatatttaaggtgtttggtatgaggtttacatttaataggaatgtgaatgtaaaatttatattaaatttgattgacaaagggtttgtgtttctaattagatattattttttatattaaaatagtagtaatgttaatcccctcaaacccatgcgtttcatatacccttaaagtctactcatttcaactcaaactcaaataaaaaaaaacacctttttaggtgagatttggttggaaagaatgaaaacatagctaaaataataacgacatttcaatacattaaaataaaactaaataaaagattagaataaaaattgtttcctttctattttattccctccaacgccacttaaagtattgaaatgtcattctaatggaataattttctattattttggcggaatgagtattctattttaaaattgaaagaaagaccattttcatgtatgatgaaaaaaaaaatgtaataattttttttttttgaagtattttcattttaatttcatttctattcatattcacattcttattcctattttaatgttttcattccctccaaccaaacaataatctcttatatcttttttatttttatttttttttatattgggaatacttttttaactttatttctgtttgtaaatttgcgaagtcagttaaatttaactattaaatgttaagttatttttttattgatataattttattgatattttgttgttttttatattatttttgtgttgttcctcttatactgttttttttctctttaattgctgggtaaaatttatttttgtaattttaaaattttataattatatatttttgaatttttgtttttaaaaattgaaaaaaaaataggaaaataaaaatataaagaataattactatttttgccttatgaacttatacattaaaaagttgtgctttctatagtatacggtttgttaataatactttttgaaatataaattttacaagtcattctatcacattttattaaattttatctttttttttttttttttgaaaataaattcttcattaccacaattcaattacaaaggattaggcaagtcttgcaacaccgcaagtctcgcgcaagggggaacaaccccaatccacatagctctcaccttgttaaacaaagcgtaattggctaaagcatgggcaacctcattggcctcccgatacacaaaagaaataccaacaacagaaacatgtaacattaactctctaataccatttagtatgccattaatgtctcgacagccgtcctccttagcatggattaaatggacagcaacttgacaatctgattcaatactaaagcgatgtagtccccgttgtatcccaacttgcaagccattttgaatagccaacaactccacatgtaatggtgagtactcccttggcatagcagcagccgaagcaaacaaacattgcccccccgcatcctgaataacacaactgaaacttgaatgcccctctccacacttcacacccgcatcaacatttatcttcacttcagcattcggaggaggcagccaacgtgccttctccctcacaacccgaccacttccacctgcacatgg

SEQ ID NO: 21948 - DNA, 4216 bp, Cannabis sativa
  modified_base (1141)..(1145): a, c, t, g, unknown or other
  modified_base (1244)..(1247): a, c, t, g, unknown or other
  modified_base (4144)..(4183): a, c, t, g, unknown or other
ctcttcctagctggaattcatcaaggagttcaacccctagctcctccaaacttctaaggtaaaacctaacctgaaatttattagttttttagggtttttgttagttttttgtggctgtttatagtagaacatgtttaataatgaaattattattaagcttatttaggactgtttagaagtggttttaattgtttagggttgttgtagccaaagttatgcaagtttgagttcaaagaactcaaacttaacttggttgtgataacttgaattttgttgcaaactgggttaaggtttcttcatgaaatatgttcattatgatgtgtttagatgctctgaaaaatttggtaatgtttggatctgtattggatgagttatgggatttccaatctcgaacagggagtttcaggctatccgatttaggtagttttaggacgaccatttagtttgatttctgttgagaacttggttgagatttctttatgaaatatgttaattatgatgtttttaggatcttgacaaaatttggtaatgtttggatcaatattgcatgagttataggatttccaaactcggacagggaggttttggaccatccgatttaggcagttttaggaccgccatttcgtttgatttctgttgagaattctattaaggtttcttcattaaaaatgttcattgtgatgtttttagataccctaaaaaattttgtaaggtttttcttagaattttaggagttatgcaagttttaaaataggatagtggagtttcgggccgtctgattttggcagaatttaagggtccattttaagatttttcccaggatcccaattgagtgttctctcaatacttagggtactgctatgatatatatcaatagggaaacttttagttgtcaatttaagtccccgaaagtgttagggcaacacttattggtttttctaaaaatgtgacttagggccttcgattaccagcagctatttccactaaggttgaccagcacacctgaaatcaaaattgagataagactagtataatacacatacatatgtacatgtttatttttatgtttgccagatgtatgacatacccgttagaatgatagttggtgtatatatgattgcatcttgatatcgtgaatgtnnnnntttggcaattcaggaagtatgaaccaatgctaccaacactagttcactagattactgagtgcatgtggtattatagttggttatactttcgaaagcatnnnntagtgctaccaacactagtacaccggagtactgaatgcatgtggtattatggctagttgtacttatagtatggatggatgctaccgatactagtacgactagagtactgagtgcatgtggtattatggtcaattatactatggtcaagaacattcgagactcaattatacatgtttgcatggtttatgacttgttgataggtgtatgggcacttagtcgtaggtcggttatatatttatgttttatgcttttcttactgagtctgtcaactcacagatgctatgttatgtgcaggtaaaggcaaagctgttgttgaacgatagtgagttttgagctggatgaagattgcatatatcgagacagttcgacttggagtgttggatttttgggacaactagggctcacaattttgtagttactgtgcgacatcttttgattatgtaaagttgaaaaatgtagataggggatcctagattttataaatgtaatacaatatatgtttatttattaaagtttatattttatcacttttgataaaccctttgattagcaaaggttgcacagtaattttgaaaagcactgtatcacgcctaaactagtagggtgttaaattcatggtacgaaatactgaaagatagtgggttaaattcaagttattgatgtccaaacttctatcttagagatctcggagtcaacctgggcgtagggctaaggtcccctcccatgtcgactactatgagttgacttgatgacgtgaactgtgcttatttttcttgaaactaccaggtgggcataaattttgatattcttaagtacttgtatctcttcttgaagcattcctaattgaattaggactttgaacactttttcttagtccttaggaattttgaaaatcaataaccaaagaaaaagaggaaaaatcttatgtttttttttttcacttatcttttatctctttctttgaaaatttgaaattttcttatttttgtcatggaattaggattaattggattagagtcctaatcctatttgaagatgctattcaaaattaaagagatcagaagaagagaaaaggcctctggccttttgcttatcatttatttattttttttcctttaattatctaattttccttaatcacaatagcaatagaaattattgttaccttttaaagccttttacttatcatttatctctttctttgaaagcctttaaatttaaaagacttccattagctttaggactaggatattaaactcaactataaataagtgagttgagatctaattttttcacacttcttcattattccacatgcctataacactttgagagaaccttcgggatttcatcttcatatagccctcctcacttcaaggtaaaaacaatctttttttttttattattattttttcttcttctcctcctttgttgatcttattccaaggactcttaaacttctaaaagtccttgaaacaattttttccaaaacctccaaaattccaaaacactcttcttttgccttcaaaaaaattccaaaagctactttgaatttttcaacttaattttgacttttcttgagttgtaagcaacttgagttgttgagtttgagatggctaggatgaagagaagcagaagattacctgatgagtatgatccccatgttgctcagttcattatagcaaaggtgattgtgcctaagtctaagaacttagataaggtgcgtggtggaaaagtgatggcaaccgagcttctcaaagctgccattaaaagtgacgatctgagagatcgtgcctttaagcttagacctcttgtgtctaataccctcactgagctttaagctcaaaaaatttagggctgaagatgtgcaacacacccaatgatcttttatacaaaaaaagcaatgcccatgcatctcccaagctctaagaagctttaggggttgcatgcatgcaccctaggatctcctaggcagtctgtttcctccgatgaagtgtagggcctctaatggcttctgggacaaaaatttagactaccagtaggataagcagtggactggtaagagcttcctaacttgtttataatgtttcgagttactttctccgatgtaacttcaggattggaatcatattaggagacagaaaccccttgagtgaactgtgccaaaaatttcccgcctcaatcaatagtaccataaccaggcctgactggcagcccaacacacagtgacaatactgggggtctcctctcagccccaccattacagaatcaatttccaaataacttcaccacctagtgtaaaggcaaaggaagtagttgttaaaaaatagatccaaccctcgcgtcagcaccggcattggtgcctcaagctggattgagtcattgcatctgatgacccctcttgagttattcgtcataaccacatcgcattgtagcctctttgcctagacccaatacctcttgcaccttgccgtatttgcgtggttagaccttcgtgaacggcaaaaagtgtgggtctggatataccaatggccggtcattcttatagggagttggctggccagatctgaggttttaagggcaaatattggtgcaggaagcgttttaagaccgcatgtgtttgtcctttgtatttttatcttgaggatctagccatcgggttctactctgggaaacgcctccgatctgcacatttttggccttcgaccggactttggtagaagatcaggagatctcccttcttttctcgcacaagttctctttttgatgggcttccgtcagtaaccgtcgtgcatatttttttcttcagctctcaatgaaagcaccaaaatatttaatgagttttttcagcaacaaaatatttttagttgatcttaatatctattcaattcaatatnnnnnnnnnnnnnnnnnnnnnnnnnnnnnnnnnnnnnnnntggttaggttctagttcagttgtattatttatg

SEQ ID NO: 21949 - DNA, 1146 bp, Cannabis sativa
  modified_base (1098)..(1099): a, c, t, g, unknown or other
ggggaagtgatggtgctatgtgtctgggcgaagagagatgggaggttgttgtgcatgtcaggagatagagaggaggaggtcaccgtgcatttgggcggagagagaggaggagctccccgccatctggcctaggcatgctggagctgtgaacgagagaagaaaaacaaattaagttaggttttttatttcattttaagtggctgatctatggtatatttctattagggttttttctttatatataactttttaagttaacttgatattcttttttataaataatgctaaccgaaccttatatgttctttgaagaaaaaatgaatgaatatatatattcagaagaaagagagaaatacgattgatatttttatttattttttattatcattttttgtttcaaaagaagtgtccaatattattaaatattattttaattcatatggtggatatatagagtcattcaatgcgggactagaaaaatgtgtattgacttgttgtcatgtcaataattgtaattgtattttttttaatttagttatgatatagtgacgcgccatgtgtgttgggatacatttatctaatcatgtctggtgtgtcactataggttaatattttttcaaattaataaaaattaaaaaattgtcggatttactttttagtgacactctatatttttagtgacctgcattacatgtgagtaacactgaatatttagagtctatttgtgcatgtcactaaaaatcattcctaactatttagtgacccacactaaaatgctcgtcactaaatagtgtcactaaaaggccaaattgtagtagtgggtcataacccccacaatgtcgacacctccaccacccccatcacctcctccacctccacaactccctcgacctcctataatgtacaccaggcgccccctcctcctcctcctatttcctgtcctgggcttgcatcttcgtcatcagattcggaaatcaaagatgatcttcccattgcactacgtaaaggtaaacgccaatgtacttttcctattccttcttttgtttcttataatcaactctcctcttcttcttgctcttttattgcttctcttgattnnatcactattcctaaaactgttcgtgaagtaatgtctcatcctggttg

SEQ ID NO: 21950 - DNA, 1434 bp, Cannabis sativa
cgctgcattgtcaatgatctcatcagaatctgaagaagcatccgaaactgaatggagagagtccacttcaactgacaaaggagaagcttgagaaacatgattaccccgacatcgcttaagaaattgtctcaaagatttagagtcatgttgtcgtttaaactggcagtttgggtggatattttcctgatctaaacataactgagaagtagagttgagacctgtggtggaattaacaataggttgggatgttgaatataagggagtggaaaatggcatagtcagagcagggtaatgagattgataagtgggagatgtcatcaggggtaagtggcaatgggatgattaaatgtggacactgaactaggagcaaataaatagccaacatcaggtgtgtatacattcgagagatgtgcaaccgaattattagttgtagaagcattgataatcggagatttcaaaccagatgtgaaaggtgattgtgttgctgaagtttgaaccaaaccagaggagatcaaagaagattgtccaagtaaagccggtgagaaaaaagattgaacccttgaggatggtgctgtggtggagacatgatcagtagcagtagcagtagcagagggaattgcttgagaagtagaagactctccagtcagtaattgtgttggatgtggaggaggacgagaatggatctgtgggattgtagcagtaagagagttcctagccagacgagtgagtaagggccacgcatttcctttggaaaaatcagatcgataacggtcataagatgaagatggtagtgcagatccattcatcataggtccataggccaactctggttcaataccattgtcaagattttccaagaactttggacatttctgatataagtgaccaataatgccacattccatacaataatcagggagacgttcatagcagaattcaacccagaattcatcccagactttgggtaatgtaatcatcttaccacggagcaaaggtttcgttatatttaaacgaactttgaatcgtaaaaacggaccccaaccttcattcaatgagtcctcatgaacagtcaaaaattcacccaaaagattccccaaagatttagctaacaatcttgacttacttagaaaaggaagcctataaggttgtacccaaaaaggagaaaaaaccatagattcgggggtgacattctgaagtgcagtaggaggataaagaacaatatgatgattttgaaaatgccaaggttctttatcaagagcccttaatcgatcaccttcacatccaaaacaaagaataaagagacctgagaagtgttccttaatgtttactttaaactagccatcccaatgttctgccatttgacgttggaaagttgtaagccaaactttcttgtgcgtgattactctggcaaataatgaaaattcttcagggggt

SEQ ID NO: 21951 - DNA, 3336 bp, Cannabis sativa
aagacaaaaaaaaaaaaaaaaacccatattttcatatatatatatataaatatatactagatgagagttacgtggcgagccacgtaactattagttttatatatattctagtaatttttgtttaagaactcagtaactaagcaacggcaacaacaatggtaaatatctatttaagtttttcatatttgtaaagattataaatctaaacttttaactttcttgacttttaacttttaactttgtctttcatgtttgtttaaaacttttttcacctgcaacaaataaattattcataagcctgtaagagattacgattagttctatttagaggtgaggaaaactgatcaatctcttttgtccacttgcattgttcttctaaaatcaaagttttaggaattaaataaaccccgcaaagaaaaaaaaccaatgaaactaaatatcttccactcattcttaattatacaatcataggccataaaagtttgattaatagtggatagtacaaactaagattcttattagtgtagaaaattacaggtgagaatattgaattaaaaacttagtttaggagaggtcaatattaggtttgaacgcattccagcgaacattcacaaatagaccaacataacatatggagtcaattggatagtgaaaagcactcactcgattaaaaatgaagagcagagagtgaaaattgaaaactcaacacctggacgaaggtaaaagtagcaactctataatcctcttattcctccgaggctctaaatccaatttcatattcacctcctccttcctcttcagtatatcttcctcccacatccattgtctcattctgtttaaacaagcattagctcttttttcgttctgtaaaaaatatgtatttatctcattcgaacattatagagtcattgataacgcatttaccttgttcacaaaaggtaagttgacaacgataattggaggagcatttcaacaacaatatcataatcagatgtgtggttttttgcaaattgaattgcaagtttcaattatcctcatcagatctttatggttacgattctttcacaccaatgccaaattgccaatcgcacaccaatgcccagttgtcaaaaagatatctgtgaaatccacaataaatatcaaatagaaaaaactgacaattccatattcattaaaagaaatctaataaactttaaaaaaaaaaattaaaatatggtttgttagagaaatatgtgactaagataattttttttaatttaaaaaagattgtttaattttggggtttaattattgagtttatttgttaaggggagataaaaccaacctattaacatcgttaaatttaacagaatattttttttatttttaaggtatattctgttaaaccaagaaataccgttagatagacacttttaatatacaaagatatatatatatacggcatacataacagtataacagtatatcaaaaattacatatatcacacaataaatatgaaccttaatttttaaaaattcccaaatttcataaataaaaatcatcaaatcttcaattaatttaacaaaagtggctctgatactatttattgggatttataaaacactccaaaaatatataaatcaaggatctaaacatattctaaaagtgctttaatatagaaaaccctaattcataaatttatggaacctttgctaagaagaagatgataaaagatgagcggaaacactaacctgaagccattgttggagattacagagaaggttttgatcttccaagaatacactattttcttagatattttctctgatggagaaagatagaattcagaaatcccagtgtttcttggggaacactacctatttatagactcattatataatgagttttgggtatttataatttggcccctcaacaaattataaattaactcatggtatctaaacattatttctatgacaatttaatacccttttgatacccataacataattggtcacttaattttatatcacactttataatagcatatacattatacatatgtgcccacaataggattttaatccaacatatgactttcttgaagaaggtaaatatattactctatttcttttattttttatttacaaatatatttttataagtttctctttttaattttagataattcagagaaaagaaacataacatcaaaggagaataagaaaatgaaaactgtggttattgattaagaaattgtgaggtatatacataaatcatatattagttgtagtttatttttatttttttttattgtgtataaattacttatttattaatatttttgttacatttacgtgtaggtttgtcatcttttggagtggatgaagctagtttaatttatgtcttgaacttttttttttccatcaaatctttagaactttattcctattgtggaagactttgattttactatagagaactttaatatcctatttctattttcatggttgagtatgaatgactaaatgctaagttttaatttgaatatatttatgatgttcttgtgatgcatgcgtctttgtctatttttagaatacacgagtactaataatattatcattttcataggttttcatagtttttacttcttaatattttatcaatgatccataattttttttatttaaattttatagtacatttgaattttatcattttttcgtaacatatataaatattaaagctaaaaaaatattaatcacaacccaatgaacccaacccaatccaatccttatatcattatagtaagtagggttgggctatacgatttaaaaaaaaaagtgaatggttcatagtatccctaagccgtagttattggattggcccactaaacactttcaaatcggccaacccagcccatgtgcaccactaatccaaacctatcatttggtatgacaacctcatcaatgttctcctagctgccaatccagttctacatgctcgaactaaacatatggaacttgatctatactttgttagagaaaaagtacttaacaaggaacttgatgtgagacatgtaccagtcatacaccaactagctgattgcctaacaaaagccattttgagttctagattttctattttgagagacaaactcagagttaaaaatccttcaaatctgagtttgaggggttgttaaagaataggcttttgtatcagttagagttagttgctttcctttgttatattatttataataatataatatatagattaaatatgtgtaataaactaataaaatgtaacatatgacaatgtatattagttgtcatcttttgtaacatttggggagt

SEQ ID NO: 21952 - DNA, 1382 bp, Cannabis sativa
attccagctccagacaatgacgaagggatagccacctctgaggcgtctcaacagaaccccacagctccaggagtttcagtcgctgcaacaccacagacgactctaccaacttccttcacttctccgttcagcagtacactgagtcagcccttttcgttgaggctcgacagaaacaacttccctctatggaagactatggtgttcaccatcataaggggacacagacttgaaggctacattaatggacaaaagccctgcccagatcagttcatcaccacaggtataccaaactctactaaatctcaagtttcggttaatcctgattatgagaactggcttgttcatgaccagttattgatgggatggctttatggttccatgaccgagggtatagcctcagaggtcatgggatgccaatctgcatctagcctatgggctgctcttgaagagctttatggggctcattcaagggctcacatggatgaacttcggaccaagttgcagaccgtgagaaaaggttctgcatctatggctgattacctgaaacaaaagcgcatgtgggccgattcacttgcactggcaggggaaccatacccagaaaaactcttggtttctaatgttcttggtggtttggatgtagagtttctctcaattgttgtgcagattgaagccaagcctcaaatatcatggcaagagctgcaaaacaccctaatcggctttgatagtagactcgagaggctcacgggtctctcaaactcgaacaaactcaatcatacacttggagggccctcagctaattatgctcagaaacctgctcataacaatggtcctcggtacaaaaactcacctcatccaggagcaagaggaagaggtagtcagagaggtcgaggcaggtcaggccggtttggaggggggccaaaactaacgtgccaggtgtgtagaaaatacggccattcagctgcgatttgctataatcgatatgatgagaattttatgggacaacaaccatctaccagccgaaccaaatctggacaaacaattcaatgctctcattgccactcctcagactttgaatgatgaaacttggtacgccaatagtggtgcgagcaaccaccttacatccgatgagggacaaatgaactccaaaactcaatatggtggtaaggaaaagataaccattggtgatggtaatcaactaaacatttctcatgttggtactggtttactcaaagctaatgcatctagatctttatttcttaaagatatgcttcttgttccatctatctctaagaaccttatcagtgtatcaaaacttactagagataacaatgtgtcgattgaattctttcccactttttgttgtgtgaaggaccaggtgacaa

SEQ ID NO: 21953 - DNA, 3528 bp, Cannabis sativa
taatttgctcttgcttatttctgtattgtttcttgttgaaattgtacaggttgaacacattggatatcattcatcaagcctcggaagaagacttattcgtgagtcatttttcaggaagaaaagtacaagtgagtcactcttcgagaggaagtgtgcaagtgctacgatttgaaggaagttcaagatctcgatacttcaaaaatttgattaggagaatagattacaacagttgcggtaaattcaaagagggagtctttatttgtataagtaaatttagttttgtaatcacttgagattcttctaataaatttgattctctgggtgtggtcccgtagaatagtagcaattcgaaaggattcctaataccacatataatctcgtgtgttctttatttaatgttcgctttcagtctttgttagctttttgttcaaacatatcttttttctgtttaaataatttctatgtcttgttgaatatctcaataacaatatagtatttaattaattaattagaataattaatatggtaatcatagaaacagaattttaatttgtattagagcggttcactaaactcttagtgagatcttgcggttatttttcaaataatcaagtttgtgtgaaatgtatttctttgtagtaggtagttcgatatatcgtcctatacttttcaatgtgttgaccttgcttttagccaacaatattgagtctttaaagcagtgaaattgaatgatcaaatacttataaaaaataattatagcaataagagcataaggattttatagaggttccacccactaataatagcaatagcctactctccttatagttgtattacttagaaaattagtaagatcacaagatccgtccaggtgagtttcttaatattctcgagaaagcctacaaatattgcagcaacataataactcttagaaagttgaaaaaaggatccctcttagtcgaatggctacactatttatagagaaaatacaggaggtaataacttgaaaatataggagagatattcaggaaagttgaatgctaaatcccatgattctctcgataaattaaaccccgtaaaataggggctataattaagctacaattgtggagatatttaaaaaaatatctatgtaaatcttttacttgttatgtgctctatccagtggcgcttcaccaggcgtatttgatctactcagagtattgtagggtatgtgaactgctcgaatagaacttgttgaagaacttatacttaactgatttggcactgaacgaaaccctaaacttgcatacctcattcaggtacaatcattcttgatgcatgtcaccttgttgagtgccacgttacttagtgcaaaaattaggataacatttgccctcaagtccgcgttggacctgttgctcgtatgtggacttctctaggttatagaccacctagatgggtgacacacatctaatcccatgtgtcgtggatgtaacataacctactcgtaacatgcgtatcttcccacattgctttagtatctccatcatttaatgctttatttggaaaatcgtacattggagatcgtatagacaattacggggaaacatgcttctaatagttataattcatgatgagcttcaattgtccttttttgtgggggaatgaaattttaaaaccaaattaccctccgggcaacatataaaagaaaaactcaattctctttccacctttttagccatttttcaaaaccaaaactaggcacaagaaccttcttcaaagtgctcaagctttcaaactatgttcaagcaacttcatgaagtttcaagtgcttgacaatcacagtgactatatttttttgacatattcttcttttacatttttgtttatgattgctttgcgaactactgtacttttgcttgcacatcatgagtagattttagggttttgagtttttcacttggatgtgtagaatcaaatcttaattattgatttttacttggatttgcactgattttcttgcaagattgcactttatcttctgctcgaccttttaattttggctctttggagttttggggcattttagagattaaatctcgattattgatttttacttgaatttgcactgattttattgcaagattgcactttatcttctgctcggccttttaattttggctctttggaatttctgagcattttagagccttgaattcatttcatttaaggattctatcaataggatggttttccctattttgatctttgaaacttccttggtcgaagtatttgggatattcttcttttggaaggatgttctaaacttgttcggatactcacctcaatattcttcttctttgtagataaacccaggtgacttctagggagatgatttttaaatagatgacgacttgcttcaacttcttcacaagaatcagtctagacactaggcagacaaatcatcttcatcttcgagcaaattttcctctacttcaagtttctctgagtgggaagttttgagtgactccccagaacttgccatgcaacatcaccattacaccggcgacatcagtggaaaagggtatgaacactttatctgatagttgaacagaggctggagacaatacttgtccgcctcgtggacgtatagggtctgtggtgtagatgtcctagatacaattccagagggtcgtccatggcctttgaggaggaatttcatgcgggaagaaattttggttacattacccaaacacaccatcgagtttgttcctccgtttagggccagaaggatggaaaataccaaacaaacaactcggagggtttctaccgaggatccccacattggccgactcatgaccatggctaccatggagcatgccaaagaacccgtacccattgaagatcatgagaaataggtggatcttaaggtacaagaggatctcgaggggttggaggagcccgagggacaagaagaaataagggtcgttgactagttggatggtgaagagaggaaagcagacttgaatgacaatttgtatgggggttcaacgaagcaggaaaacctatcttgacgccttgcaagatcttcactcttgacgaggactacgttactaaggaattcatagaggatttacctatttttacgaggaacaagtggaaagcatgatgggtatctcctccatccagccttactgccaagaggctgaagaatctttaagacaaaggcctgctcagaggtactgatgtattcttgccccgtgctaggcaactagcccacaattctagtgagggtttttgttcgtggtctagtccccatgccaagcagggcactctgctgcctcttcatccatttttcaaaaggtagcaaattactataagatatgtccgacacaaatcagcccgaatgagttaaatacgtgtctgccttatttgtgctatacatcgatcaaggttagggggaactatcccatcacaacgccaactagttcttcgacttgaagtctaatttgatgaagaacaggttaaggtactttttgtgacagt

SEQ ID NO: 21954 - DNA, 2410 bp, Cannabis sativa
  modified_base (2362)..(2363): a, c, t, g, unknown or other
tttaagttctgaatgtttggactaccacagaatgacaaaaagttaacatcttttatctctcagctactggctagataagtcaattagattagagaataaaaacaatctatgttattttaaatgaaactttcttaaattacagcctaactgttgggtttaccattagtactgtcaaattgatctccatgaattaaagctttaacgttctaaaactcaccacttgatatggaagtcttttcccctgatgttttgtttattataatttttctcttcggcgacatccgataaaattgtttattgtaatttgttttttattctgactcctgaaagctaattttggtgtactggcattgtaggttggtgtttcacttgcgtttgtcatccatgaatcagcaaacccccatattggttagtgaatcaagtgatcctattgctgtacatttgcagattaaccgatggattgaattcataattatacattttgtttctccacgatcactccagtgttccttatcatttgtctggtctaaattaccttctttttagtaaatcctcttttttattttccagaaacttgccatctgatactgtttgttattcaataatttgtaaatttaataaatgcccttgtcccgagtttcctttccctacaaaagatccctcatactataattgctaactttctaatttttggtgttaaatgcccttgtcccgagtttcctttcctttcaaaagagccctcatactataattgcaaactttcttatttttggtgtgtgctgcagctgtgttggggcgtcttccaggtactactgtttatagaaacacccaacaatatcctgaggcgtatacttacaatggaattgtaattgtacggattgattcacctatttattttgcaaacataagttacataaaggacaggtaatatatttcgtcagctgggttgacctccactctgttggtgttctttcaatgattgtttttcagtaaaattgatccgaatcatcaaaattttgtcaggctacgtgaatacgaaactgatgttgataaatgtagtagacgtggaccagaagttgaaagaatttactttgtgattttagagttgtcacgtaagtctttctaatcctatgctttaattataattcttatgggagaattagaaaaaagctctgcgaggtataagaacaggcgtttaggcactaacagaaactttggcattctttcaaattcttacttttggttgctaacaacctgtctgattcttcttactttccaataatggtcatgtactagcgttctaagttttgtttcaatgcagctgttacgtatatagattctagtgctgttcaagctctgaaagacttgcatcaggaatacaagatgcgagacattcaggtcaaaactcctttccctaagcaatgtttgtggaaactgctttgtatttgtcagaagatgattagtctgttttctgtgcagattgctatttccaatccgaaccgagatgttctgctcactctatcaagatcaggtgtagtagaaatgattggtaaggagtggtattttgtgagagttcatgacgcggtccaagtttgccttcagcacgtccagagcttaaaagggacacctaggagtacagatgatccagtattgaatgagaaaccgagtttcctacagagggtgctaaaacaaagagcagatgatgactcctccattgctcaattggagtctggtttcttcagatcgccagtttctgaagatagtaaccctcaattggagccactcttgtctcggaaggcttaaaatttgctgtgatttttttttcttaattttttcctaattgtttttcctcccttgattgcaatgctgtctgtaaattttgcaaggcagggttataattctatcatttttgtaaaaccactccatgtttgattcttgtactattataaacctgatattgtataatataataataagatctaatgtaataattctttaagcacataaaacttatcatactatcattcactattttaaaacccaaggatttctagtagaaattactcaacttacaatggccttaattatacataaccaaaaacaaaaactttaaatttgaacaaacattatacaaacttcttagacattttaaatactcataataacaccatgcatctaaagagaatagcaatatcccaaaatcttagggttctaaacctttgaacaagttaaaattatgattttaacataatgaattcttacaatgcaacttcaaagctctactagaatcaataagtcaatttcaaatcagaggtaattcccaaacttttcacaatacaaaattttttacttttagtcacannaaaatttgtgactaaaagtaaagaaattgtaactaattataaatcac

SEQ ID NO: 21955 - DNA, 2890 bp, Cannabis sativa
aaatgttcaattttagtagaccttatcatgctacaacacccatctaaataattttgttctcacaaatcaaatgcaatcattcccatgtcaactgcttttttcttcaaaatagcttaatccataatattagaagataaagaaactctaacaatatgaattcgaaccaacctgagcacttcatttttaatccataatagcagaaattaagcactaaaagaaattcaataccaagaacaccaagctacgattgttcgcttttaataattcatacttttactatgaatatatatttatatattcatacagagaaagagagagaaagaaatatatatacattgcgaggaagagatgaattaacaaaaagtaataaagtatcgttcacggtgaagagaaaaactagaggtggtaacaacgacgacatcgatggatcggcggtgcgaaggcgacgactacaccagattaagcaacgaagatcgagtgggctacgatttttgaaataagagggcaaaggggagggagattgagtggagagggagagagatctaacagagagggagatcgagtggagagggcgaaggggagcgagaatgggtctcgggttgctggtggcggtggtttggtgcgtcgctggcctgctactcatggttcgatgatcgaagaggtgaaggggagaaatctttgatgtgggttcaaaacttaatgaagacaaaatgataatttcatttgtcaaaagagggtttaacaaaaattaaaatattttgcttcagtggataacacttgctaatattttagtttcggtttctaactgaagcaaaaacaattagtgtccctttttaaccgaagcaaaatgtaaagaaatcttttaaaattttcaatttttttcctcgatttctcttttagtgtcagtcagagagttaaccgacgctaattgagttttcttagcttcggttaccatttgaagcataaaatcactgactatttattgcatcagtcaactatttttgtgtgacgcgttaatcgacacaaattagacattttgtagaagtgtcataatttattctgatatcacctacttttagaacccatcaaatttattatagtcccattactttttataagaatttcgacatagtaacaaatctcaaatagacgtttcccattttaaaaccctgccaaaacacataaaaaatattctgataatatccagtacaattttcataataattatatcagtaaaatagacgcagccacgccgaagctccggcgactaacaacggtggcaccaccacctcacactgtttttgggatatttgagctattggttttaatgcttatgacaagtggagatagagtatggaagtcatcttttcttgaaggggtctgaagttgctcagatctaagccgagacatctcgactccgacgagttattccataatgatgaagggcgagggaattaagctcgaggaccttgggagttggtggtttcaaggctcgtggagttcagtcgtggcctccgtttaccccttttttgaacgacatcggctcggcgtggctacaccgagaaggagataggaacggagagagagagagaaggacatcgagaaagagagaggtgtttggaggttctcgacgggctcatggatatttggtgtttggagtggctcatcgggatgactgagaagaaccacctaggttctgggttctccgacggcgcgcgaggatgtagcaagataaagagagggtattaggagagggagtgagaagagaagagtttagggtatactatattcttctatattattttttaatttttttaattgctgaaactttatttatttatttatttttgttgtactctttaagtgtcgaattataaccgagactaaaaccgacacttatactcaatttttatgtatattttttttttgtctcgattatacttttagtatcggtctactaaccaatacttaaagttattatatgtgtcaattataaaccaagaccataaaatttgggtggtttttagagtcgttttttaaaagaaaaaatgtctctcgaaccgacaccaaaagtctattatttagttgtggtagctacataaattgtaagatgaaaaaatatgtccttataaaaactctgcacatggttgagctaatgcatgacacaccattctgaaagtcaatatatttttttaaaaaaaagaaaaaaatggcactatatactcctcatttgttaaaagaaaataaactaaaataaactataatcaatgtaatgatgaagaaatcttgtacatatattattaagaaagaaaaatgaaaagtagggatcttatttatttattagttgcgatacactgagaggacactcgtacgtcaatcatatacatcaaacttagatattggtagttgactatactattttgacaatatataataaactatatttatatgataattaagaagaaaaggacatagtcgtctcctcgtgtaagaaaatatattaaaagctagaggggaagagtttgaataaacaaagatttgacaaaagtcttcatgattcctccggcatgggtgtaaccgtctccatctttgtaaacagcatcgatcactcgtccgagattgaccacgcgcatgaggacagacatgggcacatctcttggctccatgcactcctcattcatttctttccatgcatctaaaacttgtttcttcaattctttgcacgcttcttcttctcttacattatattgcttcatataacattccacgctagagtccacgtgtcctctatcttgctcaaactaaaaacacaaaaggtttatttctttatttagttattaataaaatttaaataaaaatattaataataatttaaattatttaacggata

SEQ ID NO: 21956 - DNA, 1521 bp, Cannabis sativa
ggaggaactatggtcacgtatggtggcatgtctaagaagccaattactgtatccacttcgtctttcatttttaaggtctcacactttctcttcttgctgcagttaattgcccttcagactaatctatgagttttttgtggtttcatctttcagctttatttattaggaaaaatttataattgttctcatctttatgtctgttactcttttctatttcctacatttgaatgacctctgcatcggcttgttatatcatcttactgaagtccatattactctgtgctttaacaggacctttctctaagaggattctggttgcagaaatggttgggagccgataatgcaaaagaatgtagaagaatgatagattacctcttggatctagcacgagaagggaagttgagatatgagtatgctatctttcaatttcttagtttgctttatcctatcgtttcgcattcctatttatcgactaaagatatatctttttgtgtatttttcttcaaataataatttatgttccaacgttggtgctttgctattacagaatggagctggttccgtttgacaatttcagcacatcacttgacaaggctcttggtaaactagggagccaaccaaaacaagtcataaaattctgaattagcataattgggagtaaggattttcttcttcttctcattattaatggagtaagaatttttcttggggaatgcatctaaaattttctattacactgtacttgaaagagttatgatatgctagactaggagcttcagcgattggaaggattactatatgttatataaactagtgtattgtcacacatgatctaacataaacagacaagttttgtgacaattttcttttaaataaatggtcttgagtcatgataaacatcacctaaaagttgtactctactactagttattattattctttcaaacaaaaaagataattgaattaaacttcttccaagtataataatcatcaaagaaagcccatctccacggcattggtgtagtggcaatggtccttgagttaggaggtctgccttaggcagacttccaaggtttgaaccgctgcaactacaaaaaatgctctgttgtctgttgggacctagcgtcgggtccccgtggtatcccaagaaagaaaaaatattgttaaagaaagctcaagaggaaaattgctgaggtagctctgccatcactggcgagctcctaacggaagacattgccgaagagaagaaagaaggtttttattggcaatgggttgttcaggttgtcacgagatgtattgttgttgcttgattttggatattacactgattttaatattttcttgtggacttgttgatttttgaaactctgagcgtttgaaagttaatgaatctaattttatttccccctttgtgtgatttgggtattacactacgattgaagatagcgtctcaagaaactgtctcaatattttttttgttggtctggctagaatatttatgtagctttttttttttttttt

SEQ ID NO: 21957 - DNA, 2189 bp, Cannabis sativa
ttattatcatttttttttatgaatcattgaatttcattgcacaaacttcctttacaacctaagcactcctttgaaaggatgcacaaatgtatacataacaatatttacaagtattcaaaccatcttctatcttcttgctcgattttctttggcaagacacaagtaattcttgttttgatttgccattttagttcctgaatgtgcatctgtctcgagttctcctgccatattttatcatttctttgctgccatatgaagtacaccaaaccaacaataatagcagagaaaacctgcttcctgaacctactcctctttgatttgccaatgcacttgattagtgttaacagatctgttgattgagccttccaaccaacccaatccttcatctgttgtaacatgtcccctgttatgctgcattgcaaaaacagatgagtaatacattcagtttggttgctgcaaaaacaacagtcttcatcagctgctattttcattttctttagtctgtctcttgtcttgagtctgtccaacacaaccatccagagaataaagctatgtttgggatgattgagcttagaccaaacctgtttacatcagtgaattctttctagaggctgttgtaactttttgtagccctctgaaatcttgtattcaacaaccataatctgccttgaatcccaattcctcaacatctcatcttttatctccacaagcttcctccaataccagctgatatggatggaagccttgtggctccaacaatctccattgttcaaataaacactatggatccatttgacccacaagttgtctttctttgtagctaatgtccatatattcttcatcaaagctgctttattccaattgctgatgtttaggaatcccattccatcttcagctttagaatgacagactttctcccatgccactgctcctgctcctgtcatattgttggaacctttccaaagaaagcttctacatattctttcaatctcaacaatcactttctttggcaatactagaatgtgactccaatacgtgtgaatagtgagcagaacagaattaatgaggattgctctccctgcaaatgaaatgtgtctggtactccaaattttaatgcgggctgtcatcttgtccacaagaatgttacattcattctgtgagattctctttgagcagattgggactcccaggtatttaaaaggaattgtgcttctagtgaaaccagaaagctgaataaccctttgaatctcagattcagccatccctgcacaataaataacagatttgctattatcattattattatttatgaaagataggtgtgtacttgagaaatcgatatttaggggagtgagttgttcaacctaatcggctattgttatattatttcttttttgtttaaaccataattacacgtcaatttagggattagaaaatgtccataggcgattaggggtgggtctcttctcgtgagtttttttttttccttaactatacaagagagatttgagtttttggggaggtggaaaaactcttgggtgtttagagagttcattgggttccctaggttataattcggggtttaaacgcattgaaacattccttgaacgcccagaacaaaattcaccattttcatgcacattcatccacgttcttgaacaatcttggattcaaacgtgtcagagtcatttctaggttaaaatgagattgtgtttaagcttaagggactcctagaagacgtttggacataaagaatgaaagctttaaggccctgaacgaaaatctccattgttggactccatttttaatggtacaccgacgacgaagaagacaacgactttggaccgtcttatttggtgagttatggtcgccttgaggttctaaccaccgtaggaagcttcaccaatcaaaataatgcgtgaaaagcaactgtataaagagttggagctcgtcagcgctggagaagacgactacgccagcataactctggtgaccacgatctgggcagttatgaggatcttgttctcaacaaagaaattcattgaggtgcttgaaggagtgaaaaggtgttcttaacaactgaaggtgagaagagtggacatctgtgcacagggtgtatgttgaaacatacgactttgttgtgggtttgatgttcatgtgcttatgagattttatattatgaattgtta

SEQ ID NO: 21958 - DNA, 3210 bp, Cannabis sativa
aatatgaaatccgtacttagtgcaaaataaaatgcactataagaaaaaatagtacagattagattggatgaacacccttaataaaatggtggaaattaattcgaaacaatatttaaaaaatatggcatgtctctatttgcctattttttatggtatttttatgtctttgaaacttttttatgatattgagtttatcatatttttgtaacacttatttagaaattccatatattatatttgggcacctccctatgaaaaatactttttccttttcttaacttactttatattaattatatttttattaattaaaaataaaaaaagataaatatgtcattcaaaaatatataaataaaaaataattttatgttctgacaatagtaatttagtcaaattaagtcaaattgattaccttttttgattatgtaaacaaaataaaataattctgattttctatccggtcagtttagtaaacaacaaaataaaatattatttatgattattttatattttaattcaattcatttctgattattctgattctaattacagtttagcaaacgtgacataaaagtctaaactttaataaaagctcaataaaaaaaaaaacaacaatattattattatgtaataaaaagtgtaaactttaacatatatgaaatataaagatagaagatatgagggtatattcataatggcaattgactatgcctagccttgaggacacaaaccaaggagtgagccctaggtagggtcaggccaggtccctcagacatgtcaacaattccatctgttttcaaatcaaagcattgaattattgaagccaaacttgtatgaacaacttgcaatccaagagtagttccagggcaccctcttcttccactcccaaatggcaaaagttgaaaatgttgtccccttacatccatattcttagcattattacttatttcattcttgtcatcactgtaaaatctttcaggcttgaactcaaatgggctttcccagtgatttgggtccctgctaatggcccaaacattgatcagcagtcgagttttttctttaatctcataatcatcaatactgcatgtttcagaagcttctctgattaatattgggccaggtgggtgaagtcttagtgtttctttaattatagcttgaatgtaaggaaggttggcaacgtctgattcttctactagtcttgtttttccaacagcattatcgatttcttccattgctttcttcatcatttttgggttgtttattagctcagcaagtgcccactccatggtaatggaagacgtgtttgttcccgctacaaatacatcctgatcataaaataaataataaaaatatattaatttctcatcgttgtattcatattatatattttcgtgttcagctgttgttttcatctacatccgtttacaaagaatacaaatatattatatttaaaattatgtcttagttatatgagtgtgtcacgattatttgagtacaatattcataaaaaaaatatatttgaattaaattttatttaaaggtaaatttagttaatgtataaaaaaaaggtagattctatattgagggcaataaatgcccaatatgtggtaatgatgaagaatccaccgagcatttgttcctccattgcaacctggctttctatttatggcgttcttctccctggggtatttttcccgtttcaggaacaggaattcgcatgcgggactgggtgaaatttttgtggaatctaaaaagtaggaatgtaaatactgatgaggttttcctctatgcctctattgttgttgacacgatttgacgtgtccggaatgacaaggtacacaataacagaatggataatgtgaaacaatgtattgattttaattctcactcttatgcagattgcagagattccattattcctatatcatccccgactcacattgctgtttggaacccgccccttccagactggatcaaaattaattgcgacgttagggttggaggggagcatatgtgcatagcagtggttgctaggaatcacctgagcaggttaatttgggtgtttacgaccaaaatggacttctctgatgccctgtgtggagaagctgctgcagtttgcttggcgcttgaggtcgctaaggagaaaggtcaccattttatcttggtggaaagcgattcaaagatagtgatcaacactctcaacggcttggatccccgatgggaaattgaaaactactctttattatttaaaaagtatcgctgcttcctttgcttcttgtttattttgttattcggctagatcttgtaactttatggcccataatgtggccaattgggcttttacccataacttatatggttgtattgccatttctactattcttaagaacatttgttgtaatgaccgtgaggtctaatgtcttataaatgaacgtttcttttcaaaaaaaaaaaaaagaattattcttcaacttctcccatgattaattgtgtgttaagttaaaatataacaccacattctaattagtgttaataccattttacatctgtattttataaataattaccattcaatttttttactttgttaaataataaatttgatcttgtatttttgaaataattcaaaatagtacaatgagtttaacagcaccaactatgcaaaaaaaatataactagtatgattataatacattaagttcatgttattattaaggtttttttaatatattaatttattagattattattaagttttattttaacgaaaatcaacttaagatattactttgtattattttgaaaaatacagatatcattatttaacaaaataataagaaatttaatcaattacttttgcaaaaatacaatgtcaaaaatatacttacccttataataatattgtataaatgtgtgttaaactatataagaagtttttaaaaaaattaaattagataattattatctaagtaaaatatatttgagatcatcaacactatatattttaaatgtcatagtattttccaacaaacaattttttctactttatttttcaaaataaataaatttagcttttttaattttactttaaactcttatataacattatgcattttctttaaaatacataatcgaaatttcttttttttttttttgttttatatctttatatattaaaagtgtctatctaacgacatttcttggtttaac

SEQ ID NO: 21959 - DNA, 5816 bp, Cannabis sativa
aaaacaaaaactttaagaactaaactttatataaatatgattagttttaggttttagggttttatatttcttgttagttttagttataaatttttaaaaaataaaatagcgggtatgggtttgacccgctccttttaggctaacccgtacctgcctgccaaatagcgggttaaaactcaacccaacccaatttttgtgggtttttaatgggtggtttccatgcaggcggattctaatgggtttggcagttcccacggtttagcggtttttatgttgcgacctaggtacagaggagttatgatctcaggcaataggttagtcttttttttttcgtcctatgttctttcactcccattgtttttatactctcttactctatggtttccttcctcgcaggcgtctctcttgtcctttactgcttaacatagggggcttcaacgagtggagatgctcgagacagaactctgtcagaccagagagcatcgtgatgccatggccaataagtggaatgactcggagtctgagctctctcgggtaaagaaggaagctgagaagcaacaaagggctaaccagaagaaaataaaagatctcaaggatgctaacaaggctattcaggctgaggctgatagaaagcttgaggaggccaaagttgacaccaaaaatatggtcaacagaattgtcaggcagtctatttatcaagcttggttagccaatcccgagatggatttgagcgttctgggcaaaggggccaaagagatgcttgcatactgtgagaagaccaagaaagaggagactgaagaggcagatgaggttgaagaagatcaagaagagctagctaaatcagtttttatttttttttttttatatatatatatttaggaaaatggccctttggccgagacaatggttgcccctagtggcattatctttgtaaggaattttgtattgttggatggccagctttgcttatttatgcatttatctttacttttaatgcctcgtaccttatgtttgaattgaatatgtctgttcattgcgttttatttcacaatttaaatatttatattgtgatccaacttatttatactctaggaagtattcccattgttttttttttcatttgatatgtttaagcagttattaatctactatatatatgctgagcagttatcatctgcgtgtaattttaatttgcgagcagttcgatttcaccctgttatatgcgagcagtttataatctgctatatttaaatatttattttttagagcaaacttaaaaaatattttgaataattcacctctggaactattttgtatatctttttgattgcttatatgagtagttatctcatctattcatattttagcttaagtattatttttccatgcatttttgtgcctcgtttgttatacatgccagaataatgtgagcctttaagtatttaacttcgcatgtagctctatgttattttataagttgatctcatttacaacttctattttttttttgactttttcatttctaaagaaaatgttttttaatttcttgacttagaataagcaatgaataacatgtgataaaaatggacaaccaacctgagttagttagaaacagaaaaaaccaatcctaacagaaactaactaacttgccaactcattatcgacacatttttcttctattattccaatactaataaccactaataatagtgcacaaaataacagtgaaactttgttgctaataacttttagccgcagaatatggaattattagcggcggagggctccatcgctaaaacctattttaaaaacttattaaatggttattgtaatttttttattagctgcataatagccttattattttaaagtgatattttgatgatgtgctaagcactcacaacatgctctttatagtagagcttttgtaaaaagaatttagctaaacatgataaaattagcttgcttctcatatcctctagataaattatgtataatacatatgcacttgaattaataaaacttggtctaaatgtagaggatgaatagtctatactttaaccttatttcaatactatataatatttatatatatattgaagattttatcatttaaatatactgaaaaataaaaaatattactaatttaatattgtagaaaaaattacagagaagttgatgtattgtgtaacgtaaaagtttaatataaaatatagagcttataaattttataatgtattttgaatgatctaactatattgtacatacaattaaaaaaataatgtgttataacgcccccacttcaagctcttattgggcccttacacccatagagttatgtctcttatatatgggtacgccactttagttactttttggaatgagaactagacctacaaaccaacatgagtatttctagtgtactttatgtttactcgtacgcttcttggaaaaacttcttaggtgatcacccatcatcaaaattactccaagtcaagtacgttcaactttgtagttctcaagtaccaaaaacaaagatgcaccttattaatataggtagtacctgtaaatccatttaagccctcttcaactgtgtagtctcatgcttacacaatctcagaatcgtcacacttgactttcctaggcaatgtgggattgcacaactcccaatatttttctttgcagatcatgggactttgactgtcacaatcaccctccttttggtgtccgacgtcttcgttgaccacacttttggctaggttaaggttctgataccatttgtaatactactgcttcaagcctctattagacccttacacccacagacttatggttcttataaactggtatattactatggctacttcctagaatgacgattggccctacaaaccaatacgagtgtttgcttcctgaaaaaacttcttagaatgtcacccatcccaagattactccatgtcaagcacacttcgttggggttttatactttaaataaaatctaatttcaatataatattatttacttattaataaaagatcgaagtttaattttttactattgtatatggcttggctcacatgcttttcataatcatttattcaatatataaattttgctaaattctaaacatatagttattcacgattatagtgttgtcactaaagtggaaaataatcgtgaatatatgcttcaaactacttagtcccataacttatcagagcactgaaattacactaacaggataataaccgatctggttttcttacacttgttaaagtggaatgtcatttccaagatattagcaaagtaaacttatatttgatgtatatgatttatatcggactgagccaatattaacagtggaaaatatatcatgaatatattattttatctttttaagttaatatcacttagtttatcttagatcaattgatctcaatcctaaaattattaaactttaagctagttgtattattataatttcttgacttgttcgttacaagcttacctgttggtttagcccatacatacatcttaaaaactcagtagttcaattgagttggagcgttaatcatagatatagaaatctataacttctatgattatttaaaagtaatacaatagtttcctttgagcttggataaacgaattaaatggtggagtacttatttcagtaattacattagtaaactgaatatcatttacaaggagctgagtgtttaaaggataaaatatattgagggataaaatagtaattttgttcccactcaatgtagaccatctatagaggatcattaattagtttgattgaaataatagataatattaattagtttgattgaaataatagataattcatagtgtatctctattgcatatatagagtattctatatattcaaaagggcaattcctagtctataatgaagtcgtgaggaattaataagctaagaaatttactcagtaaattttagatcaacttaatgggagcttaattttataagttcatggtccccacattacctgggatcatcttgatgactcaatcaattgaaattcgaaacttgactatgtttaatttgagaattttcacttagattggaaaaaaattaagaagaaaagagaaattagattttattcgttaattatcacactttatgggttaaattaatgactatatttaaattatattttatttgataattattattaaattaaaattagaatttaaatagtttagatctaatgaatggtaaaatttgaaaaagataaaatacatttaatcaagattagattgaaataaaatggcaaaattaaataggggccaccatatagtttatatgatttcgaccacgggtcatttaatgagcccatttatcatttattttggtccatttaatctaaacctaaactagtgtgagtagtacaaaagcaaagtgatgagagcttttgtcagataagtcattcaatcaaaacttgacaagaaaaagctctctttttttcatcaaaattttgaacttagtctccctcatctctctttgatttttgtgccatacactgattaaatacactttagttagtgtgatacttaggtcttcgtggaaggctgtatagaagagtgatcaaattaatagttcaagttttaagttcatcacttggaaatactctgctgcagaaatagaatcaaaggctagagtgattgaacaaaaagaataactttattctgctacaaccaatgtaaggatcctcaaccttaatgtctctatttaatcattttgtaaaacatgttttacgttattagattatttcgttaataatcaaacatacatgatagtaaattagatcctgataaaataagttctaacgcacttaacattggagttttgctgctaccgaccgaaaaaataacaccttgttgacataggtagtacccatcaatctatttaagccatcttcaactatgtagttccatacctatataatctcagatttatcacatttgactttcttcgggcgatgtgaaattgcacagctctcggtctcttcccttacggatcacgggactcttgactatcacatgtgcaatttcaaaaagacgaatagaaacattatgtaaaacttttttcttaattaatattttgtttttttaattaaaaaagtgaaaatatttttaaaaaacatatcctgtaaaaatattttcactttataattttcaaaatgagaaacatgattttgaaagtttgaattaaaaaaaagtgattttaaaaaaaaattgaatcatttttttctcattgttattttctttcatcaatattttggtgcctgacctgacctgacccagactagacctcgggcccgatctcggatcccaattttggcccaaactcaaactcagattcgcacccgcactcggaccccagacctagacccaaaagtggaccctagatcgcaaatctggaccccagagctgaccttggaccctatatcacgtgcccaggatcccagaccccgaccacagacccctaacctagactgcaaaatccaaacccagaatctagacacagatttggcccccacatacatgagacacaaataatttttattttactttcttttggtaaagggacatatttgtagctttatcatttatatttgcacttgcatgttgtgtggtccacccatgtctctatatgctagctatgagagagccaaggaatttggattgtagatgttggatatttataatcacttactataaaactaggtctcaattaaatatataatactacaaataataataataagatcggaagagc

SEQ ID NO: 21960 - DNA, 2875 bp, Cannabis sativa
cccaaccaaacgcctcctaattagtgtgttttataactataccaaaccaagtaaaaaaaaaaattattttgctaggcttgcagtttttcatttttctctacaataaatacatattttcaaattttatatttcaattaacttttctaaaattataagttttgaatcataatcaaccttatttgatcaattatataaaaagatataagatacatgtgcatgaacaaagaaattatttaatttttttttaagggactgaacaaagaaatttttaaccaactttaccaaaggtgcaaactctgtctaaaatttatgaaataattctaaaaaggttccttacaagtaaaacttatatagcttatactcactctaactcagctatagtttctagctcaacattgtttcctcttcttctaggcaaatcagcaattgttattgcttggcctgtagagccaaaaggattaggaggcatacttaacttttctactccttcaagcatttgaaccacaactttcatacaaggacgatctttagggtgccattgaatgcaccataatcccacaattgccattctcttggcaatcttaccatcatcttctttttcttctacgagattattatagatccattccggataataaacttgactagtgttgtcctctttcacgtcggtaatcttcttcccaccaaccatttcaagcaacattattccgaagctataaacatctgacttgtatgacacattcccgaagtttctagaaaaaacttcgggagcaatgtaccctagagtccctctagcggtagacattgacaccatactttgatcccttgaacacaacttagccaaaccaaaatcagaaatcttaggaataaagttgtggtctaacaaaacattatgaggtttgatatcgaaatgaaggattctttgatcacacccttgatgaagatattcaatacctttggctatgcctaaagtaatatccataagtttctcccaacctaagaaatgatcagaatctggtgaagaaatatattgttgaagtgaaccatttggtaagaattcataaacaagagctcttctaaacccgtcagcacaataaccaaccaaacgaaccacattgatatggtgaattcgaccaatggtgccaacttcatttacaaactcttctccatttcctttcaaattgttaaggattttcacagcaacaaagaattttgccgagagttttcctttgtagactactccataggcaccttcacctaatttttcattgaattgacttgtaatatgcttaatatcagcataagaatatctgcttggctttagagctaggtagtcctccaaaaatctctctaatctttgttgattatgtttttcttgctcattagagttgtaagcgcgataagccgatacaagtagcagagtaagaacaattgtaccaaatgttgcacctgcacacaaaatgaaaaacatttaacatgttcaatttttgatctagatatagtctaacataacaataatgttctataaaaacaaaacaaaaaattctcaccaattgccacgaatttcttggtttggcctgcaacaatataattcagatattgtcgttataaagaaattaatcaaaacgagacattgcttggacttggacatagaattaccccaccaagtaaaaagtacaggatagtatagtagaaaactctacaaaatccattaaaaaacaattttaattcctttaagaaaaattaccattttgccccttacttcactcaaaaattaattttaatgcttaggagtaaaattgtttgatacgataatcctacttaatcccgatattccaaatatcactcgtgaccatcccattctacccatgtgactctaatgaccaaatcgtcccatttgcatagttaccgaacaaatatcacaaaaataataaattttcacatatgtcatatttaatagattgaagtttaataaaatttttgaaattaagaaattataagatccacaattaatccatattttaaccataagaaaaagaagtcatggtcatgggacttacttggttgtggatattgataacactcagtttcattttggctaccattgtccttgaatcgacatccgtatccttttacaacttcacaaagagcacaattgggcttaacccaattcatataaatatacttttgctcactaaaagagctgagaagaatataaggaacagaaattacattatacatttttttacaaaatgccaagggcacatattcaatggaggatgaagaataaagagcaataacttggtaaccatgagggctagtgaagcaaggaatgacaatggaatctaaatcttctgaaacagaacagttaaacagtgtatagtcacaaagttcatctttgatgaaacttaagggagaaactgatgagccattgatctttaaaagctttagaaaaaggcaatcattggggtcatataattctatcaactgagatttgtaatctatgtttttcacaaacaagtttactgattttggtagctttagaactgtatgttttcccatgcatgatagctcaaagccggggtagccgcagtgattcggttgagcatctttgagtctgaacgggaatcgaatcgcggggccatttccacatcttgattccttgcattgtgtttgagttgctccaatatcaatggacaacttcagaagtataaacagtgtgtatgaccaagaaattgcagaatttgagagaaaattcatgatcactgttctctcagtctgaggtgagtaaaatgaaaactaattaagactatcttttacacacacacacacaaataaataatgatagtgctatagttgcatatgaaggtgaaac

SEQ ID NO: 21961 - DNA, 2731 bp, Cannabis sativa
  modified_base (2689)..(2702): a, c, t, g, unknown or other
ggtttattgggcaagagagactcttgaagaggatgtttagtagccatgtaagctttaggctttcaaattccattttgtgaccttgttctcattgaccaaaatctgactgataaatcaacatgttgaattacagcagtaaaggtattagcagcagtatgttgagtagcaggtggagccataatatcaccaaaaataactaactcagggaaagagatatgggaagttggtaatgaggaatttggaatagtctgagaagaggcaattcaggttgggattggtaatgaagactctgaaacaaggatataggaagttggtaaaggagattcttgagtagtttgtggattagttgagttaaaaggaggttggggttggtcatttggggtagtgggttgaatggatgtttatggttctgggaaaacagtttgaggagaggcaatttttgggtttaatgttagttgaggtgggataggtaaggaagtattaggttcaggaggtgaataaagtggcacatatgaagatgtagaaccagtggtaaatgaggcaatggaaaatgaaaagggtgtggaagaggatacctaagtagtagatgaagattctgagtgagagacttctatagtaggataacagtgttctttgaaaaccacatttcgagccacatatatccttccatccttattttcacagatgtaccctttgtgatgagaggaataactaagaaataaacacagttgggacctaaaatttgacttgttagtattatatggcataagatatgaaaaataaacacatcaaatggtttgaggagtttgtaattaggtggagaattaagcaatacttcataaggtgagagatggtgtagcactctggtagataacttgttgatggtaaagacggttgtataaaaagcatgccaccagtaacaaagtggtaagtcagagttagcaagcatggttaggccagtttcagttatgtgcctgtgcttcctctcagcataatcattttactcatgatcatgaagacagggttgttgaaagtgaataccttgatccctaagaaacctttcaatttttttgtactcaccacctcagttagcttgaacaaatttgataggtaaattaaattgcttttcaaccaaacttttgaattgaataaaaacctcaaatgcttgagacttcagagttaatggaaatatccaggtacacctagtatagtcatccaaaaaatgcacatattacttgtaaccagctgtggaagcagtgtgacagggcctgtatatgtctatatggatcaatttaagaggttgggaagctcttttaaatgatagagtatagggtaatttatggcttcttccttgttaacaagcgttgcaaagttctagatctttaagggagcctatatggagaagatgaggaggcatggtgcttagggtactacttgctgaatgaccagtgccaagcattaacatctttactaacagaggaataaaaatctataggattactaaaggagtgagctgaggaaaaagaatttttattgatatcaaaatgtgtatatgattcttctgtatgagctacatgattattacaagaatcagtacaatttgagctatcaaaagcaaccgtcttggtggtaagatgacactgcagagctgatccaggatagtgttatgtgtcatctccaagcatgtagagaccctacttaaccttccctttgaggagcacaatctcaatttatttatccttgataaaacaacaagatttatgaaattcaatgaagacatcattgtccttagctagtttggaaacactgacaaggtttttggtaataaaaggaacttcaagcacaaatttcaattttaaaggataatcattattagaaggaatagttgttgtgccaatatgagagattttgagatgcttaccatcaccaatagtaagtgtctcctgtccagtgtagttagtagttgaatgaaaattgtccagttcatttgtcacatgtgtagtagtcccagtatctgcaaaccatgtgtcatcatcaccaaagtttggtaaaactgcgggagtctgatttgtattgtccaattcatatttagtaagaaatgctttgggaggattggagtttaattttggagtaatccaattcttgttaaacctgtagtgacacacaactacactgtgacccatgtgcaagcatacttaacaaattagcctgttgaagggagcagaaccacgagagtagcctcgaccaccaattcttgaaccagaattcgtggatgtacctcttccaagagggtgataagcacgaccatatccatgacgagaagatcccatggtaagatattggcctagagctttacagagagatcattaactgaatgatgatgatgatcaagacgactttcatatgcaagaagcaaggcttgaacctcatcaagagtgagaaaatcatttgttgatgttatactagacacaactgaatcatagtccggaccaagaccatttagatgctgaaggatcacatcttgtccactaatctactaatctagcaataatgattgcatcagaaagcatctaaattttatcaacataaccagagattgacaaagcatctttttgaatgtgagaaaattgcggttaaaatctaggaagtatgatttagtacataaataattactgaaatagtaaaattnnnnnnnnnnnnnnaaaagtccttaaatctaataatttcaata

SEQ ID NO: 21962 - DNA, 6473 bp, Cannabis sativa
  modified_base (48)..(54): a, c, t, g, unknown or other
  modified_base (6441)..(6447): a, c, t, g, unknown or other
tttctttattgatattgaataaattggattacattgaaatggagtttnnnnnnnggcataaaacccaacagctgcatccctgggcattgtctccctgtaactgttccgtcactttcatccccaaatatgaccatcttgcccttatctctggtttcccccgtcggcctcacgtcggaatctcgactttttttagggactctcattctcggaatagcagggtcaaaataatttcttatcggaactcctactttgatccatgccccgtagagagggacaacctttccaatgggaggatatgcaaactcctgtggccgatcgcatttcccatatgagtgagccaaatgttcacaggtaaagcatattgctggaagtttatggtacttaaattgtacccattctttcatatcccttgataagttcaagtaaaagccttccactaatctttgattcaggagtatatcaacttgtaactttaaaaatcctctctgcgcgataatggcccctagtgctctatcgaaatcaacatacttgcccaccttcttcgcaatcacatcagtgttttcccatgtgagatatggcgtcagtaaaccatgggcctcagcccagtacctggctttgttcatatcgacatcttcctagcaaccatcttcaggccagtcgataatgttcagtaaagcttcattgaccagccatggtctttttttgagtacctcttttttatcattctcattatcgaagaaaatgccccataagccaggtttcattgtcttcaatcgacatgccccttgtagtttccaaatcttggataaaatttctttcactcaaccccttgctactgtccttcttccaaaggttttagccaaaacacctttccttgtaacttttgcacttagctccacatctgcctccagttcgagggacatagaattgaagaactgctgcctcatttcatctatttcccctgcatcttggagcagttcccctgtatccgttacctcctctggggcttccattatttccggttccccttcatttcctatctcttcttgtataatgggtgcttctgtaagcttgttcccttcctttgcggttggatccatttccagtaaataatactaacgagcgtggtaaaaatcaccagagaaaaagcacagttcggcagtgtccgaaatcacaaatcgtgtatatgcaacagtgttaagttggtaaaagctttttgctactgcaacttcctgatgatggagtttttgttggcttccctatgatctgtgaggaaagagctactccaaactacaacatcagtaggagacatttattgtatttagaaaccactttttaactggttagtgtaggttactctaacctatttaatatttaaccaattttttattatgatgttgaggtcaataatggtattttatatcaattaatgaagggtctaaatgtcaatccacccttttattggcacaaaaaaagtaactagaatatatgtgcatgtgttttgggatagatgttcataaatgggcaccattcatgatatttggacctttatgaacttataattttttttttattattattttcagttgtaaacttatgtattttaaaaaaaaatacttgtgtaattatatttagacttgcccagaataaataaaaagaaatacaaaattttaaaaaaaaattgcatcccatatataatttttgcatggactatcacaacaaataagaataccaattaaattttatgctttggctaaatattgagtaattaatttaaacaatttcaaaacaagcatatatataaattctacaaacacaacacacttgtcatgcaaagcacatataatatgaagcttaaatgagtttgataaagttagtaactaaacttaaaattatagaacacactgcatactttagttgaaggagtgtaaggagtcttgagttgaatcatcatacataaagctactcgtttggctatgctcgatggatccaccatgacttaaacgggaagctcgtcggctagatgaagcaatttgcttatgatgcatggtttgtggtctttgtggacatgtgagtaaattgtgacctgtacccttacatattctacactttctctctttcttccccgattcattatcgtttccatcacttcgaccaccttgttgatttcccatgcctttagttttcacatttaccgaatccctcacaatgtttggattgtcttgatgtccacgagatgattctgacgcttgttcatcttggtttgaggtttgatcgaaagcatccttacaatatgcagtgaggcgtgctatctcattttttacatatgcaaaagagttgtctagtttcgaagcataaatattcaacaagttagtgtccgaattaagggagtcataccttgccatttgtatgagctcgtcttgttcagtggaaccagcttcattgcttgtggttagcgttgtaagctttgcatcattggtccaacgcttcaaaatcaacgaggggggtataagcattatgttcaagtatttcatgcatgcccatatatgcttgcatggataatcgtcagtctcaaacaataaacaatcacagctgaagtggttgttaatcttgtagtactgaaccttgtagcgtatttgcccatgttgaaacctattaaagctaagaaggaggtgatccccaaagtcttctgggttaaaaactacacatgcacgctcatcttttatttgttcgacaactttatagtaaatgtctcgagtgtatatttcagctgcatttttgtagtaaggcctcaccggatctgtgaacggcgacagttgagcagtggttatgaaggttctttgagcttctgtgtgctgcaacttcatgcaagccaaatcaatgcatgagataaattctcggataggataacaagcttcaaggaatttcttcaaggctgagttcattgactcattcctctgtgtagttctcgttccaccacaaaagtgaccctttacaaatgcctctccccatgtgtgcctttcattataactttttgcgcaccactcacttccatgtagatcatattcgtccattagatttttccattccatctcaaattcttcttcggacatgtatttatacattagccttttgaagttagttttgaaatgaggatcacgaacacgtttgaatacattgttacatatatgccatgtacatgaacgatggaatgctccttgaattatcatgtcaattgcaaccttcatggccggatcaccatcagttatcacaactaaaggcttcttattattcatacactttaggaactttgtcagcatccaacaatatgtctcgaggctttcgtcaagtagtaagcctaatccaaatacgcaacttccaaagtgattattaacaccaagtagtataataagaggcttgttacacttgttagttttgtaagtggtgtcaaaagcaagtacttccccgaaagcagcataatctcggcgagagtatccatctgcctagaataaatttgataatctattttcgtcatcgcattgataatccacgaatagttctgggtcctttcttactgcacaatctagatagccaagagccccttcatcatctgtttccatgctctccaatctcctttatttggcaacagcattgtaaacatctttcaattggtaaggaacattttcatagcccccagcttgtagtgcgacatgtgccattatattagatgtcttgatctccaatttatttatagttcttacttgggcaaccattgaatctgggacctcacgattcgatctcaggtaattcatttctaaggcagtggcagtgggatggttgtgttgtatcatgaattcttttgcagtgtaacatgtcttatcccttgaacgcaatattctaaacgccaccccacaaccagttcttgtgataggtttaggtctcctttgtctttcaggcatatcaatatatctttgtcttctaaatccttcactggagcaaacccacctcctcatcgtgataatgtcttcatcatcacggacaacatcatctcttcggacgctgaaaccggtatacttcgcgtatgttgtaaaataaatatttccactcatcgacggatggtaatgtttttcccacaacatcatttgtagtgatttcacatatttttttttgaatcccgaatgcttcttttattggtggccacttgggtgaagaaaaaggatcaacgttggtcattattacaataacttttagacaaagtcagcccacataaaaaatttatatatatatataatataatcaatcaatatacaccctatgttcattattaagtataaatattaaaatttatcaaaaaaagtgtaaatattaaaaaagaaaattgctcacgtctaatctaactctatctctcaaatctatttgtttatcatctctctattacctagaaaatttatttgtaaattcagaagaaataagaaaaaaaaagatttattagtaattttcagtagtccttctttgtttgtctttacacttttgggcttatggattatatattttactcaccatccattttaacttttaactactgatcatggtattgttagagaaggaataaaaactattgcacatgcatgataaaaatagttaattagttgttatctatattctatattttaactcactttttttttttaattttatgtttgtttaaagattttattttattcaaagagatctattgatgaaaaaaaaaaattcaaatacagttatttattttcctttctgatgactggggttcaatttgataaataaaagagagaatacacttctaatccaattcatgcattaaagccacgtaacttgtgttctatatttatttcaaggcgtgtcacatgtttatgtgaaattaaaaaaaatatataggatcaaccttcttggtctcaactattggaaagttacaatgtggaaaagtgaatgaaaataactattggtctcaactaattcaataaaaaaattaatcaaaaataagattttagagaatttaaggtaaataaaacacaagagcaataaactattaaagagaaaggggattaaacctgatgaggatgatggtggggagggatacatgctgccttcaatttatttgtgcttccttcatgataactagaaagtgagtttgttggaaaaaaaagtagaaagtgagttttatgtgtttggtaggttatttaagtagatagtagttgttaggtagacttaattattcaatgtgtaagttaggttaaaagttatttaatgtgtttggtaggtcaatatttgagtaaatagtgttgtttattgaatttttatagttgatgttaatttaaagggaaaagggttagtttcaaattattagacaataaaacaggcatacaataaggacaaataagaaaaataaaatactgtcatttctacatataaaataagttctcaataatgtttgatctttaaagcatgacttccgacctttctgtaagctcattaagtattcaatatttaatttattttaaactattttttcttgttctcagttaagtcattgtccaatagatatatagttatatcgtgacttagtgtaaaatatatggtatactattagattaagtggttaggatctgttatgttagttgccacatcttagggaagttagttattgttgttgtagttagtcttaaccgacttactacactatatatattccctgtaatgcctttgttcaaattaatcaatatcaaatcaattttttctgttttctctcctattatggtatcagaagaaatactctgaagcttcaagaacttaattccaacttcaaagacttcatcaatggcaagaactcgagccactgctaccaccactgtccctcctctgtcagtggttgatgctgatccagctccaccaccatctttgccctatgaagaacactccaatcgaactgatgatccagttcccaattctcgatcacatccgatcgattccaatcaagatcaccgatccaatccgatcgattctcttcccaatcatcgatcacctccgatcgattctctccaacattctcgatccatttctcatgatcgacctgcctatgaagatgtccgttcaccttattatctcagcaatgctgatcatccggggttagtcttggccacaccaggtctcacagatcgcaatttctagccttggacacgcgattttaaactctccatagccaggaacaaaactccatttcttgatggctctctcccttaacctcctccaacagattccttgtttagctcttggattcgctgcaatcaaatggtgatgtgttggattctccactccgtttctcctaaaattaaaagcagcatcatgtatttggacactgctaccgaaatgtggactgtcctctgttgggttttatgcccnnnnnnnaactccatttcaatgtaatctatttt

SEQ ID NO: 21963 - DNA, 4183 bp, Cannabis sativa
tagctcgcatctaggcctatggcactggccaaaatctattgaaaagcatggtaatttttgctttactccattatttgtttgtgcagcagtgcttatattgtcattcctcattaataatttaattatgcgaatgtgatgttgtatgcttataatcatgaaaattgttaatgttttataaaacatttttgggatcattgcttgtgggtgatgtgtttgtttcaagtaattttgtttcgtttgtgttgtacaacttgacttggccaaaattgtcagttaataatacaattgaattcacatactgacatgatttttcacttgttcatataattggtgttgtactgttcactgtaattttaagcttggtcacattaattggatgtaccattcgtggagtacaataggatgcctatccatttttatactagtatttgttttgtgtaataaagttgctagctgatacatttagtatggatgtttagattaaagtttcttttagaattctctgttttttctcttaatcttttttccattatcgaattcctctaatcttgtagaaatagacttattctatgtactaatcagattatgagatacttttttgtttttttccaggaagatcatcatatgccatatttcatggaagagtatgtaagtctgagccttgaacggctacatgttcagggcacaagaagtacccttgaaatctcagaaactgttgttttttgaaaaggaagacaattatctttctgcatcactatcaacataacacattatcatagaaggtatattaagaggatcaaccatagatagatttagcaccctttgtggccccttttcccttaaaatctgatgtgaagttgtttgtacccgatgagaagtggtttgtcggcatgcaaattacttctgttagctcccttttttattacccccaattgtcagcactcttacaattaacttttcactgtggatgcaggaaagttggtgaggttggaggatgtgtcaaagtgggcaacaacatccagttaacagcccacgatggcaaaaagcaacatagtcatcaagcggaaatcttagagcaagagcagatgggtgtcactaatgctttgattaaatggtatattatagtttgctaaaaatagccacgagataatgcagcagacctaagatgaaagatatattagtttagtcaaaagaaacgttgtcctcatgcctaagatgaaatatgccttcataaataggttagccacagttttcacccttggtaatttatatccatctcttcatattgtttctgtgttattaaccttcttaggagtaagttgagattgagaatcaactttctcaggaaacaacatgaagtatgtttgagtttcaagtacctctcttctatctgcacaaatgaagtagagagtctttgtgaaataaagctacaaaaatgccatggatttcttcatcacagagcccatatttctggctgtaattcttctgactagggattactttaggaaaatccaagggtcattttcaagctattgcccatcatgacatacaagttaccatctctgggtcttaacagtatttatcaaaattagttaggataagaggttggttagttggtagttaggaggttttgtatgagctattatatatttagttgggaatgttgttaatctattgtaactaactctaagctactgtatgtagctgcattttattgtaattctattttgattgattcaatacaaaatatagaattctttctctactctatttttttcttttgaactgatatggtatcagagctattattgttgtgtgctcttcttcttcttcatccttcttttgtttcttactgatcgtgtggatcgatactcatggcacgaggtggaggagtccaaactcgtagcactcgtgatttagagaatacttcgaattattcgaacatatatattgttcttggtgaaaattctaaatccattaatgctaatgatctttcgaatcattttttttctttctaatactcatggcacgaggtggaggagtccaaactcgtagcactcgtgatttggagaatacttcgaatgattcaaacatatattctgtttttggtgaaaattctagatccactaatgctaatgatcttttgaatcattttttttcctttctaatggtgataatccaagagttgttctagttcccaaaattctcacaggaagtgagaattacagcacctggagaagatcgacgatgattgctttagttgctcgaaacaaagtaaagtttgtcaatggaagacttctccagcttgatgaggatcatgaagattatgatgcttggtgtcgttgcaacaacgctgtaatctcttggattcttcatgctatctctcgagaaattctggacagtatcatgtatcatgataatgctgatgagatctgggcagaactacatgaaagatttaatgaaaggaatgctccaaggatttttgaagttaagaagacaatgcagaatctcacacaaggatcgaacagtgttatacatactttactcgattgaaagctttatgggatcaggtttgtgaatatagaccacaacctatttgtagttgtggtgctatgaaggttatacaagagtatcaagaagaagattgtcttcttgaatttttggttagactgaatgactcttacagtaatgttagatctcagatcttgatgagagatcctcttcctagtgtcaataaagcttatgctttaatgatccaagaagagaggcaaagagggttaacaagtgggtcagatcgagtagtactgctgaagttgatggttcttcatcaaactcatttgaacaatttgttggaagtgttcaaccatttcgatccaaatataattatacccattgtggcacgaatggatacacaaatgatagatgtttcagattgaatggctatccttatggtcacaagctccatggaaagtttcctaatcgaaatgttaagggacctgaagggaaacttgcttttgctaacttcagaggagctgatgaaaacaaaggagaagatgcaccaggggatatagatcttctgtccaatttttcaagcatgcaatgtcaaaagatgatggccttacttgcttagaaagtagttgataattcaccatccaacatccctgatgtttgtggagggcaaaatctacaatgatcggaatggaaggatcgcgggcaccgacaacctgtagaacaaaggaaaaaaggaccgttgagaccttgggacaccgagatggtgccagccgaagggactccgacgatcaagtcaataaacaattcaaataaagaatatctgaatgtaaataaagaagatagaaaacatatatttccactgtagagcgatgaagaaggactggtaataataatagcaatgtatttcgtaaatgcttgaataagtgttcagatgagatgatcattcaggactcctaggttctccttttatagagcctctgatagttgaattttcctattctgaagaacgaacgtgggaagtggtcttccctttttccaggaggaaggatcgattcttatgcttcagttatagactcgttcctatcctttgtattagattggtcttgtagctgctgggctcgtttgggccttgtattttaattaaagcccaatgcattttggatgagtgggttatatttactgatttagttttaaaggattgtaatcccgatttcgaccgtaagaggcatttgggcctggtacaatttttggccattacaatgattaacctgttgtgtcacattgttttggtaaaattttttttgttcacaactctgaatggatcattgatacaggagccacacatcatgtgtgtcctgacattactttgtttacaaatccctacaatgattctaatctcaaaacttttcttttatctactggtttacacactaagatttcttgtgttggaacaattgttctaacccctgactttactctcaaaaatgtgctatatgttccctcttttaaatgtagcttgttatcttacatataagaatatttctatttgaggaaacatatttctatttaaggaaataagtttctatttaaggaaataaataaataattaattttgtgataaatgaatattttatattcattgaatctggacaaaatcaattatataatattc

SEQ ID NO: 21964 - DNA, 3263 bp, Cannabis sativa
  modified_base (1988)..(2001): a, c, t, g, unknown or other
ttcaaaaatattggtagttattaaatatatttaattataaatattaattttaaaaatattaaaaatcattaaattttaattcaatgatgaataataataataaaaatttaatttatatgcttaattttgttacttaattaaaaaatatattaaaatatattttccttttacattatattaaaaatatatttatatacaaaatatttaaataattttttttgggtcaaaaaaacttttttttctttattttttttgataatagctattcatgtgtaataaagtacatatatataatactagttcttttatttgatatttttgttattttgcatcttatttaactattcattaaaaattgtggaaattactactatacttcgggctacttcgtaacaagaggttagaggtcgaggttgaggctgggctggggttggggccgaggccgagactacttttgtagagtttttgattttttattttcattcatcgtgaaaaatttataggcgctttcttattttatagtatttatatttttatattatatttggttgagagttgtaaatagagttagtaatcattatcaatatcttatggttataataatataaccatcaattgtaacatataatacaaaaataaaaaatcttttaattaaaaaattaatttttttcacaggtcatttgtggtctataacattattaattgagcatgttatatgaacataatcttgttttatttgttttcattatctaattagcatcttaattataataattatatatatatatatatttgttatatgtgattgttgaaggccatgtgtatgtaacatgtattttttattttattttttgttaatataaaataaaagaaaacatgaatatggccaaaaaataaggtctcatgcattttaatataattttttttgcttatgtttatagttttttcataatatacaaatgtcttaaactttttttgtcttttttttttttttttaaattttatattaagatttgaggaatttaaagtgaaaatgtctactaatttatttatttatattatttaaatttatatagaccaaaaatatgattttccatctttataaaccttcaaagtcacatttattaatctacttttaactattacatcttctagttaatttgttttattttaaatctgtgcaacattttggtttatttaactttctttaatatatgtgtattattgttcaaatttgttttattaaactatatttttgtgagatagtggaaaattagagagtctaaaggttgtttgaggctattgtttggcccctatggttcgtttttagttttctatggttaggttggtcaattttcgtctttaattttagttttataccactagtatgattagttttaatggagagatgaacacatataaatcttaatatttatatcataaaattatatatgtcgatatttatgaaatatttcatttacttattaaatatttgataataatcacctttttttattattattttgtatctgttctattggtttagagattttatttgttgatattaaagttttattttaattttttttagagtatttctgcatgctcttaagataaacaataaaaaattgtatataaaagaaaattctcaactatttgcataaaaataatgtagttaatattgttttaatctttattaattttaccctagaaaaaaagggtcaaatttaatctttttaaagtaataattggaaatttatctttacctaaaaaattggcttgatatgatatagtttgattaattaattaggaagatgattccttaacctcaaagaaataaagaatgaattatatagtgattaaggttaatacacattggattcataatttaacttgaggggcgtaatttgaagtatacacaaagaatatattcttaatttataaaattaataataaagataatctccatattattattattattattnnnnnnnnnnnnnntattattattattattatagccttaaaaaaatactaattattttttttaacaaataaaagcaatctttaaagttatatatgactatagagaatatgcatgtccttttaatcaaattaatcacatgtgatattctcaaatgttggtgatgcttaaatctatattcaagtaatcagatttgatattaattaataatttaatacctaattatatatttggaggtataaatttggggtggttggaaagatggagctatataataaatatgaaggtaaacattatttattttttttattttattttattagaaaaaaaaaaggaaattaaaaaaaaaaaaaacaaaaatatatatccaaaaaaatttcggtactaggatctaggatgagcattccaacttgaaacaaatatagatgtgaaactactaaattatatctattactaaataaaaaaactcatttagtaagtcatgttgtactatattatatagtgttagactgtattgtattatattaatattacttaatgtagtattatgtttgatattgtcttgtattaataatttgtgtaaaattatactatatttactataaactcgactctaactctgacctttatccgggtctagggtacgaggtctggataaggggataggtcgggatcggagtctagggtttggggtctggtgttggatttggatccatagtggggccaggattcgtgtcagggttaaggactaggtcttgggtgcgggcctgagtctgggtcgagttcggggtccagagtggagtccaggtccggggccagttcaggttcaaagctagggctcgggtttggggtttggaattggagctgagtttgggtcgaggtcaccaatcccagacccattataaatattataatacaagctaatacagatactttgttatgtattaaataatataatccacattatattaaaatttattgttgtaataattaatacaatatgataccacttttatataacctaccaaataaatccatatagtgtaattttttgctagctatattgtttattattaaatgtttataaaatttatttaattaatatgaattttactattttttttttttaattttcataatcttttgaaataaatcgtttttaaggtttagtttattttcttaacaacaattttcctattatttactcaaaaaatatagtctcacttaaaattataagtggctaatatttattatatattattgtgtgtaacaagtgtgt

SEQ ID NO: 21965 - DNA, 1621 bp, Cannabis sativa
agctatataaatatgtaagtagagagttggttgaatgagtcttacccaatcaagtagattctgagcatcaacgtttagatcaaaggatgagtttctgtggcctgtgatgagttccaaaactaaaactccaaagctaaacacatctgcctttaccgataaatgtccatgcataacgtactcgggcgccatataaccactgttgcaaatcatcaaacacgaaccccattgttaataagtgatcacattctcatattctcttcaatcttattaaaactttgtgaaagaaacatacttggtgccagccaccctagtgttgacatgtgtttgatcttcggggaagagacgggccataccaaaatcagcaattttcgggatccacttctcgtcaagtagaatattgctggctttgatatctcggtgaataatgcaattgtgagagtcttcatgaaggtagagcaatccccttgcaaccccacatatgatttcataccgccttttccagtcaagattatctctttttttggactctgtttcaagacaaccttaatcagtaacttgtagctttaaacttcattggttcatcagttcaagataatgacattatcaatttactgcagactgatttagatgataagctacactaagtcatggggccaaaaaagataggaagtttctcgggttagctcttagaaacttgtggggcacaaactcttagagttaacaggtaaagtcaaggttttaagggccgtccaaatacatggtttgttgaaaaatagacaaacaagatgtgaaagatgggaaaatttttgactcatcaagggcccacaatgttggcatgatggaggaacaaaagtaagtttaagatcttaaatcacatatttagatgaacttgtgtgagtactcaaatggagcatttgaaaggccaattagtgttgcatttcactatttcctttcaaattagtattaccttaacaaaccaatcctaaataacccgaaatccaagaggggtagctcaaatggtcagactcgtggtttgctcccacaaggttcgagtccctctagggtaccaagactagatttagcaatgaggctagcaatataactagagtgcaaatatctatgaataaacaacaatgaatggtgtaactcaatgaaataagtacttcatatcaaatttaacaataatttaggctaagaagaacaggtaagtacaattgaatcttaggcaagcaatttttccagatttttggcagcttttcgatttgagcatgagaacaacattgcatcattaagtgtgattaaatcaatttaccaaacagaaacctggtattgaattagtacaaaattcagtgagaaaagataaaaacttactgaacagaagcttgtcaaggctctcattcgaaacatactcgtaaacaagtagcttctcttcgccgtgtgtacaatatcccaacaaattcacaacgttgcggtgctgcacacgggcgagcagcttggcttcgtttgtgaactcttttctcccttgatttgagctatgagacaacctcttcactgcaatatctctaccatcattcaattttccctgatttgatttcgaatcgaaattcttaaaattagaaga

SEQ ID NO: 21966 - DNA, 951 bp, Cannabis sativa
ctccttgccgtacgcgcattaccatgttttggcagaggggacatcatctaacgaagtgggcccaagcatcagaggatagccacatcactgtaagaagacttccagatgcacctcttaggcttccccattcggatgcgcctccctaaccctcaagagggcggtgttcacttcatctcttggaaggcaaaaagggctttcgagagctggataatcttatcaccagggatgaggctcttggaggtacgaagggttgggtcccacctctggtttggactcggcctttgcatgctagaaggctcaggctgttgatgacgcagatcaggtacatccttaatatgtcacgtgtcattcatctggaaacgtggataacatttatcccttaagcttctagtactttagagtggcggaagcttacagtctaccctccaaatgactctgagcacttttgacacgtggatgtttttgagaaaaatgttcatcttccatatcgtgagatacgaaaaggtgaaaatcttttgtagattagagcttgcattgcgcacgtgtcattgttcagttgactcgtgaaattcatgcattcttggaaagcacttgtggcttgggacatcacaatgacggctatttgatacaagtgtaggtatcaagagaaatattaataatgggaaagcacctcaaatattatatggtacatttaatgcagcccttccatttccccatttgttaaattggcattgtgtttcttcaaataagatttgggcccttaatttgaaagcacacaggtcgccagcccataatataaatacaaaagggggaaactctttcatctcttttacttttacgccatttcaaattcatgctttaagagagaaaccataatactccactttcgttctcagaggatgttcaatcttttcgacattgcaatccaccaccttcttcgtattaaagcac

SEQ ID NO: 21967 - DNA, 3434 bp, Cannabis sativa
cccactaaatcccaattatcttggaagaatgcactcccataaccatcaagtccaggtgctttatccctatcaatggaaaatacagccacttccacttccttggatgtgtaatcaacaagtagtatctccctatggcaatctgtaactttgggtccaagatccactactgattgaaaaaccttccttcttgctggtgtagtagaacctagtaatttttggtaatactcaaggaaagcatgttgaactttatctggtgaatcacaccaatttccatgctcatcttcaatcgagaaaatcctattttggagtcttctcgattttagagaagcatgaaaaatgtgggaattctcatcaccaaattttgcccaacttattttagctttttaagacataaagttggcaaaggccttactgatctcagcatattttttccttaccacctaatcttgttccatcaattctttattatgtggctcttgactcagtttagcttgcaactcagccaattatgctcttgttgtgatctttgtcttgtgtatctctgagaaacttgcctgatcaatctacttcaacacagccttcagccttctcagtttttggatagtgctaaacatttttgaccccctgttttcttctttccaagacttagtcactagcttgtcataatcaggagccattttccacatgttatagtacctgaacggtttttttccatagcttctatcttcataaatagtcaccaagatagggctatgatcgaaacttaactcaggtaagaatacaacttcagaactgggaaagacatttatccaatgtgtattgaccatagctcgattaatcatggaaaatattctctcctctggcttttgtttattgttccaagtgaaaaaggaacctgaatatttcaaatcttccatcttgcaattctccatactgtctcaaaatctccgagatgggaatctatgagctctttttccaattctttcattagcattcattatctcattaaaatcccccatcattatccatggctcatctatattctgtgccaattgttctagctcagcccacaattcatctcttttcttttgatcattaaaagcatagattaaggacacaaaaaacttccctacttgctactgtgattgaacatagctatgtattcattggctagagcaatatctgatatctactgaatatacactaggctgccaagaaactattattcttcctttatccaaccaaggattattgtttgtaaagcaccaacctttaaaaagactagtatataaggttcccatattcttgttttgaaccttagtttctaggaaactaacgaactcagctttcttcgagaagatcaattgcttgatctcattgtgcttttactggttattaatcccccttacattccaacacaaaaacctatccatttgaggaagagagatctccctcccctcatgtattaatcatatttccagcttcatcaccaagagtttcgaacatattctgcactacagtctcctcttttccattatttatcagtattttcttgccttcgctcactttttggaacccatcagcatcgacttgattctccttctctgtgtttatctattttggcacccatatttgtttcccttattctttcttctcttctttcttcctgcaatcttttgtgctatgtccaaataccagaacagttgtaacatacaagtggtatccactcatatttaacttccaattccacctcatgattaaattcatccataaatgcaattttattaggaaagtcatgagacaaacttacctgaattaagatccgagggcattggagtctgtctctattcttggtaacgttgtctacctgtaatggctcccccatgtgactcacaattttaaactgagatgtttccccctagtatttgatatctagacctctcaattgtatccaggttggtacattagtcacctcctccttagtgaaatcatctattggattccaaggtttcataaacattggttttatgtcaaagaaaacatacccctggtgcatcaccttgtctctctgctccatattttgaaatctgatgatgaatatgcctttggtaagaaggccaactttgaccacttcatccttccacagtcttcgaacaaaaccctcaaggatgcttattcaagggttagctttaatgacatagcatactaacaaaggttgccactaattcacctcttctgcaatatctttgaattcgatatcaatcctcttcttcgagcccaggatttcctcagcatctttgtttgatttctcaaacgaattctccaggtttcgaactatgttagatctgagaataaaaggtgaaacctttttcctagagctaacatcctgagcagttctgttagcaattgaaagccaatctgagaaatcatttcgaatctcactctgtctcttgatgactgcctccgattcctcaggtgaaaaaaattctctctacgtactgttccattgcttcgttacattattccattgattcttcagcctcgtcaatctcaagttcttgaattcctagcacaacatccatggatctagtcttgatgactctatccgaggatgttggaccagatttctttcccttagttttccctttctcggccattttcgccttttttgccatagctctagtgagacaccgaaagagagagaaggagcgggaaaaagtttgcacctaaaaaatttattaataattttaattaattatttttgtttaatttctaaattaattatgactgtttaataatgatataataactaaaataaatgtaatcaccgtggttacatatttgatttaaccattgaaatttcctctatatattctcatattgatttatatttatttgtatgttcatactttgagttgtaattctagtattctacgttttgtattctcttatttatttgtattttgagctttgaattgtaatactttatttaatttaatttaatttaatttggtcctctgtattattttgcatagacttataattttcttgatcatcatttatttttcaatttatttatctcatatattttaataatgtaaaccaatacaagtagagaaatactaaaggacacacatagtgcctagcatctttatggggtgtaatatctctattatgcaactcaatatcgagtctcacttattttactttaataaatattataaaaaattgctaaccaattatagaatgatgcttcatcgtagtgctaggcatcataggcaccttatagcaatgctcatacaagtaattccgtatcatatatcatgcgtttattatttatgacattctctttattgatcaatagtattaaaatgggatttattctataataggtattttatgtccaaaattttatatttttttatcttattaag

SEQ ID NO: 21968 - DNA, 2597 bp, Cannabis sativa
atatacatgcagatacatgtttggaggaggagcaggaactatgaatcttgatgaactccaaattcttgaaaagaatctggaattgtggatttatcatattcgttcggcaaaggtaattaatatatatatatatatatatatatttatatatataaaccaataaaatgagattacttataattaatttaattttctgatctcctactcttttaatggctgatagacatttatatttatattagatggacatcatgtctcaagagatccaattgttaaaaaataaggttagtgttcaaaatactttgtattttttttaattatataatgtttagattactgtttaaaatttgttaaactattgtttatcttatatatactttgtaggatgaaattatattgtatattactgcatccctttaaaaatatatatcatattatctgaacttattaagtttttagtttcacagagttttttattattgataacacagataataatagtatggcttttttttttttgaatattaaacatgtatgactaattgttttagtttcacttttatattcaaaattaatttatgatatatggaaaaataatcataaactttttcggatggtccgtacgtagactgaaaatattattaaaatatcaaaacgatatttctatcaaaattttgggaataatataagtaaataaattctcatgtatatatattattgtacataaaggatcacgtcacattgatcaaatgaaacttcttaagcaagtttatttaataaattagaataaaaaatccattcaaataaaaatctatatcgttgttaccttattatatatgtatacatatgatatatattcttttggtatatatactaattaaagaatcatataatggttttgtactgatcaggaaggaatactgaaagctgcaaataagtatctccaagataaggtaacaattaagaaatatataaatatttggataacattgatctgttaaataaagaaagatatatatatattcttgttcctcattttttttttaaaaaacaagaaaatatatatataatgtacaaacacatatgattacagtaaataaataattaattaattaagaaaaaattgttgtgcagatagaagagaacactactactgcaagtgatcttgattttgtaccaatgatgacgactaacaatccatatcccttaaccatattacagaatgggatatttcagttctaacacacaggctatatatgtctttgacgttgttagaaaaaattactatatattatatatatgtataatatcgtttgatatatcgacatatatatatgtacgtatatttataatagtattgttgttgtgtaatattctactactgtttattaattggcgtgtttgctaaattgaaaacaattaaggtatgctttgaattatcaagtgggtgcatgtagccacttgtatcaattataatatatatataataataataatccatgtactataggttgctgagattataaataagaacggcattaatatatatgctgtttcatacatttctacagtttgtttaataataatattctatgtatttgggtttatataaatgatcagcttgtaacttttcattataattttaattgttgttgtataataagtactatatagattatatatgcatgagtgagtttttggggatgttttatgacttacgtacgtacttaacttttttatcaataattgtttgtgaaaagggtatatatatattataaaatgatggggatcgtacagctaattactagtagagatttttatgttttttgaaattttgtattttataaacattaatttattatttaattaattaaatacagaatgataaaattcgtattgaaatagggtgtaaaaactaaaatttgtattgaaattttatacttggtatcaacaatttttaaagattgttactagtatatactatgggatcacgtctaaaaataagatttattaataatataactattgactaaatgagatcatcgagactaaggggcaattgttatacctaaatttcgaccagcaataaaaagctaacatgtgtattaaggttggaattatatgaactagctcaaactgtgcattataaaatacacttaaatgacacgtctcgggaaatatagttaatagaaatattcgaactccctgccatataaaaatgaatacaaataattcatagggtgacatgtatcagttaaaatggagcaacaattttttttagcaaaaagtcagtacacaatataaaatatagccagtaaaaatataataaataacgttcaacagtaaaaatgaaataaaagtgggaaacatagtacgcggcagcgtaaatttctctttaagtaataaatagtataaaataattatttctctacaagttataaaatgagaatctttttacttacataatgctataatttggggtcatttaatataattttcttaaataaaattttaaaaattttaaaaatatttaaaattcagtacaatgtatttttgtaatttttgtgtatttctgaaataattccttaaaatataga

SEQ ID NO: 21969 - DNA, 3204 bp, Cannabis sativa
agtgtcaaattcagaaaagatatacaaagttgttgcaatcttgttgaaaaaaaataaaaatatctctcatgcaattagaaaaatgggtattgggattgtgtcaaatatattttgggttactaacgaagttcagaaaagatatttttatctgacaattttcttagggtaccagtgttaaagttcaaattgtcacatatttttaacactggttacattagaaaaaggggttccaaatataaaaattatgtcgactattgttgaaggttactaacgaagttcaacttaccctaagaacaatgggataccatccacattgattacctcgggatgcttcttttttagctacttgacggactacattctggagataatgcagccgagccacgtagtcttgggtttgctcaacagctgggactggaacctgccgccaagacgtatacttgggatacttataatcacaagtatacttgttttcagtgatgaggccaacaaatctcagattggcttcgttcaagagaaactccgctgatcgaagaccaaaaggaagacccagcagaagcctgcatcactcgaccatctcaagagtgggagtttttctttttgagaccgctgtcaaaagggaaaaataagataagttagcaaggccaaaattaaaatcatggaataatttaaaacaaagttggaacaaataactacttacgtattatgcaaaaaacagttgtgttgattgaggagatgctacttgtccagaagaaatcttccttaaaagcattcttttttggtaacccaacaataatcttacgatcatttgtataagtcccaaaatagtaaaagcctcctgcacaacgtttcctcccagggattgccttgaccgagaagaggtatactatttccaagggagtgggacacacccatcctaaaattttatgcaaaacccttaaacttgcaaggatgaaatagaaaccaattggaatagagctattccaaggtggttgatgaactccttaaagtaatctcccaggaggagaatggctcaagccctgatgtgctcaaggctccaagcgcctatctcagccgagccactagtactttcttcgccactagtttcaccaccggcccccttgcgtacctcgcaagtaagtccttctggtggatagcagctaaattcaccaggagcaacagatctaacaaggcactttcatttctgatcaatgccacaagtccttaatatgccaccaacatagtctcttatagcccttattctcaacttaatgagttcgacatcgaacgtaatgttgggatcttgggaagtctttgacttacgaggcttggaagacattatgtcaaagtctaggtcacctgatgaaaaagtaattgtgactctgggtaaaaataagggcttagccaaaggaatagattattaatttggaggttcaggcaaggtagcatctcacaagaaaggacatttaccctctgttatttcttgtaggaaatgcctataacgactagcaacatcatcctgtagggtttttattaaatggtctctaatttttgcatcgtttatctctaatttggactgccgtttttttgtacgggatggcaagttcactaggatcctctatttctaaggattccggagaataaacttttgaaccagattgagacattctcacaaaaaaaaagaagcaatcccaattcctggatgaaatttatcaaaccagaggcttaagaatatggtaagcctaaaaatctgtgctctgcctaaaccgtaaagttactcagaaaaatttataccaaaattgctaaaaccaagtggaatggcaaaaatgcaaacaatataaatagtgatcaaaacccaagaatgtgaaaaaggaacagaagaattggtcacttaccgtttgaagtcgagttgttgtacgatgaaaagttctgcaaccaaagacggaatgaatggcgtgatgatctttttcagctcttgaggtcgaacaatatatccgagtatactcgcaagaagaatgtcactgacagtgagggcatgcaaagcttcgaaaaaatcaggatgaattttttcgcaaaaaagctcaaaattttttgaaatggccaaaatgatggaaaggtggttcgtttttcagttttataccattgggtttaatcttcatcagaataaaagacaaaggatccaatggatagaaatgagggagaattggaaaatatggctcattaatgttaataatgtgcctcgaaaatataaaccgtcaaattaaaaagcatgcattttttcaaaatggattatgacaaatataccctcagtaatcatttaaaaaacacttttcattgaaaatgactttttaaggggtacttattatacccaaaactcgactgtacttcagaaagcaacacgtgttgatcttagggaatatgaatcaacaaatataatgataattatattattaaatgcaaaatagaacgactcattaaatataaaataaatagagtatgtccgtaactcgctggctgaatagtattaagcaagatagggatatacaaactatcaattcatgtattgatgagaaaccatcttgcctcggaaggcataataccgagagagctataaacaacgcatagcgaggcatctacctccctgtatgtaaagaagtatcgacgaggcgaattcactaataaaacacttagcatataacccacgttataacaactaagtgtaataacttgaaggacatgattgtccagtctgtaagaccttatggtcaaagagcagttcttaaattttcttagtacactggtgctcatgccattgctgaaatacgagtaatccaaagtcatccatctatgtacaaggagagatacctccagtgaggtaccttttgaaggaagtttctattcctgccagcgttgaccgccttaaagatagtttaagtcacagctgtgtgattttcaaatataatttacacgtatttaaatggagcgtatttaaagcctacaatttcggggaatattgttaatttaaatgtaattagtagctgcctacctatattgctataaataggggcagattatacagaaaagggaggacgaaaatcttagagagaaaaagagaagtttactgattttaaaaccctaattctgtatccagaaatatctgaataagatagactcgtggactatgcagagttaactgcaaaacta

SEQ ID NO: 21970 - DNA, 2034 bp, Cannabis sativa
ctgtttattttggagatgcaaaatcagctgtcaaggtaaatcaaactactaatacaataattgtaattagtctttttctttcgagtgtgtgtgtgtgaaatggtgctatagtgcctagcaccaccaccaccacgagatagtatcctataaatggttagttattttctataatcaatactaaagtaaaataagttagacccgatattgaattacatcaataggtgttaagcaccatgagtgtccttgagcatttctctttacacaagggtgttaagaattttcgacaatatttatagatttcgctgcaaagtgtcaagaaaatttatcaaatcaaaattaattctacaaagtaaaacataaagataaatattattttcctaaacaatcctaatttaatttgttatatttctatatacagttctttccagatgctgggtttccatgtcctacaaaaacaaacccaacagatcacttccttcgatgtgttaattcagactttgacaatgtgtcaacttcatcatttctgcgttctaataaaacttctattacagaagaatcagttattattattatttttccttttattgttcagataatttctattaattatgttaaatattaattgttgtacataactaacatatagttttgttaattgttattatttcttaataacagggatctacttcactgaccaatatgaccacacaagatatgaaagaaattctcatccatcagtacaacaattcagaatatgcaacacttacaagacataatatacagcaaattaactctgtaagaaaaattctattcattgccaactggttcaatggccgtctttagggtggagcagctgggactgttgccgaagttcactcagcccaaaaagcctcccaaactctttttcttttatgaatttttttttaatattagtttatttttcaaataaaaaacccaatttttaaactttacccgaaaccccgtaaaagctagagaaggtcctgataggttcagcaatatttaaggacagatacttatttgatatacctggtgttcttctatcgatatacatatttggcatcctatgttttcaataaatttctatttggtccagaagctcaaattcagccaacatatttcttctatgaaagattactttggtctaaccaagtgatcttgactttgtgtttcatgctttttgttcagaaagaagtgattgtgttatcaaacaaaagcaaatcaagttggtggaagcaattgtacacattgacagatcgttcatttgtaaacatgagaagagatgttggatactattggttgaggatggtattctacttgggtgtagctgtatgtactggaactatctactacaacatcaaaacttcatatttggatatcattgcaagagccaagtgtcaagcttttgtttatggcttcatgatttgtttatccaatggaggcttaccttctttcatagaagaaatcaaggtaataatcaaatgctaggaaaaatactaatttagcccatgtgtttaggacaaacacacaatcgatcctgtattttgttaaataataacaaaatacaagtgtcaaatgggtattatctaataaggtgattataatatcattttgtaataataaattacattagaataatgtcattgtaaaccaacataatgaaaaacaatttcatttttcacaggtttacaacagtgaaaggataaaaaatcactatggagcggcagtagtaatgatatcaaattttatttcatcatttccattcttgttggtgactgccatatcaacagggacaattatatatgaaatggtgaaattacatcctggattttctcactatttctattttgttcttaacctattttgctgcctttctgtcatagaaactctcatgatgctcgtcgcatctttggttcccaatgtcctcatgggaatagggattggaactggtctaattgtaagtatacatacactaatatttactattattattattataataattgatgaaaatat

SEQ ID NO: 21971 - DNA, 6753 bp, Cannabis sativa
  modified_base (49)..(67): a, c, t, g, unknown or other
  modified_base (1276)..(1278): a, c, t, g, unknown or other
  modified_base (1668)..(1669): a, c, t, g, unknown or other
  modified_base (1695)..(1695): a, c, t, g, unknown or other
  modified_base (1955)..(1956): a, c, t, g, unknown or other
  modified_base (2107)..(2112): a, c, t, g, unknown or other
  modified_base (4889)..(4889): a, c, t, g, unknown or other
  modified_base (6066)..(6068): a, c, t, g, unknown or other
tgcaacataaaataatttctgatattttattaattagtaaatctgattnnnnnnnnnnnnnnnnnnnttagggtataaaatcccaacaatatatactaaccatgtataatctgacgtggtatactttcgtgaccaccacgtaccgggcatccgagaatacagaaaacaatagtatataatatagtgtatatatagtatacatactataaattatcaattaattatttattataaataattaactattattttgagatatttatttaaatttgaattctaaataaatatcatagttatttatttgaattttaaattcaaaataataactattttaaatatataataataaataataaaataattttattattttatataattaagacaaaataatagagttttgagggatatttttttttttccaaaaaatttaattttgaattaaataaatataattgattttaggtttgaaattcaaattaaaatataacaccaaattaagacaaaaattgtcttaacctaaaataaataataaatgttattttgttaaaataaaacttaaatgataataatgttgttttaaataaagagtttatttacgaataaattaattaaaattgttttaattaaaagagtttaaaagatgtcttacataaaaggttcatttaagaataattaatcaatttttaaattaatttgcaggtttacgatgatcctacaaaattataaaaaatgtccttgcagtggtagagattagttttgtaatttattttctaatttttctaaagattgtaaaattagaaatatccaattattactcggtttatcatcattatttttttattgttattttaaataaatattcattaatagttgattaataacatactcatgcattagtgaataacatgtcatacatagaaattctacacaattatattatcacacatctcatagtagaaacatgatatattaggattgtcatatgtattaatttatatgtttactatttttttaaatcgaaaacatgtaaattggccaagattaatttagaattaacttagtattttaaaattaacttatttatttaaaataattttaaattatgaattaaaaagttaattcaaatttaatgattatgacaggaaatatatttataatttgaggcttttattataaataaattaatcataattattaaagtggttaatatgtattagttctaagaattaataaaacagacacattaatctaaaatagtgagtgggagaaggannncatgtcaatataacctacgacctccattattggtcaacatcgaaagagtattgactgacctcaagacagcttagattttgtctccctaaggaaggtatatgtctataacgttgttcaaggttgatcttgttgggatttatgccctaaaagcaagtaattaatgaataatatattagagaatatatgaaataaaattataagataaatgatacattaattataataatataattattaaatatctaaaaattccttattaatatggagaaggtataatcttgtaaggacatacaagagaattaagattatacgatatgaataaaataagtcagtagtgtattaaagtaataggaatctttaatatggaactgctaagtatggtttactatnnactatacttctagtgtgtgtgtgtgngtgtgtgtgtgtgtgtgtgtgtgtgtgtgtgattttaattcggatcacatatgtggatagacatgtagtaaatgtgttgtgtataattagattatgcatgactggaccaatctgtaataaatatctttcattaatgtgtcgtttaccatgaaagagttattcatatcacaatgataattattagtagatcagcctgaatcctgggtgtacatgaactttaagttctttgattcacttgttaaagtttctcagagaagatnnttcttacaacttctattttgggagcttgataacacgagtggctagaaacatgttatacaatagtggaatccaagctttcctaacagatcgaatattagttcctttatagagttaattctaggagtactaacagttggatccaaatctatannnnnntatagattaactgttcacattgaattgatggtacataaggaatcaagtgagataactagaagggtaaaatagtaaatttgaccaactctaattgtaacgtcctaacctgtagagacgtcacgtgtgtacttttacaatttagtttataataataaactaacgatttaaaagaaaattgtgatttaattaaaaaatttatgtaattattttaaatatataaaaaaaactttggcattgtactataattacgattgggaagcccattttaaagtaaactattaacaaaaattctattaaaattttacaactaacacttatactcttcagagttgacataaaccaaaaacttgactactcgacaccgctgaccggataagctgatatgtacatttgttagggaagacctctaactcatggttgccccaatctagtccttttcttacttgcaccacaaagtacctgtgagtcacaaagactcaacaaataaagcgggaaaaacaaacttataaataacatgtaacaataattaacaatattcttataactagctatataatcaatactaattcaaagtagagaattacagtataacacaacttaaacaatctcaagtaattaaacatccattaatattcaagttcttgtctaataagacaaactatagtcgttacctcataaaataatcattcttattatttttttagtaagacaaccatgatacttaatccaacttccaaatgttaccgtcgttacttgatgagataaccgacaagtgagaaacctaacaacagtttcaattagagtagtactctctttcacattgttgccagacaacccaatagagtaataactcttttcttataaacggtaattacagtaccttattcttgatagcaattgattcacagacaataataatagtatcatatcttgacatgcgatgtggtacgaattaaattttcttacctcaagtccaaatacactcgtgccggttaacttaagtggaaaatactagatgatcccgggccttatgtcacaacaacggtaatctgataaacaacttatttctttaaccgttttaaggcttaaacttaaaactagaagtttgcctatcgataaatagcatggcaataccttaaatatcgataaaacaaaaaatttaggtgttggaaatatcaccccatacagctcatcgttttatatggttttgcctgggaaaaatggtccaccgtttttgtagtattttgtaaaaatgacttaccattttctctatagaaacacccaaacttggggttttcaaacccaactccttctaaacctatccaaacttaaccaaacttcataaatcagtccaataccatgaatagaacataaccaaacacccaaaaatcaaagttacactaaaaacaaagaaccatcatggaagctcaagcttgagtttcaaaactcaaacttgacattcccactctaaacaactactatgatcactaaattaacttcaaactatagaaaataaagctcaagaatgaaatctaacacctcccatactatacagaaatgaattaaagaaaactacacttaaacccaacacttcctactaaattcaagaacagtaagattctagggttaccttaatccgtttccatcaacttctatctgattcctaactgttttccttggtgaattgctgcagaaagatgaaaacttcagcttggttcttggtcttctagggtcgaaggtagaaagagagaaggaaaatgagaaggttgatagcttaggatatatgtctttccttttattttattaaaggcttaattaatcactaaccgtatccaaaattagctaaggatttctagaaattcatctaggacaaaacccataaaacttaagtaaaagactattttacctttactagtttctaagtagatttaagggtaagatggtcataaccaactaccccgaaacaccccaataaaaaacaatactaactaaaacttttcgatataagaaaatctcaaactattactgtcgtgatatttctggccgaatcgagtttctacgattggtgagcctaaaaatattctcattcacaaatatcatttattttaccaacatagcctaataaaatctctataattaataaagtacgcttatttattcacttctattaaattctttaattattacttaattaacttaataagactataatcttgtctatttatacaccaaatatacatatcattccatacttaataaaatatgcattattaaatataattagatttttggaatattacacaaattatgaactaataattgaagggtaaattgcttatattgattatatcaatagactacaagtaagaattttgtaaatataattctaactatagcatgttgggaataaggggggacataatggacgtaaccactcccttggttgggggctgtgccgccctgcctttcgatcgatacaaagttgagtaggccgatcacaaacactacatgtgtgggatcaatcctggtcagggaaggctaagacggtgcctcgcatatgggtatcaagagggcgcttatgccccgacaatggggccttatggggaagggcccaggccaatagggatagcacaccacctacttcaagcgtgtctctgtattgactgaatcactctaagagtctagtcggtggaactggtgaaccacacgagctggttagatgcgtggggtagagggcttgtagtacccccaagtgtaattccatatttatagtggantaataatagaattaataaattagattattctattgattagatcgataataattaagtaattattggagcgaaatataggtgcatggtccccgagtcacccctatacaacactgtacaggggaagattttatttgatgaataaattggagtaagaattaatttctatgaaaaataaattcttaatagcaaaatagtaatttaagaacttattattttgattaattatgataattatgaattgtataattaatattatttaactatttagttttattagataaaactatattccttagttaattataatattattcttaaatatcattaaagagagaaatttattttagagaaaataatatttattttaatcattgtgaaataacagattaataaaaattaatcaattattatttagagaattttacactgggtaaccaaaatttgattttaattatacaaatgtacactgttatttctttgtggaaaataccgatagtttcatatagtattttctaaatgttatcaatcctattcaattggctttgaggacagttactttttcctttttttttttcttttaatcttttgcttagtttttcttattcttttagtttttttgtttataatataaaaaaacttattttttctttaaaaaaaaaactaatttaactattttttttcttgtcacatggctaattatttgaactcaataattatactatcaaaacctactgtttaagatgacctttttaatacgtggaataaatatctttttaccttcatcagaaaaatgatcaaaaatatatgtaattttcagtttttttttatttaattaattaaaaaaaaactttaacaaaaataaaaattaattaaaaaattattcaaactaaattaattttaataagctaaccaatttcatgagttactaaatattttattaattcatatttaaaaattagtttgtatctttactaaacttgtattatagagcaattttaatagatttttaaaattatttataaaagtattaaatagtaccttaaacatcataaaataaattatattttaaaataataaataactattatttagttttgataataaaattaaagataagatttcatatatatatatattattggtaactttttatatttgattataatttattaatttnnnaaatattaattaacatgaaaaaattgctaaaaaaagtaacataaatatatcttaaattagcaatcaatttcatgggtcacttaaaagttttttttttttttttttcaaattttaaagttatacttgtttcatatgaatttttgtgaaatttaaaatttagttacttatctcttaataaagtataaaagaaactaaaatgttacattttatttatatcattttgacatgttggaaccatagatgttttgaccaaataaaaattttggaattaaaagtaattttatagtttcttttatatattttttttttaataaaaaagaagaagtaactggtaacttaaacaaattgtttataccttttaactaatctaattagattactataaattgtttgtaattttacatgtaaaagttactatatgatatgtattctatataaatttattttattgtattatattaaattttatatatctttttactataaaaataaataaactaaaatgtaacataattgtatcttgatcaataatatataggttgaaaatgaaattataatttttaaagttaactacctaaaataaataacaataatatatatgagataatatttttcacaaactaattagtattttagtgtcttatttttgtaataacatctaataatttttaaatatattttattt

SEQ ID NO: 21972 - DNA, 2636 bp, Cannabis sativa
  modified_base (28)..(36): a, c, t, g, unknown or other
  modified_base (620)..(620): a, c, t, g, unknown or other
cataattaaacataaacaactgctaatnnnnnnnnnaactaagcgggctttacaatataaatgccttaaatctaacctcaaaaacctaagtcagtaactctaagtcaaataccctagtcattctttctctctctgctacacgcccaagagggcttcttctcttcatctctctcacatgccttaaggcaatatgactctatcattagagatctgcctactgattcatgttttgtatccttatagagagctatcttagatcctacttataacgatgtcaatagtattatctctaggtatcaatacaacgaaaaagagagtaggtcattacctgctaactaagggggccaaacttttataacaaatctatgtttattactttttcattttatttgtgtaacacgtggcaagcatcagatctatacaacccctgctgtcagttgatcactttttgaggtcaacacggctataatcggaggttcccgaaaattttaaagatgaaaaaaacaataaacaaaacacataaaataatacaaaaataataaaataacattaacaatgaaaaaattatccaaccatccgaccacagtacatgtattcgtagaacctacttcactacggangaatatttaagatattcaaacttatctaacatgcatattccacccattcgaccgaagtttaattaatcgcagtatattcttcaatacgaatgaatatctaatatattcaaactccactaaataaagaattttaaagttttagtgattatacctttctccaataaaaatagctacttgtgcactctacaatcaacacaaaaaactcgatacctataaaatatttaaaatattaaattaaaagcttacttgaacaacatcacactattacctaaacataattaaaattaacaataacttttcaattttttctaagattttaaaatgttgaataaaaaagtttaaagagattacaaagccatagcgtctcaatctttttcaaacaatattaccacaaattaacacctacacaaaattaacaataaataattaattaaattattaaattaaactaagtaaaattaaacttattacattaacattaactagactttattttttttttacctaagttattataatgaattttttccctaactacactaaattttttacctgaacttcaatctttactattttaattttttttttccaaatattttttacacattaaatatttttcaacaacaactaaatttaaattaaatacaataattgcattttttttttaaatacatcaaatttttacacattaaatttatacaataacaactaattaactttaaactaaacacatattcaacttttttccctaaacatacacataaataaatatatatataaaatatatattaatattttttttggatatatatactttaaaatatatatagatataaatatattaataaataaacatatatataatatatagatatcttaagatgagagggagacgtagggatatcggccgttgaagtggtggtgaatgtggaaagagaatgttgcaattttgtagaccgactgtgtgggttcgattgctggggctagagacgagacagtgggagaatggtggtgggtactggaagcgagagagatgagagagagggagagtggtggcaggtaccgaaggtgagaaagatgagagagagggagaatggtggcaggtatcgaaggcgagagagatgagagagagagagggacaatggtgtgggttatatcgctaaggctaggttttgtgggtgtgggttttgcaaggggagaaggtgcggtgagcttctaatattaggtctagggggaaatgaatattatatgagggcaaaataaaatttttgtgggtcttatacccgacaaattaaaatcgttagatataaggccaataaaaaattcgtgcttttaattaaaaaaacgtcacctattttattaactagtgttttaaaccatcagaaatactcaatttatcctgacgattttaaacaattacttaattgttttagcgaaaaatccctaaaaaacgtatttttaggaccgttgtgaattctgacttttgtagtaaggcctaataattcgtaaaatacttaattcttactataatagcccttatatataatattgaatgtagtttgcgaaaattatattaacaaaatattgtgacaatttgttaaatgcaaagtaatagtttttgcatatgtcaaacgataaagcagtggaaacttactattagaaaaaagtttaagattttatgaaaccgatatattctaataaaattttagaaaaaaattatctcctacaaaaatacatcaacaaaatttaaatttaaattatttaatattttttttacattaatttattaaaaatatatattttatttaaataataattgttttattagatatttttttttttcatgttccttactttcaattaaaaaatctttaacgctttttaaatttggaaatcactatatgttgatctaaaaattctagggttgagttgcaaaatggccctaaatttagaaactaagttagtaaatgtccactttttaaaaaaattaagaaaatggccaaatctaataaatta

SEQ ID NO: 21973 - DNA, 6211 bp, Cannabis sativa
aacatatttgatagaaaaacacaattaatttatatatctaatattatttgagattttcaagatattgaaaagacctctgcacaatattagaatctcacgaaactataaccattgttatttaagtacaaggagattaccccaacgtaagattttaaaagaacaaaccaaactatttgtgacatgaaataaatagtaaaatattaaactataggctagtttggaacgtctgaagttgtattgtattatattgaattgaattatatatcatatttttatataatactattttaaactttaatttatattaaaatattatatatttaagtgtattaaaatattatatatttaagtgttcataaaagttaataccacatataattttacataaaatacaatacaatacgacctaatacggaattccaaacgagccatatataaaatataaactactccatttaactaattaattttaagatagaactccataatcctggacaatttgaaccataagtcgtatcaggttcgtccacatagcgatcaaacattcaacaaaataattgaattgattggaggggcattaatcattaaaattgagtttagagtacattatataaaatctacatatcataacttatttaactttttaatgaaaagatgacaatccaaaatccatttcaaaagatgtgtactatgattaaatataaaattttaatgagagaaatgacacaaacagacttcatttcaattaacaaatttgtaatctaataaataattattacttctttcatcgtattagcaaatttctttttttaagaggcagaatagttgtcactgaaacacaacaaaattatgtgaaaaatactttcatccactttgattccaagaaacaattatgagaagaatagtaaagaatgaagagaaaatgatacaaaaccaaaggaagaaactcagaaaccaattcgtttagaaaattgggttgttgataaaatgtaggttctgtgaagagaagagcataatatattttcaatgagtttcataaattaaagtaaaaggtaaagaaatcattttttttctctcattgtgtacaaaatatagtatggctgcaaaggtcattgcaaacacaaaagagatctccatgaattcaaagaagagcataaatgagccccggctataccttaggccagcatttaagcttcttactgtacaatcttgatctctcaagaaactcttataaaaaaaatatcaaaaaaaaaaaaatacaaaggaagaaagaaataagaaccttgttgccaattacgtaactaaagtttgcgaccctctctaaaagcaatgctgaaggaattttgtaggcccttcttagcagggccaccaatagttcctttctgcatcatggccacaaactcgttataatctatgcgtccatcctgcacgaaaataaaacatgggagaaacagtgaggttttggatgtgaaacgaactgaaatgaaagccatatcgaattaaaaaccataaattgtagaaaacaatgcaagccttaaaagagtgcatgcttcatttgagtagagactaagatgtttaaggtaaattcaaccacggaaccaatttaaatctctgaattttaatttatagccattcaattagtgcagtaatagtataatcatcagttaaatacttacattatcctgatcaacttcttgcatcatctcttctaggcggacgtcctctaccccaaactcctcgcaagcatgttgaagctcatcttgagtaatgtagccacttccgtctttatcaaagtaggaaaatgccgcaaacaaatgatcttctctctcaattttgtttaaatgcaaagtggctgctacaaactctccgtaatcaattgttccactgttatctacatctgcctgcaattcaggaagtaaagttaaactaagaatatccaatgtaatattctccaaacaatatatgaatgaaatatttatctatcatatccttgagagttcaccataattaaagaagagaatatcaaattaaaaggcaagtaatatacttacttagattgcttaccctaaacgatatattcttaagtgtaggatatcaaaaggagagcttctcaatagtttaggtttagaatcatcttttaatatacttacttttagctctgagaaaagctcagttttttcagcctctttatttggcatcttaataaaaagagcaaggatatccatttttctaatagtttaggtgcacaaaatcatctttatatgtataggaacttactgcttgcattaaatcataaatttcggattccttaagattagctccaaatcttttcagaccagccttaagttcttcaaaagtgattgaaccactgttgtcagtgtctatcattttgaacatttcttttaggccagcaatttcttcttcagataagctctctgcaataacctgccaaatgagggttttaaaataattacaattcatctattcatttaattaaggtatataacaattcatttatcaaaaacatccagtgacttactctaatagccattttcttaagcttgttcattgcagagaattgtttcaaccgacttaatattgcagaatcgagaggcttgtcaggagccacaccaccaacttgaacccagggatggcctgcaagatatataaacagaaaattatcagtgcaaacagaatgttgtgcctaaaaacaccttaatataaactactatatacaccgaaaatgatgacaagaattattgataaagcagctgaagtgaacaactggcactcttcaaaaagaattacaaacccttaaatttcagtagcaaaatgtacaacacgtaggaatctatgcgccaagatcggataaccaataaaacctgtaattatgaaaacaagccaatgaaagaaactcacacaaaacatcatgtgcagatatccgcctcctagggtctcgaataagcattttccttactaagtctttggcaccttcagaaatactaggccacggttctgttgaaaaatcgaggtcaccatgcaacacttcttcaaatatcccttgctcactttctatgcaaaaacaaggtgaaagaaacaaggtcatataaagacacataaatgaaacatcaatactaaatacataaatgactaacaagaaaaatcaactgtgaatatcctaccagcccagaatggaggcactccacttaacagaatgtaaagaatcactccagcactccaaacatctgcttctggaccataccgcttgcgcaagacttctggtgcaacgtaatatgggctgccaaccacatcactaaatctctctcctgcaaatgggaaattaaaaataagaacacatttcttttcattaaaactctcataaaaagtatgcaacagatctagctctatactatcatacagcctgaaaagtaaagtgtaaaatatcatcttagaaacgtatacttttgtcttgaacatcacataggtactagaataatatacctggcttgaagaaaacagataaaccaaagtcaatagttttgagaagtgcatcctcctgctggttgacaaaaagaaaattctcaggcttaaggtcgcgatgcataacccccaatgaatggcaggcttccagaactccaacaatagtcctagtaaggtcagcagctttcctctctgtgtaatgcccgcgttggataatcctgtcgaacaactcgccaccagcgcataactccatcacaacatggactgccacagcatcctcatatgcacctttaatagatatcacattggggtgcccagccaaatggtgcattatctgaatctccctccttacatcttccacatcatcatctgtgactaacttccttttcgcaatggatttgcaagcatactctttccctgttgccttctccacacacagaaatgttgtcccgaattgcccttggcctagtttcttcccaaaagtgtagaactcttttaatttaccagtttttgtttgcaacaccgaaccagctcgaagtccagcactggacaccctcttcatatgtggggacttgtcggttttcggggattgtggatccttcacaggttcaggtttcggaattatcacaggttctggtggtttgttttggactggcaaaggtgattcaggctccttagatgccacatcatgaacactttctccattagtatgttctgaaacagagtcatctggcgatctgctccgccacattgcagctgaaacggattgaaagaatccattcttgttgatggtaggaccaacacaagtattccccatttaatccaactctttagttcttccttaacagtcttagtttaagtccaagatctaatccaatttaaactctttacacagtacatacgatccactcttcagcatattcaagtcaaaccccttttcacaccaaagttcaaaactttacaagacgaaccataactgctattagataaaaaagaaggaagagagcaattggtcaattacgagtaaaatttcaagagttcaagcacaattctgttcaaatccatgatttacacacctaaattggtataaaaatcaagacatgaaaaacaaataaataaaacccaacaaagaaatatcaatgcttatatttatcaacgatttaatctacaatcactaagcaaagagcacccgtcttataacttttgggatcccagaaccagtcagttaaaaatgcaaaagatcatgtataagtaccaaagatgagaaagtcaacaaacggcagcaaaaacaaatgtagaccaaataaacaaatcaagtaaaagctcaccaagcttgatcaaatcaaagagaagcaaagccaccccatatggataaaagaaaagaaaaaacgaaaacagaaaaagggtatatggtaatggagaaatagagagagagagagagagagaaaaaatgggtcttgagcagttttggtttttttttgaagaatagtaaaagaaagagaaagaaaaagatatagtggggtttggagtttggagaggtttgtctgtactgtgggggtgtgtgtatatttcctttggttctatctctctattaaattaatgggaaaaagttttagtgcttggaaacttggcgaagtaaacgcgtttggtcggacacttcaatcccggagctggacagaactacttggttgatagattcaggcaagacttccctgaccttttcaattttattggcccacttttactccccaatttcctaatattttttttatttttttattttggaaagtcttttttatttctttttttagtccatttcaccctcctaagttcccaacaataaacttgttactcattttatattttttccgatttattactaattaattgttcatttattataagactagggaaaagggaattgatatttcattccaaaattaaattgaaatgagacctatacatacttgctggagcattgctattagcaccagtggtgcttagtactttttcgacatgtcacgtagcgattggctagcgatactctttaaaagctattatattaaattatatgggactcgatacttagttgaaccaatagcgatattgacacataagagggtgttaggcaccactaataccctttagcatttctcatacttgctgctatgttaagtttggtgtaatatgaaataaataattggctagagtagtatgtgtcacattaatctgtttggaataattattgagcatttaagaataagaaacgtgatcgaagctgaagcgatagttgttgcctaagtcaaagcaatagacgaagatgacatgatcggtcgaaaaaaattcaagaatcgatcaatgaaaaattagagaaaacgattactctaataccatattttaaaatataaataggagaattatgaatttttattaactgagagtttgttacaagtagttacataattagtgagagtagtagtagagtataattaactaattaacaattgtaagtagatgtatttctaactaactactaacacgattaatattttatctcttaacaatctcatttaacaaatctcataatatttatgaactcatgtattttaaaattgtcgagtcaaatatatattatacgattgagaagatactgataaattcgcgaataatctaacaacgatcatataatgcatttatagcataaaagatgataaattgaaaaaaaaaaaaa

SEQ ID NO: 21974 - DNA, 1386 bp, Cannabis sativa
gatctcctcgacagtcatttcaaacagcctcattttgggaagatgacgagggtaggtttctgcaaggcaggaatgatcctcagaaaagtctatcaaaactagttcgggtgtttgactcaagtgcttcagagcgcattttaagaaagcaggccaaataaaataagaaggataaggagtggggatacctagggggatcctgagttcacgaggccaggcggaggattcgattaaggcttcgctggaaagaagaaacttgatcgaccgaaactttggatccagggatgtgaccttacgaaccttcttggtaaaaatatctccaataacggtctcctcattttcggcgaaagctgcacgaaaacaccattgttaaaataaacataaaaacatagcagtgaataaaaaaaaagaagagaaagagagaaacaggaaaggcaataaagaggaggaacatcctaacaacaggggcgaaagaagtaccaggagctccccagctccggttgatgaatggggccgtagggtcgttggaaacaaattcaatatggcctttagcaaagaagaacctatccttccaccctttatgagaagtctctaggtctgtaatgagagctcgattcttcttaggacgaagatggtaatgtccttgcttgctttccatcaatgaataaaaatggacaacgtcggatacttcccactgaactcccgccttatcccccaaaactattaaacctaaaaggatagcccacacgttaggaagtaattgagcaagagcaattgagtaatggaaaaggaactccttaattaacttagggatgggtagccttaatctgattttcgactcaaactagtaggagtgcaggcatacccaatcaacttgaggggagtctgccctctcatgcgacgtggggagtctaacctcaactcccaatgggaaaccgaaagaagacactaataaatcgagttctgactatgtcaaaaccgacggacagcttgatttaacttccaaataagaacttcccagagtcgattgtttcctcttatatttcttcagtggaggaaccgctagggtaaccccttcggaagggatgacttgaccaccgatacccgcctcattcccggagcgagaacgggggacgatggaaacactacctaagcactcaacctccgggtccgcgggaacattgacattctcaccctccatgggaggagaatcaaaaaccagcagggatttgacgaacgcaggagcaatactcgaagaaagagagccagaaactggagaggagactcctggataatccacattcgccattataatataaataaaacaaaactcgggatccgaaatttatttaaaacgaggcccaacttaaaacaaccgccccctttacc

SEQ ID NO: 21975 - DNA, 4956 bp, Cannabis sativa
aaacagcatattcaagactcatgataaatgttagaaaagtgaatccacttcagcatggtgtcgtttgtttggaggtaatgaaatgaaatggaaaggaaatcattttatttcattcttttgtttggttgtattttaaagtattgaaatgtcattccaataaaataatttatcattttctattttaaaatgaaaggaaccattccaatgcaagatgttctatttattaattttttttatgcattttaaatttaattccattcctttcctattccaattcgcatttccattcatatacctatgttttgattcttcctaccaaacctaagggttcttcttaaaagtatgaaaaataaaaacattggtaatctactaacgaattcttactcatttgcttccaacacattttgagcctctgaacaatttgtaccaaaagttgtcattcatccccataattgcaactaccaaaatacttttaccaaaataagaaggaaaagaaaaaaaaaggggaaacacctttaaaattctactcaaataaaatgcatatgaaaacacaatactcaatactgaatagggtttcgtactaattgtccggttgattagaaatatcacatttggagtacgattttaaaccctatgttaccaatccaaaaatcactgttcaataaatcatcaccaataatcttattaccataaacagtaaaaatccgaccttgctcaaatgggtagctgagtatcttttaagtgtgtgagatatgatggagtagaggattaaactatggtcctaaaaactataatcatattattttggcaccaaaattgagcgaaaggaattaaatagagaaagtgggagtttgataagatgaaagacctgtggttttgccggttaggcccttgaagatacgatggaagtcgtcccgcttgagaggaccacgtgaaagcaaagcttgaatcagcgtctgatgcttccagttcaactccgtcatcttagatggttcttcggaaccctaatttttgttgttgtaggcttgtagagtagttgtaaagttgtaggaatttggagatatttctgggttagggggaagtaatggggtttaccattgaattggcgggaaccagtatgaaagaaaaagggactacaaccatacttcatcagttgattgcttagctggaccggcccctatattggaaatcccatttaatcgagaaatttagagagactataatattattattatttgtaaaattttaaaatttacgtaaaattctataatacactccctttaatgtattgatgtattcttatttgttttagcatctgaaataattttttagtcaaattttatctcatactcatgtacgttatatctatttaagacattctgcaaaattttaagaaatttagaaaaatttaacacgccgaaaataggattcaataagtgtattgcacgcgtgactattttattttatacgcgtgtgaaataaattgtttgaacgctactttctatattgtaaattattctgaatttctcaaagttttgtaagatatcttaaataactataatgtaaacggatatgagaaaaaattagattaatttttttttataagaaattcaatccaatccaattgaattataacttttaaggtcattaaaaatgcccctgaactattaagattgttggatgtaaggacttttgtctaatttcattcaattttactatttcggtgattgtttatgtactaatacatactactgaaactttgatatctaccaaatcatgctcctcaaactttgacatatactaaatcatgttccttgaactttcatccatgttagaccattttactaaaattagacaaaatccttaaatctaacaatctcaatagttcaggggacatttttaacgaccttaaaaattcaggaagtataatttagtatatgtcaaaatttaagagtcaaaaattctaattagcttaaaaaaaaaaaagttgagctgaaatggaccataaagaagaggcttaggaccatattaggggaccaaactttttctgctcaatgctataatcattcccttgaaacatattaggggacataaaaccagagattatctaaaatataataaacagatgccctgtttagtatttacacaaatattctaaattacatgtgcatatattaactcttactttgggacatgtggattctacttgcaaaagctctatccaccacaccatgtattttaagctccattcatgagaaaattaggtaacaatcttcatgaatttttgtaacactaatgtagaaaaagaaaagttacagaagttacatttttagtactcctcttggtataagactataaccactctgcaagctatgttcagctacagcagatatagtaaattgaacaaaacaaattctcaattgatcattgtagcacatcaaacatgttacaaacagttctacgctgatacgtattgaaaaccgctttctacaagtaaacacttgcaggaccaatccaaatattcaaagaccgattatttttctatgcaatttctctccagtagaaccactgtcatgatggtgatgttcatgatcatggaaaaggagtgtcaagattcctactaaacatagcaccgaaccgacaagaagtttgtcatatcgctccacccagtgaaacttgatctggcttgcaccatagaatgacagagcaaccagagaagtcatcacggctatggtgctgcatttatcaattatgagaattaaacaatagattcacccagatttgaaaatttcatcaggtgtaagtaaattccataaagttgttttagtggcaatgatatatggatgagcttcattgtaaaaaagaaatagacagatcacagatacgcttgacagtttgatgaacagagatatatacatttagattgtagggaacatgagacaaaacttggaaggaaattcataaggtacactaaatgctttcaagaattgccaagaattatatttctcatgatattacgggcttgaaaaaaccgaggatggtataactttagagctttctatagttatttaaatcatgtatgacaaattttctacaaattgataaatatgaatgactgataaatgattccttttgtgaagaacaaaaatagtcagattagtacataatcttagatattcatgaaattctatcattttggccctaatttccagaattcctttaacaaagtcaatggataatcagagtcaaaagtcaaagttacaatacctgaatagcagtactatgatagcaagaaccatcatggaagacgaatttccaacggcaagaaacactggaagtgtagttgcacaaggagacagcgccggcacaagaactagaccagcaacggccattttttccatgggttggttatgagagtgactgtgaccaccctttcccattaaaaacaacagaacataactaccaccaagaactataagcaaaagggaagcaagtttgtgtactgtttcttcaccagcaatggtgtttgccatggttactgctgttataccaagaattgaagtagatattacgtgcaacacagcaccgaatgcagctgcaaacaaaattataagtaaagataagtgcaaaagtaatataactataaaatgcttccaatctgaaaaaggaagaaaatgatctcatcttctaattaaaatatatactcgcaaatattaattaacaacccaaacaacccattagcctaaatctttttgttttggaagagattatctgttatgaaaagaataatttcaaaatggtccaacttgagtgaattcaaaccaatgcaggacaattaaacaggcaactattttctcgtgcctaaacgagccagaagcaacacaagaaaacaaaatataacgcgctaatggagtcagaacttcacatcatcacaataaatgaaagaaaataagttaaaagaataggtgacacatccataaactatagcctctaaaagcttaaactgtggatacaaaaaccacatgtaatgtacttgcttcataaaagttagcgaaagataaaggaaagacaggaacatgagtaatgaaggcaaaaagttaaagaaaactttccatatatgaagcagtaaacttgaacattactaacaattgaatcaatacccataaaccgtgaaatgcttacaattgatagcatagatctggaagtaaaagaaagaacttactgacgagaagagtgcgggaaagagtccatttctgagcacggccgacaatggagaaagggagccaatgcgtgggaatgaaggaatgcagaagcgataccgttgcgattcctccgatggtggacagatcttcggcggtgaaactttccatcgaattccaagatccaaaaggacacgaggaattgggcgttagagaattgaaatttgagtattgattttcaaattgtagggatttggaatgagaaattggattaactagcttactacactacattcgatttgggttaactaactctaaattgggcgttagagaattgaaatttaagttttaggggagaatttatggattgattggagatccgagttacaaataaataaaataaaaaatcaagtttactcatactagaagaagatagatcattactatccgcaactttacctaacattaatgaaaagcttgttttcctaagaatataatatttgtaagcatatccttaaattatataaatttttgtaagtggtcctcaaattatatttttgacaaattagtttttgaattttattcttttggtattttttttgaatgaaagataattattagggtttttttttttttgatattatacctaaaaataattttatttataaaaatacctttaagaaaattatttgtacaaataacgattgccacgtcagcatacatatcgaaattaaaaataattaccgaaaataaaaaa

SEQ ID NO: 21976 - DNA, 2351 bp, Cannabis sativa
ttagaaaatacatggtccattttggcatttaacaaaatacagggtccaaccggtagcttttgcaaaacacagggtccaaaatggtatttaccctaaattatataaaactcaatacttaattagactaatagtaatattaacacataaaaaaaatactaaataacactagtacctttcaatatttctcataaataataaaaatatgggtttaagacctcattataatacttgattacttatattagtgccgttacatagttttttttttacagctgggaaaaaaatttaaatgagaaaagccaccacccttcaaatgattttgtttcttgtttaaccaacataatattatagcttatttcccattaactcttcctatataagttttgttgagtagtctaatttttcttcacaagcaaaaacacactcacaaaactcttctctaatatcaaccaattcaacctaaaaagttatggagagttacaaagtgactatagctttcactattgtacttcttctaactatggccactttcgaagctgctgcggtggaagttgaaagtgtcagagcaattccaccgacaccgatgcaaagctctgcgaaagcattgggtgtttcggttgcacttgcagccatggtttcactacttgcttggttcttctaaactttgattgtttgattatttggtgcctatgttctcacttttgttgagtctctcaaaaatcttatatttgttgtcaatgtataattacttttcccattctcatcaagatcataagctaatgaagtttaaatagaggtctctatctatataatgacaaacttaacataaatctttggctttacatgacatgattaatcataagggtaaattgatttaatagtctctaatatatttaagccaaaatataaaggatctaatagttctaatttccccaatcttttgcttcttttttgtactaatactaataactactagtcaattaatgtgacaacttaagttaattcctattactatgattatcaatccaaaaagggcacaaaagacaacttaagttgttcttcttcatgccaagagttttggactcaagtattgtaaaagttatcgattgaactctctgttttgttaaataataaattgaactttgtatttttcaaaatagtacaaataagaccataaactcaatttttaacaatttttattttaatataaacaaattgatggcaattactagtacgaacaaatgcagaaatcgtaactatttttattataacatctctaaatatcgaattattattaacttttattttgttcatagtactatttttaaatatacagagtctaatttatcatttaataaaatagagtgtctaatcaataacttttgcaaaacacaaaatctaaaatgatattaagtactaacccatgattaaatgaagaagaaaaaaatcttacggttttctccatattttttttggcaatttagtaccaaattggctagcttttaatcaatataaaaaagcttcccaagcttatatttttctggaagtatgatatacatcatatgccaaaataatggtacaaagtagagaacaagcaacactaagattttcaaaatactcctctgcccaaaaccaagtttggaatttaaagacaaaacattagattaccgctgctttatggaaccgaaaagatcctcataagaacgcttgggagcatcatcgcgtgcaacaatctccacgactttgtagtttgcttcgggatgtattaatgcctcaacagcaacttctgcaacctgatctctggatatgctgcctgaagaaagagtgtcctagcagaacgataaacaaaccgaacacaaagaactacattagtacatgtgacagctacaatggtaagttgagaaatatgtttgaacttgtaattttaagtcacctctggctccatcacaacattcccacttggagggtcatttttcaacccgcccggccttatgatcgtgtagtttattccagatttcctgatgtgctgctcggcctgaagcttggctactaaggtgagtccaaagacatttagaaatatgtaagcaggattaagtatttggcccattgcagctccattgactaaaatggagctaatgagaataaatctctttatatttcgtttacggcaagcttcaacaaggttcactgtgccaaaattatccacctatattggtaaaaacataagaagagaaagaagaaacatcatcatcatcatccaaatcctaacattctaaaacaactgaatataatataaatatggtatgagtattgaatatctgaacaccactactcgaatgataagacctttt

SEQ ID NO: 21977 - DNA, 2365 bp, Cannabis sativa
gggcaaaaagtatctagtggcagtgacttgtatagagttctagaccaatgtaaagtgggcgacaaggtaaagtttcatttgtgctgacttatattattctacattatcttcttctaatgatagtttcagaacaaagttggaaaaatctttagagaatttcaattctgactccaaaagtgttttgagtgcataaatgtctttcgcattttaagatatttcaagtcattaactagttggttgagcaagtcatactgtcaaagcatatcatgaataccacgaattataaaacaacaacagtttattcttaattcttatacaatatttgctgataccaatagcatatagtagaatatacttgcgtctttggttggtctggaaaatgagccaggcctaccctcttatgcttagaagttgtttagatttaaaaagctgctttttaatactgcatgttggtaagttggatgtgggtgtggcagtttttgttacacaagtaaattttgccggtagcatatttcatctttaaccatgctgtagactagaggtgaatggtgttgtgtggtctgagttaataaaggcattgtactctatgtatacttctttcccaaattttctcttctgtttatctctttattgtcaatttttttatggcaaaaggggtaaatttaaatgattaaattgactactaaaactccaaatcttacccacatcagtcctcgttaaacttatttaggcatgtttgttggttctcagatatctgtggaggtgttgcgtggtgaccacaaggagaaaatccctgtagtactggagcctaagccagatgagtcgtaacatattgattggactggatttataatacacctcaaaaatgagagatgcattaatcctcactgaaatggttcttgtacatatttttatttatttttgtgtacatactaacactatcaagttcaattgtcattgcatgccaacattatcatgacatttgctttggaaacagcctatattttcatacttttgtttagactccttatattttattgtttagcacttggataatttttatagtgaaacgacaatcttaatttctaactagggcatgataataacaaagacattggtattggttaaattagataaaatgggaaaaagcaacattttcctcttatatttcagcttgtataagtactggtgaccaaatatagctcaatcctgaaaagaaaagataagatacttttacttttagtatgaaccaaaccagtattaagatgttaatttttacaatttgttaaaggagtccgctctctttcctaaagtcttggatttgttgcttttaatcaacaaatctttattgtactattttctagtcaaaataatgtatacacgggtaataattagctcttttttttttttttttatctgtatattttaattttatatacttattacaaccattatatatacatatcttctgataataaaatgatatattttcacgttatatcttttatccacatgttatcagagcaataatttttctattatcttttatccacatgttatcaaagcaagaatttttctcttgttcttcatcattgtcagataataatagcaactctactttcccatcattatcatctccataatcatccacttgaatcaaacaagacacaattgctaatcatgagattattatagattatagaattgggcaatcagaatgacactttgtgcaaaaagcaaacttagtcttgttaatggatccttgcccattgttgaacaaaaaaattcataatttttgggaacttatatgtcaaatttatatatatttaatacagtttttaagtattttgtagaattatttcttaaaacccaaaccaagattcacttaaatcaattagtcatcaaacaaacttaactctcaaaagcaagtattttatgtccgttgacttatatataaatatatatagagaaagttgggatcgacaaattgtattgagcaacattgacgattatattagtttgagttagtgagttaataagttttgagagattacaccatgaaagacttgttgtgattatttccttgtatctcctctcagacttgttgtgattatgttggtttgggttagattgatatctcttattctcaattaataaagaagggtggtagtgctttcaaacttgactaggactaagttcacattaaacttaggatctgaaagtataattctcgtgagttattgtatttccaagccatttagtttcaactgtagtatgatgatttgtttatttttatttaatttttaattgtttaagtgtgatcttaaagctagaatcacaaatattaattcctacaaatcagagc

SEQ ID NO: 21978 - DNA, 5856 bp, Cannabis sativa
tttttttaattaggctttgaaaaagaatattctttaattagcatatcatattaaaaatgtgtaactaataaaattttattttttaatggatttcgttattcttcggttcaaatctaaaatgttataccaattaaataattaattatttttatgaataaatttattaattatatcacttaaaaaacctatgttaaatagtttattattagtttaaattaattaatataattatttgaaagtggaaataaaatgaacataataaagtacgaaaataaataataaaaataagataaaattgaataatttaaaaattatgaaaataaaaagatattcatcacatgtatcaacaaaaagttgaaaattaccaatttatctcatgtaccaaactgaaaaggaaaataattatttatgaattacgtaagtctatattcaatattattattatttaggaaaacaaatatgatcaaaaaatgatgtttaacttatgagaatttacacttcaatggccagaaataatgaaatgatactttaatcaaatgctctttattgtcaaatatattttatatttatgatttgcatatataattggttaaatatgatataataaatatttaatattctatcagtttaataaaattctgtatgtttccgttcatcagttttattttcattaattcttctttaattgcattaattataattttgaatatataattaatattctatcagtttaataaaattctgttttttttccgtttatcagtttcttctttaattgcattaattataattttgaatatataattaaggtgatgtttagttggaagtaataaaaatataagagtagaagaatgagaatataaataaaagtaggaatgaaatagaataaaagaatggaatagtcattgcaccaaaataatgggaaggtcatttcaatactttaatttaatatgcaactaaataaaaaaatgaaataaaaattatcttgaagtacatcataaagtaaaagcttatataattttttataaattctgctaatataaaggcaatgtataagaaagagaataaaaatgttaaaattgacaattacacattgacacagcaaatatcattataagttaaccattataaaaaaaaaaaaataaataaatgcaagaacaatgacaaaaaccatatatgtatacaataataacaaacaaaagaagctatcttttttatttttttgataacaaattatatgggtattataggggtgtcttaacaaattatattggtgttataggggtgtctttgttgtattaaataatataaaataaaatttagaaaataatataaaaagattggaaagaaaaaacaaaccataaattaaaaaaaaaaaaaaaatagatgattggaaagagagtatgccattaaaaagctcacataagattaaatttattttgcatccaaaatatattattctttataagaaatttataattacaacaataaaaaaattctaatggagtataaaaaaaatgacaaacgattgcaagtgtaaacactaatcaaaaaatgataataaatgatatataataatgtctttgttttaaaaagattcatgaagattagtgaaggcttttaagatttttttgtgagtgaacttcagattcttgaaaatataaaaataccgtgtcaaataatatgtattacgtgaatatatgacataaactttaaagaagtattggaacaatataacttttggtaaatactataatataacttttatgaattttggtaatactaatcaaaatactttataaaattaagaaagaaaaatgatatatttcttaacatctcttacaccagtaatggtctctttgcacatcaactcaagaagcctccaccttcactttagtccttcttcatatgtctattttgcttcttcaaagcacttaagtaattattttttgctcacattagttttatggacaacatttcttctttgtctaacaattatttatagtaaaaaccaatgagattaaagaaattcataaaattaaaactgatatattatttataataataattattaaccataaaatttttattttagtaattaatgaaaaactgaaattcaaaaataaatatgataagttacctacgttttttttctttttaatatctatatattcatatagtttaaatgtgatataacttacattatattaaaagtggttttaatttgctaaataattgaaaggtcatcatttaaatcattaaatggtcaacatttatctatattaaaaaaattgattaaaatatatttaaatgtgaaaatttgagaaaataaagaaatgattaagaaactcaactaagttgccacataaactctaataaactttcctttatatatagatatagatactctaagcaccatacaattataggtttagatgctctttattttggaggcagcatagtctaattaatgtttcttgtttttcaagcagccgaaagtagcttatttctttttcttttaagtatactaataccatatatatgataattttatacatatttaattatttatgaaagtatgagtcatattcaaaatcataatacacagctaatctcaaactataatatcgatcgcttataaaagccagatacttgaaataaattattatttattgtccctatataaaatgatgtactagtataaagaatgagtatgtgcatgtatgttcacacacttttacaccaaaaacctacacgatcgatttctctttattatttgtttcgctctctttttttggaaagattatggtgggatgttcttctatccaaaattgtgtttttcatgaggaccaccaacttataagtgttcgctttatctatagttgaaattatctgaaccatatgtacgttgtgttatgttaaatgtttggaatgagagcatagccgtaaatatgtatgtgcttgttaggtctaccctatattttgaaatgattgtgaaaatatgagttctactatattatattatatgcgcttataaatcgtataagagtcgtattgtattaaataacaaataataatatatttagataaaatattgtattgttataattattatgaccataaattttaatataatgtgagtcgtaatatttaatacatacaaaggacttgtgttagtttgtattatattatttacaaagggtctagggtcaactctagccaagactccagccctagactccaaacgcggatctagagtcgaacccgaacctattctcagacctgaatactggacctgaacctggagccagacagccggaccctgaacacggacctcaaaccctggacctggacccagacgcagaccccggacctaaactcagacccagagccaaaccccagaccctagacctagacccgaacctgaacctgcaccttagaccccaaccctggatctcgaacctaaacccagacccaaaccccgaacttgaacctagacccaaacctgacctcagccctaaaccccaaatccggacccagaccccgaactgggaccaggatcgggactgggacgtggacctcagacccaaacctagaccccagacccggccaagacctcgaccccgacctcgaacccggacccagacccaaatcaagaccagcatcaagtccagggtcctagtccaagtctgggtttgggtttgggtccgaggttcagaacccagccccaaacccaggttcggtttcaaggtccaagatctagtttgggtttggagttcaagcatgtgtccggtttgggttcaggcctagagtcaaggtcttggtttggggtctgggtccacggtctcgagtctggatccaggtccgaggtgaaggttaaggttcgggtccttgtccatagtttgggtctgaggtccgtgtttaggtctgggtccaaggttcagggttcaagtccgggtttgagttcagctctaaggtccaagcccggctttgggtttgggtcttaggcatgttttgggtccaagatgtgggtcggggtctgagtccaggccatggttagggttggggtcgagtttattataaagaatttataattttacataacctattagtacaagtcaataccaaacataatattgtattaaataatattaatataatacaataaaattgaacacaatacaatacatcacggtgtaccgaacgagccctaaataaatataggttgtattgtgcccacaattttatagggtacatctagcacaacttgtttttctaatattttttagttgtgcttcttggactaacccttttttcttaaataggctagtctgttttcttatacgggttaaaacttgtgctccatgtttttacatttgtattacaatttaatgagctaactattatattttataaattcaattattcttatataatttttttaccaattattacacacaataaaaaaaataattataattaaaatgattaaaattttaatatcttcaattattttaatttatatgttattgatatataaatattaatatactttaatttttgggagaatttgaaaaaaaaaattgatgttgtaaaagttatttggaaggaaaaagtttttaggtagccaatgtatcagcttgttactcacttgaagcttctcaaaacgggtttgaaaattttgattaggcaaggtaaaggtgatcttattattcaagagaaagattgtcttaacaagatattttttgtgaaaaaaaaaaatcagatcaaaggatttgtgacttaattaagaaaaaagcttgaaaagattacattctagcccacaagaattatatccagctccttagtcaaaaatctaaactagcttggttaaaaaatagtgatgaaaataccaaattgtttcatgtaagtttaaagtatagaagacaacaaaacacaatttattcaattaaagatcaaaaagggcacttggataaacaatcaagtgggtgtcactaaagcctttcttgatttctacaattccttgttgggttctaaatattagtttttagagttcatatcagagtcacagcgaaagtagaaatcagatcaaggttttaagaagaaaattgttgaatccaatatgaaccataaactttggatcttaacacaatataacatgaattaaatctaactacttggaataaagattttacctcttgatgcctatcaatagatctttgaatctttttgtataaatgttcgaacatctaactttatgggcttgatgaagaatccacactagatcttccaaatcagcctcaacattcaagataagagaaggcttatagattatataggatgaataaatttatttcattacagtgtattctcaactcataaaaaactgtaatggcactactacaaaaggaccaatttgtgttggtcaacgtgtctcactaaaatgattgactgagataaaaaaaaaaaataggcagagattttatgcttcagagtataactgaagctgaaaaataccaattagcgtcacttgatactccgatgctaaaagaagaactgagaaaaaaagtagaaattttaaaaattgtcttatatattttgctttggcagaaaagtgattccaattggttctacttcggtagaaaattaaggttaataaatttgccacggttatccactgaagcaaaaagatttaagttttgtaaaatccaattttcacacatatgattttattttgtctcttcgatcccccatttgaaaccctagcagatgaaagcccttttccaaaccctagcacatagccacgtgtgcctccctttcttcctcgttttgaaagacagcctccccccccccccc

SEQ ID NO: 21979 - DNA, 2079 bp, Cannabis sativa
ttccgttttatacacacatatataagtatatataaataaaaaaaaattagttacaactaaacttctttcttttagataggagaaaaacaataataaaacatgttatgtggtgtgtatcctatacaaaataaacttaataattagtttttatacagctctatataaattcacagatagtacaaaatttcaatttaaaaatccacacatatccttctagtttgctctttaccattattctattctaattattattattactgatttaaccaagtcgtcaaatatggcattaataaatttaactacttccattctgagcttggttattattttctcatcatcaaccctagccaatgctcgctttcttacagagaaattattagaaaacaaacaaggcaatgagaatattgctaaggaaagcattagcgatgaaaagtttccatccatccccggaatgccatccattcctaacattccgggattaccatcaattccaggattctcatcaattccaggactctcaaactcaccacctttcttcaatattcctggaatgccctccattcctggaattccatccattccaggcatgccgtccattcccggaatgccgtcatttattcctggatttccatccattccaggaatgtcatctactccaaattcaccaccccttacttttcaaccttctcctcctacttccacacccattgaatttccttcacctccttcttcttctactcctagtttttcaaccccgccttctccttctcctactagtccaaccactccttctcttgctcctggtcctgaaactccaaattctttttcctcgcctattgtttctcctagctctgaaactcccagctctttcccctcatcaccgggtccaacaaattactaagaatatatattatagtaataacacatatatataattgactagtaacatgttgttttggcattcactctgttgattcaataatatatataaatatatccacagggaccacacaaatatatgtaaatgtgtgtaagaatatgtacgtagctatattaatatgtactatatgtatttatatgtaattgcaagctattgcataataatataaatatatggacttttaaataacatgataataatttgtattgtatacaaatcgggctaaatgttcaattttgcataactaaactgtacataatctaattgtgtttgtcaaggcattaattgaatcactacatcaatctataaaatcgtatatcttgtataattttaacttgtgtatgacattaaaagttagattgagtttctaataaatttattaagatgagaagcatttcacacctccctaatggaatagacaaaattatgtccacatctattagcaaaaaaacctattgtaacttccccacatcccaagtaccagatggacataattttgtctatttcattaacgaggcaggcgtgaggcagaagatagttggtgctcgcactatgatcaagacatgatttctaatgtcaagagtagctattcattggcgtagtcgctccaaattgaggaggaagttgtgaattcatccaagttagcgcgctggtggagtatggaatcttaatatgccaccaaatgtaaaaaaaaaatatttggctttaccaatagcaacatgacttatcttccgaaatgggggtatgatacgagacgtagcatgtgtggtttggttggcatggtcatcaggtgtgttaggtgatttttatgctaatgtggcagagctgcttgtcattcatctgggcttgactcttgcgcatcaatttggttttagtttctccattattaatagtgattccactatggcaattggttggattaataagcttcacattaattttggtttcagtctattttattatatattctttattagctgctgttagtagtggttcttgcagcgccattccgcgatcggtgaatagtgttgcccacacgctggcaacctctattactagttgtacacagattttcgttaactaaaattgagcctcacaatattgatctcacacaaaaaaaataaaagatatagaaaaat

SEQ ID NO: 21980 - DNA, 3338 bp, Cannabis sativa
cgccataataggatggacataacgtactaacatgttgggagaccatgaatatgctctaaaacatctttggtcagcctattgggctaacaactaattctctcacgttggacatgtaggccgaaatagccaataattccttaaaaaaaaggattgtgctcttaattggtgattaaggtagaatgggtatggctatggtgtagagagaatggaagagtaaagttcattacacccaagctctcttttctccatatgtgtagattaaaaaagtgtaatcaacatggtcattgaagatcaaggttaagattggaagtatgcttattattatgttaatgcttaaaaattaaatatttgatcttggttaatatgaatatgattggttattaattgttattaattatatgctgaatgtgtaataatattcacaaatagtattagagcttcgacatttaattttagtggttagcataattaaactcatttgtttttatttttatcaatatgattttacataaagaaaagaaaaaaaaacaaaaaaaaaatccaaaaataaaattattggtagaagaagtaagattagatgattaatattaagtttatgtgtgattgagactagatttttcgtttcttttggagtttatttactaaattaaggctcatttattggtcaacgaaaattggcgctgaaagttggtagtttcattgagagtcttgtgaaaaaaaattcaaaaaaaatatcttccctcaataatatttaaattttccaaccacgattgatgataaccctcaaaatgatgacactcaaccaagggaaaactaagtgtcctgggaaagaacacaagaattttcaaaggacaaatgcaactgagaccccgtgctcgagaaaaggaaatgattaatggggttttgaacaaactagagatgagatccccaaaaggacgtagtcaggctgcgtatgatcctacaagatatgtgttattgctggaattagaaaatagacaactccgacatagaatggtagaatcaaattagaggaatgctaagttggagcgcgaggctgtgactgcaagggcaacatacagtgacgcactccctaaccaaccaaacacatccactgggcgacatcaaggaagacctagaggatcgagaaccaaaagaaatgaggaaactccttgagaaggtaaccatggaaatcccgcgaatccccagaatgatcaactaaggagtataagggatatctcagtggacataggaggtccccaaaatctgagtagcactgacaataggaaaactcgacctagtgatccaggaacatcatgcggtaacatgaattgtgggaatgcacaacctaacaatttggaatcatctcgtatgaatgtagaagccagacaaacatgacctggtgatcaggggttcacaaagcatgatgcgaggggtccaaggggacatcctgggttaggacgtccatcgagacaatcacagaggccataccgaaatgaaagagataaaatgcatacctactttacgtcatgtatcaaattgactccaaagagaaagacctacacgataagattctcaagaaacagaaccaagcactggtccaaatgggtcaaggacgtgtggtcagagtagatcaaccaggatacatgcacatgaaaggcaaacaaggagagaagggaatactcattgccattactacgatgaacaagcaagcatgagtaactcgtagagttatcagtctcaatgtctctctacgataagatgagttagtaatattacgacttaagggataaaaggcgatgcaaccccgatcaccgtgaacatttaaactgaaaacaacctaacttacgcaagcatttgaacgtcagtgttcttgattgttgagatcgattaaattagaacacaactaatcaacaacaagacgagcagcaagtcatggatcccatccaattaagggtaatttagtgtgaggataagttcagatgatatcgagatgaagaatatgggaaattgtcagggtatgattatgatgaggaaatagaaccttctcaccccaacatactcaattcccagttccctcaaggatttaagaatcctcatgtcgtgcaatatgacgatacaactgacccagttgcacatttgaataacttcaacactataatgcgatgttttcaacaacttgcattgcatattgatcccaacatccctgattggggtggcaaacagttggtttgataaatttacaaagtattccattacataattaagtgttgctcacttagctagtgtcggcattagcatataatcgatactgtatggtatcaccatcaggctataatgggatggatataacatattgacatgctcagggcccatggatatgctctaaaacatctttcgtcaatctatttggctaagataaataattctctcacattaggtaggctaaattggcccatcattccttgtataaagggttgttgtgttcttaattggtgattaagatggaatgggtgcggctatggtgtagagagaatggaagagtagtgttcatcacacccaagttctctctttctctatatgtgtagatgaaagaagtagaatcaacataattattagatttagagatcaaggctaagatgaaggtatatgtctattattatatgttaatgctctaaaattaaatgtttaatcttagttaataagggtattatttgttgttaatgtttatattgattataacataagtaatattaataaaagagaccgtaaatatagatagataatattaaagtttataattacttttttatttttgaaaacaatcttataattacttttttaataaataatttttaataactactttattttatttattttattgtaataatattgtgggaaagttacaactaaaggtgtagaatatttaaattaattaaactttaaataattaaataattagcaatgacaagatttacaaattacgaataataatcggatagaacatggatgaacagagtaagggaaaactataaaataaaatagggaaaaaaaataaaaaaaaaatcaacaccaagatatatattggttcaagttcgatagatcgatgtaatctatgactctactccagttctgaaacaccaccaaatcattttcattgattgagcaagaataggtacaatatagtagagatcgattctctgatgagttctctcaaagtgtttcaactctcacactcttatcaaaaaatcttcttcttacaaaacccaaactcaatctctctcttttctctgtatctttctctctacctctcaatctctcaatctctctctctctct

SEQ ID NO: 21981 - DNA, 1503 bp, Cannabis sativa
aatgttcacttgcaggtttctttaccatctttctcccttgggttgccatcctactatattcttgcttcctctgaatcatcttctaacctatcacgttatgatggcgtgaggtaatttttcattcctttttattgatgaaaggtgtgcgaaaaaatggtagtttgtagcacttttccgacatgattaaggagtaaatattagatttgttatttttaaaactcgagaacaatgtttccaattagttgcgaagtaaaaagtaaaaaagggggctaaggtgtaacaaaatcattagtgcaacattgttttcgtcctaaattgcacaacaactaacaaagaaccagagaaacaaagtgcataaacttcaataaaaataaaagaacacgagaatttatactggttcggaccagattgtcctgcatccagttttagagcttccccactatcaaaaatcagtcactgtacagcaagtataatacaaaaagaaatatacaggattaccctcaacacagctctgagattcactcttcaattacaccataaaccccttggattttagatcatcttatgccatagcaattgagggaagggacattccaaaactaaattggaatcagtctcccatttttcttgcaataaacacaccactctggagacaacacctgataaaggcctctacttctcatgaacattcagcttctctaatgctaatgggcatccaaacactttgactttagttggtacacaacttttcgaaactgaatgttttctcttgacttttacttaaaaaaatgtatacaggtatggaaatcaagctgctgctgatgaattaaactctctatatggggattcccgagccaagggatttggtaatgaggtaaaaagtagttaattggctagtctgaatcttttttgcaatttgtttgtttggttacgagtgttctgtgaatggagataatctgtcagttatttatctagagtttggtggtgacttgagtaacttgataaataatttgcaggtcaaaatgaggattttaatgggaacatatgcactttctgctggttattatgatgcatattacaagcgtgcccagcaggtagcctgagcattatgccaagttttgcaatatttgaaaccttaactaatttattgacatgtgaaagcatgatttggtaggagtcccctaaattagtacatgcattccaacaccatagtactgaaatagatttgtatcaacaggcttgttaccactcaccagcagataaattgttcttgatacatatgacctacttatgctctcattgccttgattataaatttaggggtagttttattagtgctatggcggcagtgtgtaatttaattgaacatgttattgataaacatgaaaattagtgctaaatttcaaaacttatagtcttgcttgtttcttttttggttatcatattttactgggtgactctttacatatcctttgttggcttaagaggaagttaatgcttgta

SEQ ID NO: 21982 - DNA, 2105 bp, Cannabis sativa
atccgcacaaagagagaaggacaatattacccctattttgtgactgttggggtgttgggtgtaggggcagtttcgggctgccattatttcctacactataaaagtgaataattttaaccaaataattttttgatttcatgagttcaagtttagcaaaataattttaactctacttttaaatttttctccatctaacattaaaactttttatttcttaacactaacaattttaaccaaaatttaaatataatcctaattctaaaaacgctagacatttaatatatttgttttttgttggacaaaatgcaatactcttataaatactaaaacattatgaaatgatacattgttactataaaaaaacaaattcttgtttatatagacaaatggaaaaaaaaaaaaactttcatgactttacaacactcaaagttttaaaagtatacttaattatattgatatcccaaataaaattggaaatctcaattcttaatgatagatcataatttttttactattttatttttagtttgatgcatttaaaaggaccatgtgatacttgtttatttggttattccaaaaaaaaaaaaaaatagaaatcgatgtctaaaattatgaaaggaatagcttaatgttgtagatgagaggattattgtttaagtgatttcactaagtataaggataatatgtatatttatcattctccatatataaataatacaataatatatatatatatatttgtatttacaatgtatataattttaaaagaaataaaaaattaaaactcttcaaaaataatcacagcaccaacatataaaaaaaagaaatatatcaaaatttgataaaaagataacaaaacgacaaaaaataattagtaaactcaaatttgaaagggaaagaaattatatatcttaacaaaaattaagttagtcttctttttaattgaaaggttgcaaactctctgtgtcactgttaattctcccatgcatagacatctacatagttgtgattacatgctcaaatctcgttttaaaatctatatcatcacatatataaaatgatgctctttatatattcgattcacacatatatataatgcaattgccttaatatattttcataatgtacacaaaaaaattcatataaaacattcagtcacaataactaaaaataaaaattacataccttaatattattcataaatatacttataatttggcttcttctcaaccccaagattgataatttttccaaagtaaaatacttaaagttttaagatatatattgtacatatattataatttgagtagaatatattatagtaagaaagttgaaagagttttttctttgaaagaaagttgaatactttggtgataataaaaaagtctcataaatatacaaaagaataataagagctacacaagaatacaacccgtttaattaattcaaggatacaaaaattttcactattgttgtaataaaaatatgtaaaaaaaaaattctccatcaaccatatataacaaagcctcacaaatttagaacccttagcatttatattttacacaaccaacttgtattttaaataaatataattaaaaaaatgtgagttataaaaaataaaaagttactatatttaattgatggtattttattatttataattaattatttagggtatgagttatcaaaaatataaagacactaaataaatatccaactaatgaaagaaacataaaagtggatagcgtatgcccactaaatgttttgaggcagttattgtattgtgttttttttttcatttgtcttcttgatcaaccttctgtaaccaccatcttccttcccaaattcatcttttttcattgttctagtaatcattttctactatacatcacatggattcacttgaatattccatgaattacatacttctccactttgatggagaaaatttcagatttgtcttaacagtctagaaagtagaagctcttgaaaataattatgtatcacaccatacgtgccccctcctctagtcccttggaagccgcctatggtccaagatgcttttgggtgtgtaatagcagcgatgtcgaggccaatctctgatt

SEQ ID NO: 21983 - DNA, 4138 bp, Cannabis sativa
aatgctaaaatttggataacctaagtttttgtggaacgacggtatttacgtgacttttgtgacctcttagattattgctgaatgcagattttaggaaattctaataaagagattaattagagagcaggagatctagaacctagaagatctgaaaagagctagggtaatttgaataatctgtcattcacaacaagaactggaatagtaattaggcattaacaattgggtaaacctatcaacaggattctgttccctatcctctcatttctgattaatttttattgtctcttttagcttcttgaatttttattcgattattgaacttgaaaaaatattgatttgccaaatagaaacatagatttaatctagtggtactcagtccaattccctgtggttcgacctcacctgtgtgagcttactacttgattacgtacacttgtgtattatttataaaattcgtaacaagttttttgcgtcgttgccgggaaattgtttaaagattgatattacataagattagattaaattctactttgatttatttttcctgctaattgctaatctgtttccttcaacattatctttgcctatttcaggaattttaggtgtatgcgccgtcaaggacaaggagctatattacccgttgatcctgaaatcgagaagacttgtaggagaaacagaaggaacaagaggcaagaaagagtttgagcaacggctgaaacaccagaaatcatggctgataacgctaatgctgcaaataatggaggtaacaatggtaataatagaggtgccgttgaagatcaaccaaatggcctcagtttgagagattacattctcccaactcttacgggggttcagtcttgcatcatgtcgcccgccgtagatgctaataactttgaaattaagcctacaataccccaaatgatgcagtcttcagtcgagtttggtggactcccttttgaagatccgaatctgcacttgtcaaacttcatggagttatgtcagtctttcaaggtcaacggggttagtgatgatgacatccgtttgagactttttccattctcgctgacagtgagccaagagttggttgatttcattgccaccgaattctatagcaacatggacagacttagcaacaaagtttctgtctaaattctttcctctagtaaagtctgctaaactgcggggagaaatcaacaacttttgtcagttagataatgaatctctccatgagtcctgggagaggtttaaggacctcatcaaaaaatgtcctcatcacggcattgagaagtggatgctggttcacaatttttataatgggttggttggtaacaccagaacactcatagatgctgcagttagtggagcattcatgaggaagagtgcaaatgaagcttaagatttgttagacgagatggccctgaataatcaacagtggccaactgagagaagtcaaacaaagaaggtggccggtatgctggaggtagatgccattactaagttgacagctcaggtagaggccctaactaaattgatagttgtgcaagcaaaacaagctcagctggtttgtgagttgtgtggaggtcttcatccctatgcagaatacccagaagatgtgaatagtttgccaatggatgaagctaaagccattggaaattactctcagaacaacaactatgggttcaatcaaggggggaatcgaaggaattctgggttatatcaacagaggaatcagaatcagacgcagaaccaacaacaaccacagcaccaagggtctagtgggagttctggtcttcagacagacttattgctacaatttatgactgagacaagatcatccattaaagacctacaaaatcagatggggcaattggcaacttagataaaaacccgttctcagggaaattttcctagtacaactgaggtaaatcccaaagaaaattgcaaggaaattaccttgagaagtgggaagaagtatgaagggcctgatgggggagaaccagtggaagaagaaattcaggatcaaccggtgccatcatcaacagaaaagaagaatactaaagtcctacaccagaacaagactctccacaaatcaatatagatcatcatgtgaaaataccatacccacagagactccgaaagaccaatctagacaagcagttttcaaaatttctagaggtctttaaaaggttgcacatcaacattccttttgctgaagccttggaacaaatgcccagttatgtgatgttcatgatggagatcttgtcaaagaagagaaaaatggaggactatgaaaaagtggcattgacttaaagctgtagcgccataatacagatgaaacttcctcctaaactcagagatcctggaagtttcaccattcctagtactattgggggaatagaagggataaatgcattgtgtgattttggagatagcattaacttgatgcctctgtcagtttgtacaagattgcagttggggaaagcaaagccaactatagtaaccttgccattggcttatcgatctctagctcatcccagaggagtaatcgaagatgtgttagtaaaagttgataagtttatttttccagctgattttattgttctggatatggaagaagacagcaatgtcccaattatattgtggagaccattcttggcaactggccaagcgttgattgatgtttagaagggtgaattgaagctgcgagtgcaaggggaagaagtggtgttcaatgtgctaaaggcgatgactttcccaaaggcaagtgataactgtttctttattgatttgatcgataccattgtggaaaagaaaaagttgatagatgatcctttagaactgagcttaattgaggatgatttgactgagcaagaagggctggaggtaagggagtatgataaatggctcgattcttatggaccactgaataagaagtattataaagagttgggggttgtgccgagggagcttgtgccatctacagagaaacctccggagctatagttgaaggtgcttcctaatcatctatgatatgaggtcttgggagaagataagaagcttccagtgatagtgtcagcttcactttctggtgtggagtctgataggttgcttagagtacttcgagcgcacaataaggctattgcacaataagactgagaaatcatccataaagatctctatgcaagattctattaggtccaaaaagaacgaattgattcccacaataacggttactgattggaggatctttatggatgatttctcagtctttggttgttcattcgatcattgcctagagaatttggagaaggtgttaatcagatgtgaagagtcaaacttggtcctaaactgggagaagtgccactttatggtaacagaagggatagttttgggacacaagatctcaaaggcaggtattgaggtggataaagccaaggtgtcaacaatagagaatttaccgcctccagtgtctgtgaaaggagtaagaagtttcctgggtcatgctagttctaccgaagatttattaaggacttctcaaagatctcaaaatcgttgtccaatctacttgttaatggggttccttttgagtttggggaagaatgtatgaaggcattccgaattcttaaggagaaattaatttcatcaccaatagtcacttcaccaaattgggagttgcccttcgagttgatgtgtgatgcaagtgactacgcaatcggagtggtcttgggtcaacgggttgatagggtgttctatacaatctactatgctagtggaaccctgaatgattctcaactaaattatcccacgacggagaaagagatgtttgcaatagcgtttggatgtgataagttctggccctatctaattggaaataaggcgatagtttacacaaaccactcagcaatcaagtaccttatgaccaagaaggatgcaaaacccaggctgattcggtgggtacttctactctaagaatttgacatagagataaaggataagatggggactaaaaatctagtatcagatcatctgtcaagactagaattagaagaaacccaaaatgcaaaagaggtggaaataaatgaagaatttcctgatgaacaactctttagtttgagggaaaacctgatggtacctt

SEQ ID NO: 21984 - DNA, 10261 bp, Cannabis sativa
  modified_base (26)..(51): a, c, t, g, unknown or other
tccttaaacccttatgtgtttatttnnnnnnnnnnnnnnnnnnnnnnnnnngttaatgaaacatacttgttagtgaatctagatcttggtaaaatatttccaacagtaaactctagatcaaaatagtatccgacttcataaggagtaagttgaggccagcctagctcctaagaaaaaacatcgctgaaaggtacctgataccttttggggtgatttgtgtcggacacatccaaaaataagcagcaatatcacaaaagtatggatgaagaggaagtatagctccctgatcaatgtggtactccaaccaggccaaccagttgagagccaacctatgagctagtttattttagggaggtatcttacagcagatatcctctactagcccaacaacctatatcctcttaaaactgtgcttcgagagagacaaaataaggacaatccacctatccccttgtgaacttgcatcaagagttttatgctcaagggattgatccaagacatggtccaggctgagtaccaaaggctcacccagcctgtttagcatatggccatcgttatcatagcaacctaaaggacaattggatagagtgacacaaggcttgtatctcttcctcgtaaccggaacaacttcttcacgactggactctgccctgaactctcattctcatgatcggttccagagctcatgtcgccatgaggcaaggcagccccttctatcaccttgttgtgtctctatttcatattgaccataattataatgaaatttaagagacctatacagctaccaactccccaatccaacacccagcattgtttgtatggaagaaataaggggaggtgaacaacctgacaaaactacaaatacattcaagtcaacactcgacaacatgttctagaaaaaacaaagggtacaaggtcaaccaacgaccaagtatcgtcttagacacaattgctaagacatacagtaatcccttgttgtacaattaaccataatggacttatcatctagccttatacagagttttgaagagaagccacgaataagtccacagtttatatgcctctaaggccgccacacaattgttactatggtctaaagagggaaaaagatggttgtccgcttggagcctggtccttgaccggccagggttctaggtcctagtggctggctagaccccaagactcatcttagagatcatccaagaaccctagttctaggcataggccagccggcctacggacatagtccccatggacggccaaaccccatggaagccacccatagccggccaggtttagaacaaagcctccttggctggtcaccatgtgcatggatcaaaaaatatgactttttaagaactcaaacatgttcttcgtgttcttcatgactcaaagggccaagaatcacaacgaaagtcatattctaatctttttcatctataaatcacacttgttcataaggctatcatgcggatcaaaatatcaaatggactacaatatcacgtaagaatcaaggcatgttcaaaacaaggaataatgttcatgcatccatggctaaatgaatcaaatcatgtgaaagagagggaatagaaagcttacctgcaataagattctgatgtagacgaagatgggaagcttggatcgttcaaataacgaaaaaatgccaagaagattgaagcctacaggtttggccacctagagagaaagaggagctttttcaagagcaaaattttagtgagagaaagtaaaagttaaaaatgaaagtgaaaaaggggttccccccaaaactcacttatgtagatgtgggccctctttttctcacttacttcaccaactcaccataaaggcaaacaaatgagttatttttctattgcaacgagatcaaacaatcaagacaaaatgcttcaacacatgcaccactttttattaaacaaaggtaactacagttctgacaactttaatcttactagtaaagtccctatccgtacaaacatctgcacatagatttgggggaaaatgttatcccaatttttgtcctcatgaggtgggatgcttacgtggatagaacctgtgtcatgtggcagtgcaactcacaagaaggaaggctaagtcagcatctgagccaacgaagaccccaacattcaaacggggataaagtgacagacaagctcactctcaagagctggctagccacccctagctggccccatgcccagttaggccagggacagcatcatggtcggtcagccttgccagcacaaggcaatggtcggctaaggattgcactatcagtcccagaagactctcctacacgtgcaaatcaagaatgggctgggaactgggccccaaaagcccaacaaaatagctaagaaatatctagaatataagggcatttttgtcttttgcaaatatctagctaactaccctattttcaagagatttgagttgtaaatatagtatttaggcctactatataaaggccttaacctctagctgaaaacctaagttacctaagcctcctctaagatagaaatctcaaactctctaactgtcagactctatctctcttcctcactctctcacatgcccaagcgtaggttgcacaacaccctaggctgtccaacacttgagtccagccagacactaattcatacattgtaatcctaaggggagtaggttattacccactatcacaagggggccaaacctctataacaaatcctgttgtttagtactttttactcttatttgtgcacacacttggcatgcatcagatttgcatgaccccgatgttggctgatcactttttgaggtcaatatatactataggcgacaggtttaaattgtggtttatacatcacctatagtgttatttgcaatggtttttaagtgtgacttaaaaattacaattttcttaaaggaggggaattggtgatgatggtggttaaaaaaatcgtggcctatactataggccacagttttaaactgttgcatatagtataggccacgatttaaaaccgttatttatagtgttataggccataacatttaatcgtcggcaattagttcaaattttaaaattttcaaatagtgcatttttcctcgtttcaataaaatgcatgttagatcttaaatttttcaaatcaatatattttcaaaatgtcgctctctctctctagagttctccctctccctctttcatagatggcggtccacgagctccatcactcatctcttgtctctcgctctctgtttcttgctttctctttcatgatctccactatgagctcgaccatagacaaaagcacattcaagctccaccataagaaccaccaccactcatctctgtctctctcattcgaagacgattgtgcgaccacgagccaccacgagcaccggtcagccatctctctctcgtccactctttctcataacttatttattattatttttattttgggatttatgtatttttgagatttttgtatttaacagatcgtcagagatctagactatttgtagatcttaaggccaaacaaagctcctatcttggttttaaggagcatgaaggtgatgatttttatttggaaatccactataacgacggtttaaaccatcgactatactataggccactatttaaaaccatcacctatagtataggcaacagtttaaaaatttttcctacagtctcgactatagctgacgattttaaaatgtcgagaattcttttataccaacatttttccactatttctaattctacccagcattcgcgatgctcgtataggttacagttttatagattgtcagaaattctttgcatgatggtgtaaaactgttgggaattccaagttttttagtattgtttgtttgttgggaggacatggatctctttgctcatggagaaccttatagttgttcactgaacaattgcacctacatgcacatttcttagaacgtgttattgttttccatttgtactttatattttttttattagggttggtttgcttaccatttggttggtgtgtttgtagatactcccgaagcctagatgctaaagtctttaagtgaaaagtttctaagagcttggccaagctgaagggctcgaaaggaaaggggaagagcttgcaatccaaagcctgcatctacctcatcctcatttgacatccgagagattcctcctcctatgagggttatcacacaagcttccgactccaatgctcccattggggtggacataacaccttctgccctcgaggagggttcaaaggagttgactgtgttcgggagttgcacagttcaaattggccatctcgagccaccaaccccggtagaagcttttccacctttggtcatagaggggaccgtccaggaggacttgacgagcattaatgtttttgatggactcatcttcccttggaaggatgcgtctgtgactccaaaatgcaagactcctcctcctccttctaacatggatgccaagaaggctaaagcaactctaattaggtatcttcaggaggggatgatgatctttggagagccaacaccccaacaccaccaaatctatcgtcgtccaacaaacaacaacaacacccacagcaacaacaacaagataacaaacaacaacgaatccaaaatcaacaaccatcaccaataaaacaacataaatccaacaacaataataactttagcagcagcaacaacaacaaacaacaaattttgttaggagcccttactccttcgtggggtcaaaagtctacttcaaactagcaactaggggtttattacttctctgcccaggatcccaactttaggtctcaaattctggttgaagcctactcatctcaaccatgaaatcctgaagaaagtgtgggaggctgaaaacatattgatgaaatgccttgagaaggaaaagaatgttcttcaaaagaggactggcaacttttttagtagttaagagggctaagatttttgaaggcatctgcaccatggttgtgagggaagcggtgccctttgctacaaaacttttggaccaaatagtaggcggtgtgactgagctaaccttagagaagtgggccacctagagtagcagtgatgcatttaacttggctcatgctacccaacagcaagccttaagggtaagtctcaatttcttcacctttgtctttatttttacgttttattttctcatgttgtattattgcaccagatggccttggcggcaaacagaactacaaatgaagtcggggctctgattgtacaacttgaggaggccaatgcaaggagtcaatctcaaaatactgacaatagggcctcccttgctaagattgagattcctatatcccaagccactactgaggttaaccaagccaagaaggatgcaaaggatgagataaagaaggttagagtcgattgcgaagctccagtcaaaagcgcaaaaaaagaccaatgccaagtactagaagttatactgcgagcataaggcaaaagctgatcaagagaaaatggctgagttggattctcttttatcgaacttttcaaagtgacagcaaggacctcgcatgatctcacaaggtgaggctctgaagcctacactccaacgggtccacgatttacaaaataagattcgtgagaaagacctggtaaaccaaggcttgtcgaatgacaatgaaaatttgaaggaatagcttgagactctacaaaaggccaaagactctctaagcatcaaatatgagaaatggacttttgtcttccaggctacttgtgcaaccattaattcccgtcttggcacattaacgaagttgtagaagaaagtttcacaccaacctactaacaatattaaatatttcattgccttagaagccatggaaagagccaaggaaaatgtggcacaatttttttgggatgctatcaaggtagagaaagaggctggagctagggctaaaacgttctagctgcaatccatggaaatttcctactcactgctccttcacactctttcaaaaaaggacccttctgtccttaagcatcttggagaagatgaggaagaatacacctggagtgagctcgccattgacgacgattcctttctcaaaaagtacattcctaggatgatggtgtggagtctagcaatgaatcagctaaagacttggagagtgaacgttccgtcaaagtggtagtttctttagggaagttatcaaggacttccaagaaccttctgaggacaaacaagaagaccttttagatcaaactcaagatgcgcctccaatttagctccaagagaaatccaacaatcgaatccaagaaaccccttcataataggcccatgatcagaccaaggagtaacttctatcttacatctttccttctttttaatattttagccttatttttgcagatacagtttaatcacaccttacctgcaaggatttatgtaatagctagataactactgctttaacttatatatgtttgccatatttaccatatgcttgtttttgctttctctttccactattttttgtttataggacacttgatagatttccttaggtgttttcaaagtttcaggttccaatagccaaaacttgatgcccctagactttcaaactttgaagtaacttattgaatctttgaagcatgcaaactgcaaattcttttgatgtcaacctttttcaaagtctttgttgtggcacttcccgaaatttggaaaattgatcttacatggatggattctaaacttgttcctagactctataggagtcactgagcttgactcctatctacgtgcttcctaattaactaccctaagtagaatatgagtaatttccctttctaggaaggagggttgaagatgtatcaaaatccaagcaatatttttgactattagtttgaaaatttaaaattagaatacgagtaagaaattaaatacaaataaagattgaatacaagtaataagtaaggaagttttcatatagctaagtatactacctcgcaagtgagttaggaagtttggacgtctccaaattcttggtcacttatttaaaacatagcttgtgtaggaggaaaaaatgggaactcttgtgtaaatttctactattttcatttcattatacctaaaggtttacattaagacagagaatttacaaaaaatttacatacaacttaagcagaatgtttacatttggatacccccagcctattgttaataatgacacaaatggttagtgttgacctcacttctagccaatgacagtgagtcaattataaagcgattaaatgagataaataaaagaaagcaaaaatagtaagaacaccagattttaaagaggttcgaccctgtaagtatagtaatagcatactccccttgtatttgtattaacttgagaaaagaaacaaagtgttcttccactcgaaagctcttacaatttgatcattattttctctcttgaatgtatttcagaagcaattctttcgaccccctgcatagtgagattaggccactatttatagggacataatacatgagggatggtttcctttttgcctataatgaatataataggaaactacataaattctacaattacaatgtgagaaataagaaactaggatgtgttgccgtcatcctctcacccaatcccataattacagggattgtcttcgcatctgaaaaaataagattaatctctggaatcatcatttctcatgcttcgctcagtatagataagtctacaccttggccagacatcttcttaatcatgctactcgaatgtctaaatgttacagatgttgggtagtcctttatgggttgctagggatattttcctccatccaggtatctataatatgggacacatgtaatccattcctattgccacgtcatggtacaaaaaataggacaacattttcccccaagtctgtagatgaccttcctgatcgcacgtggacttaactcagccttaagtcttgtttggatgggtgacgcgtgtccttgatgtcggatgactagctgatgtgaccttgataaggtgtctcttcaatttctgtccatttgatgctaattgacggttttacctcaaatcagggttcgatgcttgcgcgtgtttaacgattacactccctgcaatgagtacgtaatgtatacttttggagggaaatttaagaaatttgaattttgaaatgattaattctcttttcacactgcttataaataggattaaggatctctacaaatccttttagccattttaactcttaaagaccggagtaaaagatatttagccaaatttcctctcaaattctttgagaatattcataggaaaacccttacgattccatccgatcacaacaataaagtttccaattagtgagtaagttcttcatttttttcttttacatatttgtaatgaaattcatgcctgatttctagatttttttgccatgaatctctcatgttcttgaactattctaggttaaccatataatacctaggtgtaggacttgaaaatctcattcatgcctaaccataacatctgattatctgactgcacttcaaatttaaccttacaatgttcatttccactcgtccatagggttttagtgaaactcaaattccaattcaaagttttgaacttatgggattgaaaattctatttctgggtgaaacctttgcgtttgaattctcaatcaaacctggttggtatatacaacctgtttttcatttgttactccgaccaactctcactttcttgtctcctacctttcatagacaaaccctggtgagtttttgggaggcaaaaaccatatcaaccaagattcgctccaacttttatacgaggatcaccctcgtctctatgctatcccatcttcatccagtgatgatctttccaatctagatttgaagattgggaagtaagtagctaacatacaccttccctagagcttgaggtataacatcatttttatcatgaccagattcaaggtgaaggatatggtcatttcatctgggaactcaagaaaaattgaaggtgttaccttcctactaactagacgtatagagttcatctgaacgtggtcgacactctacccgagggttgcccaaccctggtgttgttggtaaacttattgccaatttcactgtgaccactacctgacacacttctaataaaattctgcccaagtatagtatgatggcacgaaccaaatagacgattagtaaatcttcattaaccgacccacacatttcctgcctagccactttggctagggcaaaatagatcagtccagccactgacgaggaagatactttcgaagacgtcaaagttcaagaagtggaggaccatggtgagatccctcatgctactccttctgatggcgaatgcgataaggaagaaggggtagctcgggtgccaccattcagtggctataatgatgaaggataactcgtgtctaaagctggtgatgtcatggtggccagccaggaatacattgttgaggagtataccgaggctcgtcctttgtgaaagagaggtccactaagagatcaatggattctccaccatctgtggcgaccatgaagaagatgaccaatctgttcaaacgcggtctcttgggaatgtcaaatgcttcctttcctcccctggccaactggctactgaccctggagaaggttattgtgcttgtttaggagctcacaccaagcagggtgtaatgctgcccttgcttcaatttttttaagaaaatggcccattactaccacataagtctgagccagttgactcccaagtgcctcaagtatctgtctgccctattcgtactctacgccttacaaggatggggtgagctgtccccctacgacaccaacttgttgtttgatctgaagtaaaaccccaagcagaacaggtcggggtacttctacttttctcaggtcgagaagtcgtggttcacgagcaccgaggtgatgaagataggaggctttgtagatgagcattactttgtcaagggcgtggacacaaaatataccagtctccagcagattgcatcctactatcatcctccgttcaccctggaactcaggaagagggcttagaaaattctacaactctcttttcatgaacgagacatttctctcctagccacgactgcaaagtttgtcaagtataagcatcatccagcggatttcgtacgaaacgcagaggaggcagtagaagaagttatgcctcgacaagatgcttcgagcaagaagaagaagaag

SEQ ID NO: 21985 - DNA, 4330 bp, Cannabis sativa
tattttaattataactagtttgaattatttcgtgttatttgtttttattcattatgttacagaaccgattatatttcaatcataaccattttgcgttatcttatgttatttatttttattcactatgttatagaaacgattttatttttatttatatctatgatatttacttttggtgactttttcggtgacttttctgacaactgtgacttttctgtcaaatttttcagcgacaataacttttctaacatactttttcgacgaaacttaatattcttttacaaatataaaatttttatttttctttacaaaaagacataaaatactccatataaatataaaaaaaaaaataaaaaaaaacacagacacataacccaataatataatttatttataacatcaaaaataaactcttataattttccatatataacttctacatgcttcaactctaattcaatctaaataataatggtgttccttcttcaaaaaaaaaaaaaaaaaatggtatcattcgacccaatttcaacttatcctaactttcaataattttatatcgtgttgtcatgtctttgcagggatcactttacacgtcctaattgagtaagaggccaaagtctgttactcatagattaactactacttttcgaagctaccaatattgcaccaataaaattcataaaaacaattttagtttgaacaacaataacattaccaaacatacataaggattttcactaaaaaaaaaaactacaaagaaacatagataaagatatttacataaatcgcatatatagatggcgatgctttgattaataattagttcacaataagatcaaacacgattaattattaattagaggtaagttcatattatatatctataaaacgttatattattacacacaaaataagccacaaaacaactctcttctcttgattggaaaaatgagactagtataggggcgccacgtggtcaatctccatcgttcctcatctgccgtacaaaacgccacgtagtacggcgtcgtttcgcgattaccaacttcatcttttttccaatcaaaacgcagaaaccaaaggaagagacgacatattcttctgagattcatcatcgtcgttttcttcttcttcttcttcttctgcttcccacatgaaatgggcaaacgaccccaacacagtgctacacagattatcaattagtcgtgtgttaatttacttaatctggaaattaaagaacaaattatgtgaaaagtgattaattagtaccaatcatgaggagaagcagtaatggcttgatcgaagtaagacttggctcgatcctcatctctattcgtctcccaaattaggtttccgtacagcgaaagcaattctccatcacctggattcgctagtatagctcttccgtaatactcctctgcttttaccaaatccttctccaccttcacaattcagattttaattcaataattaattgaacataattgattaagttgattgatttatcgtcagaaaaatttgtatacctcgtgtaagtacttgccgtaatttctaagaagaagagaatctcctggatttgacttcaacatctcttggtaatactccccaagcttgcttcgatcgttgtaagcaccgaatccaaaatctcctcctcctccgcctccgctgccaccggatttgcttccttcaccgaaacctcctccggaaattccgatctccgtagatattgccgagaaactcgcggttctacttaacggagtagtggattcatcttcctccggtattcgcgtcgggaaaacacgagatccaacggaagatttagtctccgatcggatcaaatcggtctctgacaaagctcttcgaataacatctctatcattccgacgccggttgatctcgaaatgcaaagagacttttggagaattgacggcgtatttgtcgccggagaagatgccggtgagagactcgctccggttgagacgaactctgggagaatctgacacgtgtgggaattgggcctttaccggaaccgaaccggttcggatcagagcagctttcattactgttgaaatgatcaactttagattttttagctgtgatgagaactttatctttcgaaaaagctaagtcgactttaagtagtgaaaggtcaaatatagtgatgatcacgaaccgttggatgcactgactgtgtggactttgaacgtagaagattgtgacacgtagtagggtgcacgtgatatcgttatgcggagaaggcaattccggaggagtcggcgattgtaattagtgactttttttttgtaataaataataatttccttttttttttgatacgcgtcacgtgaagagcgaatgggatgaaggagaagttgccacgtgtaaaggttttctgtatagatattactagtttgtatagtacaatatgtcctttgaactttgaagcttatcattattggtttctgacactcagatttcatacccatgttttctaattttattttgtgttgtaacttattactttcttaggcaaaatttactagaaattagaataagaagtatatcaattgttacaatttaaaatatgctttgcttattgctttgtcaagagattattatgtgctttgcttatcgacttgtgcttggtgtagagttggtgctatgcacttagggggtgataatttgtatttacttgtcgtgtcgagataagtataattactatttgttaaactcgaacatgatctctttaatcgagtcaaaaataaaaatcaaatatcactaatttaattattaaaaaataaaacacgggtatataaatatattttatttaaacatatacattaatttaaaaatatatattagtgacttatttaatattttaatttttttatttttacactttaaaatagttttttttgattatttttatagaattttatataaaaacttccataacaactaacggaacaacttaaatagtatttaaaatttacataaaaacttatatagaaattactaaaaaaaactactaaaacaacttaaatcttaaattaaaataaaataatatataaagtaattttcttacttttattttgtaataattatgtcgatctcatttattaatgatcgaaacttgctaattttcgtaagaatttctaattatattatcgtataagacttattttgtgggttctatttatagtacatgtaattcaaacttttatatgtgcctatgtttggacaaggatatatataagaaaatataatattcatgaatataaattgatgattaaagaaaaccatgttctaataccaacaccaccgcatttacatttaagccaatgggtagtaaataaaataaaaccacggccttagccgcaattaaatacaatcttgtcttattctattgtattttttttattatgttcttagtgataaagaaaaagaaaaagtaaacaaatatagattgaatgtggcgttaatgcttatccaattatctccctatattatatttttttttgggtggttggggtttttgggtgcatattgaggtgttcgattgatcctagtgccaataaacttgaatatccgatagaattctttttcttttttaaaataaattcttttcttaataccaaaaacgagtttaatacttcaaaaaaagatgaaaaattaattttctaacttactaactcaacaactaagtaatgtgatgacaatacttcataaaagtaagataacaaacttaaaatgtcaaataattaaaaaccaaaaaaaaaaaaaagagtacaatgcttagggaaagcaaacttaatactaaacaaataaagatttcaaaattataaatgagactaatgcatttacaaattttgcccaaaaatattcttttaaaatattaagatatgtaagaaaatatattaaaattcttttagtggtttttttttttgaaagagttttagtgatttattgaatatatgtgaatatgcttaatagatttatattttagtggttataagcaaattttagtggtgttacatttttttttccaagagaggaacacttaagtttaaatctccctccctatataaatatacatattatttgtattgttatttaaatctcgtaaattagtaacacataagcaatataaaacaacacacaatcatagaattaagacttgatgctattagtattaattaatgtaccatgttgtactataataatcttataataataacctatatgaatataaaagaattagttcatccgtactaggagaagagaggatcttccttcctagttcctatttcattcaacttccacaatcaac

SEQ ID NO: 21986 - DNA, 1493 bp, Cannabis sativa
ataatgtaaaaattagtaactttgtaatatatagtgtggtgttgtttgaaccgcaaactgcaccacaccgcgcggtttgacaaaaatacgaaccttaactgcacctcaaaagatttcaaactatatttatctctcatatttctgtaaaaaaaattttacgagcatctctaattatgctctgtaaatacactaattagctaaaatagggagtaagcctaaaaaaaataaattctaccatgaaaaattacatctctataataaagaatggataggaagtttcttatttttttactattttttttaatattattttaatcaaaagtactaattttttttttttggagaaaatcaaaagcattattatattttttaattatttcatcaaattaatttatatgtaataaatttacattataatagtatctgctacacaaatttttttatatttttattttatttttcattaaaacaattatctattcttctaaaaattctaattattcttggtatgatatttaagaatctcattattataactcaaaacaagcatgaaaattcctccatttgtgaaattggatatgaagtatgaaaaatgtcctctttttagtttggacaaaaaatggattgaaagtgaaacctccccaaacatatatcaataatgatactaattaaatattttactttcaaacattagttatgtattttgcaaaatactaacaacaatcatttgtctaaagttaaaaagaagatactaagaatctcaaacaacaatcaagtgattgcataaactatacaaaacttttatacacgcaatatcaataatttttataattttctataatatatatataataaataaattagattgatgttacattcaatgcacgaattataaaattttttaattaagtaaaattaagcataatacatatatttattttttttaattaagtacgtaatctattttttttgaatttttaaaatagaatttaaaattttgatagactttttttagctatagcaattatatttgtgtgccttttgaattgttgttgagttgaattatcttttttattattattatttcaaagttaaaaatatatacaatattttaagtattttaaattaaaataaaaattttcttatataaaatatccacatcattttaatttttaaatatatataataatattataaaattaatcaaaaatattctaataatatattctattaaaattaatataagaaatcaaaacacactttaactaaaaattctattacataactatattttataattacttcttcatcactaagataaagaattataatggctccctcctccaatgcagtttgattcatcatcagtcatcaccatggttctccatctcaagctaataaaaagaagaagaaaatatcatcatacattttctttcaaaatcaacttctcacaaataataaaaattaataacataatacaatattgttaatta

SEQ ID NO: 21987 - DNA, 2056 bp, Cannabis sativa
aaataattacatattctaataatggcaattttgtcaaattaaagcattctgattacctttactagttatgtaaacaaaataatatgattctggttttcttaccagacagtttagtaaacagtataacaaaaatattgattccgattattttctattttaaaccgatatatttctctcattgattattatgattcaaattaaatttatgtgaaatatgtataataaatatttatgtgaaattatattattggtaaatatgtagaataaatatttatgtgaaatttataagtgtattagtattgtgtctaatatcaataaatagtgtttgcgagtttaataggtgatactaaacattatagtacgtgtgacttgatggagatatttggattttctttttttaattttagagaaaacaaaatgaacctcatccagtgggagtgcttagagaattttctaccattatccattttggggttgttggaattgtatttatggagaattttgtgggaacttgtcttatataaataagattgttttttttttaaaaaaaaaaaagtaaaaattaaataaatatataaataagattatttaattagattttgaaatttacatcaaataataacatctaattcaatcttgtaattaaatatctaattttttataatttaattaatatatgttaaattaaatatctatttaagagtttttttctaatcacttcaaagaaaaataattaaaaaaaattgtactagggttgtccatctcttaccaataggactggtcctagacataggcttaggacccactcattttagaggcccaaataaaaaaaaatatcttttaaaaaataaataaaaatattatttattttaagtaagggtcaaatttttttttttatctatagcccattttaactcaatagtggtcgtgcttaccacatatgtaatgtagtctaattcttaagaataattttatttaaagtgttgcttaatatagacaataattacatgatatttttaataattttttattagaaaaaagttatttttacctaaaaaaaccattaatttaatgtgatgtgggtgtaaaacttttagaattgtccaattatttttcttaagtctaaataacaattttatatgaatgagagagaaaataaaagaaataatattttaaaataatgttatattttgacaactacaaatattgactcaattaaaaatcattttcattcaattttactgtttcagtgattgtttatgtactaaactatgctcccagactttgatatctaccaaattatatccttcaaactttgatatgtattaaattatgtcccttgaattttcatccatgttagaatttttttactaaaattagataaaagtctttaaatttaacaatctcaatagttcggaggaatttttaacggccaaaaaaattaaggagcacgatttaatacatgtcaaagttcaggaaaaaaaattactaattaacaaaaaaaaaaaaaaaaaggtgatgtaagatttgagaggtgggccaatggaaaggttaagtcacgccacctgcatgacttggattccatgttacatgttttgtgttcctctacttccgaccccaccctgccacctcagcacatccccaatctatctgccacgtgttagtatgggtcgctttcgttattcatttatctctttaactctattcaattctcgtttcaagtccgtaacctgcagcacacaacgactgtgctacttcgggtaacgttaacaacttactcacaacccccatgaacattgaattaattaattaatagtaaaggaccatctcttaatacaaaattaattaataataattgcttagggtaaggaggcaaagccactgagagctgatgtgggaaccaccccccatttcttgtttgtaaacttattagggaacacatcatgggtcccatccccaaataatctttttatttatttatttactttttttttcctttcaagaaaacaaagttgcaattaatatgggaggagaatccatgaccaatcttattgaa

SEQ ID NO: 21988 - DNA, 2934 bp, Cannabis sativa
  modified_base (1933)..(1937): a, c, t, g, unknown or other
gatccaaaaaaaccaactcagtccagttgttaaggtatccttagccgctgctaataaattgattgcaacatctttgagaaactcgttagaaaatgacttttctttcatataaattgctaacaaccccaaattattattattaccttcttcatcattttcatcatcatctgtgagactcatttgttctcgttttagtgagatgcattggaataagaattcgtcgaatttttgtcgagctattcttagccttttttcagttccaatttgtaacaatttttgcagcttccaatagagttttggtaaaatatgtcgatgaattgcaacctcttccatctcattaaatgcatttaggtattcagctttagagtacttaaatttgtaagaagaaagatctagcccaaaaattaatagaattgcattatcgaatgtgaccatttgttgtaatgcttcttgtagatcaacctgagttataagaacaattacattattacacaataaaatatatataagtttggaaaggcaaagaaaagtctacacaacttaattaattagtaacatttatacaatttagatagtactaatagtacatacatgaattggagagagtactactattatgcatgtcgtgtaataaaataatttgagaaaaaaatattattgtatttgaccctatatatttataagcaaattacttcaaaaattaaataatatatggtcatgcatttcttacttttttggtattttgaaaaaagtttagttttattttttaagtaccttatggttatttaagagatattgtgaaattttaaaaaattcaaaataatttaatttttttttaagttttttaaatttataacatacacgattttcatgaaaaaataaaataaataattttttttaaatgccgaaaaaataagaaatacaacgttcatgtaatataaaattttctaataatatatatgtatcgtgaatatatttcaaattatgttaaaatttaagataaaatgaataggtttttatctcaaaatttagtgttagggactagctagtgcatgtattataaaataaaagaattaaaagtctacaataatccttaccaaaaaaaaaaagactaaaaataattattaagtaaagtaattaacaccataatatttatagatacctgaatttgggtttgagtggcatgatgaagaaatggaagaaagtgattgaggagatgctgatggagagattttgcaacaaaagagtgaaaattaaaagtatgttgtcgagtggagagctgaaacattctcctttgaaacttccaaagatcaaaatcagaattgataattccatctccaagaacatcatgaaagatatccctagaggcttgtccttttggataattggtaaagtgagtggttgtgatgtgttgaaaattcaaaggatcagatgtggcaatgatatccatgccactaaacaaaggccctttgaactcaaatgttcctccactttggcccaaaacatgagttgcatactcatgaaggcatgggaatttacacaccagcctcggcagcatccccaatatcggccacttcggaactattgcctttctatttccccaccaatattcatgaatgatcactataacaataatcataaaaacaccaactacaaccaaacccattattaattattggatgtatattaagatatatagatggtttctcttgtgtttcttccttctatatatagttgcatatgcatgtgtacgtacatgcaatatgtaatttagtcacaataaaatttgtgattaaaagtgaaaagattgtgactaattataaatcatcattttgtgattaaaggtattaatcacaaaaattacaatttatcgtgattaaatgtgtttttagtcacaatttatgactaaaacaaaattagtgacaacttgtannnnnatattatgttttagtcataagtaattttttattatgacaacatttagttacaaaaaaaaaaaaaaaaattatattatggctaaaatattgtcacaaaaaatagactgttttttttttgtagtgaaggaaagcccgaaagtggccatgaccctatttttttttaaaaaaaaaaaaagaattatatacatatattaattataatttttaaaaaataatttattattgaatttattttttgaataaaaaaatattaaattgaagttataataaaaagaattataatctattagatatttcaaaaaaatatggactgtcatggcatatgttattttgtctattaaaatgagccaaaacttattcgttttctgtctaagcctatttgtcatctcactaatactattacactaactcacttgactaaacaaataatctcttttaggcttttctttttttctccatttctagatcgagtcaaggcttggtgaaaataaagaaaagcaattatgtatcatcttaatgataggtactcttcttgtgtcaatgagaactacaaaatgtggattctcaatcatgaaaattataaaagcttagaaacaagatggaaatcaactttctgaataattgcttaactgtttgtattaagaaagatgttgctacaaaatttagtattgattccattatagatgagtttgcatttatgaaggaacgttaggaaaaatttacttaaggtgcatttggatgcaactgtataattattaattaaaaatacaatgtgtgtttacatgtcacttatttcatgtttggtaaattagtaagtgattgcataatttaataatatttataattatctaaaaaaggtaatattgtgtatttacacactttaattatactaaattttcatggaagtcaaaagaattagagtataattaatactctttaattatctctaattacataattgcagtataattatttaaataaataaatcaaatctcat

SEQ ID NO: 21989 - DNA, 6229 bp, Cannabis sativa
  modified_base (5881)..(5886): a, c, t, g, unknown or other
aaaaggacaacaaaaatatataacaaattaacatgcaattataattggtacaaataaaaaaaaaatacatacctgaaaacatacaaattactaagatataatcttattcagtttgagaaaaatataaacagagcaaggactataaggaaagaatacatattactaagatataatcttatttagtttgagaaatatatatataaaaaaaaaaagtgaggacaaaaggaaaaaaaatactgattaataagatagtcttattgaatttgagaaaatataaaaaaagcatggactataggaaataaaagagcaagaagtttcacataagtttctaaatccaacaatctcaatagtttgtgagaaatttttaacatcctggttaaaaaaaaattatgggcataatttgttacatgtcaaagtttaggagacgaaaattctaataagcatttattttatattaaagataaaattatctttcttcttaaatttttgaaataactacaagaaataaataaataaacagattaagtataataataataattttatgcataatttttttttttattttttatatttaaaatccaaaaaaatattattaaaaataaccataaatttttttaaaaaaacatattattatactcaagtattgtcatacgagatcccacataagttttactaaaatttatggtttaaaagaaattttaatatataattttataaccaactaatttacttaatttatttcaaaaaaagatatatttaatttaagtttatagaaaataattaaattatgaatgcatatatttcaaaaaaaaaaattatgtatgtccaatacatatgtgtattgtaaaaaagaaaaaacaaactaaataatattgcctaggcggttggatgaggccatggccgaccagcatgtggaggtagtggctggctagatagtggattctatggcaggccaacttgttgaggacatggttagccaaccttctaaaggcccagttgatgttgtagttggatcctgtccgcattcaattagctttggcccctagcataattgtcgtagagcttttgtgcacttctgtcaatagctatacatcttctttcttagaaaagccccttagtggtgttgggctaccacttatgtgttttatgctataccggattggacaccttgtagccatcctcctcgtccctgctctctggcaagatcattgtttagaggtatgttgttgtaggtgtatctaagttggttgtctagcatgtttgttccttttgaaacaaagggacttagttctttgaagaactgagcaggtacaaagtttgccttggttgccaaggcacagctggctagtttagtgagtgcatatgctattgtgccgtctttgggggcttgccttttggtatagcctatgagctcttttagcagctctggtaggccatcatcttcttgtattgagttgtacattcacccaagacataacctacgactagctgagagttgtggtacatgtctaagtggttagcctaagcttcgtgtgctaacctggggccaacatttagagcttcatattaagcctcattgttagaagctttgtaattgaccttgttgcctcgtgcctcagttgcccccaggtgctttgggggccatgcctgcatcgggcaggtggttaatgtacctcttgggttcttactctcgcttattttctggctcatgcttttctcccaaactctaaggtgtgagcttggccttttatgttggtcgagtctcaatggttcacttgagtagtttgcctgatgctctaggtgtttgtggaacctgccgcaactgttgatcaatgtacacctttatagggtgtatttggaagtatagccttagctttctagaagccaagtgcaagttgtgggtcagcttcctcatgagtggtaaccaactttttgtgtcgatcagtctcttgctagtgtagtatacagtgtgttgtactccgctttcttctcctgtgaggacaacactcacaccattctctgtgactgctaggtgcacacctagctcttctttgtctaggaatttgggcaacacaggtggttgagccaatcatttcttcagctcttagaatgcgatttcacattcctttctccactagaattttttgttgcttttgataatgttgaagaaggatacaaatttttctatagactttgacacaaatttgcttagtgtagcagtgcgtcctgtttggctttttacttcctttattgttgtcagcgacttcatgttcaaaagggttggatcttgtctaggtttgagcttcttcatgatgtggctgtagaggattttgaaattttctatctaggtccttcatatgccccccactccttttggacttgagaagcatgtcgtccacgaacacctccatattgcggctgataggatcattaaacatcataaagcttgtattctcctgatttgatggatgcttcttctatttcatggcgttggacaaggccaagttgtaatagtgacgggcagattgctgttctcctctttacattttacctcatgccttgttaggaatttcaggcaaaggcggtagatggatgttgcaccttcaagttgtatagggctagttagcctatcatggcattgaaagccaagggaacgtagattacgacgaactgtgccatcaaagttctggtggttggattttctccaacaatgaggggtaatctgatatacccgatggttgtgatgccttggccaaggagaacatacataacttgattgtagggtgccaagtcagcgagttggagcctcatcttttcatgtgttgattttaaaaagaatgttgagggaggctccattgtccaccacgtatcttgctataactatattctcgattcgtacagtaacgactaagggtcattgcgcgggaaacttcttgggcatgatcttctttttaagaaagagatcttgggctctccaagctttggttgcttgaagcctcgctctttgcctgcaaggaagttcattttgggctcgtgacggagtgtctgagcatagcgctcactggctttgttggtctcgcctgtcatacggggtccgttaatgacaaccccaaagtttcttgacatcggaggtttggacagagttggtgatacctgcctatgtgcctggccaaagatggaggccagccttcgtagaaggagcccagccttcagaggtagaggtcagacttcagagatggaggccagactttggagatggaggcaaaccttccgaagcaaaggccagatttttgagatggaggccagccttctgtgatgggggctagccttctgtgattgaggccagacttcgaaggtggaggctagccttcagaggcagaagccagacttctaagatggaggtcagccttctgtgatggaggccagccttcggagatggaggttagcctttggaggtagacgccatactttggagatagagggtagccttcagagatggcggccaacctttaaaggtggaggccagccttagaagatggaggccaaccttctaattgcttattgctgactcgccctggtgggatgtctgggcaccccttgctttgggagttttgatagaagagtgaagcatacacacttctactccttcttgcttggacttcatggcataaagggatcattgaatttccctctttttcaactatgtttgtcagagacatcgttgttgcacttgcctctaccattctcgttgtttgataattggtagggatcgtctgcgctagttggcatgctagacagtgtttggtggaactatgaggccttgtgtttgttcgtcattatcctactctcttgtctaggctttccgtacaacttcttccaacattatgaagccatcggatcactcaagggactcctccatgttgttccttgagattctcttgatatcttcccagaagacactcaacaataggatgcctctgagtatggccgtatataagccttcttctgtcatgcctctaacttggtggcctcatccataaacttagttcatcatcttgtctttgctttatttcaacaagatcctcaagtcgggtaggtatttgtcttgaaatagagaattgaatacaaaatctcgggagaattcttcccaagagttaaatcttcttgggataagcttgaaatactatttttgggctatttcagctagagttgccgaaaatatttggcatcgcatatctccaaatacttgtaagagatctatttggatctcaaagtacttcaagtgtactagagggtcttattttcccgtgtacatattccaagccggtatcttaaatatgcgcaagggaaaggcattgatgtatgccgagaatggtgatcccctcaccttgtctagctcgagttctgaaggttttagatcagctaggcccttgagcatgttcctatttgatccaactgtgcttgcacagaaggatctgttgctgtaggggcctgtattggccttctttgattgagctgcaacctcagattagctagagcttggccaaccataccttgggaaacagtatactcaaggctggccagtcctgagtttggtgcttgtacatggccagtaagccctaaggtgggcaaggactggccgcccacacttctctgcctggctagtggagtttttgcattgacatggagtagatgacactagttactagagtttagtggatttaactgtctgaagtgattaatttcacttctcagattgttgtttttggtgtttccactctttcccagtccttgttagttgaaaattgatctttgggtgactcgctccccttagggagggagtgctcttctctggctggccatagagacttctacaggagtttgactggccatggagacttctacagtagtctggccgaccatggagatccctactggtagttggtcggccacaagatggatagaggaggctgttgttgaggtagagatccctagctggccccccatgccactggttgccgagatttaatagtttttaccatttgacctttgaggcaaggtttgtccttcctctagatagggaaaatctgtcctagtccctaaggggccaggttggtcagcttgtcgatagaccctccgtaatctatcagctagtctttcttgaagtggatatctaaggagatcctagcctcttacatcggttctctggttgaactgccttgtcagattgttggtctctctgttgcggtgatctaactcttcttggtgagatcgaaggatgtactcttggtcatccatccatctcaggaatttgtgtcgctgctgagtgagcacatcgcaattagtagcacgtgtttcttcaaggaatttgtgtctctactgagcaaatacatcacattctacagcgtgtggttcttcaattaaaccggcttggcagaagacctctctaagtgtggctaacttgagatcttctcctaagtccacatgaggctcgccaattctggtctcgtctctcctgcataataccaagggcaaaactcggttgctgttcttggggggtgccccccgaggattcttccttcagttggaggtgcctgtggagggtcctcccatggaggcagggccctgccacttggatccaccgggatggctgtatcagtttggcagctatagtggccagactcgtggtgcttgttgcggtgactggattgaccacatctgctgtgttcatgggaattccaattgtggcaggaccatgaatatcgagatctgtagtttttaggtcttgagggagacccaaagatgcagatggtgcgactggtgttcttctcatgttaaccatggcatttgatgagatacgatatccacgctctcaatnnnnnnaccaaactgttgacctcaaaaagtgatcaactgacagaaggatcatatagatttaatgcttaccatgtattacacaaatagaattaataagtaataaacacacagatttgttattgaggttcgacccctggcctactccccttttggctctattgatacctaaagataatactattcagatcattataggtgagatctgatagagctatctataaggatacaaatcatgaatcaataggcagatctttaaatgagagtgatattgccttagaggcatgtgagagagttgaagagaagaagccctcttgggcgtgtagcagagagagagaaagagaggctaggg

SEQ ID NO: 21990 - DNA, 3186 bp, Cannabis sativa
ggggcaaacatacaccagcaggcacaaaacaagatttcgatgaaattttgaagtcacctaagcttggcagctagtttgaaatagaaaccaacaactacaatacatacctcttctgctaatgctttgaagacatgaaagggcacaatatattcaggacaatccactgcatcctgcaaccataatcaaatgaactaaataagacacatagccatatttttagatacaagcaactatccacaatagaataagaaaatggtacagcaacatacctctaggtgaaacttgtacttgatgccaaaagggcttgaagatttgaatttctgaaaaaaaaaaataaatgtttttttgagaaaacatggaagcataaaattaaaagtagaacagtaaaaatgggagaaaataatcaccttttcagaaaactcttcatcgaaacgtatccaatagacactattaccaaaggccaggccttcagctgcaaactcacaatgaaagtgaaatcttcagtcaaaaatggtaaagttgatccacccttcccaacatgtgcaatggttataactgatagataatgtatgagattttacatttaacaaatagtctaggggggaaattgtacatatttttctgtgtgtgatagtcataaaattataaacccaccagtgttgttcaaacaactaacttttcttgttcctacagcccctgacaatgtattgcaatgccaatgcttattcaaggatgtttaatcaaataaatattatgctcagacttattgcttcattaatgaatggtgtacattacttcatgtgctagttcaataaacaagcaaggaaaatgatcaaacttgttcatttggaacaaaagtaaacacgctccatttagcatcttataaaaaaaattgacacttataagacaaaccttctctaagctttttaacgatcacattggcatcgggcatagttccgatgaaaataccaccaggacgaagtaaagctgacacatttgccaaggctcgccgtgcacgtgcttcagtagaccaggaataatgcaaggcaaactacgaagtttgtgtttcaaagaatcagaatttccaaagctcacatacactactgcaataacactttacggtattgccattacaatgcatagctcacctggcaactacaaatatcaaagggtccatcatctgccagaacttcatccaatcgagcctagtaacattatcacagaacagaaataagagtacatacaaagtgaatgagaagtaggactgtttaaattcattataatgcttcacggatacaaattagatcgagaatctaatttttcttttccttttatattcaaaattaaaaaaaaatgacataaataaaatagagaaacaatttgtagtagcttatccataaaagtgaaattacttcataacaatctccacatatgaggcgtgcagggaatgagaacttcttacggcgttgatgatgatcagcatcaccattgtaacgagtacgacaatcttctatctgcagacaaacacattgtaagatggttgatgttagcacatagatagtgtagaagagatgttattcccaaaaagtatggagacaaccaaagaaataaataacaatagcatgtacacatgagtatttcctggaaaattattagctctgaaaggagccatctagacaaaacaaattaagaatcatataaaaggacagtctgcagtaaaaaccaaatccacctttagaatcaaggttgcattagacaagtcaaaatcgccagtgcatcaaaggaaaagttaacaaacaccaaattacaagaaactttagtacttactgatccttcagctatatcaataccaacataatatccaattttggccttgtcccatttgataagatcacctccctaatgaaaaaaagatatacaaagaaaaaatgttaatgatggaaattacaataataacttatgtaagagacaaggacataaataccttgccacaggcaagatcaagaacagcgtcacctctacgagcatacagctgaattaagacacttttaatctgtcgtaaaagagagaattagaatcattcatcagaaagcaatattaaaataattcagcattgtataattctaagagataacaagacacacccaattattaagtttcttcaagtgtataattacactagcttctcgctcttctaaggtttgatttgtccttgcactgtaatggtcagccactttacgagcaaaaatctttgtgctttcatcctccaaaaatgcatcacctatcacatcaaggtgaaagcaatgaaacaatttgagtacttcaacttgaattattcatcatgttcaagtataaaacaaccctcttttctcactccatactcttgcttaacttctcctagtaatcacaaagtactctactttggcagttgagaaccccatttaccaacatccatatgattttaaaagaaccattcaaagagaatagtagtggccttcgtctaagacgatgggttctaaataattataataaagtttaagtaactctatcattatctgccttagaagcttaaatttgtttatctcttaaacctaatacatacgggaaacaatccttaattgttgtttgatttctcaaaaagaaacaatattttattgaattattaaatttcttgttcttccataccatctaaaccccagaagctgagatccaaaaaacctcaaaaagcaattaaatttaccatctgggttgtgtttgattctggattggggtggcccaagagaggtagatggcgattctgagagattttgttgtttaggcagaaagagttgattgtggtagagaatcaacgagaagtgtcggacctggggttgttctattgaaaacccatagaacagtaaagaaaaatctcccaacccaatcaagcagaataaccaaaagtaggggagaagctgcgccatcatcgtctgcgagtgggggagttggagtcgtcttcttcgagtcgtctgttgtcgtcgactcttctgggcttggtcagagatgagccgatactggagagtgatacgatagagtactggatctgatccctgagagagagtgcgagaaggagaggaaacgagagagagtgcgagaaggagaggaaacgagagagagagcgactgatcagatccattcgcacaaagtaag

SEQ ID NO: 21991 - DNA, 1940 bp, Cannabis sativa
aagctaattcaatgctctatcaagtcatgtgtcacacttaagatgtaattttaaagctatcatcttcaaatttcaccccaaggagttatgaaaataagctctgggttacctgcagcgggacccgccggacaccaaaaattggccatcaccactagaagctaatttttaccgttagatcatcatcaatcatggaataaaacttatttttatctttcccctattttgtgggcctccttcacctatataaggagagctcccttagctcatttttcacattcagaaaaataccacaaggtcacagcttctctctccagactttctcgctctagagtttggagtttctgatacttagtttatttttgtaattaccatcttgtgagacataaaactcgaagtagacatatagccccattactatcgcgatatagggggtgaactactataaattggttgtatctctctattaaatacttaactaactttttcattctcgccaatctagcgagccaatgtggcttggaagtctagtccgaatttgtgaatcaacattttggtgctctcattgagagttgaactcaagaaagttactaatcaagatggttgcaacacgttctacaagtgttgatagattgactccagcaactagccatgcaactaggggcacaccaattgacggggttggaattgagactacttttgtgccccaggtgctaggagctggttctggtgctaggagtaggccttggaaccagctcctcaactcatcttccaaggctaccaccaactgctcctgggactagcaccaacgaccagatgtcgcttggggagccacacctggagatagaagaccctgaggagaccgatcctcaggtagctcagctcagccaaactgtggctgacttgtaacaacagcgacgatactttctcgataagcaacacggatggttctaacactggttcgtggaaaactagaagaacattgagagttgatgcgttgagcaggaacaacagagagctaacctatcttaatggattagagaagcttatcactctaatcgcggaactacctcccaaagaggttttttcgagttggtgagagagacaacccatcgaccaactggtcacgtgggaactagtatccaaggcaaaaccctgtatgctcagaacaacactgctacacccggtaactgaaaaggtactaggcaaacaccaggcgtggaaacctcccagagggaaggtaccttcgatcaagagctcgaaaggactcaagctcaagggcgccagccaatgggccctccacctgatgttgaacgacctcgcaagaatgagagaacttacatgactcctccaccaagtcctcctcaatgttctcaagaaactaggcctcaagaccctgtgaggggaaagggacctactactcaaccttaaggaagtagtaggagaagctactttaaaactggagactaagaaattcagcaggtaaggagcaatgagacacttcatactcgaaagtatttttaagatgaaagggggaattatgtcgttactttgctcgtggccccgatggccaaaaacatgattacttccctcgagttcacggagaaaaattaaacttgatcaatcaattcaattctgtccacacttttttattctgctgaagactactttgagggaagtacccattacaatgctccgaatgaacactcccacatgggtcatcccaagatgatctagagttcattttggaggcctcactagagtggccttcacgagccggtggttaggagacaactataagacctaggtcgaccacagtacaagaacgacatggaagattaagagacctgcatgacctcttaaacaggagaagaatggtggatgtgggaactgttgggttttgtgccccaaataaaactaatttcaatataattagatttact

SEQ ID NO: 21992 - DNA, 2938 bp, Cannabis sativa
acgtagttaattactaaacacatgcaatattaattaatatatatacgtaaaaatcacattactacaatataatatgtgtgtgatataattattaccaaattaaatgagaagtaactttagtcaaaagcaagcaaaagttaagatagaattatatcctgctcgtgaattatctttccacgtaatatagtacaaagagatctcttgtcctctaaagatggtgaccgaccattatttaaacctcattatattaccatcacaacaaacaaacacccaattattattaatctaattacaacacaatataaattacttagttaattatagttattaattattaattaacatatgtaatttatagggtcaataaaattaaaatatatatataacaaagcatattagtaaaagaattcaaagaagagatttgagctcgatgccttttcctttttgttttccaaaactactctctctctctctctctcttgtattgttgtgaatctgaggcctaatattaaaaatatataatattgaattgatttacgaggcagtcaaagatacaacacaatatttgatttttcttcttcttttatattctctcttttgttctttctttatttctatctttccttggctttgctttattagctttaagacccatcaacaatatttttatttttagaaaactatttattaatatatatattatgaggtgtagccaatacaagacagggttttggttcccctttagattttcaaaatgggacaaagctttactcacatgtcattatcttaggcatacataccacaaccaacaaagctcattccacactatatgtattttttcactggacaaaatataccattgataaagacctatcttactattaaaaaatatataaatgcatgtataaaaaccttctgtacatttgttattcttccaaaaccaaaggaacagaactttaattgttttatttgtcttttattttttactttttttaaagcttaatagtaatatatattatatatatagtactaatattaatatataggcatgcgtatatgtattatatatagtactatcactgaatcaaactattatatgctattctctgtttttagcaaaacacacacatatatatatttttttatatatgtatgtactacagttttttgggatgaagagatattacttataagtactgtagatttaccttcttgacgatgatgttattatactgagcccataataatgtatttaactaatattcattattaatacaaatttgaactataaaggctctatttattatagcagagccataaatgtttaaccttcttttttaacatatatatgcaatttgtaactactggcttcatttgtgaataataatcatgataaggatgcatgtttcatttcctatatatgtgtttatcttaattattccccttttagattatttttatgaaaattataaaaccttatattgtaattttttttttttggttatggccagatcccaaaattgttatataatatttctaaacaattaattttcatatgtatataggaccactgctctaaatctgattgtctgaatttgctttgaccagaaatacgaccctcaaaagaaagaatataacaggaaaaaactaaaaacaaacctgacccaaacaataactacaagacagtattctctcctaaactggcatacatatattcttatcaattgtaaaaatccaacttaattagtatatgcttgaagaaaaatcggaaacataaatttaataaaattaaatccctttatacattttctatatagggttggccttgaccgggggaataatatatattctagatcaatataccattataaatgcagggtataaatatttatatatatatcaaatcaagatcatgtcaaatataaattggacgtggatgtgaaaacataatgagttccacaaacgtaatgttataagaagcaaaatgaggagaatgaagggccacttagcgttcattgcattattagacattattttgtggtagtcatccaattctcttaacttgttttttcaaagcattacatcactccctccttggccttataatgtattaatgccaatcaaaatcatgaggtgctcactcattttagtgtccttatcctttatgtgagagagaaccctagctagatatatatatagctcctagctcctaggtatatttgttatgcactgtaattaataacactcaattttatatatatagtatctaatatatagtatttaatttattttcatttatatatataatgcaagtgtcgagtatagtacagttttataaaaattatttttgaaagagggcaaattcaatatttttggaaagtacagataataattatttagtaaaaatagaatataaaatttacttagaaaaaaataaaatggagatctaagttggaatcttctccatcaataattaaaattgtagtgattaaactatcagtaagatcaaaattatacaataactagaaacacatcaagaacaatggcataaaatttatatgatttgaacagaacaaaaaccagagtaacaccagattttaagtggtttcaccaggctttgcaacctgatttaatccattgagggaacaggccacaaaggctttataatttttattcaatactgatgaaacagtatagctcgagtctaagaaccttcacaacaaacacctaagttcttggagcaaaaatttaactcgatcaacttctctctataaaatctctctctcacaatctgtttacaagttttctaacatgaggcattggtgattcaaatgagaacaaatgagccttagattttgtacaagtgtgatacaacaaagagataatagactaaacttaaaaaataaactcaggttcctcacatattgttgatgtggca

SEQ ID NO: 21993 - DNA, 2733 bp, Cannabis sativa
attcattcctagtagagccaaatcatgattattccaaagaaggtgttgaagcaaactattacctttgtgaaagctttcttatggaaaagttagcgtatacacactctggttcgggatatgtggcgtgggaaatatacttgtaaactaaaataagagggacgtatgggctgtcaaaatgtagtagcatggaacattgatgcaattagaaaataaatgtgggcaattgccaaaaaaagaatttaagggtgaaatgggtgcatcaggtattacattatggaggctgattagatggcttctgttgtccccaccaatattttttttttgagtggagggtgactcggaagctaaaaatgatatggaaaggtatactttcataccaagtccaagtcttatctaaccctaaagaagcttgggcaaggttatgtgtagctgcattctcagtctcttggtgtgagttagggatgcagttgggaagaaagataacacttctctaatagcatccacttgagctccataacttgtgagcatgacgtatcctgcctaaatatctttgatgagattgaggcagtctgattcgacttgatgtatgggaattctctgatctttatgctagtggagggcctgtagcaatgcccaagcttctactgactgaggtggcatctgtcctgcaatgttttgtgctctagctgctattatttgacccgatgagttgcgaaccagtgctccagcacgtgagcgtgcacttttagtttacactgtgccattgacattgagtttgttatgaccatcatcgggcggctgctaagtatgctgactgggtaggtcttggccaagaatgttgtgattgctaactgctaggttttgtttgtagaaccgaagaaagtcctctacttcctataaaatcctaagaggttgttcttgtatgttcatgaaaataaagatatttttactattccaaattttccacaaaaacaaaggattagttcaatctcattttcttgcaaatggtttttgagaaaaagaagtgtatcaaaagtactttttccttgcatggcattaataagaggctttaatgatgtacttgaccagatcttcttaacatctttgcatttaaagagagcatgcttagtactctcaggacatatatggcatctggggcagagaagggaggtcctacttttcctataaaaaggttattggtagttagaagagaattgtggcagagcctatgtgtgaaatgtttaattttaggagggagattgagattccataaggatttccaccaactagtgatattgttggtattagaagttgttggtttagctaagttcctgatgttttgggcaagatggtaacccgttttaacagtgtagtttctcatagtggtatgttgccaaaagagggtgtcaggttggtgggtttgtggtggtgggagagacgggatgtcatctaacacatccttggtgaactcactattaggcttcgatatgttccagttccgagaagggaggagtaggcttgaaacttggttctagttagatgatagggatgtgggaaggaagggatagttaggtatccaattgtcatgatatattcgaacaatgtcaccgttacctattctcatttgaggcattgtttaaaaagatctttgccctaatgcaagctttgccaaacaaaagaggggatatgacctttgctagcgtctaagaaggtggttcacagataatacttggctttaaaaagctttgctaaaagcaaagaatgattggagtgaatacgccatgcctacttagcaagcattgcttgattgaaggagcctattaatcgaaaccccaacccacttgtgatctttgacttgtaaaggaaagatcatttcttctagtgtattttgctttccccatcatttgagccccaccaaaacttagccatttctttctccacgaatttgcaaaaactcgtaaggagtttgaaaatcaacatagcatacaagggaatggattggatgaaaactttgagggggatctctttacctcctttggaaaagatctttcctttccattttgtaaggtaagcctgaatcatgtccttaagggggttgaaagagtgcttctttgatctctcaaaacattggggcaagccgagatatttatgtaggctgttgctgttggaaagggggatgcgtaagtagtcctagataagggtttggtaagtaagacttgtgttgggtgagaaaataatcgaagacttggtgaagttaacaagctacccagagatcttctcatacaaagagagggtatccttgatagcattacaagcctggatattagaattacagaaaaagaatgctatcatccccaaaaaagagatgggagatctaaggggcattcctagtaagcttgatccctacaaagcaatctttttcctcacctgcttgagaagtaaggaaagtccttcagagcaaaggaggaaaaggtaaggaaagatggggttcccttgtcttatgcctctagagggggtgacacaccccagggcttgcccattaaggttaaatttgaaggtggttgtggtgagacaggacataaccagagagacaaaccttgaagagaagccaaatttttgcatgccgtttgtgaggaaagaccactcgaccctatcaaaagccttagccatatcaagtttgacagccatccaacctgtgcaaccatgtttcctatgtttaatagcatgtaggag

SEQ ID NO: 21994 - DNA, 1386 bp, Cannabis sativa
taggactcatctaggcatttaagttgctcagtatgataatattttgtatattatcaaaagaagtagttaaaactatcattatcataatcctggattccaaacaagtaaaaataaggctatttgattgccaaaatatttccttttcattttgtgagaagattatcaataagaatgctagacatgacaaatcttctactcttcaggccaaatatattcggtaaacgatgctcgatactttgactggcctgaaggattaagaaaatacatagacactgtaaggcaagggaaaggcaagtaccctaagaagtactcggctcgttacatctgttctttagtggccgatctacataggacactcttatacggtggaattgcaatgaacccgagagaccatcttcgattagtatacgaagcaaaccctcttagctttcttgtggagcaagctggaggcagaggatccgatggtaagcatcggatcctctcgattcagccagtgaagctacaccagaggctgccgctttttttgggcagcccagaagacatagaagagttggagagttatggagatgtgcagcagagagtgaatcctggttatgaagtttaatcataaatttataatataagtaaaatcacactgaggttttacttgctaacataacatgtcattgtaacataattgtttaaattttttgtataatatatatgaatcttctatttcaatgtatgtagttaagatttgatgagaagaggttaggcataagaggatgccttgttatgtaattaatggtatgtgttaaattctttggctaaactattcaaaaactttatgatttgttacattttaaatgctaaactacctaagctacactaaaactactcaaattaaaatacctacacatttaaaaattagataagttgattttaaattataaataaaacttaaaattgtataaaaataaaataacatatgctggtactaaaataaaaaaatagtcttttttttaaaggtaaatactattttggatcctgtgttttataaaagctactaattggattatttgttttgttaaatgaaaatgaactctgtattttctaaaatggtacaaatataggaccatgaactgattttttgtcaaaataaaaataataattcgatgtaaaagtgttatgacaaaattatttatattttctgtatcttttcgtgttaggaattgtcttcaagttagttatattaaaaaaaaattgtcaaaaattaagcttacatatcttcttttaattgataaatacattcttttataatcaaagcactaaatataacttcacataatttattaaaattagagttcctaatatatataatgaggatataatttataggctaattag

SEQ ID NO: 21995 - DNA, 2360 bp, Cannabis sativa
catgtttcgaaagtatgtcttagattcgtcccatatcctgagttatgaagcattggaactacaactagatttgtcatatgaggaacaaccggtgcagatactagatagaagggagaaaggcttgagaaacaagaaaatttcactggtaaaagtattatggagtaaaagtaaagaggaagaggcaacctggaaactcgagacgaatatgcagcagaaatatcagaagttgtttaggtaaatttcgagacaaaatttctataaggagggggtaattgtaataccctaggattaagaaaattgattagcataccctaactagttaactgtgtattatcatggaattatattattgtatcatttattttatgtgaattaatatgaaatatgatacgttaagaccccgttggcgagctaggggcattttagtaattttgaccaaagaagggtaaaactatgaatttaatttaatacgtgcttatggaatatattattatatagtatgcctgttttgtctttttttaggtgtgttctgacaagttggcgatgtatagtcacagaagggtattttgggccccaccgagttcgggcccgaaatacaattttggattgaattattgacattttatttatatgtgataaatctaaaaattaattgaatatgtggtatgtgatggagttgacctaattgcccttgtatgcctaaatgagtggtatgttgccctaggggcaattttgtaatttttgcataattggtttattttcaacaaaagacatttttgagtaaaattggaattatttttttggtttttactccaccaaccgacccctccctttctctccttagactcatcttcccaagttgtgattttgcttgaaatagcttggattcaagcttgaattttgctaacttttggagcttggaacttggaggtgttaaggatttttctttgctacaatttgaggtagttattactgttttaaatttaatttctcttgctgaaatttattgagagtaatgtttttgggctttaaatgcatgagggttaaaaagaggagcttatggtgagttctttgtaacttgaacttgcttaatttatggattttgcacttatgttgttagaaagttttagggttgtttttccaagttgtgaattatgatttttatcccttattgttgttgttagttgatggtgaaacatgtgggggattttcttgtttttgagtttgcatgttgtgaagttttgctcttgagtgggcttgtggttgagcacgtttaaatgtgatttttgagggttaatattgttgggttttaatgtatgaaactgtattctaactctctgtataattattgaaaacatatttgatggtttgagtgttttggttaaaatggttctgtgtttgggctgatttttttgtgttgttggagagtgatttaggtgtaattcttctctatttatttgatttgtgctatgtgaaagtttactatgattgtgggctggtttagcataaaaattggtgtttttgcatgcatttttgtggctgagaattggatttcttgggtatttaaagcaagtagccgcgaccattttatgacagcttattgtattcttttcggttttttgttttggtcataactttggactcgggactccgtttgggacattctttaaatctttggaaagcttgttctgagctctatgtgaatatctgtatttgaaatgccaattttataatttgtggaaatgcatttagggattaaccctatacttgtgtatcccgagattctgactaggattatcggtaattggtcaggaacactcaaggatttcgaatttccatatttacgggacatttagtaagacagtagttagcacgtagagatatgcgcaatggttcttatatggaatatgatatgtatgagaaactagcaaccgggattagagttattactcaaaaatgagcggtttattggcttagggttattaccctagtaaattgttaatatgtaattgttatgccatgatgtccatgatgtataaagatgtataagatgtatattgaatatattgaaattattgaaattaagggttatgtgttcaaggcataatcgggtttgactaggtaactagaactgagatgaacagttctaaggctttattgtatatagacgtgtgagcgtaacacgtaggtctatgccatatagacataaataggtgtgtgagtgtaacacccaggtctgtatcatacagacaaatatgaaatggcattaatatttatgagatgtgttacttatcattattgaaaattatactgtcttgttggacttggctcacgggtgctctactgtgcaagaaagggta

SEQ ID NO: 21996 - DNA, 4350 bp, Cannabis sativa
aaaaaaaagaagtatatgtagactataaactttctttacaataaatttcacaaaattgaataaatcattaacaatttgtacatctttatactaaacaattttatttttagccttctaaattatatattcaccacgatatctcactttaattttattgtacatataaaatatatataaataatcacattcaaataatatatcaatatagttgcaatagcaaaaaaaaaaaaatcaaagatcaaaatttcaaacttttttttaaatttttttaaaaatatatattatttaatttaaaaaattaaacatacttatattgcatttaatatcacctaattaaataaaaaattaattatatgtgcaatctaatattaatttagtataattatatatattcagttaataaaaacacacattagaaaacacgattttcccttaaaaaattaatactaataataataaaataaacccacgatttctaatttatttttttatgatgatgtggcatatataataaaatataagtacttttgtgattaatatgaaaagaaagaaaagacaagaaaagaaaaaatctacatatgggctaaccgatgttggatatggttgtattgtatatatatattatgacccaacaaaagctatattattatattcagtattattttatttatgatgatatcctatatattgatcaaactcaaattatgtattgaaatataatctaaatattaaattttatgctgtaatttatcaagtacaaaattataatttaagagagagagagagagaaagatgtgggcttttgcatgtgcaggttgagttgccatcttgggctccacattggtgggcccaatcttaaggagttcacgtgcaggcggcccagagaccatgcggtgtgggctctccctgtcgcccaccttaaaagtgtggtccattccccactcaatcaaatgctatgtttgtccacttactctaaaccccactatatatctatcaatataaatgctcataatccaagtttatgatttattattatttttatttgaaaactatttggataattaatttcaataacataattattacttcatttttgtcaatggagccttaacatcagttaactctctccctatataaaaataataagttgtgatgtgaatacttaaacttaacttttgcttatagataaatatttatatttaattttttagggtaataatacaaaagttataaatttagaattttcataaagtacctgactcttaagtgttaaattataatccacatgttattttttttattgatatatttaaattaattttaaaacaatttggatttgtcatatggtcattgacttgacacttaaagtactacaaaagtttcaaaaatataacttaactattattatcgtcaaaaattaaatttaagcatttatctacagctaaaaattaaatttaagtacttatgtaacaaatcactctataaatatattatagtgtgtgtttttatttggttttttttttttattaaaatgtatatgtatatttcgtattatgtgtgttttagtattctattttgaaattgtttatatttagtgccttaaagaatatgattaaacaacctttaattatatgagttttaaattcaaatataactaaaatcaatttagtaaaattaataaaaaattaagtacaaagtaccaattatatacaatttcaaaatataattatatacaattatccaaaatgaaagtactaaaatttgtgttttgattaaaaaaatacaagctaacaaatgaatatattctatttttcatatgcctaatttttaatgctttttatgacaagttttttttgaataaaagataatgttaacactaaaaaacatttgtaaaaatatgtttgtacaatgcttaaaaatcccagaaggaaaacctaaatgtaaagtaagtaataagaagaagtcattgaagaaatagtgtagtgtagatatttttcaattaaagtagaataaatatcatttgttattttgtacttttgtaaataatgtactgattatgagattatgatatgatgcaaaagtttttatttttccttttttcaaaaaagaaagtccaaacaatgactaactttttgaagtgaatcaagtattattgtagtttataaaaacgtgatttatgcttagatatataaatatatatagaatattttttcgtgggtattataaataactactaagctattatgaatgaattcaaaaaaaaaaatagctattatgaatgaatataaataaaatgataaaaatgtcaagtttattatggaaaacacacttaaaaagttacagattcacatttaaaacctcataaaattgctattcaaataatgccaaaaattatagaaatttttatagactaaaaatttgataaaaagtacaaaaaaaatactttaacacgatttttttttattttaatcttttgaaccttttatttacaaaattatctttttaataaaacaataaaccttttttttttatagtttatttataattatattataattattttgaagttattttctaattgttttttatttatttatagttaatttataattgtcttgaggttgatttattattttttttagttgttttcttacttttcttagcaaaaaaatatatttatgtgattttaaaacttttaaaaaaaatttataaaaaatttaagatgtaaaattgtaaataaaatacaaaatcaaagtatttttgaaaatttcccaaaataatattaatttggtattttttcttaattaaaaaaacacattatgtatggaaacaccaaaaatgaaaaaggaaaaaaataaataacaatatagaaaattgagaaagaaagaaaaaacttaataacaataaagaattttaaatatccttaaaactgaaaaattaggaatatcatatgttatttttattattatttataaggattattttagaattttcttagagataacttgaagaacacccttttttttgtgtaagttaactaaaatgacctgcaaattatattcatttacattttacttacttttataagaaaattacccaatattccctcacatataccacaattgatatacacattatttcttctatatatattctattaaacaaaatttacatagtactgacttttgttattttttataaaaatactgccacacggtagaatttacttttttaatgtgtatttttgtaagttttatattgtagtatactatatttattttttgtttttttatttattttaatgttgttttacggttgtttttgatattttttttttgtataattaacttgaagataatttctaacacgaataaatataaaaaatgtaattagttttgtcataatagttttattttgacaaaaaaaaaatcaatttaaggtaccatttagtattatttaaaaaaatataatatctaatttattatttaacaaaatagaaaatccaatcgataagtttgataaatacaaacaaaatctaaaatgatattaactctacatttctcttgcaggctttacagttagttttataattgggctcatgaataattagtgaaatagtggggttaatttcataaatacaataaacattgtaaatgatgaatcgtgtcaatcaaattgcaactagacattcattcaaaaaaataaataaataaaccttatagcatttcaaaaaataaaataaaataaaataaaccttataaatcaattaaatcttccttaccaaaaataaaaaataaaaaaaaatcaattaaatcttacaaattattaaatgtatagtacatctattaataccacatatacagatactgacctaaagattttttttctgggctcccaataaatttttgtatggactttcaaaatgcctttgacatattttgaccaaaattcacaataattattttagaagtcatgtttggtccctttcaaataaataataataataataatcaatgtttggaaaggagtagctagaacaaaattacatggaatatggctttttagtttctataaatttgataaatatgtgagtttttaaagtttacgtttttatagttttttttacattttttttatattttatttttttaaaaattatagtataccacattaatttttaaaataatgctgagaaagagtatttaatttctcatcttcctttgttacttctagattgggctgtaaactcttcaaatatttgaatggaccttttagagtacataaataaataaatggggtaagttgaaaaataccacttttattaagcaattaatcaaatttacctctaat

SEQ ID NO: 21997 - DNA, 1485 bp, Cannabis sativa
aaaaaaaaagtgttttaatgatgcaatcattggggaagttgtcttttatcagatcaatcattgagccattgtactgggtgatttttttcttttttttggttgattgtggagagtgattttaatcaaatgttgaccctatagtctaatgggtctatgaattaagtcaaactgggccccctcactattcacccagcccacttagttcagcccaatgtttacaaccctaacacattcatcatcatcttcttcacttcccttcaccaaccgaaccagcaactccacctgaagccctcatcatccaactcaacccgcacttgactccgttcacctcgtcaacccagcaatcttcttgtcgactcaacctccgattcatcaactcagccactcactatcaccacttcacccaaatccatcatccatacgattccctgcatcaaccgaactccccttcaactaagcttcagcaaccacgagtcccaacgttcgccgtccacctgaaatcaccttcaccatcacgttcatcttttagcaacaacccacccgaacttccattcaatgcacaaaactaccagctccgttcaaccaccagaagtagccttcgtcatcatcatttccattcattcttgatagctgatccatcacaacaaattcccactggtttgtcaagaataaactgctaatttttttgtttatttcgatttgttcttggctgccgagtagtaagtggaggtgtgtgggtgtgttaaatttgataactttgctaagtggagttttgaattggttctgaaactatcagtgacaaatttatcatggctgccaagtagtgatggatctaatttgagtactattgatattgtaagggtatttggtgtgatgttgggagttacttgtcgtggctgattatattgtgaaattcttggtgtgatattggaagcttggtgtgattagaagtgttagtttggtgtgtggatagaatttaatatgtatattttgtgagaatgtgcaatcctagtagttgggttgagtgtgggtgactcttgaagttggtgaagtgtgctgaaatagttagagtagttttaaaattatggttgtgaacttggatagattggagtggtggtagaaaaaaaaattagtggtgtggtgttggacaaattttaaaaagagaaaagaagaggggaatttctttgtggctgtgtagtcttcaaccaaagaaaaatgcctaacattcaagagggtgacgccaagcatttgttgtggctgccaagttcccacagattccctcagcacgttctagacccatggggtggaccatcagcttcgaacacagaggagccccacgaggactctgagtagagggagttttctaatacctaagttattttatctttatctgttatgtgttgtttttagtttgtattgtgctagttgtgtgttgtcttttgtgtttggaacttttagttatgtcgtttatgtgattgttagttt

SEQ ID NO: 21998 - DNA, 6874 bp, Cannabis sativa
caaaatataatatcgctattggtagaattaagtatcttatatcactgctatactcgtatttcaagtaataaatgaacgaatctatcatgcatgcgacacgtgtactaaagaaagacattaaatgatctcctcgcaataaaatacatgtatggggtcttctcaagaattattgacgcatttaatattaaaagtaacatgtgtgtaaacacttacaataagcgtcttgcatattgtgcagtcaaagactctacttacaaatagaggaaggtcaagcttgttgcgagatcgaatgccaacaactcggcatgcacaagagatacaacttgaaaaaacttacaaggagagatgatacttacccaagccttacttcaaataaaccaacgagtagggtctacatgctaaatctaaataattcacgaggaagcctgtacataacgtatatttttaaccaatattttcctagaggagcgaagtagtgctatagaatagcttggtcataacatgttcaaaatttagtcaacgacaatagttattcttcttattttaaatatagacgaccaatttttcaaacttagagaaaattctgtcaaattatattctgtaaccaaaaaatctaaaaataaaaatgacttgtggagtgcgtagattttaataacaaaatcacgtaaaaatctttatcacttatattagaattcataattaagtatatatatatattcattaagtatttattacatattattaggtttcataatgctaaggaaattctaaatttcattgagaatctttgataattaactttgaaacacatttctctacacaaaaaaaaacaaagttgttattatggacaatagttctcaagacattcttgtcgaacaagaagaaacggttcttcgtcctagaaaagagccccaagggactcaacctgtagacaatccaaatacagaaatcggtcatcctcaatgggactttgaaagaactgacaatccatagggcattccagaaaagataaagtaggcaacttacgacctcactagatatgttccttcagcggaattggaaaatcgccaactttggaaaaggttggccaaatccaaccatagaaacgatgaattagagcgtgaagtcgctgcagcacgaacaactgcgaatgatgcacctgtaaaacaaattgagcccccattaaggcgtccatgaggaaggcctcacgaatcgtggactagaagggtgcgacatgccatagttgaagcatagttgaagggaacaatgtgaataatcctacacgtccccatgagtaacaatcagggagtacaagagaaattcccattaaccaagaaacttcgcaaaaccctaatggtcaaagtccaagaggaacgcgaccatatgttccaaaatcgtcccacaggaatgtgagacctccgccaaaacaacaaataactcgaccatcgagtcatcgtaagcttccacgaggcccacaaagggatgacagaagttatatgtcctatctatttgaacgacatcacctaagacgagagactaattctcaaaggacaaattcgaataccgttgtaagtggatcaaggagaagccaaacacaaggccagttctcaaggtctcgtacaagggagacttctcgcaaaagaaagaataatgtcgtctcaataatcataatgaacaaaccaacatgagtaacttacaaagttatcaatcaaaaagtgcctcgctcacaaagtctgaaacttcccaaaaatttaaatgtgatttattaaggcatattttatgaaatatggaaaaatttgaatattaagaaaataaatgagtaagattataatcttactagattaattatatagggattagggattttattataaatgtgagaaataagtgtcatttattaattacaaagattctataaaaatgtgtgggtaatatgcatgctatttatgaattaaaatattttcaggtccagcaactttagaaactcgattggttggccagaagtatcatagtggtattagtttgtgattttgaagtgcgatgaagttttattagtattggttttattgaggtattgcgaggtaattatttatgataagtttacccctagtattggaagtttattcgaaagtgagggtaatttagtcttttgatatttaagtttatttaaggttttgtattttagtgatttctagactagttgagccaattctttaatttaataaactaagaatttcatttaaggattaacataacacaaaaaatttaaacctaagcctctaacctctaattctctttctctctctctctcggctcactcaaaaccttagtgtttactgggattttcagaaaactaattataagaaattagaactgaataaataatttgtagagagaaatagaacaacatttagagttttttacatggttggagcgttaaagagccttaatctacgagtatatattattatgtattttagcttgaaaagtctttaggaatacaatgaatatatgttctttgtttttgcttgagcaaatattataagagaattcaacccttaatttgaaggatttgttgggtatttatagtgttcatatgaattatacttagtttctctttttcctctaatggggagtttacattaaaaaagatacaagttaagattgtattcgtgaggcccaacccatgagataataggtgtgttgactaagcaaattgtacacgatcaagtcgtcattatcgtgtcctcactactataacaatgggctttagatgctcttatttttgctggaaattaaaataagggacgacgtaggtttattaatctgctaaaggttataaatctcttatggcatcaattttttggaaataaccgatgtcatagagtaagcctctatgtcgttagttatttctaaataattgacgccatagagtgatctttgttgaacaacgtactcttatctggtatattgattactgataatgtccttattggttatgtgtgtattaacacactaaaaaaatggtgatgctgggtatcacgctattaaacttgatatgtccaaagcttatgatcgggtggagtggtgtcctttttgggtaaaattatccaaaaattgggattccatggtgattggattggtaaggtgatggagtgtatttcctctgtggaatattcaattctcttgaatggtggtatttatggtaatattcatcctaaaaggggcctttgacggggtgatctcatgtctccatacttgttcctgttgtgtgttgaagatttgacgagtttggtgaatcatgattgtgataataatttgttgtgttggattccatgtggacggtcagggcaactatctctcatctgttatttgctaacaaggtcgactctgaggtgaggtgagccaggcgtgtgccttggacctctgcacgctcgaggtcccgaaattgtaaaaataattcacgaataaaatattaaaaaataagaaaataaagtaaaatattgtttagtgtagtggtagagtgtgattttaagcaaagaggtcaagggatcagtttccaacctctacttttacattttttttagaaatatttaatgtgtagctatggaaaattgaaccttagagctcttaagagttttaaatttgtttaccactagtactacaccaaaatattagaattattatcttcataataattaaaatatttatatcggggccctaaaatttaattttttcttaggccccatatacctaaggacctactgatgataatctttttgtcctaaaggcttcagtcttagcatgtaatagattcaaactcatgctctcttggtatggtgctgcttcgggtcagagtgtgaatttcgagaagttaactgtttgttttagtcctaatgtctctgaggaggataagattggtatgacgatgattcttggggttgttggagtagagtgcacaaaaattatttgggtctttcttgttttgcaaggaccactaagtttgccatgtttaattctatttgaaattgcatttggaaaaagttgaatggttggaaggctaaatccttctgtatggaggtagagagattcttataaaacatgtcattcaatccattctgacttacacaatgtccctcttcaatttgtaaataatgtccattgcatgtgtgcaagatttcggtaagggtgatgatctgaagatgaagatgcattggtaaaaattggaaaaattgtgttgggacaaagatcatggcgttatgaggtttctggatttacatcttttcaaccaagttttattggctaaacatgcttggaggctctatcatgacccttccgctttggtggctttttggttctaaaaggtttatatcatcagaatagaccttttaaggcaataaattcttctaaaagaggctcttatatttggaagaacgttttgtggagaaataaattatttgatgcagggacactttagaaagtaggggatggtagggatatttccatttacgaagacaattggctcccaatggctgttggtttcttagtcttgtctctaaatttacttgggattggtagtatagtggatttattgcaatctaatttcggagattgggatgcatatatgatttatggtttgttttctcctgatgaagcttcttctatactttctgtcccttgaccttcttctccatctagtgataaattaatttatggccatgattcttcaggcttctattctgtcaagagtaattactagcttgctactcattgattagagtgtgatagaccttctccttcacatgattttataacatgatggaagaaattttggtgccttaacattcctcccaaaagttaaaatatttgcttggtaaatttcaaacaatcggatcccttctaagtttaatttgatcaagtatggtatgcttactgatggcctttgtcctttgtgtgatgtccaggaagaaaccactcatcagctttgtgtgggtgctctactttttcacaatgttggaaatattgtgagtttaatctcggagaccctttggttacttgtattgattttattagttttatatactttattagaacttgtttccaatctctcaagtgagatcaactcttgttattatgtggagagtttggtatatgagaaataaaatagtgcataacaattctctaatgtctcctgagttggtggccacttgagtctgtgattttttgtgtaattatcagaagcctcttttgagtccaaaagagattgatggtgtgagggccacaaggcatcttgtggcatcttcttttcctcccaccatgcctcgctgggtgccccctttggcgggttttttcaaggtccatattgattcagctttagatgtgtcggggatttttatggtatgggtatgattaatactcatagggttgtctttacctcgactatttggcacatgatttgatattttcaagctgaaattcctgctcttcgtcgtgtaggagtccaatgtcatcgtttgtgtttggaaaatattcaatttgtgaccaactgtattcatgtgcctaataaaattaacaataatgtttttttggactaatcgttaggcttagttgttcgacatattcattataatttgactctctttaataatgtgagtctttctcatttttctaggataaataatgccataatcttgctaagtttgctttatttatggcataaagtttaagagttaagttatctgaattatattcatttactcgtggttgatgacatgaatttttaatgatatcactctcttttatctttttcaaactcttgctttttaatgtggaattttggggtgttcttcaaaaaaaaaaaaaaaaaaaaccttcaactttaaataaatatattaattaattacaaaattactaccaatatttatggcattacacaacaaatacttattattgttcttttctttgttctaatacttaattaacaaacaagatgaagaatcaataaaatacaaattttgtatattaaaacactcaaattattcaaaaaaaaaaaaaatcaaacacaacactcttagatcattcctaggcatacaaaataaagaaagaaaaagattcaagagatagagaatcttcttcttctaggcttagtgacatctacaacatcttcaatattagaagtgtccttagaaccatgcttgaagggattcaacttaccaagagtcttagacattgaggagaagaaagtctttttagagcctgatcctttagaagacgacgtcgttccgactgtgtgaacacttgtattacccgtactaccctttttcatatctgaaataaaaagcttcattttcataagctcgctccttaaagcctcgttctctcttaccaaagaaacgtctgtttggagttggttcttggtcacagcggtcacagctatgtcactcttatcatccacgcctccgctccttagttttagctgatcgtagtagagagcgtgaaggactatttgcactggtaatcgcttgttttgtgacgcgtgcacacgcgcttcgtacgagagttttagtgggtccattacactgcataccttttctcgttctatctcgtctaagttgggatgagcctgtccaaaaggaaattaatgatcaacattattatttatacaaaataaataatttaacttattcggaattaaaataaaaataatattagatcttgatttattattgcatttggtaaattattttacgttaaaatttattaattagagtagtgatattgtagattatatatgagacttgggtttgtttggtgtaagttgtattagatccaatattaaattgtattttatataagtgatgcacttatggtatct

SEQ ID NO: 21999 - DNA, 2321 bp, Cannabis sativa
actactgactgtcacaataatatagaatttatagtattaatttgaaaaagatgaatgttaaaaaaaactctctttttaattgtactatagtttctttttatttcctaccatcagtctgtttggtatactgtatcatattctattatatagtattatacttcgtattatatatcacatatttatatagtttatggtattaacttatatatgtgtatatacacatacaatttaatataatataaaaatatttgcggcaaaattctcttaatatttgtaattattacatatatgattctaataaaaaaatagcagtaaaaatactttatcttataaataagttgcagtaattgtactttttttttggctgttataataagtgtcaattaagcctattaaataccaactcaaattcatgtgacaatatatttttttaacttatttaatacataatttaataatatatcacaacgtgtttttgagttgacatttgatgactaaaaaattatacgactgtaataaaatcataaaataaaatatttttactgttatttttttttaatttaagttatatttgtaacaattataaatatccctataatataatacaatcttatcaaatgaatctaattatatgatatacgtggatattatacattaaatatttgatatgtatttattttatatatgttttgatgtttagagattgggtgttgtaaggcagctgtaattattagaaaagttgataaggacattttaaccttaacacattttgcttcaatttcgctcaaaaactggggagagagagagagagatgatcacttttgtatttattattgggttaccgagttttggggcaaacattatgtgtatataaatttaaatgcaccactaatataccatctcaacttccctttccttttttcttattcattacataaaatgttgatttaaatatttcaaattaagtatggggttctgaaaatttgaaattctatttttggatttttttgaaatttgtgtagaccttcaatattcaaaaaaaaaaaaaaagctaattttttatgattgtgtatttttatatttatttaagagtacttgtaaatttttttaaatattttgaataatttacagtaacaaaaataaagttcaaacagttatttactacgtgtttaaaaaaaatagtcacaagtgcaaaaaaatataataaaattttatttaattataatatataccactatgaaaaaaaaataaattaaaaactcctctaaatatcgaaccagataaaaaatctatgaaaaacatacctttaattaaaaaatttaatataaacttacccattaataagaactgtaatataaacttactcatattttaatgtaatatgataatttccttctcactaaattatggctcttctaccaagtttcatgtgtatatgtatataatataaatttatataaagtggtttacagttgtttatattcctaataatagtgagagtattcatgtactataaaatgcatcgagttgaaaaattgaccaatattaggtgttcttgtatttaatgagatatatagagagatatattgaagagagagagagcttttttttctcatcaagaatctctcaatagtaatagttacctttctttttgacgaaaaatgctttttcaaatagatacaaaaagcaacttaataagttatataacgttattattagatataatatatagggcttttcctataattgaaaaaaataaaatatgtaataagtaacaatgttttttttttttaaaatgcaaattgaaattttattaatttgttaaattagccaaaagacgagactgtaatttagtaggaacatctctcctactgaaaactcaatctgaaaaagaatatgacgctctaacaaagctgtgagtagtcgtattagtagattgtttaataaaaaacaaaaaaacattgtttaaaagaaataaaagctttcgacagtccatcaccactcttccaaacggtgaaaccataataatgttgatgcgaatagcttgaacaattgagagacaatctaactcaagtttaactttaggccacccatattaatctttgattcaacttaacgccttttttatggctaaagctttagccatgtctggtgccattgtacccctacgatagaccgttctggcctgaatcaaatagccacgatgatcccttgccaccaacccgaaaccataagatgaactgtgataaaaaaaaattgctgcattaatagagattttgattacattctcactaggtttaacccaagaaaccgccccatca

SEQ ID NO: 22000 - DNA, 3718 bp, Cannabis sativa
tggaggcttgaagcggggacgttacatcatcatccaagataaggactgctttgcctttaacatttggcagaggaggttgcaatgtggcagaaatatttgaggagacaatggtgctataacttggagatgtcataggaaaggtagcaggcataaatggtaatcgggtggatggcttaactgagggtgaattgggtggataagtggaaatcattggtgtaatgggaagatatgaagggaatggaataactggtgcttcatcagaggaaatagttcaggaaaccggtgtagtagcaggtaaggtaatggttggggaagtaggtgtagtaacatgtggatttgaatgtgactttgaggatgatgaagattctcggttagtcatatttggtggcagaggaagtgaaatcttagccagatttgggatagcagcagtgaaagaattcttagcaagtctagtcattaggggccatgctccacctttgaaaaaatcttatctgtagcgatcataaccagattaaggaagaggagatccaatcatagcaggaaaatattcaagagaaggatcattgccattgtaaatatgctcaagaaacttatggcatgattcaaaaggatgtccaatggtgccgcattcaaagcaaaactcgggtaatctttcataacggaactctaaccagaattcatcaagtgagtccttaagtttcaccattttccctctgagtaacggcttggaaatatcaagaatggcacgaaaacgtagaaaaggacctcaaccttcatggacatcaacgtaagtaccaaggaggtttcctgcccattcagccattgctttagttttacttaaaaacggtagtctgtgtagttgaatccagaaaggagtgagggacatagcttcgggtgtaggtgattgaagggcagtaggtgaagataacacaataagatgattttggaaatgccacggttccagcaataacactttcttaagatctccaaggcatccaaaagtaacaaggaaaagacccgaatgatgatcagtaatagtaacagggtattggcccttccaaaagccactcattttaatgcggaatgttttccggctaatatcccgagaggagatgactctagcatatagaacatgattcgaatgagaagaattaccattgctcaaaccaggaggaagcgttagaacttccctttcagattcagtgagatgtaaagtatgattcatatcatgcaagaggtgatccatgaaggctaagacaaaggattggaatgcatgaatactggctaaaatttgcagaaattcaaaaagaagggtggatggaacagttaaaattcaaatggagaggttatcatatacggttgaacaacaaaggaaaataaagggagaatattaaggatagagatcaaaaagtctggaagttaaaacagttaaaaagaaaaaaggaaactaactaccacaaagctttttaagggcacacttatctacataaattaatgtatatagtgtgttgtttgtttttgttattattattcttatttaagtttgtatgtgttttttttattattatttttgatactttaccgtactaaaaatgaagtttaaatactttgttcaacatgtttatttattttttttttctatttttttatacgcgtgataaataattttttgattcttatttaataaggcattataaactattcgagtttttttttgaaagaagtgttctttattaagaagagttatcgcccaaaagaatagacaacaactccgaaggaacactattaatagggcacatacgttcagccagagacataaagtgtcgggcaataaaatcaaaaaattaccaatgtacaatcaagagagaattttgatccaagaccaaaaatcaataaatctaattaagttcttaataattaaaaaaaaaatcgagtataatagaaaaatatttagcacaagcaaaatacaaagaaactgtcttgaaagtattataagtctcaaataatgactattccaaaataaaaaaaaataataaaaaaaaaacgtatttctctatcaaatatgtttattatatgcttatttattttattttttgaaagcatatgcttatctattaattattggctaattaggattttttttccccttaaactatatatgtacttatgtactaaattgcctttcaatttttctaatcgttaaaaattctctctaaactattaagatcattaggactttttttttaatttcattcaattttactaatttaataattatttatgtactaaattatactctccagactttgatatttatcaaattatacatctcaaactttgacacgtaccaaattatgcctcatgaacttttttttcatgttagacttttcctattaaaatttaacagaaattcttaaactcaataattttaatagctttaaagaatttttaatagtcttgaaaattttgaaaattataatataaaaattcgactaaaaagtagataaagggtataaaagattctagtgtataaataaaatcgtacaaagtagttagttttagaggtattcaggtgctatttacctttttaaaagaaaataagaaaaaaacactattttccttcaatatgctcaagaatgttctatcaatcaagaaatacaaaaaatcatttactatttatttatttatttattttttggttaagttttttggttaagtcggttttgtaaaggtcacatatgatgatgtaatgaaagtatttattgttatgtaaactcggttgtagacaataaaatcccaaagaagtataaaataataagtcagtgtcgtaagagtgacgccacgtatacgtaatcgtaaggtgggaacaaatgggaaaaaataatttaattttttattttttattttaacaaaaatagagaaaaagaaagtttgcgcgtagacagatcagacaggggaagaagagctgttttaagaaaaagaaaaaaaaattgattttttattttaaaaggaaaactttaattttgatttggttatttattaatagtctctgatgaaatctgaacctatatataaaaataaatgtaaaaaaaataaatatatactttgacagttgacagtacctatatatatataagaacagaaaaaaataaaaattcctttattaatatttttcttttattttaattttaatttattttttctttctcattgacgattcacactttgtattcacacacccttataacaaatatttccttcttcatcaaatctattttttttttctttctcttttttcttttcttgagaccaaagtttaagatcttcttataaattttctttttaatattattttctgttgcttggttatggagggtcatcatcaccatcttcatcaccatcatcatcaacaacaacaacaacagtttcatcatcttcttcctcaacagttgcaacagaatagtaataataataataataataataacaatagcagtgtaagcttagatgtaacagatagatttcctcaatggagtttacaagaaacgaaggagttactaatcatcagagccgagttcgatcaaactttcatggaaaccaaacgaaataaactcctttgggaagttatttcaaatagaatgaaagaaaagggttttaatcgcagccctgaacagtgcaagtgcaagtggaaaaatcttgtcactagatacaaggtaat

SEQ ID NO: 22001 - DNA, 2578 bp, Cannabis sativa
tggaggcttgaagcggggacgttacaaacttagcctaaaaatgacctaccaaaaagcaaaggaaagaaacccaaactacttttacaacaaaacacttaaaaaatggggtgaagataaatgcaaaaatgccatcacctgttgtttgaaattgaattaatatgatagtcgtgggcatgaacataaacccttcgacatctaacaatcaagctggtttcttggctaggtacctacagattatgaaatactctagggattagcaaaatgatcagaatcaaagagaattcaaatatcttaatccatggattgtgaaacaagaaaaaaagaaacctgaatgcaatacatgtcaagactataaaaatccaagtagaaactaattgcacacagaaactacatctttgaatctaagagattagatatgtcaatgctacaaaaatgacatgtgcaagaagctaaagagtaatatacagaagatataaaccagaacatagataaaagattcagagactattaaaattaaaaattagtaaaacattcaagtgttaaaaagactatccactcccactccaccaaaaattcttctcaatctctcttaaggtggaagttactaaattatgtcaatcatcaacattaggaactctatttccatctccatggctggagctcgaattggagttagacaatccaagagcatttcccacgttgatctgatctcgcattgtttgcctaattattcctctgttgacctttctcatcatcgcaagaaattccccataatcaatttgtccattctgtgatttcggataataacttttgaatgcttaacacatttttctctccatcgaaaaaacaaaacaaaaagcctacattatcttgattgatttcttgtatcatctcatcgaggtggaagtcgttcaaaccaaactctttgcaggcttgttgaagctcatcgattgttatgaaaccgctaccatctttatcgaaaaatgaaaatgctgacaataagttttcctctctttccagcttattcaagtgcacagttgcagcaagaaattcaccgtaattaatcgttccactattgtcaatatctgcctgcaaataactcacaagcaaaatgttatgcccattttcgaatctaatggtgaaattagtaatatcctcttactgcatccatgagatctttgatttcagatttcatgagctcataaccaactctaaacaactcttttaaaccgccaatttcttcttctgaaagcctcttagttatgacctgaatgcaaacgagatattagtgttctgcaatcgaaagggagatatccaacttaagaacattaacggcacaaatagctcctaagctttaaaccgaaaacctacaagtaaattcctccaacaaaattaatctatgtgagatgcgatgatcaaagcacataatgcaacaagttttgcataatgctaatgggattcaactgagtaaagaagcctcattccaactttgaacatttgcaaagtaaatactgcatcaaaccattgattcataaccatgtaatacccaacaatttgtgcataagaaacatgagcattttttgttaaagcgcgaaaatatttatttacccaataaatgaagaaccatgtaagcttcattataattctaagctacaaaaaacctcagcagtgcaaaattcaggctctacttaactaaatgagcattacaatcatgttaatcggttactcgcaaagccattatcttgagtttcttcatagcagagaattacttgaggagcgaaagcacagcaaaatcaagaggtttatctggtgcaatcctgtcatctacaatccaaggatggtttgaaagtaaaaaattcttactaatatactattatacctgaaatttggctagcatatagggtcagaatgggcctctaaggaactgctgcaaatagatcagaattcagtaaacaacattcaaaactacaagctgatacaggaaaattcacaaagaaaaggacttacgtatgattcagaaggcggaggtgtttattggagataaacccgtcatccagaagaagtcatctttgaaatctgtcttattgggtagaccatctatgagtctccggtcgttagtgtaagccccgagataatagaattcctcacagcatttttttctcgcagggacagctttgacagagtaaaagcaagcaatctccagggaagtaggacactcccagcctaagatgtggcacaagaccttgaggctcgcgaggatcctgtaagaagtaggattcagctggaagggggcaacctcgaggtagttgcagtagtccttaaagtaatacctcagggggagagtctccccagcattaatatgctcaaggctccaggctccaacacccgaggagttactggtgctgggaccatcacactcctcgcgtattatcctttctggaggataacagttgaatttcccaggtgccacaaacctgataacgtaccccttatgttgcctaatgtcacaagactgaaggatgccaccaacgtaggccccaatagacctaaccttagactcgataagttctgcctcaaa

SEQ ID NO: 22002 - DNA, 3023 bp, Cannabis sativa
gcgagtgtaataaaatctactagaatacatagtacaataatttgagtatagttttaggtatgagtaatattaaatacatacttaaattatacacacttattacacacgatcatatgtattaattcactatttatacttttttgagtgattcattgaaaatttaattacttgtgtgtcaattataaattaaaaattatagaatggtgtgaacaaggagtgatcatgatcatgatcgatcatgtcatgtatgggtggagaaaaagattggctagtacccacaccgaatttctctctctttgttatttgtattgaaccaaaggtataagaccaactccataaaaagctgagtaggccacaaaccctactctttagaatcttttagattccgctcttaacaatcactaatcacagattattatttctcaaacagaatcttctacctttatgttcctcagtctcgagtcacgtacggcttttttgtttagttaattaattcattctctcaaactaaaatcaaattaataattaaaatttttcctatagtaataattatataaaagacaaagtggaagaaaacaaaaaccattggataataagaatgtttaattaatcaagtctagtatcgtttaatatatgagatgggagaagatataataacaataacaacaccttgtctgatagcactgtatgatggccagattattctgattttatttgtcacttgatctaatcagtatagtttgtttgattttattaaagcctaatcccatttataatattaagttttcaaccatgtttctgaaaaaaaaaaaatccaaccttgttaaattttatcgagtaatataacaatcatatattgtttcaattaaataataattatatatcagttttggcataacagctgacctgacagtgtctaaaaaagacaagagaatcactttaaaaccactacaatccactcaacttgaaatttatgatactattactagtggagcgtatatattctcccaaatgtatatatgcatatatatagaatttatttttttttttgctaaattttctccgttacaaaaaataaaaggaagaaacttcatatcgaattgggaaagaaatacactgcatcaaaaacacaaaaaaagaattgggaaatatatatagcttcattaataaatatattttaacagttcacatgcttgaacaaataataatgagattagccaatttcgcaagcacacatatacaatacataaataacatctaaattagcccccaccattaatagctatatatgcattaatttgacatattttaatattatatatatatatataaaaaaaaatagtaatggagaaaacgtcatcgttttggagtaataatcggtggccacaaggctgggagggtggtaataatttcagatttggcagaggcatgggatcttgctgacgtggcagctgagttagaggcatgagctgcttcttctttgtccattttctcatcgtggttaatctgctgttgcctgcactctaggctgcagtatgcactaatacctctacaaataaaaaatcattgccttaattaattaaccaaaaaccaattaataattcaatttcatacattttaccatactcttcattacatcaatattctattattttttaaagatgaagagatctacagtaacttaggaacttgatctaaatgatatatcagaatatatacctatacatgtaaatatcacgattaggaacgaggcggcgtttgcagagaaagcaagctctaagaaaatgagaagtagtagtagtagtattggtctgagactgagtaaaatcagcggaattactcttgcaaagaccgccttgtactacggcggtggttgccttcttgagagggttgtgtggatcgaacggctgagatttgtcgttggtgttcagatcaaaggtgatctccgtcatacttgttgtcctcttcatcgacgtcctagccctcttccccaacatctttgaacaacaaatggttagtaatactctggtaaaatggaaggaaggtagtgtattcttcaaatctagagagagagagagagtagaagaagaagaagaaagagagaggaaataggagaagaagaattggaaatgtagtagcatagcagcacacataaaagaaaagcaagagggcaggagagaatctgggccgttgatctctccgttaaagaagttaagagagcgacgtgtggacaagaagtgtctggttggatgtaccacgtcatcaatgcttttattgaattaataatattattattattttattttatttttggtatgtgtagttggcaattggggagtatgagaactttggatacttcaatttaaagaaaatctcattcttcaatgaccatgcgatgcgagagagagagagagtttattgggtaattggtgagttattacgttaatcaaaaactcaaatgaatatatcacaacaagggattccttttttattgtaattaatggtttgcctattattattattattattaaattattattttttgtacggttattattatattcatttgattaggaggaaaggaagaaaaaaagtacagttggtccgcttttttaaaaaatcaaggtatattatatatatctaaaaaaaatcaagaatgattctgaaaaaattaaattgtatacactattctttagggatgttgatcaaattgtctacaccgcacaaactacttgcaccgtatcacatcgtataaaaaatataatttaaatacagtgcagttgtggtttgtgtttggaaaatttgaatttctatacttacaatgccttataatttttaaaattggtcatatatgaccactttactaatttcccaaagctacccctcacatttcaaatcctaatcttagtctctctcttcctctctctcaacccacactctcggtcagcctcctcaacccacaaaaacccgaagctatgctcacggtgatggcgcacggcgcaggcgacttcgacccagcccat

SEQ ID NO: 22003 - DNA, 3432 bp, Cannabis sativa
  modified_base (2879)..(2893): a, c, t, g, unknown or other
taattggagatataaaataataataatttctacaataaaatgttctgtagtatatactctctacaaagcattatgtacggaaataatttgctagcaatttattatagaaatttttacatcgttttttttaaaaaaaattacaaaaacatatttacaccaagaaatttttatttttgctgtttgaacttttttatttacaaaaatacaaatttcagtaaatttttatcttttataatttaattatcaataaataaaatacaaccacacgcgaagcgcgagttgttccctatttgagttatacttgtcatgatgttgattttttttcgttatttttaattatttaatagtttattgatcgttgttttgaagttgatttttcgttagtttttagttgttttattatattttttgttgagaaaatcgtatttttataattttaaaactttaaaattataattttgtaaataaaaactttaaatcataaaattataaataaaataaaaaaaattaaaaaaaaaaccctttacgatcatatattaattatatagggatatgattttgtcccgtgattgtactttcacggaatgcattccgtgatgtacgacagtcatcagatgagggagttatttgacctgacggctgagattgacttaggggtaattagggttaaaaagtaaaaacgtactctgacactcatttaatgtaccctgagacccatttaatgtaccacagaatacattccgtaaaagtacattacgggacaaaatcgtgtccgtaattatatatttcctttcgttgatataccttaattaatcaaatgagtgtaaaaacctaacgagctagcttgaaaatgtagatgtaacgaacccttatccatgcaataattgatggtgccaaaagcaaacgtgattaaagtcttaaacttataaatagttggaagataaattataatattatttaacataatgaccgtatatagatgtaataagtaagtggaaatcttaacaaatatcaacttaattatatatataattaatttgactattttcttttgttcaaatatctttgatattgcagcactttcaattaaacatataacattagagatttcccctccccggcccgtgtgcactaccaaccttaatacacacaaaaacatatactaggttctaaaatcaattacatataattaaccaatatatatatatatatcatataagaaaactctacgccccatgagaccatgacacgtagctcaagattctcagcagagtccgacacctggatttatgaagctatgaaagtagggagtggtagtagtaccagtactaccctatatataaaaatacaatcacctaattccttaattttttggttaatattttttccttcaatgtttaatgtttagttggatttcgattatttcattatatatatttatataattaggagtgatagtgtgtcaatattaactttttattataatttcttaattaatttttatatttgaaaatacatattaaaatttattttttatggcaatattcttcaatataattataatatcaaacttttaaatttttaatttttttttaataatttgtagtgtcgaaaataaatttaaatttttttaaacacaagtaaggtaaattaaaatattaaaaattttattttcggtacacttttcatcagaaattttcaaaaatttattaagataatattatatctatagccaatataaaaaaaaaaattaaaaaattattctaattttgggttaagattaatagcacaccgtttatataactgtactagtagtgcaatgcatggtcactctcaaattttctacggaagatttttcactttcagacatgacccttaataactggagtagtactgtatatatttatataaatatatatctgtgtgtatcatctgttaaagctcacctcacgtacgtacgaaagaaagatgattaaagagccaacttttttttttatatatttttattattatgtgatgtgattatatcattcatttatttgataaataataaccacaccaaccaaatccttatacaatatatatacacagaaaaaagagaaaaaaaaaatagcatatatatagacacagagggggaaagatcacggtgtttaattttagcacaaatggataatatctttttgtttttctaattttcttttggcttaattaatggtgacaaaattaattaacagtcacagaacagtcaaaaatgagaatatatttactaattgtttttttaaaaaaaaacaaaaagagtaataattaattaattaattacctggaggaagaagaaaaattgaagagctttcctttagtggagaaaacaatcaaagcaacatgggcatcgcaaagcacagagatctcatgagctttcttcaacaatcccgaccttcgctttgagaaggttacttgtctactgatcttgttctcgatccgcttcatctcaaccctacctcttcccattgttaaacaatcaaaaccctaaacaaagcaaccgaccatatatataatatgaaaatgatgggactggaaacacaaaagacctcggataatacagagagagaggtagcagggtttttatagagtggagaaaagggtttgggtgtggtaaatgaaaatatgattggctcaactactccaatttcagctacacattttgcaggggttcgtacgagggatctcttcgtatgagagagagagttgatttgagtagtgaaacaaaagaaaaagaaaaagagagagaaaagaatagctttgcccgcgggaccagaatggggacgccgctcactcacttccccctcccactttttatatccaccattattattattattatnnnnnnnnnnnnnnntattattattattatttaataaatgaactataaaaatagatgttttttttttcattttgtacaaatagtaaattttttgaataatataaatactgaaaataaaatttaaatattcacttagcataaaaaaatatttattcgtgtaacaaaatatctaaatttatttttagtactataattttttttttttatatatgaatattaaatagtacgtccaaaataattacaatatcattagataaaatcgataataaggttatttatgaggtttgctgagtgttggaagtatcaggtttttcaagacaatgcactcttttcaggtatattggtgtccttatttgtgctaaaaaaatatcaaagcatgaatgctcgatcttgatagaaaaaatgacagctagaattcgagtttggagcactaggaatatatcctttgctggtagaacaatcctcataaattctgtgctttcagcaatctatgcatattggcactacaacatttttacttagtaccggcggaagtaataccggcggagccaaac

SEQ ID NO: 22004 - DNA, 3865 bp, Cannabis sativa
gaactccaacttctaattctagcagtcattctctcagctaatatatcacattctttccctgagatctttttcccacaaattggaatacccaaataggtgaatggcatctcctgcctgatgaaccctgagatctgcataatgtggtacacttcaccaagctggatgttactacagtatatggtagttttgctggcatttgggtataatccagatgtgagcgagaatgtttttagagcctgcaacatgtataaaacactcatgaaatccccatgacaaaataataagacatcgtcagcaaaaacaaggtggcagcttcaaactagaacatcttagaatataaaaaagtattattttagaatttttttattgtaattttttattgcaatttttatttaatgcatataaaattattatttacataaaataattaaaattataataatttattaatattggatttctattaaaataataatactccttaaagatattttgttcatatacttgtagtgatatgagactattatgaatgttaaatttataagttatatagttttaatattgtccattctaaaattagtattatatattctatatgcgagtgatttatattattgatttactatgtttgattgataaacttattctttatattaatgcgataaaatattttatattttttaatttttatcaaatatctaaaattaaaaaaatcttttaagttttttatcgattaaaaaaatattttttatatttttttcattttaaattattaattttagttgaatatatataataattattaggtatatacaataattaaaaactatagttattcataataatttatttatataagactacttttttttacattttaaattatttaaatcactaaatttatatataaaaaaaatatttttaagagtcttactattctaataaaatataaattattacagttttaattattctatataaataaataaatttattatcaatatttatatatctattatttgtataaaaaaaataaagtattatttcatgttatcttttttattttttgtttttaatatttttttttttatataaatattgtaatttgagtccttacaatctcacgtggtttagatactaatgtagattttgtattattggttatcaataaatgactatttcttttactcaactttgtgagaaagttagtgttacattattcttttttagtgggtgattaatgagatttgtcttacccaattagttatagtttttattttctttagaaaaatgcaacaaatatattcttttatttttcaatctttgtcaaaacttcaaaattataataaaaataaaaaataaaaaaaaataaaaaactgaataataattttcataattagctaaaaaaatatcaaaatcaaaatttagaattattatgtaatttaatttatttacaatttatttggctatttggtacctagtaaaaaatagatagtttagactatggatgggcatcataaatattatttctattcaacgtttaagttttaatgtggactcaaaggattttttagggatttctttagttaagtataacacgtttatcgaaaattaatgaacaacaaataaaaataaaatttgaatatttttcttattatatatgaataaagaaaatatgtttttcatgtaattagattagatcgatttttaattagattttaaaatttccttaaaaaaccaatttaatccaatccaatccaatggtaacttgatattcatttttttataattagattggatttatttgattcggtgtaattgaattggttatgtgtaattaaatcataaatcaaatcacaatcgttattgaaggttactaagagaaagttttaagaataagataaaaatatttgattataattagaaagagtatatcattatactttattttgagaaacacaatatctaaattatagttttaactaaatataaaaaacgactaataattttaaaatatagaactaaaatttgtatttattcttaagagcagctagatttactagtgtatcataatgtgtatcataatcaaagacaatgactatatatccccttcattatatgtagcgacatataatagcataattttgacagtatacattatatatgtaagaaaattataatacaacacagggtacttatccagggttccaaacaagaaacaaaccagaatccgtaaagttgctaagtccatatcaaatctaacaatttatatatcttttaatgatcacagcaaaacaaaaaccctaagctggttattattcagtaacaactagcacaagagacagaacaaagtacagagacaagagaataatgcaaaaacagttgggagccctggttttagttcgtaagatccaagttgccctcccctcctaaaaaatcacatctctcttcatttggatttacatttccaaacaaagtattgcataaggtggtttgttttaaaaagaatcataagatgtattccaaaataatcatttaagtaaatgtgacagtaagctccaactgttcataggaaggatccttaattggagtttacttaacctctgctgctatgacgcttcttcatcatatggcaacttgcagggagccagacggtcttttgacttgtattgtcctagcatttcggctacagttttgcaccggcattcctttccagggcggaccacatcaccatagagtgccatttcaataatgtcaagttccttatctgcaataagttgttaggaatgggttatagtactgcaattttcaatgtcgtgaatataatgagtaggttgcttgtacttataggaaaatttttaatcttttttttttgtacccttgagtgtccaggctagcttgtgcgcacctcaactaattccatggccccctgccacataccaagcggaaactgccagtggcctcaaatattgagtctagtgggaatggaagcaatgactgtgttcctaatcacacatcccaagtaagaccttttaccactaggctaaccccgggtaatttggtgcttaaagctttatataagtgacagcagggaggaaagaaagggtagcaaatgtgtgagtgaattgtaacgacccttgagctcttgggagttctccaagtccattgaagaatctgggttatcagtttctgtattttcctttcaatttcagcaacaatgttttttattttggcctattgtccctctttggggttttactgattttgatttccttgctttcgttgacattttatcacttgaatgattctacactatacaaaaggaggagcatataaatgtgtttgattgttaacaatcatcaaagaattttatgcatagctttcaaggccactggtctatgcaacagaaatgggcaagtttcatggctaaaagcaattgaaatggtgaaatatacataatcatttatatgatgaaatatacacaaccacaaatcataatagtgagtatgttagttaagaatatacatagccctatggcccgatcaatagatgatcaatgatcaagaagagcctctgtttgcctataaaagaaacaactgtacttcctatttgtcacaagcttgtgtttgaaaattatattttctctctgtaaaagatttcccagctcgaggacacactatcttggtattttaaacaaactcaccatgagatcatagccaaagtaccatcttggtatgccctctcacatagaagcgaatgattgtttttgtgtttattttgaacccaaagatgagtaagcattccaacatagcaatgcagtctaaacaatcttcggttagattactttaattaaatttcatgatct

SEQ ID NO: 22005 - DNA, 2360 bp, Cannabis sativa
  modified_base (1193)..(1193): a, c, t, g, unknown or other
agtatcactattcctgccattggttatgcaggtggtatcatgttttcctggaaagtgggttttgtttttaaatttatcaactgttctagtaattaaatatagagtttagtatattctgaccccctaccttcctgtggcttctatcttgtgtttatggtcggccgtatttccactcaaaaaaaaaaattttgggaagagatcatgaatataggagacaaatttggtggcccttggctaatcttgggggatacaaattttgtgctcaatgaatctgagagggagggttctaaagggaaggacttttttatccctattattttgaagttggttaattctcggggtcttattaatttggtaatccaaggagataaattaacttgggataatcattagtttggtctcgcccatgtaaaatatgcccttgataggggccttgttaatgagggatggaacttactcttccccaaagcagtcctttgatcctttcatactagtaactcgaatcatagacctctctgcttatattttggaggtattgatgcaaagttcaataggagttttgaattcaaagaggcttggactcgggatgaaagaagtaacctagtggtaactcatgcgcgggactaggttatctttccttaggccccagccagattgtttaaaaaatagaagccactcgagttaccttcatctagtggaacaagcttcagtatgggaaaattgacacgactataaaagatcttgaagctaaactggaaaagttgcaaaatctccccacggggactagagactgggaagcaaaactcgagatccgtttggcattgaacagggcgctggaaaggaaaactctttattggaaacaacgagcccaaatctcgtggattaaagaggggaataaatgttcaaaaaaaattctttctcgttgttattttcagaaggagatggaaagctatcaaaagcatcttggaaaaaaattgaaactggctccattccaggtttcagattggtaaggaattcctaaagttcttcaaggggatattccatgagagcaacaaggggcaaaggttgaattgtgcccacctaatccccaatcgcctttcacaagttgatcaggaagagcttctcaaactctcaaactctgaagaaattcgtagaactctttttagcatgggtatcaataaagcccctggccngacggtatgtctgttctcttttttaagcactactggaaaattgtgggtggtgatttttgtgaaatgattgatgatttttttcacactaacactacgcacttggggatcaatgctactacttagttctcatcccaaaaacttaaaactcgaaaaggacgcaccattttaggcctatttctctctgtaatgtttctcacaaagttatttcaaagatcactgcaaatagaattaagcatatcctgcctaaaattattttccccactcaagctgccttcgttcttggaaggtatattcaaggcaacaatgttatagtcccggaaatcatccactcttttagcaggaaaagggcagagagtgtttctttgcaatcaaaattgatcttatgaaagcctatgacaagcttagctggaagtttgtcgatcatgtcttaaggtgttttggggtctcggataaattttgtcaatggattgatcaatgcatctttaccactactctcaatgttcatctaaatggggattaggttggtaggattagaccctcttgaggtttgagacacggagaccctctatccctgtatcttttcatcttggctgggaaaattttatctagactatttgaggaatctatgaaaaagggtgagattaagggtattataattagccagaatggccctagtatttctcatatattctttgcagatgatttatcttggttgggaaggctactttgggggaggctatgggtatgtggaattgtcttggtaatttttgagattggttggggcaacatgtcaataagcttaaaacctccatcttcttcagtaagaatacatccgagagcatgaattctgagataaaaaaatgcccttggtattggcagtaaaaaagtcaacatcatacctagttctcccttcattccggtcaagacacaaggatgcatattttaattttattatggagaatttgagttccaaattacaaggttggaaggcaaaaaagctgtccacggtaggccaagcaactctcattaaatctgtgggtctggctatgccagcatatgctatgcaaactactaaactatctagtcgactcgctacaaagattgatggtatggttcgtgacttttggtggggatttgataagggtaacctgttgggttttatgccct

SEQ ID NO: 22006 - DNA, 4568 bp, Cannabis sativa
  modified_base (1586)..(1588): a, c, t, g, unknown or other
gcttctcggtcttttatgattgatgacttccatggttcaggaatggttcccttggctgatctgtaagttaactgttcatgtcaaatttgattacccttttgttcatataactccttaaattttacatcattctatcgattttttcagctttaatcataaaacaggagctgaggatgttcacttcacatctgtttcttctcactctgaatctgatagtgaagctgatattgaccaaatgaatggtgatacctatgatgacaatgattcagatgattcagagatagagatcagtcctttggggacgaagtcttcgggggagtcttcttctgaattgggggatgaaccttcagctatggagatgattatggtcaaagatgttaaagctggatctgaggttagttttttcatatgtttctgtgaaatgttaggggttgcaatcatggaatatttgggatttgttggttagtttttctgttttgttagttatatttcgatataggaaggtacagtagtcattttgcttcttgctttattgtgcttttattgattgcattacaaggtttttgaaagcaaaacaaacaatagaattgaaatttagattccattacaattcccattcatgccaacttaacttgtgtgtgcgtattttgtatcacatcgcttatgtgtgagtgatttgtgaagtttatattacacttaattgctaccaaaccttaaccccatcagagggtttcagtaattgggtaaatgctgtgtttggtgtgattaaatctatcatagaaacacgcacaatgtgtttgattttcatcgacttagtagccaatgaaatttcattctttttgacttaacataagctttactttgaaaatgagtttttaggttggttttggtagttaagttattttttaatcattttcttcttttgtcaggtttacaacacttatggctcattaggtaatgctgcattacttcacaggtatggatttacagagcctaataacccatatgacatagtgaacatcgacatggaaatagtactcgaatggagctcgtcgttgttctctagccgacacactagagcaagggtatctttgtggaaaaaactcggtttctctgggtgtgatagccaagaagagtctgattattttgagatctcgctggatggagagcctcaaatagagctacgaatattgttacacataattctgttactcgaggatacatattacgagttggattctgcagtgtcaacttgtgtgaattcagttggggaatttaaggaaggaaagggcatgtttttgttgaaaggaatcacaaaaccgagcaatgacatgttcatgaacaaaagtgttggcgacgctcttttatcggttgcaaatattagagagagtctttatggttcaaattcgttagaggatgatattgaagcgttggagaagtgttgttgcgtaagagataagaaattgtaccattctttggcgcttcgaattagcgagagaaggattcttcagaaactcagaagttatgctgctgaggctgctcatttgagaattggcaaaagaacttctgcaaggaagaaatctaannngacttgaaatgaaatatgagattttttgttgtaatgatttgattgtttttttgaactatttcttgttttcaagttatattttttcaattcaaaagaggccaaaacaaggttaagagtttttgttaaaggagtccattttgattatcaatttaaaaagacaattttggatacacttaaaaatgttgttccaatccaacttaaccattgttatgccaatgaagttaagtgtataagtttcttaatatgtaataatatcgcatgtaattgttgagtactacacattttgaaactcagatggatttagttcaagagccactgagccacacatttgggattaagccttgtctcaaaactcactctttttcaaagtttctaggaatagtataggacataataaatagtgcagttgaagataaataaatgttcacttattagtcattagcacaaactgacataatctctatttacatgaatcactcacatgtcaaggaatataggagaattaattacatacaaactgtgtagattattgcatgaacaaatcttttacagttaatacaaaaaatagtatggtattttactctatattattgattttttattatcttcacgtgtattcttgtatgttattatctcattgaaaggagccaaacaacagatcagaagaaaccctctttgtcggacagcttcgatggaagccgtcttatgtcttatccttctctgctttggctttctcaatagactccatggtttcttcaaaagatttctgaacacagcaatagataaacaatattataaaaccgaaaaaacagcttaagaggcaaccaaaattaaatagagtaattgcacaacattgaatgtgggaactggatgaggagttggctacttggcctgttaacattagtttgtgtctgctctcctcattttgctctaatcatttctattatgtaattttcgaattatgcaagtatgattttatgttgaaagacataataatggcaatggttggttgaaacaggaattaaggttgtagagagtagagtaacataccccggaattatgcatcttccacaatgcgtccttgcccatatcgattacaaacatcccacctagtaaagcactgtatacagaatcaaatcaatgtcttaaaatcagtcttaactttcaaccagtaaactgctgaaattcgttactccattacgaaacatactagcattcataatacagcagagcctaaataggaataacggctattaagcacaacgattctgaacaactaagccaaaaaaacaagagtattgatacttgcttaaaatcaccaacatctatgtttctgaattccagaaattgtatcacagcttgacaaggaaaatatatcaaattccatcaaggcataagagaacggtgtgccccgttcatatcaagagttgtgatttgattataacattatctaaacatgaggaaagcaactatcccaaattggcaaatttattgggaaaacaatcttgcaaatgatagattaacaccctcaccaagaaattcagatagtttctttcaatatgagaagaacagaagttccaaacttgggattcttgctagagattaaaataatcaatccacccaatatattttacaaacccaatcagttcactataccaacttaagttacagaatccagagggactttcaagtcaatgtataatctaattcaaactataatctcaaacccaattcactcctaactacaatcaaacaacaaattcaatgatttccaccatacaattgtttcatttggcatttaccaatatgtcaaattctagtatctcaattctcaagttccataaactaattcaatgggaaatctcatcataaactaattcttacaatttaggtcacaaacactatataatcaaataaaattctcacccaaattcacaaattacgaataaagaaatgaactctaaaggattaagaatcttacccagcaaaagccacattaagaagaaaagctctcgtagttaagtaacgaagaacattctcaaatttcgaaatgaacccattagagccagacccagaaccagaaccaggtcgatattcactaccataattgtgttgaccatagccataaccatacccataagaattaccagtagcaccaccagaattatgataccgatatcggaaattatagtcggcgcgcttccgatcgtcgctgaggatctgataagcttcagagacctgtttgaatctgagagtagcggtgtccttgacagatttggaagatccagaatgcttgtcggggtgaaatttaacggctaatcgtcggaaagcatccttgatttcgtccttggtggcgttcttggtcagacccagtacctcgtagtggtccatttgtgtgaaactctcattacgaattttcctgagaaaatggaaaaggagaaattgggtttgtatggggaaggagagaggaattggaaagttaaaggctttggtgaatccatggcggggagaagtgtattggtggcgggaggaaatggcgtcttcgtggcgcttccatagccggcaatggattctttccttccttctaattctaataatttattttatttattattttttttcttactaaataatttaggtaattttttttttagcattgttaataagagtattgtaattaggcactatcttaaggtggtcttgcaaatggggatgcacatgccacacaaggcggataattgtcgaggagtgtttgttctattctcatttttgtttagaattttaatcttcgttcttgcttattctttattagggatgaggcgggaaatttcctaatgaagatggggacgggaattcccttaggaatggggtctcacgagaactcacccttaatgaggcggaaattcctcaaagttggcattaggaattctttaaatatcatattgttgttggtccaattaaagtgtcataatgtgtgcct

SEQ ID NO: 22007 - DNA, 8260 bp, Cannabis sativa
  modified_base (3707)..(3718): a, c, t, g, unknown or other
tataaataggggcagaattcatgaaaaaaaaaagcacaacaaatttgagagagaaaatattgttattattcaaatattaatattgtattctgcactccgaaaaatattcctaataataaggactcgtggagtatgtagattttaactacaaaatcacgtaaaaaaatctagtttttgttaatgatacatttatttctgtagtatatctattacgaaaaggctattaatttggttaacaaaaatctgcgttaacagtttggtgctttcattgagagccttggtgataaaaacttagaaaaatccctcctcataaacataatctacccatattcaatggttgataacaatcaaaacgacggtaatcgtcatgaagaaacattctatcgtcttggcaaagagcccatgggatctcaaagacccaacacatctgaaataccacactcgaggaggaacgatggtaatgatgatccaaactcagagaggagaaataaggatgtcaataactctgccagatacgtgcctaggagtgaggatgcaatagacaactttgacaacgtttggctgaatctaactgacaaaatattgagttggagagagaagccccagcagctagcgctacataggggatagttcctcagagccaacctaatcatgcggtaaggagaccacgaggaagatctcgaggctccagaaccagaagacaagaaacaaactaagggaatcccccaaatacccaagaggaacaacttgggaataccagagatgttcctgtggaccaaacaaaacacccaaatcctaataacgcttagaatcaagaacatcgacgagatgttccacaaacttcccatggatttgctaaccaagggaatgaacgaactaacatgtcagaatcatctcacatgaatgaagaatcaaggcctcctcgacaagggaatcagggatttcctcgtgataatgagagaaatcctagaaatcaactaaggataagtggtcttcctccgagacatcatcaacgtccatcccgagcggatagagacaatgtacacacgtacttaaaatagaggatgtgtgtctaatctcatccaaagaagaaggtcagtgtgagatgaagcaagctcaagcacgagacaatcaaggtctcgagggcatagtcggtcgagtagacaaatgtgagacagaagtagatcttgacgctattatgctgagaaagcataagtaactcacaaagttattaatccgagagttacttgaagacaagatctgtaagtaactataaacaaaggcaacttgaccttcgtgagcacttaaatcaaagacagcttgaccttcacgagcgtctaaaccaaaatgcccctaatttgcgtaatctactcaatcaaaatgcaaatcggcaaccagtggatcccatccaactacgaataattcaactagaggatgaattcagaaaatatcaagatggagaacatggaaagtttcaaggatatgactcagacgaagaaaccgagccattccatccaaatatcttaaatttagaattttctcggggatttaagaacccacgtgtctcgcaatatgatgggaccacagacttgatcctctttaaacaactttaacactattatgcaagcaagtaatgtttcaaataacttacgttgcattttattcccaacttccttaacaggtgccgcgagcagttggtttgataaattcacccatcattccatcacgtcctgggaacagttgtcgagagactttaaaaagcattttcaagctgcaagagaccattgacttgaagcatcgtccttgaccatcataaagcaacaacctaaggaatctcttaaggcgtacttgagtcgcttcagtacgactattacaaaagtcagaaacttaaatgatagtattcaactaacaacacttcaagcagggatcacaattgacttatctacagtaggaggtgagttatggagagtaatctctagggtcgccctgtgaggaacattaatgagttcaatgaaaaagcacaagtctttgtgcgtaaagagaaagcaaggactgaaatgaagctgtttaaaattggctcaggaagcaaatccagcatgagtacggtaacaacgagcacagtcacaacaaaagtagacaatcctagtggatcaaacacaaaaggaaaggatgacatgaaagaatcatccaagaacaaaacgaagtagaaaaaacatgacaagtacgtataaatttacttggtatacaccaaattaaatgaaactcgcgagaatatcttccttgctaatgaaaacaggattgcattttgcaaacctaagccaattaggcatgcgagacacaagcaagattcaactaagtactgtcgacaattgaaagatgaggtagaaaacttgatctcgcgaggatactttaggcaatatgtaagaaacaggagagcctaactagcctaacaatcctaataacccaaacaatcagagattgcaacctcctcccgttgagggcaaggatatcttggtaatttcgggaggaccacacctcgcgggaaatagtaacaatgcccaaaagaggtatataaatgaagtgaagaatgaacaatcagcgttcgctcctgaaccaccaattatcttctctaaagaagatacaaaatatgtgcgatatccacatggttatcccctcgtgataacagtccacctcgccaataaaagggtgaaaagagtgttaatagataatggaaattcagtcaatattttctacaaagacacattgaaaaagataggattagagaattccaagttaacactaagcatggtgagcctatgtagttttaatggcagcacttaacagattcatttcaaagtcaacagataaatgccttccattttttaatattttttgaggcaacaagaaatttgaatggccagaagaatgcgaggaagcatttgtcaacacccacagttttggccaaaccaataactgaagaaactttatacctttatttagttgtctcggagcatgccattagtgcagctttagtgcgagaagagggtaagcaccatcaacctgtttactatgtcagtaaaaggttacttggggcagagtcgagatacccacctttggaaaaacttgtactatgcttaattcatgcatctcgcaagttacaaccatattttttggaacatccaattaaagtcttaaaaaatcaaccattaaggcatgttttatcaaaacctgatgcttcaggaagattgataaaatggtcgattgagttggaacaatttgacatagcttatcacccaagagtatcaatctaaggacaagctttggctgactttctaataaaaagaataaactcagaagaagaccctgatgttgagtgtgagacagaaacatggaatctatatgttgatggggcttcaaatgagaatggctcgggggtaggtgttacaataatgtcgccaaataactttaaattccactacgcactgagattttagtttgatacttcgaacaattaggcagagtacgaggccttgttagcaggtttgagaacaaccgagacactaaaagttaaaaatataacatggtatagtgactcacagctaattgtaaaccaagtcttgggagaataccaagcgaaaggcctaaagatggctaaatatttagagaaagtttggaagaacttagaaaagtttgattattttaaaatnnnnnnnnnnnnaagagaacaaaactctaatgtagatgcacttgcaaagctagcatcccaatttgatctcgataagttgaattttgtattggtggaagtcttagacgacccaaaatatgtgatgaggaaaaaattgagatgatagatacttcaccaacatggatgactccaattgtcaagtatctagtaagtggagagcttcctatgaacaaaaccgaggcacgtaaactcttataatcaatacctcgctatacggtggtcgaagggaaattatacagaaggggttattcaatgcctctcttacaatgtgtgttaccagcagaagcaaatgaaatattaaaagaaatatatgaaggcttctgtggagatcatgcaggttgtcaaagcctttccaagaagattatccgtcaaggatattattggccaacaatcaacaaagacacacatgaatttcttaagagatgcgataaatgccaaaagttttcacatatacctcgcgtaccaccaactaaattaagaatgatgacctcaccatacccatttgcaatatagggaatagacctgattggatccttacccaaaaggcgaggaggagcaaagtatgcaattgtggcagttgacttcttcacaaaatggacagaggttgaacctctagtttccataacttgtaaaaaaagttctcgattttgttatcaagaacatcatttgcaggtttggcattctaatcaaaatagtatctcacaatggaactcagttggatggagaattattcactaagttctgtgaagaataaaattattagaagtttctcatcaatatcgaggtctcaggcaaatggacaagtagaagctgtaaataaaatcaaaactattaaagaagaagttagatgctgctaaaggaagatgggttgacgagcttccataagtgctttgggcccatagaactatagtgaaaacaatgatgggacacactctgttctcattagcgttcggctcggagcaatgttacccgtacatgttaacattgcaacccttaggcgtaaattctattatcaagaggaaaaccaataacgtttgaatatgtcattggatctacttgaagaaaaatgcaatgagtcgcaaataaccaatacagctgaccaacactaaataacgagatactttaacaaaagagtctggaaaagactgtttaaagtaggagatttggtgttgagacgtgtatttacaaatacgcgagacccagcagcaggagtgttcaacccaaattgagaaggtccatatgttattgaagctgtcgtaggaactatttacaaattagcttggcttaatgcctctctaataaagaatcactagaacagtgaacatttacgaccttattaccagtaattttaacgtgtaaatactatatttatctttctaatgattaatcattgttatgaataaaattaaatttgttcaagtaattataaagtttctttcctttaaaattacttaggggcatatatatgtgtataataactagattccacctagaaatatatattgtattgcaaaagataataataataaaaaaaaatcacaacgaaaagaataattgattgaaattgtcttcggacagtatgaaattaagaattgaaaattcttttctttaaaagaaaaaattaaaatagcagttgtaagtgagatttttctcataaaataatagaaagctatatgtgagttgagtaagtaacgactcgcattattgtagcatgtgctataaacgagatacaaagtgccttgagaaataatacttaagctaaaaatatgaatagaggattaactattcatatgaataatcgaaagatattcaaaatagttcttaaagtaaattattcagaatatttaaagtttgctctaaaaacatagcagattataaactgctcacgtataacatagcatattataaattgctcgcgtatcacatagcagattataaactgctcgcgtataacatagcagattataaactaccttgcgtataacataatagattataaattgctcgcgtataacatgtcagattctaaattgctcgtgtataacatagcagattataaactgctcgcgtataacatagcagattgtaaacttctcgcgaaaaacatagtagattattaactactcatataaatcaagacggtgacatttagaatgcatataacctcaaaaatatcttaaggtaaattgagagaataaattgtttaattgtgaattataacgcaacaaacaaacataaataactcgaaaaaagcaaggtaagaggcataaaaaaattatataaataatcaatgttggccccaacaaagcaattttttttacaaaaagccacaaggggcaaccaatgtctcggccaaaaggccatttttcagaaattaaaattaaaataaccaagtctatatggttggagacttggtgagttcttcttcttcttcttcatcctcgacatccacagcctcgtctttttttatttgcttgaaaaaagccagcatctccgtgacttcttcacccaaaaagcttagatccatccatgtttgaattggccatccaggcgccataaatagaccgtttgggcattgagtttactctggctatggcatttttctcgtccccttcaagtttcttgttggcctcattaagctttttgcgaattttttgatgagcttcacggagatccttagcctctttttaagcaccttcgagctcagacttatggctttcacctgttcctcagcttccttacataatcgagaaacctcagtacgagaggaattccattgcctcacaagaacttcatgttgctcaatggttgtgcgaagttcggactctagttgcttaattctctgaagtcctctttgatgagctaagtgagaaaatagagatgcctacaagacaaaaataatttaggaagaggatgataaagggagattaagaaatttaaaaatgagataaagataaaaacttattaagaaggaaagatttaaactcctctcagataggctctcgaagtctccattattgataaaatcctagtcgccctgttggaatgaccggtagtggcgccaataggaagtggtagaatagacttacgagcccataattccagcataacttggtagggggtaggagggctccaaaaataccatctcaagttgtgaacccaagaacttatcctgatgaacaaatcctaggacctgttcatcggtgctcgcagcagctggaactagggagattatttagggatcattaggctcaataaccatttgagtcgaggcacatttcttgtttgatgtggtcttttttgctctcttcaacgattcaaggttcattcccgaagaagttttcgaggcaacaactcgcttcttacctttcttggaacctggaggccttgagagaaggctttcaaaattcatatctatgaggcaaaagacagggtcaacacttacaccaaataaataaagtaaatgtggagaaataatctcccactcagaaatttaccataatcatctaatgataaggaagaactataaaaactactaaactccctagagccagtaatcctagctgtatagatcaaacgagtttagtggagacatgtcccagtcagaaaggctcgccctatcagaattggtactatattgatgggcagttccaaaataagaactgctacaacttaattggacatgatactcgggataccaactgtcaaatctatgagctaggcgatcaacacaatttcagatataaaaattatattgaatattcttaaacttaactaaggaagtacgctcagccctaagtactatgggagaccatccacaattattacctcgggatgcatcttcttcagcttttcgaggggatgtgttcttcaaaaaatggatacgagccacataatccttctcttcctcatcagcaggaactggaacttgctgccatttagaatattttgggactttaaaaactaatttcattaacattaaaataaactaattattttactaaaagaggtagaaaaaaatagttacaacataatgaaaaatatacaatgcctaataactaaactttaaaaacaatactaactttaaaatctgatttcgaacatataaattttatatcaatacctaataaccaaacttctaactttattatcgattttggttaattttttatttacttgcttaaaaatcagaattgatttacgtatacaatatagagcaaaataacaaagaaaatcagaaactaaaactagctagagagaaaaattaaacaaagaaaattaaagagaaaaaaatgtaataaaatttataaaataataacaaaaataaaaataaaaataaaggagtgagagaaatcatatagaaaaataacaaaaatagagatgagttaatattatatactctaataatcaaataatactctaagcaaatacaaaatccactaaaaatatattagaatagaaagaaaaaatagagaaaatacatagcctaaaatacaaatgcaaaataaactaaaa

SEQ ID NO: 22008 - DNA, 4821 bp, Cannabis sativa
cgatacttagttgaaccaatagcggtattgacacataggagggtgctagacaccacgggtgccctttagcatttctcttaaaataatataatatctttttttatttttttctacctaaaattagaaattaatttgtttgattttttttaacgaaaaaggtttaaaatattgtaataattttgtattcttagtaaattgatataataaattgtgatcacatataaaggggtgtatgaattgtagtttgtgatattattgactacttctatccacgtaatttctacaattcgaccgtgtatattacattgatgtcatctataggctacaaaagctattttagatttgtccattttaaacttttttttttttggtatgattataggcttgaagtaatgaatatccaattcaaaatatctttgtttcacaattaggatttaacgttataatagctcatggtttaacgttatagattagtagacctatatagctgcttcatggctggcctttttgttctcaagttcttttcttttgttgtaattagattgggttaagtggagctcttgagactctatgtgggcaaggatttggagcaaagtcattcaaactgcttgggattcatctacaaacggcttgtatcacatccaccctcttctcaatcattatctctttcttgtggttctttactgaaccattacttatctttctccaccaagaacatcaaattgctgagactgcaggactttataccaaatttctgatacctagcatatttgcttttggttatattcaaaatattttgaggtttcttcagacacagtcagttgttaggcctttggtattgttctcatcaatcccattggtctttcacattggtatcacatattgtttggtgcatttaacacctcttggtttcaaaggagctccactagcaacctcagtcacactctggtttacctttttaatgttggctgcatatgtcatgttctccaaggaatttaaactcacatggcaaggattttcacttgaatccttcagttacattctcacaaacttgaaacttgcccttccctctgcaactatggtgtggtaagtgaccaagtgctcactttgtttctacttgaaattcagtttctccaaggcagaacccatgtttattactccaaatgtagaatactaatataatagtaaaagaattgaagtgatcaaatccttcagttacatattatgattatatgttacacaatccgacatcttaagtgatttcttcagcttggaatattgggcatttgagattatggtgttcttagcaggactgatgccaaactcggaagtaaccacttcactaattgcaatgtggtactttttctgcactacataaatttttcttgttacattttaatccatcctgattcttcctttctttgcgaccgatgagtagtttcctggctatttttgtgcagtgtgaacacagaatccatagcatacagtattttgtatggcctcagtgctgcagccaggtttgggagagatcaaacttctgttctttcacattccattcttttaccatataatatatatttgcatatttgtgacccaaaacaatgcattgtgactacatacagcacaagggtgtcaaatgagttaggagcagaccgtccagacaaagctaaaaatgcaatgatcgttaccttgaagctatgtggactgcttggctttgtactagtgttggctctaggatttggacacaacatctgggctggcttattcagtgacagttctgatataataaaatcttttgcttccatgactcctctgcttgcaatatccataattgttgattcttttcagggtgtcctatcaggtatatattaggattaggaactactttcaattttttttctactttaattttacttgaaattttcgggttttaattaagatttcttttttccttccactaaatgaaggtgtggctagaggatgcggttggcagcatatggttgtttatgtgaacttggcaacattttatttcattggcatgactgttgcagctatccttggatttaaatttgaattctatgccaaggtaaatatacatattacatattatttatttatataattaattactgcttttttggttgtttctctctgatggtaattgtaatatagtgacgaataagtctagtaatttgtgtttgcgtttgggtacagggcttgtggattggtttgatatgtggtctgtcatgccaagctgtcaccctcatggtaataacaatgcgcgcgcagtggaccaaattgcaactgtctgaagataagtccgagaaggaatactcaatttctgcttgaataattgctctcattcataagggacacaacatgcattaaatagatgtaaagaaatgaagttttgtatgagatacctcttattattagtttgcgggatcgtgaagagatttattaatgtattcatatcattgtcggaattaagctggccctacacaatagaacaactgatttttgaattttttttaaatctgaagtactatttattggcctattttgtaaaatttcacagagcttctgggatattcatctttttcacaaaggttaactgtgtgaaaataacaaaagaaggatttacattgccaggaatgtggtttttaatgagacatgttatccaggaacatgtcctcctcagccaaacatcacagaacatgtacactctaaaattcccttgtctcactttccttctgtaacttttcacactagtaacactaattctgcttatggttttgctgttccaaataccacaacaattgaaaataatgctaccacattacttcctcatcctgcggtccatgtgccaaccatacaaggtcgaccaatctcaacctgtgtggcgtcattaaatgcttctccatagcaacctgcaactttatctggcttacaacctccacttgcacctgcatcaccaactctttctattccaaacaacactcaaccacaaccccacttaaatattgccacaagtatatcctcaacatccactagtcttcccacaccaccaaaactgagtaatgcctccccaaacacatcaaacaccatatcacccactccaaacatacaaacaaggactcatgccacaacaaggtcaaaaagtggcaaaaggaaaccaaaagcctaccttgctaccaaacatcatatgcttgaatcactattaccatctgaaccaaagtcaatcaaagaagctcttaaagatcccaagttgcatgcttcaatggataaaaaaaaaaaaaggctctcaagaaggcaaaaacttggactttagttccaagaactaatgacatgaaagtaatcagcaataaatggatcaatggctttgtgagctacaactactagttcatttaattgaaacggattctcttttggtggctcaaggattgcaatctgcccaaatgtcggtttttgatttttattgtatcttaaataatatttcccttttagtatctaatcaatggtgctcaaattttaagtcggctaataatgccgctcacttgttggcaaaatttgtactttctgtgatactaattgttcatggtttgaggaaatgtttctatcactgatgcctattgtattataattttcttgttttaatataataacattttatctcaaaaaaaaaaatgttgatataaaatatatgttaaatttgacaaatactataaaagttgtgtcaaatttcacactaaaatatagcattaaggaaatttgtcattaatattgatctaatttacaaatttaaatttttaattatttttatatatgctcttaatcaaaattaatttcttttctgatgtaaaaataaaacttaatttttttcttacattttaaaaattaatttgcaccgtacgtatctatccgaacacagttacgaaagtttggtaaaatgtaatattagctcatttttttagtcaaattagattgagatggtcttatactatttgcaggctctgccagcatttaattgccactattgttattgctttaattaacttgttctaaaatattaatggtgtatataactatacttatataattagcaaatatttgcttctcataagttgaataatttctgtcaatgtattaagttcacaccatccattctaaaacggcttccgtcaaaatatattatataaatttggactcttagtttagcagaataatagtctaaaccagtccctgatatcgatccttaattcgatcgatcgaactcaaaggttacggtttccggggattttgattaattagatgggaataaggaatgtgatggtgatggtgatggtgatggggttggtgttttttggtggcattgatgttggagaaggggtgcgatatcgtcttcctgagccatgctttgggaattgcatgaagtcttgtgtgggagatctaaattccaaggaatccttagtcgaccattgcaagacccatgtctgcaccaatcagtgctaccaaattgagtgcatcttttgttagccggcttatatatatatatatatttaatcataatgatttatatgatgatgatgatacaatgatcatattccatactatcaatgattagacaaattatcattacctaaatgctagttgtctgcgttctcttaatatatatcaacatccttttgtttaagacttatattgtttccttatatattctatataaaattgtagttatgtgaaagaatttttagtttaattgtgttttcataattttttagttaactataacagaatatcataattacttaacataatatt

SEQ ID NO: 22009 - DNA, 1803 bp, Cannabis sativa
  modified_base (33)..(44): a, c, t, g, unknown or other
taaaaatgtaaaaaaaatattctttgaacgtannnnnnnnnnnnttttacaaaaaatggtgtcttatgtaattattcctttttatttactataatgtaactaattattatgattcattgagtttcactaaactttacattctttatttactatgttactggtatttaaataataaaaaactaaaaaaaaataatactttatgtgtatcctcattaaatatcatatgaccatcaatataatcaattttttttgtgcattggatcataattgtaaacagtagattaaatatatcacaaactcattttttgtgtcaaatttagaaaaccacacatgattaacaatggagcaatctacaatcggcggtggtacctcctcgaactaggatagctcatagtctaaccgaagggcatgctttaccaaatcatgagctgcataatttcttatcatgagccacatggaacaaaactgctacaggaaatttagacaataaagtcataacatcctcaaacagcacccccaacttattaaaaaacacaaattttaattaatagtaaggtagtcattccttcacatttgtttactttataaaattaagagatggaaaacttgattaaataaggcataaaagaaagggaatattttcccccaccaattttttttaaggaatgacatttaaaggtaatgatttttattttattttttaatattaaatatataatgacaattttgtcctttaaaatatgtcttacaaaataactaccgcctactatagtttaactcaaaaggataatttagtcaatttaagcgtttcattatattttctcataaagtaaacaagataaattattattattttatttccaaataattttagtaaacaacttattacaaatattgatttcggttattcttcatttattttattatatttctctattaatttattctgattctaaatcctatgtagtaaatgtgccataaaaagatgaaatattaaaattatgaattttaagctttccaaataattttacaaatcaaaagtagttttaacataaatgggattattttcacagaaatatttatactcttatttgttaatgattatcaactcgtgagaaccaaaagtaaaaattttgataaataggaattcgatataaacttttacatgtattttacactattttcataagactctaaattaatgtagttgtttaccaaaattttgataaggatgacgtgacaagtatgatcacacacgtggcacaagaatgtcaagactgaattaatgtgaatatgtaaaatcaatattcaccaacatgaaattttgagtatatgagatgaaagtgagtaataacatgccatgagtatattctatgcgtgtgggagataaagaaactacccccatggagtaattttaccagcaaactccaatgggtaagtctagcagtcactcttctagcatgggtaaagtaactacctcgtggagaggaatggacaaatacccccattgtaggttaaacaatcacctctctcctaaaggtgagtcatctactcaaaggttataaattagtctagcggtatacccctcacccctacagtctcatctccaagtatcacattccatctaaacatgatatggttagtgcaatacgtcttctctctatgaagactacctagtgctaagcattacacattacatgaggagcaaaagagagagtccccaggggtaccatcctgaggtgagtaccatcaccatgaccaggtaggtcgaacagtcatgctatatcctaaggagtaccctca

SEQ ID NO: 22010 - DNA, 2065 bp, Cannabis sativa
ttaaatgggtgcactgtatgtacatcaaacaacacaactgttgggagtacaatgctcctcttcacagcagctgatattggaggaaaatagtcaaaattaaagacaaagttaagcttttggtgcagacaaatatgttcactgctaatgagtataaaattgcagcatgttattgcttgtttgattattagatgcatgaaagagttaaaatggtgcaatgaagtctggtctaggcttaatacaccaaagcatagcttcatgacatggcttgctatgctgaataggctaaagactcgagacagaatgttcaagtttaagatgccagacacagcttcctacttattctgcaataatgcagaagagataggagaacatctttttttcagttgtcctttttcccaggattgcttagtgcaggttaaagcttggttaaagtggcataccactgctggtaacctacaaggcctgctgaagtggataaggaaagctaagcattctaaatttaaaaacagtgtaaagtcggctaaaatagaaaccttagtttacgtgatttgaattgctaaaaatgatatgttatggaactcgaataggatgcaggttgctgagtcgatgcaacagctaaaatggatggttaaaaatagagtaattcttgtaatgccaaaaaaagtaaaacaaaaaaaatagagaatggtttcagtttttgtaaatatcattgtataggtaaatttaaggccttctacttctagatgaaggtgtttttaggttgtacaaaaaagttattagagtaataaaaatataatctggttcataaaaaaaaaaaaattattgtggactcaaaatcctctaattctccacccatattatataccaattaaaattgtaagaagtactcattaattaaattcctaataaattacaatttataaacttgctgatatatatttttttgcacatttattgatatattaaaagtgtctttcttaatttaaatgttttattatttaattgtaccaggtcattataatttcagctgtaatataaggataatgattactggcaagctagggttccatatgtgtctctgaaatttcagttacatatatttatatacaggttagtattatcctcgtgcactcagtaattaattaatatttattatacaataggcaacagctatatatcatttttcccatacaatatgatgtgtctatatctatagttaccattgttagagaaaaacacacaaaaatatatggaaagagaaattaagagaatcagcttatgaatttacataattacccatactatcacattctatttcctttttggattgcacaagatgagggtactttcggcattttagggcttatttttctttgaaacaaatgaaccattagggttcgagtacgtggagggtatttttttggtaaatgaactctactttacctatataaagagtgcaaataggctagtaatcttcactactacaaatctcagatcttccaaagtatattgtctcagtatagaaaagtagtacagctctaaatttcttcttcctagttcttttcttttctcttttgggtatcttagtagtcatatatatatagtcttgtacttcttataaataatacaatattatatatatattttgtgattaattcttctattttgttttgtccgcagggctgagaaatggaagaaaagggaccctttggaggtgtagagccatattggaaaaataaaagaccattcgaagataatcataatgatgatgatgatgatgagctaagcaaaattttgatgatgaataagggtattagttcattaccagtgtggaaaaaagcacacttgatggactactttggtgatggtggtgttggtagtagtagcaatgaagtccccactaaggcttttaatactaatattactgctagtagtactactactaatacccttttctcaaacctaattaatgaaaatcaagggccaaaagtagctgagttaattccaagcttttgtaatactaaggaaagtttggacaatagggctaatgatatccagttcagat

SEQ ID NO: 22011 - DNA, 1935 bp, Cannabis sativa
caaattcggtgatgacgtggaaccgaaaattcggttacggtctggtcggtttgatggtcggtttcggtttttcgatttttatgaacacccctagttcttatacatggctcaatatttttatatttaatccatgtaggataatgttctctaataataatgatgatataggtcatgtagaggattttttttatatataaatttaattttaattttaaattttttaatattatatcatcatatatataattaattaatatgtaagatttatattttttatttttatgttatatttatctgatgtgcataaaaataaaatgtggagaatgtccacgtttcatgaacaattataaaatgatcaaattctaagagaataactatcattttagacttctataaataaggacagattccaagaaacaaggaacgaccaatctttagaaaaatagataatattgagattgtttatcatttatttctaaattgtattatgtatacaatttataaattttgaataagataaacttgtggaccatgtatatttaacttcaaaatcacgtaaaaaattctcttatcatctattgctattcatacatttaattattacaataaaaaattaattatttagttaagaaaaattttctttaatattaattttataaattatttatatataaagcaaatattttaataagtttaaaataagggcattttttatttagaaatgaatctaagaggttattttatttaggggaattatcctatatacttttttttctttttaaatttacgatttgagtttctaaaatagttgcagcgctagttgcaataggggtttctctacgatttctatgtaatttagtaaaaatacacaaaaaaatatttttgaaatgtaaaaataaaaaaggcccatctatttatttattttaattgtttttgaacatttttttttgtttaccttttagaaacctagaatcatgttaatcagcttaaagtgaaaaggccaaaatagtaatttcctttataattataataattttacatgataaatatacattgagaaatcaataatttatgaacacactttattttattattttgactttgtataattcattttttttctttcatctcacatttcttacaatatatatatatataaaataaatatattttaatattattaacataaaaatgtacataaaatgttattagaataaaaataaataaaattatgaaaacgcgagattaaaaaagttattagaattaacatataccaatgtaaaaaaaataaaataaagaaaaatagtaagactaaatattaaaattttttttgagttgattttttcttattattttaggcaattatgagcttatatatatattcacacatatcaaattttacgtatagagtttgtaaaattttaatatgtcacttcgcaaaattatatatatattatatatatatatatctataaacatatattttataattttgtttatagtagccttttttaatataaagtggagtgtttgtttgacatgctacattaagaatgttaatttgcaaagaattataaataaataaaatatattttcagaatataatactaattaaaaagaaatcaactgtgctaaactcatgactttatacaagtgatattaatatatatatatatatagtattattatatatgatgattatttaaattggaacctgtttcctaagagtttatggagcctaagtatcaaatcttcttcagcctcacttatgttgcctctcttaatgttgggtctcaggtaatttaaccacctcaatctgcaactctttccacatctatttaaacctaaatatatatattttaacaaaaattattattaataataagagttcatatataaataattacaaaaaaaaaaaaaaaaataagaaagaaa

SEQ ID NO: 22012 - DNA, 2894 bp, Cannabis sativa
acttaacatattattggaaatgtctagaacttttattgatctttgtaatgggtaacaaagaaaagtctttagatcaataaatctattatttgaaagaaacaacatgctgatattcgacagataagatggaatacgaccatgaaattgattcgaagatagatctagaaaattcaatttcaaagtttgattgaaaatcccattaggaatttcatcatgaatttcagaatttgagatgtcaagatatgaaagatttatttgggtttttagccaagtaggaaattgtggacctaacttgcagaatctcaatgatagtctatctagttgaaatggtggaatccaagaggaattgatcctcaatgttaaggagttataggataaataaagatgtttcaatttagaaagtttttcaaagtgaacttcactcacaagcccggtgaaagaattcgaagagacagacaagtactcgagatcatgaagcttaccaatatcttcgggtaaagtaccattaaacttattgtaaggtacatccaacgttctaagatttgaaaacatcgaaaggttgggcaatgttccttctaattggttgaaaccaatccataaatctttcaaaaagattgggaaaggtttcaaactaggaaatgatcctcttaattggttctgatcaaaatctaaagtttctaaggaatatttagcacaaccacttagactatctagcacatcagaaagtgttccattgaatttatttctgctcaatactaatatttgaagattacaaagattccccaatgattttggtatttcaccttcacatccattcgaagataaatcgatgtgtgcaagagatctcatgttttcaaaagaattgggaataggaccatttatttcattatctataaaggtgagattaactagattggtactcatatttagcaaccaaggaactgttttaggaggtatggtactgccccaaatatcaagattggtgagagaatttgaagaatttttgttggtgaagatatgatctattggttgaagtatacatccatctaactctaaacttgataaagattttgctcttttgatcaagtgaaccaatctgtggatttcgaattctttatattgatgtcactcaacgataagattctaagagaagagagatgagaaagccattcaagattagtactaacatcataagaattatttgcatctagtttgagaacttgcaacatggtaaggttcccaagtagagaattaggaatggatataataggattccaatcaaagttgagatatgtgagtctagttaaagaaccaataaactcaggaattttaataaacttattgtgactaaaatctaggtacctcaaatgttgcaactcaactaaagaatgaccaatttcaccatacaatggtgtatcattccagctagaataaagatcaagcatgataatatgatgacgagttatgttatcgcacctgatacctctccatgcacaacaatctcgtctggtacttgtccacgaggatagacgattgccatcatcgacaaagcctttcttcaagttaagaagagcttgtctctccttctctatgcaataatggacatgatcatcagaatcacttgtgctactccatacaaagctagtggttagcaccaatgtaagtactacaactttgatcatattgacaatacttttaagttatgagattgttatcttattatgggttaatgcagatctagttaattagattataaatagaggaaaccaaaaaaatactattcaaaataactcaccttaatctttaattaacaaaaattcaaaagtcaataacacaaccaaatgataatttttaattagttacaagtttgggggtatgtgtgtgttgcacatggggctcattttagtatgttacaaattaattatatattccaaaggtcatcatgcacatattcaaacccaagacatttttgtattttgaaatttaaatatggtaccatcaaaattcattttgacagttgaacaaagacaccaaaatttgttaattaattactgaagtaattaaacaagacaaaggtggaaatgtaagtaagatttgaaagaagaaaataaaaaagcataatagagaaaaaaagacagaattatacaaattttataagggataacactctagttgagaaacaaaaatatacataattattattgaaaatcaaatcatatatgcacacattatagtctgtgaaagaaaaacattactaacattaattttgaagcttcttgaatgagagctttcttcttctaccactgccaacctcgacgaaaggaaatgttttggtcatatgggtcagttgtgtttgtggagaaaaataggatgaaagatgagtttgccaaggtttggcgttcgggtatcagtagctaggaatgccattaatggaggatatgaatgaagcttggaattgaagaagttggcttgttccactttccctagtttgcataaagaatgatttgatactcaatcttcttctttttttcacaatgttgaaacaaacttcatgctaaagaacttaaaagaatgatttgatactcatgttaaagaacttagatggttttggttattgcatttaaggttagttttgatcacctctcacttagaccaataaaacattatagtggagatttagtgcaggattacttgatccatttttttttttttcttaggagattctattttgaggttataatagggaaacttaacattaaagtgtgaattgcaacaaattattaactaataaaaaaacaagaaaattaccccatatactgtttttttcaaagctacggtttgggtttttaaaatggttgcagcgctagttgcaataggagtttcaatacgatttt

SEQ ID NO: 22013 - DNA, 5122 bp, Cannabis sativa
ttattttagaattcatattagggtgttaatgaaacatacttgttattaaatctagatcctattaaaatatttccaacacctttggggtaagttagctaatatttaccttaagaaatctttagctaacaaatgatacttaaagaaaaagctctatactttaagaattgatgaaagtaaagagctaagaaagcatcttgatgaattcaatagaattattcttgaactgaataatattggagtcaagatagatgatgaggatcaaggtataattttactctcttcactaccacaatcttttgaacactttgctgatacaatattatatgcaaaaggatccctaaccatggccgatgtcaagtctgcactcaactcaaaggagattcaaaagaagtcagatgacaattctcatctcagtggagaggggctgttcaccaaaggcaaaccagacagaaagaaccatcacagcaagtccaatagcaatcatcaaaccaagtctaagttcaaatcaggaaagaaatgtttttattgtagaaaagaagggcattttaggagtgagtgcaaggcattcaaagcaaagcttgccaaagaagaaggcaagaaacaaggagaagctgacattgcttgcgtagattacatgtctgctgatgtattagttgtttcaagaagatcatgtgaagaagagtggatcttggactcgggttgttcattccacatgtttcctaaagctaaaaagttcagtgatctcaagaagatctcaggtgggactatcatttcgggaaattataaagctttcagtgtgcttggcgttggatctgtcatgatcactatgtttgattgcatatcaaggacacttaagaatgtcagatatgtacctaatttgaagagaaacctgctgtcaataggtatgttggacagcattggttgcatcatcaaggtggaaggtggaacccttgtgatctcaaaggatttcacacctgtgatgaaaggagaattaaagaatggtctatattctttaattggaaagactgtgatggggaatgttgcacctcccataatagatcaagagattgatcaaaccagtctttggcaccttaaacttggtcatgtaagttaaaggggtccacaagaacttgagaaacagggacggttgaaaggaaaattgaatgggaagttgaagttttgtgagggctatgtttctgggaaatgttgcaaggctaaatgctctacaggtatacacatcagcaaggagcccttgaactacattcactctaacttatgggggtcgtcaaggattaaaacactcgggggagcaagctattttctcagcattatagatgatttttcaaggaacgtatgggtgtttctccttaagtctaaggatcatgcattcaatacttttgtcacctggaagaagcttgttgagaatcaaactggaaagaagttaaagaaactcagaacagataatggtcttgagttttgctcaaaccagtttactgagttttgcaagaaagaaggcattgatagacataaaatagttcccaaaaatccctagcaaaatgggttagctgaaaggatgaatatgactctgacttagagggtcagatgcatgcttcacagtgctggacttgacagacctttctggggtgaagctgtgaagacagctagctatctcattaatagatgtccatcagcagccattggatctaagaccccataagaaaaatggacagggcatcccccaagctatgaacaccttagggtgtttggatgcactgcctatgcccacataagacaagataagcttcaaccaagagcctcgaaatgtttatttctaggctatccagatggagtgaaaggctacaaactatggttcatggaaccaggttacaagaaatgtctactaagcagcgatgttgtctttagagaggaagagatgggtatgaaatcaaagacagatacaaaaccagatgaaaattctagtgcagaaccaactgggtttgaggtggatgcaggcactacagatcagacacaagatgaacaagctgctgatcaggttcaaacagaagaacctactgatgtagaggcggacatggatgctgatgattatcagctcagtagagatagagagaggagggtgcataaagcccctgttagatttggttttgctgatttcacagcttttgcacttgcagctgcagaaaagctagacaactcagaacctgaaacctatcaagaagcaatgacatgtaaggatagcaagaaatggaacaaagctattgatgatgagatgctatccttgaagaaaaacaaaacatctattgttgtcaacaaaccagagggacaaaagcttctgggatgcaaatggctattcaggcacaaagaagatgaaactggtaatggagaagtaaggtacaaagctagactagttgcccaaggcttcactcaaaaggaaggaactaattttgctgaaatttttgcacctgttatgaagcaaacatccacaagggtcatgatggctaaagcaggaaagtatgaccttgagattgatcaaatggatgttagaacagcattcctacatggcgaacttgatgaaaagatttatatgacacaaccagagggatttgaccatgggaatcctaatcaagtatgcctactgctcaagtcactctatggtttgaaacaggtccctagacaatgaaatttgaggtttgatgaattcatgaagacccttggtttcagtcaaagcagttatgattcttgtgtttactttaatcagcatgtctacctactgctgtatgtagatgatatgccattaattggcaaagacagatctgagataaataagataaaagaaaagcttaatgcagaattcgaaataaaggacctaggatcaactaagaagatcctaggcattgacatcaaaagaaacagaccccacacgattttattatctcagaacggatacctacaaaaggtgctaaccaggtttggaatggaaaatgccaaacctgtttcaacaccattagctcatcattttagactttcaaaggagcaatcatcaaaaatagaaagagaaagatctgatatggattgcgtaccatatgcaaatgctgttggcagctgaatgtattccatggtctgtaccagacctgacattgggtatgcaatgagcatggttagtagatttttcacagatcctgggcaacaacattggtttgctcttcaatggactctgaggtacatcaaaggcaccctaaacatgggaattatgttcggaaaagagtcatttgccaaagaaattgttaatggttgtgtggattctgattatactagttgtatagatacaagaaggtctctcactggctatgtgttcactgtgtttggtggctgtgtaagttggaaatcaacactgcaaaaggttgtggcattatcttcaactgaagaagaatatatggctgtcactgaagcaatgaaagaggcactatggttgaagggattcactagtgaacttgggctcaactatgatgatataacagtgcactgtgacaaccaaagtgcacttcatctcatgaaaaatcctatgaatcatgagaggtctaaacacatagatataaggctacacttcatcagggacatagtcactagcaatcaggtccatgtcaagaaaatcaatacagatcacaaccctgctgacatgcttaccaagtgtgtcactttggacaagtttaggcattgcctaaccttgcttaacattgaagaatgttaaaattcacaaactttagtttacctgtgtctcaattaaggtaaaacttgttgtaattaagacacatgtgaattggtagtttgccacatcatcaccaactatcctattcaactaattcggttggcatcaaaattagttgcagcctacacctatatataaatttctttctcattgatttagttgggactcagttttatgatttgttattgctgagagagagcttgagaaaacagaaaatagagattgtaagagtgtttatggagggatgtcaaagggagtgtccattcatgaaataacttccctcatgtgaggatttactgtaaatgtctctgtattgtaatagattcatcttcctggttttatctctctctctcattcattgtaatcaaagctaatttagcaataaagattcttcttcatgttcataatccagtcttatggtttcttggtgaattcaatttctcattcattctgtacagtacattattcttgatctcttttgatcctttatattgttttgttattgtttgttaattgttgttttcagccttgttcttgcacaacagggagcaaactcaatgcttttgtagatgaatcaaaacaaaattaagtatgtaaacttaccaagtccctttatggtttgaaacaggcaccaagggcctggtatgataggttgaaagatactctcataacctggaactttaagaactacaaggtagattcatccttatttttttttttacagagttctaggtttagttatcattgttttagtctacatggatgatgttaatgtgataggtaacaacactaccaagctgaatcaattaattaataagctgcatcctatgtttgccatgggagatctagggctcttgcattacttccttggaatcaaagttcatagagatgagactgtccttcatcttaaccaaggcaagtatgttcaagaactcttggttagaactgggatgatgcaccttaaactgtgatcaactcaaatggcagtcaacaaaccattgtcaaaaatagattgggagccccttaacaatccaactgagtacaggagcattattggaggccatcaatatctaacacacactagattggacatctcttttacagtcaataagctaagtcagtttctacagactcctactataatacactagactactgtaaagaggttttgaggtagtgaaagggcactgtatacaacggtttacacattaaaacatctaatagacttataattacaggttgttattgggctttgtgccctaaataaaactctatttgaatgtaatcttttctatttaattatcaataaagaactaaaattattttcattacttattt

SEQ ID NO: 22014 - DNA, 6672 bp, Cannabis sativa
  modified_base (2710)..(2711): a, c, t, g, unknown or other
ttccaaaagtgttctatcatctttacatgatgatcccactccctctgttgtctaatgtaagaatcaaagcatgttcaaaacaataaataatgtccattcaatcatggtataatcaatcaaaccatgtgaaatagcgggaatagacaggtacccactacaagatgttgatggagaagaaggtaggaagcttagatcattgaaatagcacaaaaatgccaaggagaatggtgcttgtgggttgaccacctagagagaaggaagagatttttcaagagaaaatttctagtgagagaaagtaaaactgaaaaaagggtttcccctaaaagtcacttatgttgtacatgtgggccccttttcctcacttacctcatcaacacatcataaaggcaactaaagcaattatttctctactgtaatgagatcagacagtcaagacaaagtgctttgacaagcacatcaacttttatttagcgaaggttataacagtctcaaaaacatcattatagctagtaaagaccctatcgttacagacgttcgcacagggactggttatcccgatttttgttcatgactttgcatgcttacgtggacagaactagtgccacgtggtattacaattcactaaaaggaaggccaagtcagcacttgatcaaatgaagaccccatcacccaaacgggcatcaagtgacaaacagctccctctcaagagttggtcggccacccctggctagccattgggactgcaccatggaaagctagcctggccttcacagggcccacgccgggcaaggagtgcactgcaagctttcctggacacttctacacatggacaacaactataggctgggaattgggccctaaaagcccagcaaaataattgaataatatcgagaattaagggcactttggtgttttgtaaatatctaaaaaactatgcataagttaagggatttcaattataaacctagggtttgaggcgtcctatattaaggacttaactttaggctgaaaacctaagttgcctccaagcttgaaatatgcttctaaactctaagtgtctgacaaactatctcttcctcacttcctctctctcacacaacaaccctaacacatctcaacacttaagttttgccattattgattaataccttgtaatcctaacagtactatagcagatcccaactatagtgatctggatagtatttccctcggtataaatacaactaaaaggggagtatgacatttcccgctatcacaaggaggtcgaaactctataacaaatatttttttttattacttttcattcttatttgtgcaaacacgcgacaagcatctgatctgcacgaccctgtgagcggttgatcattttttgagatcaacagctgggaatatacgacattacacatcccgagtaatctcttggagatcaactgcatctcaaagtatttaatgtgtgctaatgggtcttctcctctagtataaatcttccatatcgacatcttgaatttgggaaagggcaagccatttatgtatgttgagaatggagatccccttgaccgatctagttaaagatctgaaggtttggactagtgatgcgctaaatcatgtcccttagtttgtccaactatgcttgcagagaaggatttattgttggaggaatttgactgactggccctccttggaggggttacagactctaatgtgacagggtctggccggccatactctgagagagtgtatggtggagatcagccagacctatgttgtgttgtagaccttggccggccactccaagtaggaatgttggctctggctaacaaagcctacactaggcagctgtccatgccggtcaaacctggatcaggtagtgtctagctgctcgttactccccgattggctaatggtgttggtgtgttgataggaggtcgatcacaccagttgttgaagtttgttggatctaagtacctaaagtcattagtttcttcttagattgttactttgagtgtttccactcgctcttgatcctagtcaattgaagatcagcctttgagctactcgctcccctatttactttacagttctaattgtgtaacacatggaaaacatcaaattcataggaccccgctatcggttggccacttttcgaggtcaatagtttggtgctttcatttagagcgagtggatatcgtatcaattcaaacaccatggttaacacgagaagaactctggttgcaccattaacctcttcagatcttcctcaacacccacagactgcagattctaatgttcgtgttccaggcacaactagaattcatatgaacactgaagatgtggtcaatccagtcaccacgacaggcaccataaagtttgtcactacagctgaccaaagtgacaaaaacatcccggtagatctaaagagtaggcccttatctccaatggaggaccggccactggtgcctcccactaaaggaaggacccttgggtaacaacccccaggaacgacaatcagatctcatctcctgtactatattggagaaacaggaccaggagttggcaaaccggcaattggtgccccatctgaacttgggagaagatctcgagttagccaaacttagagaagccgtcaaccaggctggcctaactgaagatccacgtgctgttgattctgatatattttctcaaaagagacgcgaattcctgagatggatgnntgaccaagagtacatccttcgatctcactaggcggagttagaccactgcaatagagaggcaagcaacttgataagacggttcaattagagaaccaatggaagagaccaggatctcattagaaatccactccaaggaagacttgttggtagataagggagggtctatcaacaacctgatcaacccagttcttcagaaacaaagatagaccttcctttacctgaacgaggacaagccctcccactaaaatctaatggcgagaacagccagctccttgcaatcaacaacatggggggccgaccaacaatctcaggctcaataaaaacccccattaactagcctttggacgaccaaacaactgcagcagtccccctggttggccagaggagtacactacctccctaaagggagcaagcagctcaaaggccaatcttcaaccgactaggaccgagagcgggtggaaacacccaaagtgacaatttgagaagttaaactaatccaccaaactccagcaattggtgtgatctacctcctatcaacacactgataatatcagcaaatcagggagttatgggcgaccatacactgcctgatacaggtctagttggccatggacaactgcctagtgtaggcttggctagccagagccaacatccttacctaggagtggtcggccaaggtttgcaatacaacacaggtctggccgacccctaccacactctctcacagtatggctggcaagaccctgtcacatcaaagtattcaacccctccaagaagggccagtcagtcaaatcccaatagtaatagatccttctgtgcaagcacagttggaccaactatgggacatgactcagggaatagctagtccaaaatttcagatcttgaactagatcggtcaaggggatcaccattcttggcatacataaatgccttgcccttgcccaaatagaagaaatcggtaaggaagatgtataccagatgagaagacctattagcgcatattaaatacttcgagatgcagcttgatctctagaagattactggtgatgtgtaatgttgcatatgccaaaccactttcatggaaaaagctcaagaatggtactttaaagtttccccaagaagattcaattcttgggctgagttttcttgagaattatactcacaattctcatcctcaaggctcgtaccatcgcagctagaagatcttgtcaaagtcaaaaaaggagaaggagaacctttgaaggattacatctagaggctcatggttgaggcacaaaggtaaaatgcctcacaaaggagtgtcgatatatggccatactagggggaatactcccattgagtgacttgtggaaagacatctggaggatctcaactaacaacatgaagaaggtcctcgataaagctgatagctttatcaaactagaagaagctatacgacaggcccagacagggcatgtcaacaatagggagtcacaagacatcatgcactctcatgacttgccaggctcacaagcaggtaccaacaactctacccaaatctctggtggcaataacacgataaataagaacaacaaaaatagctctaggagaaacagtgggaaaaagggaagcttaacactttcccacgccacaaaactagaaggacaagtaggagaagtatacatgcttcaccctcctcatggagaaacttgagaccatcttcagggccactcagggaacagtctcataatgccctaacaataggaacgcactgagtagtgactaaacatatgctgatcttgctaaattgggattactaaacctaagagcgaaaattcaaacttgaaatcaattaccgagtaaaactataacttgaaattaataaattttacaaacattccaaaatactacatttgttttgggatcccataaaaacttttgaaaaattattactagttatctttacacgttgacctaagcggcaaaagtagagaatacaaaatatttcttttggtagactcaaccgtcgaggtctagtatggcccaaacatgcacaatacactgccaagccctcgaactcatgagcctttcctgcacaatagagcactcgtgagcaaagcccaacaagaaagtataaataacaatatgcataatgattaaaaatcacataattattgatgcccttgcatctatcatctatttgacatagacctacatgttaccctaacacatctatttaaaataaggctttagaatggtttatctcgattctgattaccgactttaatctaattatgccttaagcacataattctttatatcaacatatacaagacattattgcattcaaaatcaattaactactagagttataaccctcaacaacataaccacttaatttagggtaataaccctaatcctggtttttcacttaacatccgaataataaaatacatgagtgccacaacgcttaactctacatgctagcatactatcttaactagtaatccatgtatgtggagattccaaatcctcgggtgctcttgagcaagcgtcgataatcctagtcacacattctttggatttcacaaataggactaatcccaaatttaatttgcattccatttatagattggcatatagagctcaaaacgaactttacagctgatatagagtacgtccaaaatggggtcttgagtcaaaagttatggccaaaaaaaattgggaaaaacaggcatgcccactgccaaacttggtcgtggcgaccaataatccggtcgcgtcgactgggtccaaaaaacctagaaatctcatttttaaggcctaaaaaggtccaaacacaaatctaacttcacccaagtcataaacaagccaaaataatgctaaacgaaggtatttctaggcattagtaccatagaatataagctcaaaataatcaagttatactcaaccaacatcattacacaaaattcacaagcttaacacaagcattcaaaccatcaagagatacacaaaaaattcagagcacaaacccagaatttacaccacatttctcaaccctaagatcatcgaaaataacctatatgcaataaacacaattccaagaacacaatagcctatccacaccctaaatcatctaaatccaccaaaatcacaaccacatacaattgcaagctttaaaaacatcaagaacaccaaaataatcatctaatactccaaaaatttcaacaagaaaatagattaagaagttacctcaagcttcaagcacaagaatatgcacaaacacaacaaaattcctaacttttctctaccaaatcaacaaaaatttatcaaatggtaaaggcagagagagagagaggcggtatggaagagttaaaccccaaaaaaaaaatgattttcaattcacttaaaatctaattttgttgaaaatgcaataagtggtcaaatcaccaaaatgccactagggccaaatatatccatacatatataatcaagggcagtattttcatttcagcacacacacaaatatcacaataatttacattttctcatttctcatatcaatgccataaataaagggaaatgctaacaaatgaccttatttctctctctagtgaaagtttatgtctcttttttaaaataataaagcaaatgtccctttttattttttgctacctaaaatacccttaactatatataaggtatagattattattattatgttttgatgaacaaagaaacaaagctgtcttatcaaaacatggagttgtcctgtataatttgatttaatatactgtatttattgttgttgtggtagatcagtttattttccaattatagttagagtatagtatattaattacacaatatgttacattttttagttaaacatggatggatatatactattagatgaatattttttttactattctctttttattaacaagtgctgatatacatcaacgtataaaactagtta

SEQ ID NO: 22015 - DNA, 2559 bp, Cannabis sativa
ttcatatataattaccacctcatatccaaacacaccttgcattttaaaatatagtgtaattactaaaccgtgtaattaccctacttagtaattacacagttacttccaaacacacccttaatatgattagaatattttcaatttaatttatttattttaagcacgtgattagtaaaacgtgcttaaaataaataattagattttatatatatattttaatatttttatagattttttgttttgtttttttaagaaaaataatattgttttttctacattactttctcaatgtgaaaaaaagaaataatactgtatatttttgtaaattaaaatctgtaaaaaatgtgaagaaaaaaaacatttataatttttgagtattaatgaaataatcaatttgtcattttaaacaaaaccattggatttgatacaggtttaaagagagggctgtatgctgctctcctcctcccttctcttggaaccgagaccagagcaaaagaaccatcaaccagcatcggcccgcctctcacaccacttgccttagcgcaaaatccaaccccttcatttttgttgttctctattttacctggtaaattattataattattcttctcttttcttagttgttctagggtttgcttttttattatttattttttaggttaaacataatgtttgtctaatttaatttctaaagctcgtcacctactcaatcagcttagtctatgaaggtcctattttgtgtaaacattcttctactgataatattggctttgtttgatttgtcgttgtataggaaaaaaggggaggtgttttgatgagcgaagaagatggaaatacaaacttgtgggaagcccatagactcattgttggagaaggtgctttgtatgaacattttatcttctgattatttcaaagagctttaccggttgaagacttaccatgaagtcatcgacgaaatctacaatcaagtggatcatgtcgagccttggatgaccggaaattgccgtggtccttccaccgccttttgccttctctacaagtttttcactatgaaactcactgtcaagcagatgcacggactcttgaagcacactgattccccctacataagagcggtacgtgttcatgtgtatgtcaatgttaatctgtatctaagactcattctcctaatctaccaagcaaagaatgaatgaatgaagtgatgcaactctattttcttgttggtcaatgccaatgttatgctatttttattacattttgtgtgtgtgtgtgtgttacataatgaataaaatagtatattaaaaggcacacaaggagactaacaggttggttttttgcttctttctattgattctcgattttttttttttggtggcactattgtttcttgattttagtacttgaaatttaatgttattttcttttattagggttttaaaattccaattacttgttttatggaatccttctgaaatttttattatcgttggtgtgactgaatctccctctagccacgatctcatttgtgaaattgaatggtgggtgtagaagtagaactagagcttcattttcaggaactcaagtctgtatcttgttcctgagtccttctgtctttctttttttcttatatataattacccttgatgctacctgtaaagtgttttgtgttttcaattttctttctttttctatttcatagtttccatgtctcagtgaaagatagaactgcccgcctgcatggcctgcacaagaatttggagtatttggttatttattccgtaaccccattagtagtttaacttgcaagttcaattaaatttctactttcagtcattatatagaaagatcatgagcgtgatattgcacttttcttagcagattttacaaatcaaggttggagtttccttatttctttgagttactgagactttcagtttcagatgctaaggtttgatgtgtacatttttgctttagtagttgagactttctgactatcagatgtagttttcaattgatatgttgctccttagtttttttcttttccctggatttccctactggcttggatgtatacaatgcctataacagcatttcttcctgataattaatttaattttccacagcaacatataagatgaagtgatgaacgctggagttagatttatattaacatgtgattcatgactttaaacgtttaaatttatcaatcataatcttccaggaggaacccaagggtttatttttattgattgcattagttatgtatggattatgtgctccaaccttgaactattatcgctaattatgaaactggttgggttattaggcatgctctcatgtcagatatcttgtgtattgtgctgcaggttggattcctctatttgaggtatgctgcagatccgaagactctgtggaattggtttgaaccatatgtcaaagacgaagaggtaaggtattaatggtttttgtaatttctgctgcttcaatattttctggactttattgtttttaatcttatttatgttcattattttataacaaatttataagaatgcgggg

SEQ ID NO: 22016 - DNA, 7299 bp, Cannabis sativa
gaataattatattaatgatagtttaattattttatgatgatttcaaaaaaaaatttatgatagttcaaacccaataaatcgcagaaaccgcaccgcatcattttttgcggtgcggtttttgtggttttttagtatcgcggtgcaggtgcggtttggaaaattgaaaaaaccgcatgtgcgggttggtttgaaaaaatggttaaaaactgcaccacccgcactgcgaacactcctaatatatagtatagtgattgatttgagacaatggaggaaaacgtgttattagttacactcatgacataagtaaactgtataaagtgtgaaaaaaattaaataataaccgtatattgatttaaaaaaattagtaaaaatgaaaactgaaattaaattactgtaaaaaagtttaaaaagtaataaaaaaatggtaatttatgtaaaaatttatttatttttctaataaaaagctcaatttttatttttcgcccaaaatctccaaatcacttgggtaggtcctaattatatactatataataatacaaattaatttattagtgatgataatacaaaaagaatgttataattataatcacaataataaaatattgaaatgagagttataaaaatgaaaagatactcataatcaatatgtagttcgtgtatgtgtgttttttttggacaaaatatgaaagcctcaaatattagaaaaagtagaaagaaaaaaaaattataaaatgccttttaattgtgttttttttattatttagataggtagatagataaataggtacatagacatagaagaatgaatcaaattttggttaacattttcaatataggagtatataagttgatgtgcacaatagtgaaattaacttaatagactatcttacttaataatgtcaataatgtcaaaaagatcattacaaacataccattggcatttggtgagttaaggaataagtgatacaaaatgatgaagtttggtgccttaaaacaaaaaaggattgatttaccaaagaccgtaggttgggttgggcggtttggcgatttttttatttggtagttttttaaaattacaacccatacctgcccaataaaagtttgggttgggcggtgttttaggatgcgattttatgcgattttttgagcggtttggattgcttaaaattaaaatttccaaagtatattgtcactaggaaaaaagtattcaaccaaaaatttgtacctgttaataacaatgcataaaagtccttaaaaaattcatatcaatctttataaactctataacaaggcataataatagtctatgaaaattttataacaattcttataaagttcatactccataacaatctaaaaaaggtgcttaaaaagtccaaacaagttcataattaaattaattttagactatgataaaataaacttcatacacaaaaattgtaacaaaacaagattaaaaataaaaaaaaataaaaacaaaaactttaagaactaaactttatataaatataattagttttatgttttagaattttattttttcttgttagttttaattataaattttttaaaaaaataaaaaataacgggtacggggtggacccgccctttttaggcgaacccgtacccgcccaccaaatagcgggttaaaactcaacccaatctaatttttgtgagtttttattgagcggttgggcggttcccacagtttagcgatttttatgtgacggcctaccacttatatgaatatatctcataatttgggccactgtataatttcacctgaaataaagccctttttattaatatagaaaaccgaaataaaacccttgcccacccctacgaaataaaaacccttattagtcgccgaaggaataaaaagaagaaaaaggaccagaagggaagtgttataagtttactataagaaaggttcagagtgttccttacaaattttaccgatttctgctgattaacacttctactacctcttccttgggtcctcgacctcttactaaggtaatccaatccttcatcatgtttatctatatctccctttaatggcttcttcttacacttttccttgaatctatgaatccttcaattggttcttgtctctccgttcaatgtttttttttttttttttcttattttgctggttgcaaatttgattcctaggttcgtttattatttgttgtttacacgaaataatgagaacattttgttggttttgcgcctttgcgttataattttcatttctagggttttgaaggaatttcgaatctcattcacattatttgccgaggcttatctgttttttcttttgaattattatattcttaccaacgtttagggttcaaaaaataaaaccatgtattaatatgtactcgtatcgctggttattttgggtatatatttttttttgggtgatagattgatttggttctgttattttacagcaataatggcagacaatgatgagaagaaggaggagattggagaagtgagtttgtttgtttatctacattttgtgtatgtcaatacttgttgatgcttttattttgttgatttattttagagaagagggtgaatagggctatcgatttcttaactatttttggttatttattttgtaattgtaccattgggtctttaaataacttgttttaactctgcatccaattaattaggaggtacttatttgtggtgagatgaagattattgtaaaactagcgatgtgttatgctatgggtctagaatttttgtataaggatatattggtcaagctagactttcagtagttttgtatttaagaaactctgatgttctgcttgaagtaaattggccagtaattgaaatgggtataccacttgaaaggtgtatgacccgactttcacttgtcttattatctaatagttctgcacatctgtagttctccacttttgatcctagcaaaaagaagaagaagaagaaggttgtcatccaggatctgttggatgactctgaggagaaattgactgagaaagttgaaagtcttacgggtatggaaattatactacttcgaaaaatctatgatgtctctaattttgtcgtctcatgcttgatattttctggctctacctttctttgcagtttctgatggccttgaaagtacattttcgggtttgaaaaagaagaagaagaagccagtgagttatttggatattataaattgggaaatttgagatttatctttttttttttgtagcgattaatgttttaaaatttatgcgattttaggttgaaaccagtactttgattgaagaggttggtggcgatgcagtggaagagttggaaagtgaaggtaagattcttgatacttggtgttaattcataacgtcagatgagtatttatgaatcatctatggtagattttttgagtttctgtatattggctttttagatcatgttcatgttgatgaagaagaagaagaagatcaaccaccacgttatccttgggaagggagtgatcgcaattatgaatacgaggaggtatatttattgtttaattgtttccagagctctctactttgtaatgttaggctgtgaaatgtgtgagatggtgttcttatgatatattttaatctctgacattataataaatctatatttacattttctctgcgttcttctgttggagattggtttctgctttcttttctaccatctgccttgctgtatcaatattagtagaaacaaaagctataaaaacattacagctggatgctgcttgctgtgaactcttttgtacttgactaccctttaaactgacattctaaagtatggttcatatgtatgtttgttgttcggtattttgatgaccacaaacttttcctgtcttattatcttctgaatttacatttttattaagttttaaatgctattatgaagtagttattttctcttatggaaactgcagcttctgggtagggtgtttaacatccttcgagagaataatcctgagctggcaggggacaggcgtaggacagttatgaggcctccacaagtacttcgtgaaggaacaaagaaaactgtcttcgtgaatttcatggatctctgcaaatcgtataatccatttcctttgtcatatcaatttaactaagtcttacacttatgcaccatgcattttttttattgatgcatacttgggatattatagttttaacttttgcattttcttcataagcattctttctgtgtaattgcttatgtacaatcttttacatctttgagatgatcatgctgtcatctttgcaaatgatcctctcatggtttaatgttgctttaccatgctgtctagtatataatatggggcttgttttcaatattaaaatgatttagggacttttatttgtggttaactttagaaatgtgtgattggcttgctcagactaaatatatcgtttgaaaaacctgtctttggaagctgatagtggatatgtgtttcatgctgcgttttgttaccatcattatttttctttcttttttcttctccttcttcgtgtatctatttttctccccttcctgtaattagtaaagtgtttcatcttcagctattgcttcttggactattattattaagttgttggatattgtttttgtaaaaacattacatgcacttattgtgccataattagtagtgttccttcacgcaggcttttttctactatccatttctaagacatggaaactatgtgctcgccaaaatttttggttgttgatctatgatatttagtgttacattattgctttaatgtatatttgacctaagtggtggcatgttatgatggttatatatttccttctttggtaatttgtgatgtgaaaatacgctatatgttgttaaattatgatctgacatagtcccttctaccttgttgaaaatgtagaatgcatcgacaaccggatcatgtcatgaatttcttgcttgctgaattgggaacaaatggatcacttgatggacagcaaagattggttgtgaagggaagatttgcacctaagaattttgaaggaattttaaggcgatatatcagtaagtaccttgttcgtaatctggtcaattttgtcttttacagtttttatcgtagtgctgggcaaactcaatgtttactgtgctttcaagtaagatttgaaaattgatactctatcatttgttgaagaaagggaattgttatatatttgatatcaattcagcattttgtaattttgtttatgccttctttcagatgagtatgtcatctgtgttggatgcaaaagtcctgacacaattctttcaaaggagaatcgtctcttcttccttagatgtgagaaggtaatatcatctttctttttccctgatcacctttgcacaactagcccttacagcatagtaggccaaattttaatctttttattgctgttgtattacattaactttaagcaaggaaatagatttaaatattatatgttttgctttcaatacattgaacattcattcatgtgattaggctctgatgatatctgtagaactgctttgttacccttccttttagaagctaactcctaataaggatcacataagttatctagttggaatgtaacgtacttattcgtatttcatgtttgtaatcatgtagtgtggttctggccgatcagttgccccgattaaagctggtttcgttgctcgtgttggtcgtaggaaagctgaaacatgatcaatttctcagtcccccttcttcctggaaaccactggtggtttattaatcgtcagttcatatttgttgtttttttctcttcactttagtattaacttgtcaaactctggtttgctttgagccccaacttgaaaaaaaatgtatcagttttgttgttttaaagtttggaatgagatttcattatgctgtttaaagatgattttttgtgcccgagtaatattctactggtgggaagccaggaccgaaactgacagggctgaaaaccaaccaaaacatgcacgcgcacacacaaaaacacaaacagtggcctaacttatagctcaatagaattttggtggaaaaagagaagatcgaaactcgtttaccttgaaagttagttgtagcgtttaaagtggagcaatgttggtacatgagatttcttggtctagtcttttactatccacttttcatttgagtggtatctttgattgaattcgatttgacccaattggctgacttggaacttgtcgaatattggatttagttaagggtagcctagccattctagtcactacttaatggaagttaatggttaaaagtgatatgattacggttttagtaactttagatagatttggtgctaaaataaaattgttgggttggttccaaatattgtatatgtgtgtaattgaaaagcaatggtaagtatacatttataattaattttagccattcatatttttcgagtattacccgttggctcaatactatatgagcatgagttgaaattttaagtatattttcatgaacgtcccccgtatcatagtaatctactattcacattcaatgacattccacaaaattgtgcacggttcgatttggccagcgaataatctaataattcccgaaaatctatatcgacactaattacactaattattcttagatatcatttgcttcagtagaaatttattggttgttttttttatagaagataaatttattggtttttgaatgcatttgacaccactttaaaaaaaatgcatttgacaccactttaaaaaaaaaatgcatttgacgtaaaaaaataaaattgaaaattacatattttatagaatttaatacacttttttgcaaaattattattttttgtaaaacaattattttaccttaaactgttttttttttcatatttttcatattttaatttttctcaccataaagaacaataaaaatgaaaatcatgcagtactcagggatgacaaaattattctctatatttaccctattttaatcaagagcactttttctaaaagtaaaaacatgtgagttctttttttttttttttgaaacccatgtgagttcatttatcaataatatctagaattttgatacagaatttaaagctaaacataaattattgtccttacaaacaaaatatgaattcctttaaaaaaaaatatgaattattaatattttttacaccaaaataaatatgatttattattttatttttgataaaataataggaataattacaaaagtcaccattttttctataataattacatttttacgttcaaagaatttt

SEQ ID NO: 22017 - DNA, 3592 bp, Cannabis sativa
agggttgggcatccgatccaatctaatttttttcttttcatccaatccaaatagtaattgaatttagaaaattatcattctatccgatccaattacacctaaaaatccaatctaaagtaattgaattggatgggttttttgaatggatatctaattacatatttaaattttaatattaatttaaaaatataaagaaaaataggtaaaaaaaaaattaaatatcatcttttatttaaatttaatactctatgtaatgcaactaaaagtttaaaataagtaaaataactttgccaataataaaatagaaaaaacatatcatgaaaacaattatacaaaataatcaaatgttataaatttaacacaaatttcactaaaaatataattaaaatatatattatttattatatataaataaatataaatattattttaatatatataaatataattggatggggacggtttttctttttttaatgacatctaataatccaaaccgagtaaaatctaactttaacatcaattcaatctaattgtaattagatatttaattttttgtaattgaattgaattgggttcaattagattagattgaatgtagcctatccctaatttttatcatatttttcatacatttattttttccttgtgaagtttttgtttctagctgaaaagaatctgaagtcttttttttttttttttaatttgtctccccttttctgcactggtatttttattgtcatcaaatcatagtagttttattggaacgatcatggagagatatttgttgtttactttttcctctttatctttttctcattggaacgagacattgttggtcatttcgctccaaaaggatacaacgtaacccattttggcttctttctctaatggctcagggtctatttggggatttcggctttcagagaactcacagcacgtgctagacccatcatcagtctcgccatgaaagcacgagcttaagtactccttgccaatgccaagttaggctagaacaattggtgaatcagacgaaaagcttgggcatgtgacacgtgcgaccctaccccgtcagccttgtatggtggggggttttcgggattgtgacgtacacaactattactagttattgttttacctaagtcttcagaagaatgatgacatgagttgaatgtttccgtgtgttgttttgctgaaggaagttggtcattttggttgttgagaaattaatggaatgaacaggattcttctttattattggtattattttgtttggttacaatattttgattattatttcaatagaaattttactatatgattcttgcaaaaaataatagaaagtttatcttatgcacgataaatttttggaaacttttatagtactctccttttgatttggacaatttaattttttatacattcaaaaaaatttaacgcttcgaaaatggaattttaaacagtttgttgtatgtttgccttctttattatgtacacgtgaaataaactattttaacctttattttcttatcaagcaaaggagctttttattatcacagaacaactacaaatacaaccaaaaaaacaaaaaccaaccaagctttacaacaaaccagctctagccgttaacttcttaataaactatacattttaagcaaaaaatgttgattattagtgttcaacttccctctagcaacattaagcaatctacaagacatcgtcttttgaaccttagcaacaatcaactaagctgatctaggacaaccttcaaacacatggatttcgatttttccatatctcatacactattgcaaccatcaaacaatttataactgcagcaaccaagcctttcctagtgttgcagatccagacgttctagctttcaaacacttgaggctaagagaaagaccccaaccaactgaacaacatctgaatcacttgatcagacaaagtacattcaaagaataaattagcatgcctttcttttgctaaattacaaacaagacaatttaaagtttcaacagagatgcagaacttgaccagctagtcactagtaaagagatgagagttcaaagcttgccaaaaaataaatctatgtttaagaacacttagccgacaccaaacatttctctaataactaacaagaggctgttgaataagactgttatagggttttgcagctctaaatttaccaaaacttcatgcaacaattatattgcctatgcaacaagtttgcctcaaatgacaattttctccaataccagctcgaatcctgcttcaaattataattctagaaattggcacctttgagatatattgaactaacacatttaacccataacaagacatgcttctccattatagcccaaatatagttagcgaaaacttctttgttccacagagggctctctcgaaaccccagacctccaaacatcttacgaagacaaactttcccccaaagagtcaagtgtatcttactcttgttcccattacaaccctaaagatatcctctgcaaagtttctcaacttctttaataacactctgtggaagcagaaaaatgcttatccaatagttccctaagcctaaaagaactaaatggatcaattggactcccccagcaaacgataaatgcctaaaagcccaggtgtgaatctttagttttattttcctcaagataacatcacaattttccaacttccacttggtaggtcttagcgagactcccaaatacttgaaaggaaatctagcttccttaaattgcatctcaagcaatatagattctcttgtagaattcgagatcccaactagaaatatttgggattcagatttgttagcttgcagccttgaagcattagtgaaatcatccaaattattttttaagtgcctcacatattgaactgttcccttgcaaaataacataagatcatcagcaaagcataagtttgtaagttgtaagttttttcacataggatgaaatctaaatgttccctcttgagattctacttcagtcttctagttaaatattccattatcagaacaaatagaagaggggagatcagatctccttgtcttaatcccttggcccgttgaaatttaccttgcaatcttccattcatcataattgaataagaagagcctttcaagcaagtcattatccaattaacaaatcggctaggaaagtagtaggctttaagaagatcttcaaggaatccctagtccactgtgtcataatatttgctaagatctatctttatatcacatctagctgagttttttcctaccataatctttaatacgatcttggaagatgaggatattatgggctatatgcctatttttaacctactttttatattgtaaattagaacttttcaaaactttgcagaagaatatgttaaataattacatagtacattgttatataaaaaaattaaaattatttggatatcgaaaacataaagagaatgtgccaattcattgtagaagcactctaaattttatattattctctttttactcattacattttattacactttaacactcttaatagatgagctaaaataactcaatcttaaatatagagaaaac

SEQ ID NO: 22018 - DNA, 3790 bp, Cannabis sativa
ataagcctcttcgacttgccctgctcgagctaaaagatcaaccatacaaagataatgtttttcccctggttgaatcttgaaatcatttcgcatgagatgaaaccatttttgtccttcttccacaagacctgagtgactaaaggccgaaagaagtgaaacaaaagttgtgtggtcgggttttaaattttctgtcatctcgaggaagagcagtaaagcttctcttcccagtccatgaattccatagcctgtaatcattgcattccaaaatatcaagtctttagtctttgtcttatcaaatacagcacgagcataggaaacagatccacactttgagtacatgtcaattacagcagtgcctgaaacttgatcaaatccaagccttttgacaatatacccatgtatagatttacccaatttcaaaaaaccaagttgagcacatgagagaagtgcactcactagagacacaaattctggattaaaaccactactttgcatttctaccaacattttaagagcatccacagcaaaaccattttgagcataaccagaaatcaaagcaccccaagagacgacattcttatgagtcatccttttaaataataaacaagctaaatccaaatttccaaacttagcatacatatcaacaaggctggtttgaagtactacatccaaaggctgatctctcctaatcaaatgcccgtgaatagaaagccccagttttgagttaccaaggctcacacaagcctgtatcaaccccaacatgacaaccccatcagcttcaacaccccctttttgcattcgcctataaatatcaacggcttttaatggcttcccacttcggacaaacccacttatcatggatgtccaacaaacaagatcccttttcggcatttcatcgaacaaggtcgctgcatcatctatcttcccacactttgcatacaagttcaaaacagatgaacccacaaaagcatcatacttgtagccatattctatggccttaaaccaaatttcttcacctaatctaagatccaacaagcacgcacacgacttaagagcgaccgtaaaactagagctatctggcctaacaccttcggcgatcatctgacgatgtaaccttaggacttcattagagttgtgctctcgagaataagcaatgatcatggcattccacacatctacacctcgttgaggcattttatcgaacaggcggcgagctgtcactgtatcagcaatgcgtgcataagattttataagcagggcattgaagtttccacggtggccagacaaaatcagaagagcgtggaccttagctaaggattgttcatcttcacaagataagataagagaccttaagccctttgtccatgaaatcaaccgcatttagctttttattgcttggggagcaaataacaacacatataccctcctgagctaaaacttcatgtaagctgataagctgaaaacctatgaacaaaagtgatgtcttggttgattaatcattaagaccgtggaaccagcatatagttttatgctttctttaattagaaatattttaacttgttaatttttttattaagaattaaaatttaaaaaattaaaaaaaaaattactctcaaattttttaaacacaagtgtttttcttagtcaatattttagagtctgaattgacctagactcaaaccggaccaggattgtagccccgaccctggcctcaaacccagaccctggctccaaaccccggacacagtctcggaccctggccttgaacccaaacccagacctagacctagacctcggactcgaactcaaacccagacccaaccctcagatttagagccagccatagacttggactcgaacccgaacttggactctggcccctaaccctggacttggaccccagcaccaaacctagacccagaccccaacccaaaacctcgacctcggatcgggattcaggccaggatcctgccccaaactcgaacttcagccccgaatgcaatctcgacctagaccccaccccagatcccaaacccagactcgaatcctaaacctggtcccggcccccggtcccaaactcaaactcgaaccccaactccgaacccagaccccgaaccccgggcccagacttgggactcgaacccaaacccaaattcgacttaactaaaataaaaaaataaaaataaaaatgaactttagataacacactattaatttttttttttttaaaaaaaaatagttatagagcatatttttgtttttttaaaaacaaaattctactgtaatttttgtgattaaacaattaaaaaataaaaataaaaatattaccaaacgccacataaacactcaataaataaaaggtatggaaacattatttatacgataataaaaagtaaaacacaaattaacacacctacggactacagtcaaagaatagattaaaagaacataaaaagaaaaaaaaaatatttctctacgcctgagatgagatgtaagtgagtgaggggaagcaagtagggttggcgtcgtgcgaaagggcatgagatgctctgctaaacgaatccattcatgagagagaaggtgagcttgaggtggtgttgcgagtgggggaaagcaagcagggcgacattgggggtatgggtgacagagtctgtgagcgcctaaaaagagttcagtttctaaaaaaaaaataaaaaattcattgttttctaatgtaaaattttgaaaaattcgatataatttacaaaatagaaaacaatgtttaaataatttatttcacacgttgataaaataaaatagatactcgtacaaccgattattaaattttggtgtgttaaatttttctcaatttaataaaatatcttaaataactacaacgtacacaattgtgaaaaaaaaaaatattaaactaaaatattctctataataccaaaacaaatagagtgtatggtgtacgagaatgctcaattttttttttcaaatttttaggattcttgtttttgtaaagttatattttactaaaaaaaataattacaagataaagttgtgaactaatttaaaacatcaaggtttctcgtttttaaatttatagctgcaggaagttatcttttgtctccagctaagcccgccggtcttccctaggcataaatgtaacttggtcagagttgtgttttgctattacgattcgatttttgctactgcgattagtcttgtttttgtgacatagttttgagtgttttagtcttgtctgtgtgacataattttattttgttatgtttttttgttagttcttcgatgactcactatcaaatcgctgtaagtggttgggaataacaagttctttgtaacttaagggatttttagtaattcatttacttactatcgattttgtaattcttttggcattttgggtatttataaaatatccagaatgtgtcatcacattaaaaaaaaagttgtaatataatttgtgtaaaaacattaatgataatttaaaaaattaacgggtacaatggactttagcttgtttgtattagggttgtatataaatttttgtacactgccccattgaataacctgcccaaaccaaaccgagataactcaatagaaattataaaccgaaaaaccgcccaatctttatattgggcggattaaaaaaataccaacccgtccaatcaacctgattaagacggtttatatacattaatatgtttttactatatatatttatactaataaaaagttacgtgcaaggcacgtatactaaattttattctagttttttttctat

SEQ ID NO: 22019 - DNA, 4865 bp, Cannabis sativa
aaacgattatacatatatattgtgagactccaatccaaaactccacacacaccctctcatgtctcctatagtgagttgagctaggctcttgtggtaaaaacttggccatttttcgaattgtgcgtgtgatcctgcgcagggatcatggattattagctattagttatgtacaaatatgaaatatgagatataatatagtcgcgctacatatatctctatcatgcgctaaaattggcgtattagctattagtgatatataaatatgaaatatgtgatataatgttattggttcatgtatcttgtatggaaaacatcacaaaatcatttaatgcaatgggtcgtgattggatgttttattactgagaacataatgaaaatgaaatcatagcaccacatgcataataatgtgatgggccagtgattggatggttttctgtaatgaaaatgcgaccagaacgctatatgcatataaatgtgataagatatagtaataggaacgaacataagctgaagaggcttcattgtaagaaacagtagttccaagcattagtgtaaattaggacattagagagtatatgttacgcgattaggttcaaccaatatacttaatgctcagaaaagatttaacgtaacagttgatgcattatgtattgttatagtgttaattttttgcaaaaaaatacaagtacaatcttgtaaataattgacatgtggactccatttctaatgaaaaataatgtcatgtcaataaatagcttcagtagagctaatttcgcttgatgtgaacttgtgagaagatgcgaacgagacaatatctagtcgcatattatgccacacatagtcaaagaataagcaggaccaagagaagttgatactgatcatacatataccgattatatgcactgatcaagtaaatctccatgcgatgagtaaagatcacctctttacataggttttggttcgaatgacttaatgtattcgacgactcgtcagggacttgcatgtcctacgttgtccaatgcatagaatgtctgatcatgcgatcaagagtgaactcatacattcaacgaaataggcccaaatgcctcatcttccgagtactacaccatagatcccgcgagctcgtgtatttggaatgtgaatagacaagctgggacttgtcaaatcgcacacattgctgcaaattaatttatgaatggacgaaattgttcttcattttttctttaaatgtttattcttagttattccatttattgtaaaaacatttctaaattggtcaatactgtaatctgaaaggacacttgctttctagaaatcattaccaaaagtggactaaacaggccaagttcttgctgaatcactataactctcttgtcttctctttatttttgctattgtttttgtctatttagtagccaatatttgaatactcgctattctaaccgagtactagcgtatctattttttggtatccaagcaactctttaatactcacatatttttattattgtctaaattcatccaacaacatttggcgccgtctttggaaaatgataaatatttctgagattttagaggagaattgaaatagctatagactagatgaacacgaacaactacaatgggaccttcaacgttggcactatcaatgttgctctttctggaggaggaacaacccatgtcgatgttgttataggaggagtagggcataccaatgtgacccccttaacctatttcctcaattctcaaggcatgttggagaaacctcgacaccagcatctatagtgggacagtttccaccaatcacgcccgctgttgcctccaaggctatcatctaactgacaacctcgtagtgcacgactattcaggaagagattggattcgagcctgttatcccccacatattccaaaccaacgttgcacagatgattagataactaatgatactagacgtcataatgaacattctaataatactcgtaatcagagggaacgtttaggtgacaatgaccatataggactcgacctaaattaacatgttcatgactccatacgtggtaggagttcttctgttcctaagactaatcaataaccttagtggagggagaaaaggccgcaagacgaggaagatcctaaatgacacaacttgcgtagtcatgtacaaccgcaaattgaggtaaacgatggtgaatctcattcctcttcctcaagaactgacagtcactcccccagtgtttacaccaggacaagaacggtgttcacaagactaggaggaaggtaccatgtgtagagagacaaaatgtgagactgcctcaatgaagtgtttcatgcacggtcccagactctaagcaatttcaataatgaggagaaaccccgtgatcccctttttggccgatcaaggtattccctccgtgaatacaaataatgcaacaaatgcagttaacctatcgctttcaccagccgtgcacaatgatgtggtggtacctaacatagcagtagtggccgctctgccaacgggaaaccaagttgcacttaccaacaatcccacagtgccaggagggattgatcaagaaaatcttttgcgagcgttaagggtgatcaagcagcagataaagcccatttacaagctacattgaacgtcaccgaataagtgcgacaagccagactcctcaaaggcttcagactttctgagtcgcttaaatataaaggtaccaccaatcctatagattatcttgataaatttaacaccattatggaagttgatcaggtacctcaattggataagcttcgtatccttaccgcaactttggaggagaacgcacacgactggtctagctagttgcctaaagcatccatctcaatttgggaaacatacgtggatttgtttttgacccactttcaagcaaccatgacgtataaaccatcgtatacaaatttagcaagcataaaagaagacgaaggtgagactttacaagattactttaagcgttttaatgtcgaggtaactaaaggggagaagtcccttgtgtcttcacttgtttgcatgcttatcacaattgttctaccaagaacagactttttgaaggaactacaagcacgatgccctgaaaaactagtcgagttctttgccatggcagaaccccacaaaagaataaagaacttgcttgtagagctcgagaagggaaagcaaaaactaagctctccagtaccaagaacgcgatctagaagtctgcaaactaaaagttctagaggacatagtccaagttgtagcccaaaaagatgcagccctacaaggcatcgaagtccgaagcttgccaagtcaccaacccgaaaagaaagttccctaaagcggaagagaggtccgcaacttttcaattatacaaaactctatgtctcccccgaccacatatatgccatcgaagagcacaaggttgttttcaggaaacccccaccaatcaaaggcaattatgacaagagggatccaaaaaaatattgtaagtatcacaaagacattggtcacacaacacttgaatgtttgtttttgcaggatgaaatcgaataattaatttgacgaggcattttagccaatacaagaataacggagaagtcgatccccaagtggatatgaaagaaaatgtagaagaagtgagtggctctagagctcttcgaaacattttgaccatcattgttggatctcacgtttgtggagattcaaagaaagtgtaagagcgatacgcggtgcagaccaaggagaaaccactaaccaatgtgaacaatctaagtaaaagaccaacaaagttattaaaaaagagtgcgacgatgtcactttcatggaaagtgatgcgagatgggtaaatcatccccacgccggtggactggtcatagtcgctaacattggaggtgacaatgtacatagcatacttgtggataatgatagttttgttaaccttttaaacttgtaagatttcaagcaaatgggactacacgagaaggatttaaaactagtaacttcaagtatttacggaattacttgggacacaattgagttgaaaggaatgatcaaactaccaataactcttggtacaacacccgtcacaacgaaatctatggctaattttgcggtaattgaccaacattctgcatacaatgcagtaattgaacacccaatcgtgaaggagatgaagattgtaacttcaatttaccacctcaccatgaagttccttactcacacaggtgtaggatcggtgagaggagtccaatcgactcgagagaatgctataacaccacagtcaagatcgtagagtttaataatttaatatctttttatcattcaataattgttttttcttccatgtttttgtttaaatatttttatcttcttatcataatatcacaaaaatattttattttatacatgcatttgttttagaatgggagaaggaaaacagaaaaaagaataataaaatgggtgtttttattttaaggagatttttttttttttttgaaagaaattttgaaagagaaatttacaccataagaatattttatattatatttgcaccctaaatttactattaatatatatttttttatttcatattctcttgcgtcattttcaataattttttaataatgtttttcagatatagttttaatataataatattgaattttgtgataaatattttttttaaatgtgaaaaggaaaaagaataataaaaaaaaatatgagtataaattagaaagattattttatgcaagtactagggaacaaatccgcgcttcgcgcgattttaatattttttttagaaaataattttttaattatgaatgaaatattatatcaaatacttttaatgtttttt

SEQ ID NO: 22020 - DNA, 1881 bp, Cannabis sativa
aataatgtttcaattatctaggattgaaaattgaggtcggtagtattaatacatatataggaaaaaaaaattggtaggggcatatatatatataatatatattaaaaaaaaaagcatgttaaaaatgtgatttaaagtgaggtacatgctatataaatgtaggagattctattttaaaattaattggtaggcatcatatatatgtattaaatttttatacattatcaatattttttggtaagttagtcacttttattactccatcaaactgtacagctttgaaacttataccaattggtcatttatatacaattaaatgtcccaatcaagttttcaatccacaatctatcacttatcactatacttttttgtcccaaactcatatttctaattcattaaaaaaacttgttactgttgagacacattttgattccatatagttctattttttagctttccatatcatgtacacaaagtattagaatctttattgattaaatctaaagcttgcccagttccacacctgtttagaacattgcaaactaaaatcacattgaaaaaataggtgattgtgagtctcttgttctttcccacatatatagtagtttgtaggctctattatccccattttgtgaaatttatctctagttttgagcctatttcaagctgcaattcatgtgatgtatctatgctttgaaacactttatcgcatccagatcttactcggataccatgtcttcccttttgaagtctcaaaaagtcttttacaaaattcttttattgaataagacacagtctccgtctgctttttaaaataaacacctttgagtgtatcccgcaccggcaacaccttcttccaacaccacccattggcatggtgaggttgataatcccaccaattttccttcttcatataaattttatgaactcacttaatccaaagattatctttttcgtgggctatgtgacctctgtccataaaaaagctctacatatagagtcaatatagcttttaacactttcttcggaagtatcattacttgagcccaatagatgttaatagctacaagaacaaaattcactaaaatcgctagatcttcccgcatatgataagtgttttgaactccaagttctaattcaactattattttctcaataataaagtcatatttaatactagaaattctttttgaacaaataagaacactcgaatagtgaaaggggagcttattactttgttgaaacccgaaagcatcgaggatttgttggatcgtaattttagtataagtatgtaagaaaattataaatcaaaaacaaatgcttaattatattaaaataatttataattttataaaaattgtcctcaaaataatttattatacatgtgtataaatacttaaaaacaatctaactattttcaaatttttaggcacatggatgagtataaatacattttttatgtgatcgtttatatatagtatagttatttaattagaaaatttcccaaatttttcagaaatttcaaatatttaaggtgccaaaaatacgaagcaagttgtgttgaagcatatatgttttatacatgacaaattggtttaaaacttatattaaactatgtaaaattctaattttataaaaacttactttcatagtaaaaaatgtaagttaaatgtagattattatctacatgttatttttttattagcatatttaatttaatttttttaaaaaaataaataaaatgattaataatgaccaattaattgtcacgtgacaatttactcttaacaacctacaaaagttctagaatgataatttagttattattatcgctaaaattaaacttaaatatttataatttgcaaccgaaaattaaattta

SEQ ID NO: 22021 - DNA, 3431 bp, Cannabis sativa
gtccatatgatcatgttgagacttcagacaaaatgatgaacctttgctaatcaatcttcaaagaaagttcaaacttcaaagtaatataagtctcctagcaaaaaaataaagaaaaaattggcattggggtaaatttgttacatgtggtttttattttaaccacaacaagaaaaatatattttttattatattattattttttaaaataaaatagaatttttttttattacattatttttaaaaatttatagttttttattattgaaaacaactttaaattaatttttatgacaacagtactataaaactatatcatttttagtgttaaatttcattttctgattaacatatacaatttcactaacacaaaataaaccaatgtctaattttttataaacataaatagtaataaataaataaaaagatggggtagctattgagcattgcatatatagaatggccagtgtaaacaacatatgtgattttatatagtgtaggttggagatgccctaaaagaattttgggcaaaatagaaagaggagatgatagactttttgggcaaaatagaaaatataatttcggggattttcaagtttctattggccacatagtttatggtgcgattgtttattgattgttatcgctatagatagtcatttgcttatttccatttattttaggttaaataataagcttgttatgtcccaatttttattgtaagatcattggctgatagttattaatagatagattgtgtcaaatgttttttttgatttaaaagcctagtatacatcacacttcttcaatacttgattgttagtcccttattgaattcttaactgagattattgttaggattaaacaacttaatatacctaattttttatgattttactttttgaactagatcttcatgtaaaaaaaaaaaatagtaagtaggaagtaagtaaaaaatgctccaataatttaataagaagctttggtgttttctttttcctttctttggttatctttttcttttgattatgattaaatttgctttttcttgttctttgctctctttttagtttgggaagataagaattattactttattgttagctttgatatttctgttagtatatgtttggaatggtcatgttattagaaataatatcctctctctctttaatcttttcttctttatttgtttatttattattatttttttttttaaaaaatggactttaatctttatgttaaaaaagaatgaaattgtttcagatttctgtattcatctttgccaatcacgtggtttgaattctctttttacttttttagaaattaagtttaattaatatatgagaattgctaatcgacaccttaaagtgttaatcattataaaaagcggtatatctaatgttattagtgcaatttgatatcgaattttatatatttctatttaataaataatatacaaaactgttaactacttacaacgcgttacattaatataatattgcacaattttcaaaaatatacattttttatattttatttacatttttacgacttaaaatttttatttataaaaatatatttttctttactaaaagtataaaaacaatgagaatttaattttacaataactataaattaactataaaacaaatagataaataaccacattacaactataatactaattaaataaccaaagtacatatttttataaataaaaaaaaaatcaaaacaaataaaaatatttccattaaaaaagaggtgggaccaacaaatctactaattttcccttaaaaaagacaaaaaaaaaaaaaaatctattaattttttccttatattaaacacgaatcatcttgtgccacgtaataccaacgtgaaaaaccttcttcagttgccacacatacaatgggcacattccaccgtacactatatataaatcaccaacaaatcatcaattcatggctttactttagtgatcattattttgattttgagtactcctccacattctcattaatggagaagaagagaaaagggtcagccccgagaaaggcggtggcggtggcggtggcagtggcggttgcttggctgggcgcaattagcggcgccacagccaaagcagtactacacaaagtaggaggatctaaaggttggaatgaaaacgttaactacactcaatggtccaccacaactgctcctttcttcctaggcgattggctttgtaagtaattatttctattatcaatattcattattaatattcatttttctttcttcttaattaattgttggtgaaattttattatattttaattttatacatttaattttttgatttttttttactatatcccttaactttattttctttctaaatttaaagtataaattaaatctcactattaaaatactaattggattgtcagtgtgcaccgagggacagagctagagtttgaactttaggggagaaaaaaaaatttaagagggaccaaactataaattttgaagaaaatgaggaaaaaaagaataattttttttgtttagaattttgggtgccatggccaccttttattcagggtggctccgtctcgtgtatacttatgtttacataacatgtttttgtatgtttcaaagttttaatccaattagtatttaatagtgtaaattaacttgcgtcataaattcgtaaagaaaaattaagttaaagggatattaccaaaaaaaaaaaaacaaatagttaagtgtataaaaattcgaacatacatagatttttaattatttgattacaaaatttttgataataataattaattacattaatagattttgtgttcgacaagagatattacaatgtactggaagtgaatgaaacaagttacgagagttgcaatgacaaaatatttttaaacaacgtgacacgtggaggtcgtgacgtgttccaactcactgagtctaaaccttattactttatctctggcggaggttactgctttcacggtatgcgactcactatctctgtcgtcaaggatgacgcaacaggcggctctgctactcttccgccagccatcgttgatggtgataataatacttttgcaccggtggtggctgatgctcctgccaaaaattcatccccatcatcattaatattacatttggatttattaatttatttagttattctttatttagtgtgctagaataaaattagagtattgttattacacattttaaagtgtctaatattatactcaactgacaaagcgtgttgtgagtggttaatgatctttcatactacttattaaattaaaatgtgtgggtttcgataatgaattttaccatacaatatatcacttatagtagtacaaatttgacacattaatgtttcctttaataattctcatctaataaaacacaatcaaataagaaactaa

SEQ ID NO: 22022 - DNA, 8766 bp, Cannabis sativa
aaaattagaaagtaagactttgcaaaaattataattcaatgacaaaaatactatatttaggtagactaaatatctaagagctttgaatgtaatcatatgaaaaggaatgcaagtggaatagtacaaagtttgagggagaaaagtataaatatgagaaagatataagaggagtactgataacaaagaaatccaccaattaaccaacaaaactgaaaatggcgctacaaatccactgtccttcctctttcacaaccaaaccctatcgtcttcctcttcactcctccactaaaacccacttcaggatcaagtcccagaaccaattggacccatcggaatccaccatcaaggtcaccgagaccacggtccagcccaagaaatccacctcacagggactggggtttggttcctctgcttcgtctccaaccaaagagaatgcggcccaattgagtactactactgctactaataagaaacgtaagagtaaacgagagagggcttccattattcggaggtctccggtcgaaaagccggcttttggctcagtagaggatgatgacgaaaaggccaaagaaaccggcagaaatgagagtgcttttctcctgacatggttggggcttggtgtgataattcttactcaaggcatcattctttctgcttcaggtactgctttaaattattattattatttattttgaggtagaaagagctgttatcagtaatgattagagattccatgacaatatcagaattcgaactggattggattggattatgaatatcctttaaccatataaaaaaaactttgtccacctaagagcaaatttagttaggttagttgagaccttaaaactgtcattgaagagtgaagaccagtgaacaaagctttcacttccatttctataggataaaatcaacccttaacttcacctgaagattctaggttaagagccccaacacctacttacaatattcttctgattatcaaaagctgcatctacaattattttgtattgacctgccaagggaggtttcgaaacgcgacaagagggagtattttgtgccatgagatcaatagaaggtgatttatgtagagcctcacagaactgtgcaagataatggcttgtacgtctagaagaagaaacattgttttagacattcgtccatgcaatttcccattacgcaagactaaatgattcacatgataacattctccatttcttgtttggtaagagaatgagaaagagtgtgacaatttccaatcagccttataggcaaggtgcatagagagcgttgctgctgattcaagaacttgacgttgctgaagagctgcagcaactgttagtggacactggatggcctgccaagctatggtttttacttttggtggtaatgtaaaaagttcagaaattttccaacagtggatatgatttatggagctctaagaagtgagaattattcagagctgtagctgtataataatcagatttcactgtgtaaagtcaagtcttgtagaggtatgatgtctatcttcctgtagcggaaaactgagagggatggaaaggattctgtctatatcaatagattaaaaatgattttgcaataaaataatggttcattgatgatctgcagtaataaactcaaaggcagtcaaattatggctaatcccttgaaacttaatagacttagaagttgaaatttccatggaaaactttttgatatctctttttcacataatcaacattgtagaaggataatgtctaagacaaacttgaaggaaggttgtgtcggcagacacaaaaaaaaaaaaactgctaagagagttggtttgtctatgatacacatgcttgcttttctagtcaagctttcttaaaatgaattaggatctaaagcccttacctcctttaattttagaaaggcttatctaacttttcaagcgaatagaagagcccttagcattagaatcccaccaaaaatgtgtcattagtgattcaagctgatgacataagctacttggaagtgaatcagcttaaggcataagtagggaaggactccacatcaccgatcggaaacttctcctgccaagaacttagtagtttctaagcattttccttaattccattgaattgttgttgcttataattgcctgaaaatgatggcaaacctaggtaaatccaattgcaacaaataggtctaccaaaagtttactgagatagatattgtatcgctgaaaacatatcatatcaggagaaaaagatacaatagatttgtccggattgagtagttgacctgatgtgtgattttaggtgtccttaggtgtccaagatgcgctttacagcattgtgcgagggagcaattgtttggaaaaataataccatctgcaaataataacaatgtgtttggtatggggatttgggttcttggatttgggaatgtaaaaccaaacgtacgtttgttataattttagtacaagacttacgattaagtgggtctcgcttttaagtttattgtttgggtaaaaactcgaactctgttaatacttgagtattcaatctttctctactaaaacccatcaagtgaaactcttacaccaagcactccataagtgtgagattggtagagcatgtctagtaatagcaagaccctgggaacaatcagttcttgatttatgttggagtagatgaaaaagattcttcgcaaatcaataagtattgtgaaagtggatcaccatcctgtgttgaaaaaccaagtgcttgttctattgatgagaaaaaggagacccagctaatgcattgtataatgaggctcaaaaagcctcattttaagcgtcactttttcaataaaaaagccactctactcgaactgaagatttagtcatgtctaattttcgagctgcatagctattcttgcctcatttctaatcagttcaaaagtcaacaaaatgttgtttgtaataaaaattctatttcagaggaacacactgtcggttctcatagataattgttagcaagggttcctaagggcttcggaagcaatcttaacggcagcattctgcatccgcagtagacaatctactcactttaattaaagtccacaatttttaatggtattatttgccttcatagccctagagtgacagaagagtgttggataggagtctccagatttcagccaagtgcgaaattgctgctgccattatgtttcttgagccataaatcacgagagttgcaaagtgaagctgccgaaatttagagaaatggcaagctagtgcaaaggtacatcaactgatattgttacagactttggtagccttttaagcagacacagagtgtgctttctagcgttgatcagttttcataaaactataaaaaccagttaaattccttggaggaccaccttcaaatgaatacagcaatcgaagtgatttattgaataagagagtagtgttatatccacatggtctttttataacaacataaacccaccaccaagaccaacccttagaatttctaaaccataactgaaatttagttaaaagaattttgcgcactacgctctttcaagtctcatgaaaaatagaacatgaggtgcttatctcaagcaaagatgacatgatgcaattgggttccccaagccccatgcattccaccctagggaatgagaagatttatggctgctggtgggagatcgtaaagtaatgtcccaatggagtagagtcagtagtcaagccttggacaccacttgtgtagagagaaatcatcaacctagggaatagactttatctgaggagtttgtggtgcgtaagtgttgaaggacctacctaacagaacagccattgtcaaagattgtctgttaacatatacagatatattgtgcattatttcaataaaatgatcaaaatgtgttggtcctttttgagtctaaatttcctggaccacttaataagtgggactttgcacttctttttctttctattattattagtgtctaagcttatctggcttaagtagtagaggaaaaagtgaccacatttttgtagttgagccacgagttttgtgtcctgacgaattaaaaacaattttatttgtgttaatgttgaatatactaatctttatgtaaaatacttgcatcggttaagttagagttttgagtgttagtctagtcttaatatccaagtcacaatataagaacttgtaaaattttaacagagatattaaacctaaatatttgaagctggtacatgttcaagatctaactactgcactgacaatgtgctatttagaacaaagtagaaccccttcctagtcacaaaagcttctctttccctaaattggctcccccttactcctgatttcaggtgaaatataagctacatttttgtggaaatgatccactaaggtgagataaaactataagtaggtaatatggcttaaggatataactgatatgctctgagtaactaactggcagtggctgtgatgaaagcggccttggattataaatggagagaaaatttcatgtaattgaaaagcataaaccagaaaaacaccctaatggtttttttgtttgtatttttattcatgtgttcatttcattttctaaccaagaaatcatgtgaacacaatcacaggttttctgccagaagaatgggataagttcttagttaagtatctgtatccaacatttactccaacagttggtttgttcatcgctggaaccgttacatatggagtgttgaagtacctacagaatgagaacctcaaagatcagaagtaatatttatttgacttcatctacaactttcaggtataaggagatatcataatacgtagaaattatgaacatgcaatattatttttaggctgtatttgttgtggctttcatgccataaagagatgaatgtgaaaatagttgaacagatttcgcctgccttcactgtatcattctgaaattatagttagatatattgcccagttatttaactcttttcacattttgttgaagatcatgttagtcagatcatatttcaatatcaatatattaccataagcttaccaagtgatctctgtcagttaagcccatctattaaattttgcaaaatttattgtctctgcagagtggttttagctacaatgaataagttaactttgtcttccttttctatttggggcatttccattgaactgtgccctctttttagcaagttttaaatagctgtgacccaactaagaatctctttttccatttacatttattcctcaaacagaaatagggtccagcttgtcatctttgccgtgttttcacttcacccataagttaagttggttgaattgtatatagttttcttacctattgagtttgtccattactttctacattcagaattaggctacattgaactgtctttcctatttggcataactatttaaatagttgatacaattaagaatagtcaacaaactatgatatcccataaagtttcttaatggtaacaaactatgccatattattgcccataatacaagctataggaaaaaatggatagaaatatgtgaagagtccagctcaaaagctgggcaataaaaatcttttgtacctttttttctaggctcatggtgatgatatcacctacgctagttatgacaaacaagtacttcaaattattgggataacccattttttctttttaaattgatgttacttgtacctgagtatttcagaagtatattatatctagtaaatgccataattgcaatgctacagttgtatgaactaattaaagtctactcaagcacgataggtaacagagtcaaattacatgtactggactccaaacagttagagaaaaccaatggtatatatgtttgaaaaccaaacagttatttctttgtaaacatagttttatgaatgcgaaatagtatttctttccaagatttgaaggccaaacagtaagtgtttggctagttatctcattaaggcaattttagcctacaatatttgtggcaaaaaaaaaaaaagaccctactacaaacatattggtaccagattaggaaatgttacaaaactttcttttttttggtgaaaacttaaattattttttatttcagaagattatgttgaattcattggtcaatgttggaggtgccactcactgaactcttattaaagagttttaattataattattattctgtaagggtcatccaatcattagactaagccacgtaatgtagctgctcttaagtttattcacaatcgcttcaatgtcgtttagtgtcactattgctttcatcaaagttgtatgagaattagatgacattgaggttgaggtcccctcgaattattgcctctttatctttcttccccctcttttattactaatcaatttgcaccaactctcttaattaccttttccttttttctctattttttttttttcgccctttagcctaatcataaaaatatatatatttatatataaatatcagtgctacaaatacgtgtcgtgctagtccggtctttatttttcgagtttttaaaaatatggatcgtgttttgatgtggaacaatttcataaaatagattcagtacggttcataaacctagtaattttatgccgtgttcaaatttctttcatgttttaattgggctgacccttttttaatgtcgtgctttcaagctaatctatatgtgctttcgagcttattgtatcgtgtttaagtctatatttttcgtgtcgagtcgtgtcaattcacaacattgtcgtgtcgtatctaagttcatattttttcgtgtccagtcgtcgtgcctaagcatatattttttttgtgtcagatcatgctcgtgtctctcaggctcgtgtaggtttcgtgctgtgtcaaaaagaccgtctcatatttacaatactaatatatatttcggtattcagaagaggattttagttatataatacatacattatagttatttagaattaatgataaattttttagaaaattctaaatagtttacagtgttaaaaataatgttcaaacaattgcttatacacaatattaaaaaaaaaaaaaaaatcaatcaaccgtgcaataaaatacttgaatcttatttcaatattgtaaattatttaaatttttttcaaaatttatacgtgatccaaaataattataacgtacacgattataaaaaaaatattaaactaaaaagctttcttaaatgtcaaactaaataagtgatctatcaaaacaacctttaaagtgtactactttcccaatatattgaactttttttcccctacattttcaaacttttggtgggtatttcagaaactactaattgcagagtccagcatcaaaattggagctaaagttcttgatgtgagtgaccttatgcagttattttctacaaagtggagagaagctttcacacaaggaatttttatgttcttggccaagttatcaacaaggcactgcaattcagttgacaaaaaaaaaaaatgacttgtgaggtagtagtgcttcttacagtgagtgagtgagtgagtgagagaaaatatctttatcaaaagtcaatagtgttgaatattttactattagtatcagccttgtaatatgtgactgaaatgagtttttatttggggagtaaaagtctcattaagtttgttccaatttcatacctggatgatcaattagagatattttggattaattaaatgttgtactcgatcatcgacatcaacattcatttgggaactacttttaagagttattggagcgactcaatctactaaaaacttaataaaaggttgtatctatcaatgctcaccaaataacaaataatatcatacacaaacttaaatgcctaactttgatcgaccaccaaccaaaccaaagtactcatctcctggtttcaacttcttcctatttgggtgtgtaatgtatacttgtttagtatcatgtattttcaataatgtttatttggtattggtatgtattgaaatcaatacatatatttctatattatctatattatatgtacaaggctacaagccacggcggctacccaatttaatcatatattgactttacatatagaagcagtctgcggctacctccgtgatatgagaaaagtgtttttgtttttttgtttttttttcaatagtgactgataagatagtagtgtattgatgttgaatttcttaaggaattaatggattagtatcattatcttatttactcatacaactttttttcttttcttaaattaaaataactaatgcaccaatacaaccttttgtaactttaataattaaatatttataattttatttatgggtctctactaatttggaccatgtgttttgtaaaagttattaattggatcatctgttttattaagtgaccaaatatctataatggtaaaaataggattcagagctcaattttcaacaattttattttttaatataaccaatttaagacaatttctaacataaacagatacagaaaatgtaactagttttatcataacatttctacatcatattattattaaattttattttgacagaaaattagttcaaggtcttatttgtacaattttaaaaaatacaaggtccaatctatcatttaacaaaataaaagggttcaatttataacttttgcaaaatatagggtctaaaatagtaattactctttatttatatatataataatatatatggtagttatttataatatcttttaaaacttttgaaaaattcagaataattta

SEQ ID NO: 22023 - DNA, 3034 bp, Cannabis sativa
  modified_base (31)..(37): a, c, t, g, unknown or other
ttttagaatttatattaggatgttaatgaannnnnnntgttagtaaatctagatcctgttaaaataatttccaacaacactccccaggttgagtggttgtgcatgcactcttattggtttgagtgaaaaattaaattaaggctgcgcattcctccgttgattaaggaattaataatacattactccctttcccctgctcaattacttcctaatgtgtgggctatccttttaagtttaatagttttgggagataaggctggagttaagtaggaggtatcatatagtattcaattttattcgttaatggagggtgagtaagggcgttgccatctacggcccaggcggaaccgtgctattatcaatgacctgaagacttctcataaggggtggaagaattgattcttttttgtaaaagggcctattgagtttgtttctgacaatcatactgctccttttatcaatcgaagctggggagctcctagtattctttccccttcatttttccataggatattcttgtacataccttttcgtcgcattattcatacttttattctgcagcttttaacctttctttgtaataatttttttacgaatgtccaacttttgtggataacgaggaaactgttattggggaagtttttgctgacaaagttcgcaaagtcaccactctagaataaaagtttcagccaatcaagtatcttttgtcgaatcctcttcttggcctagtgagctcaggatttctttaagtatccccattccttattcttcttattttatttgactaatttcataaaatgtgccttggagcatttaaaacaaacaacggaaccaattttgatcgaatattctgaggtacatcccagccttgaagagacttacccctgtcatcttcctaaaatgaaattgtctaagttgttcattgaagaaattgaggcccaaactgctgcccggcgaaagagacttatggcaaaattgcctaaacgtaaaggaaagggtaagaggagtaagatggtggggcctgatgaggctaaccagtaagatgctggacaatcatctcagcatgacttggcaacggatgattccattggggtgctactcaatgctccacaagatactattttgaccatcggaaacgttggggatgactcccttaattcgataccagctgagtagatgaaccctgagagagtctcccagcatgaggatccttcggtggttgacttggacgcgatcgtaggttccctcccaccttcacctactcacacctccacccttccttttgggacttcgcagacctcccagcttgctatgtctccctttttaaatcgttcttcttctcatcctagtggttggggttctccatctttgaccgtccatatgctgagggtttcggctgagtgggacgagatccttactttctgaattcagaatgatgttcctttcaatgaattgactaaaaactagtttaagtccctattggagatttctcttacttcacctttgcatggaaatttaattacttgatgataagaggatggaactgccttcatagtgtggatccacagccggcccaggatagcgttgtaggtcgacatgcaattaactatctgaaatttcaccgacttgttcaccccattggcataaacaggtaattggacataacttcgggcgacgacgctctcccctgagaatcctaccaaggtgacttgggtttcttgtgtatttaaatccttaatttccatttaattcaggacgacagcgaataaaatatttgcacaactttctgtatccatgagcattcgcttcatgcggatgtgggccacgtctagggtgatgatcaaggcatcgtcatgcgggtgaactaattccgaggcctccccttggctaaacattatttgtacaataggtctctcaatgtctgtaatatcccaataagcttaataattaataattagggtttatatttatattatgagttaaccaggtagtaagtgggattatgatcttactaatctagttcaacataaaactttaaatttgctataagtggataaataagcgtaatttttaaattacggagatttatatagcatttgtgaatgtaatatgaactatatgtggaataaaaatattttcaggtttggagaccttagagactcgatcgggggtcagaaatgtcataacaggcttaattaatataattaatgggatattgtgataagttgattatgtaagtattgaggtaagtaggagtatgtagtatttaatgtagagccctagaaatagttatttcttattaactaaaaaatgataagataattattaataataaagtttttattaatattattgtattattatattaatattattatattattattgttataatattaacttgaaaagtaaaacacgttcagtttatatatataagttatgttacataaatcacatcagaacagtaagaacgaacgaatcctcgttcctcccccttcaataaaaatttctccccttatatctattttctttgattttcaatttgaaacttagcgatctaagctccggcagtagcacgatagctaattcacagagcgaagaagcctaaggtaaggtttaatttcgttttaagtttaataacaattggtttcgtatagggattttgtgaattagaatagttatgaaggttctgatcttataggattgttctcgggtagtcatgggactagttctgatgttttcttgctgaaattgaggtaattttgagttagaaatcgagtttgaaactttttaaagcttagtccgagcgttaatggcgttttccgtttaaggggtcgatttaatttttgttatgcaagaatggtagtattcatggtgtatatgtgccctgtgaagtttcgagtgatttggataagttttggtagtgtttcggtgagtgcaaaaattgagattatcgtgtttcatactttttagaaattcataggagattagaaatcgtatttttatcataactttttcctcgggtgtccgtttt

SEQ ID NO: 22024 - DNA, 4367 bp, Cannabis sativa
cctaaaattggttcccatacactcaatagtgtgtcatcattaacaactgtaatttttgttggcccattgtatgaagcaccatattcaaacatagaaccattattatttagctcagtcatggatctaaatataatctgtgactgttacatgctgtggctgcttttgtgaagtccgtcggtgtaaatattggatttaaacattttgatgatttatggctcaactttttgcctatgaacaaaatatccacactgaactaaggaaatggtaacaaaatatccacactggtctaatgaaagggtacttttggcaaaaggttgcataggacaatgtgctaaaaaatctgaggcgtaaattgtgtggtaattaaagtgtaactggtgaaagccttgtcgaaacattacaaaattttacaataaaaatggggcttcaaaaagtataatatgtttacaactgtgttacattctctttcttgtctgaagaaacttcttgaaagttaacataatttttctctggttaatcaagtgcatgattgtgtgttgtttttactatgtttgaaaatctgcagtgctcactactcatctttgtagaggttcatagcactattatttttttggtgttgtggttaccttttcttttacaactttttgagaatttgaaatgcaggtttcagatgctgaccatatagacagactgatttcttgcctttacatggctcttccatttgtcgtggtatggactgtgttgaaataatcttaccctattttctctctgtgtttgtgtgtgtttccctttttaaaatttaccccatgtactttgtacttgacacagagaggtgcatcaagtagcaagttcctcaactatctcaataagcacataatacccgtttttgagaaggtaatcattttttttaatgttattgaatattttttagtgtgtatttaatgtgatatttgctacactaaaatccattttagaattgtcacaaaattgagtcatttggttggaaccttatatcatgcttgtgaacttttgataactactttcatcagttaggaagttgtgtagctccttcccgtttaagtggaaggcttttctgtaatctcagtaaaaggttctacagtagaagagctggaaaaattctcaatgctctatgaagagctcccttaaaagactatctactatctagttgctcagtttactacgtaccagtaaagttagtcaatgtatataagttattaactatatatctcatgccagctacctgaggaacgcaagttggatttgctcaaagcactagcagaaatttcaccttacacaactcctcaagattcacgccagatccttccttctattgttcaactgctgaaggtattttatatattgtttcaatgacataatgcaaaacctgttgccatttatgtagctctgagacaactaccttgcctgttaaagttgtttgaatgtgaaaggtcaacttaaatatttagtttgttgagtgattttcatttatttatttatttttttttttgtttttcatttttcatttgatttcagaagtacatgcctcgaaggaaaactggagaagagatgaacttcacttatgttgagtgcttgttgtatacatttcatcatcttgctcaaaaggttcctactttacatttgattgtcttgttaatgtacttatttgatgtgaattactcatgtgctaagtattttactattgttactggattaggttcccaatgccacaaacagtttatgtggttacaaaatagtaacaggccaaccctcagataggcttggagaggacttctcagagcagtacaaagatttaactgaaaggtaattgtatctatctgtatagtcttttgtttaaaatatatatgtttgtaaattgaaggtggtagctaactcactaagtaggcaattatgttagatacttggttatgccatgagagttacctttaatttctatcataataaaaataatatcttaatgagcctggctcaacagtttggttattatttaattacaatgacaaggaatattggtctttgttggctcgattctttcttcttttctgtctatatattttatttagcgaacattaaacctcctgctgagtccagagttttacttgaaaataagtaaccttggcctagggttgtttgtgaaagaaacttgggactgtattgctttatgtcaggtagatgcaatctgattttcagtatattattgttgttccgggtggaatatctgtttaaatcagagtcagagtctattttgtgttggaatgtggtcattcatatcctactgttatacccaagaatggtagcttgaatgatcagacctttgtttactcccacattgtcagaggtgcaagtccctcctgcctacttccatagaaatttctaagagtctggttcccactattattgggaattaaataaggggttatcatggcatttagaattctacgatagtaatgaataactgctgtagtttaactatctagcgtaaagggggttattaattttgcaataaaaaatatcatgtcattcaatacttgtctgtagtaagttgctacacatgcaatcattttattatgtcactctttcagctatgttaaactgtcttgataatctattaaacattaaaattcttgtatttcattggaatccttgtgtatttaaaaagaaagtagatgatgaatttttaatcatttatcttagacattaggtgaagttaatgttgctaccccattacactgttttcattgctatcatttgttgagcttctctctatattttcttttccttttgtcaaataactgttaacttatggtttaggttgacgagtgtggaggagctgactagagctaccatgaagaagttaactcagggaatggctgagcacaacaaagcaatggctgcagccaaatctgatgaggcaaagggtagcattgtgagtattcgtagaagacttcatcatatcgtttcttgcttccttcttacaaactttgaagcaattttctttttatgttcagaaaactcaaaagcagaacacaacaactggactgcgaacctgcaataacattttggcaatgacaaaggttgtaaaacactggcttttgatgtttacattcatgttcttttatgcataaactgtcaaaactaaccccttttttattcctttaacttctgatgattcagccattgcatgtgaaaacaccgacatttattggagacaagagcataaatttgtcttggaaagaggcaaccaaacctgctgtgtcgtcctctaatactgttgggtatgagagatctgcctgacttatctccctttatttgttcagaatgtattattttctggttcttaatcctttttctttctgtatcgaattactctataatgttagttgtagccgttgttctcaatcattatatctttgcttagttataagcagagctgtaggaatctattttagcatagttaagaatttacagtcagtgggcacttaatttttataaatatcacttgtcttagtaaaatggttgggctggaagtgcactagtaaaatagtgtttactggaaataaagctatacttacgcattatatgttaaatctattttcagaggtaaacgtccatctacagctgctaatggatcaggcaatgcttcttcaaaaaaaggccgtggaggtggtggtttgccgagccagcttgttaatagagcgtttgaagggttatctcaaggtggcagaggtggtgcgagaggcataggcagaggcagaggatggggtggtcgtggaagaggaagggggttccggtagctgcactcagtgatgcagttaggtaaaagctacaaaattccaggatgtgtatgagaatgcgcattgagcacttgatgtatggaattcttctcttagggatatgctttgtttctcagaggaagttgatgagttttggactcgatttggactaaccccaattatcatattactctggagattatagagtggcaggagagtagagcttggggattctgaaccctttcaaatttagctgcaaccgattaaaaaaaaaaaagagaccatttaggagaaaagtgcaggttgccgttgtgcactgattatgcttgttttactgattttttttaattattattatagaatactgaatttgattttaaggtattttgtagttcaaataattagtgactattgttgaatgcgtgactagtacattagtgtataactcgagagagtttattttagtgtataattcacttgtaatactcgaacttgttaaaaccagtcattgtcttgcatcctcccaactgatgaaatttcaaccaaatgaccttt

SEQ ID NO: 22025 - DNA, 3709 bp, Cannabis sativa
tatgactcttgatgtgttgcaaggggaattggaggccttgctttttggggtctctttggccaaggacctgcagttagtaggggtggatttcttcactgataattctctgttggtcaaaggtctgattgagaaatcttctccttcctggctgtctcatttctcttttgctaaattgtatgagttgttggttagtcttgactgttctgttagttagatttctcgtgttttaaataaggccgcgcatgctcttgctcgatggggtttgtcccattcttgtaatggtttattgcgtttcatgggatgtggtgtggtgttttttgctcacgggatgtggtgtttcatgagaccatttttccttttgttcagtctgctgaaataccaccagatattcagggttttttttcctatttctacacctgaacctgagctatttgcagcctcttcaccccatctgagcctcattttgagcccccttccattttcagttccatgtgctaggcagcagcagacaagattttctcgaaccatcactaaaccttcatatcttagtgactatcattgctttcttgccactaatgatcttgttgatttttgtgagtttacaatgtcagtgactgcacatgctctctcccaagtgcttgattactcaaaattgtctcctaagtttcgagctatggtgctgtccatttctagtcatattaaacccatgtgctttagtcaagcaaagggcattcctgaatgggataatgcaatggataatgagatcgatgccttggaaaagaatcacacttggattgtggttactctcagcatgtgataggttgtaagtgggtttacaaaattaaatacaatgctgattgctccattgatagattcatagtaaggcttgtagctaagggatataatcaacttgaaggaattgattatcatgacacttttgctcttgtcaccaagcttgcttttgtcaagctcatacttgccttagctgctatccatggctggtttttacatcagcttgatgtaaataatgcttttcttcatggagatctctatgaagatgtctatatgactctacctcctcggtatagtcctaagggggagaacaaattaccaccaaatgctgtttgcaagcttcaaaagtctctatatggtttaaagcaagcatcaagacaatggttcgccaagttctctacaacccttttagaggaatgtttttctcatttaaccactgatcattccatgtttataaggcactcttctactagtttcatcatcttacttgtctatgtagatgatgttattctagctagcaacaacatgagtgagttagaggccttaaaactaaggctgaatgacaggttcgaactcaaagattaaggggatttaaagtactttctcaggcttgaaattgcaagatcaagcaagggcatatttgtgtctcaaagaccatatgctcttcaacttttagaagaacttggttatttgggaagtaaaccagtaagcacaccaatggagcctaatctaaagttgtcacaagatgagaaagacaagctggccgaccctacaatttatagaaagatcattgggaagttgcaatatcttgtaattacaaggcctgatatagcttattcagtcaataagcttagtcagttcttaaccattccaagagctaaacaccttgttgctgcacaaagggttcttcatttcataaagtcaagtccagaacaaggtattttgcttgctgcaacttcagaaattcagctaagagcattcacgggtgctgactgggctgcttgcattgacactaggagatctacaacaggtttttgcatctttcttggagattctatcatctctcggaaaagcaaaaagcaacatactgtgtcaagatcctcagctgaagctgaatatcgagcaatggcaaacacaactagtgaggtgatttggttattgtcattgctgaaagagttgaaaatagagcacaaagggcctgccttgatgtattgtgacaacaaagccgctgaatatattgcagccaattctgtttttcatgagagaacataacatatcgagattgactgccatcttgtaagggaaaaagttgaagaaggactaatcaagactatatatgtttctaccaaagaacaactggctgacattatgaccaaagctttatttccaaatcagtttaaggctcttaaggacaagattgggttggttgatgtataccatccatcttgagggggagtatcaaagttagttggttagttaaaattgtttgttatagtcagttgattagtttgttgatcaatctgttatgacagctgtaataactaactgatatgagttgtataattgagctataaaagctctgcttctgtacattgttcagtaatgaaaaacagttggttttctcattcaattcctctctcaattctctctgttactctctcttcttcttcttctttcttccacagctaataaagagcaaggtcttaagtccttgacattacaatcaaaaccttactgttgattcttatcttgatcatcttgtctgacgctgctcattagataatctaaacaaaaatgttaaattgaaaaacacatcttcaatcggaaacaatcaaaaagcccatctattagaagtaaaactcattagtaacaatcgctaccattggaaaattgagaagagattgagtgagaaacataaaattaaactaaaataaaattaaatatttttaatattctgtaaaaactttaactctttgtaatttttgggtatttctgaaataatttatttctatgttttctatacttgtatctaggcggcccatctcaagctaatttggggtttagacaaaaaaaaaaaatctaattgagttttttatatagtgataaaaatttaaaatatagtattttgaaaatataattgaggcttttatcttaataaattgttaaatatagtattttgaaaaatgttttttttcttgaaagaaaaaaatgtattttcttttagaaaatagttaaattttttgataaataatagttgaaatacaaaatatgctatttttcaaaaataaatttgggcctttttgttaaaagggttttttggacttgggtgcgggccttgcttgtgtcacaaatgttattttgtatttttatattaaaaaatataaagttttattattacttaacatcgatattgcacttggttattttttggagagtaaataatcagcccatgaaaaaaagtatgattaattgaaatataatttccgtgtgttatctacttggatcgtgcaaaaagttagtctaaggaaaatagaaaaatcatgggtaagaatttcactacgtatatatatatatacatgtaggatagtagtttacaatattatacatttcaaatctgcacatcaaatttaaacatttttaggagcacatataatggaacgctgggttttccttttaatatatgtacttattgtttgcatgggctcaattcaaattggattttcggtacaactttaaactcaattagttttattgtttcattgaagttttttaagaaactaaaataaatgttaatggcagttttattttttcgacactgccaaaagttttggcggtattggtggagttggagtactaatttacgggctcgcctgcaaccggtttggaaggaaacgggtatatatatattttttatatg

SEQ ID NO: 22026 - DNA, 3754 bp, Cannabis sativa
acacggcaaaaacttatatatactatcatttttccctcaaaatgctccaaccacactgcaaaagccaacctattttcatggagctctacagcgtcccactaataatggtgggcactgtagactacggtatatatttttttaatgattaaataatatattttaatatttattaatataatttattagatttaataaatatttaatattaaaatatttttattatattaattaaataataaaatgataaagaatatattttagttttgtgattggaattaaaaaagaatagtattgaaatagtaactttttggtgtaaattttaacactaaatatgagttttacactgaagatggcctcatgtaatcactgagattacataagcataagacgatttaaattttgaggtcattatataaaactcaattttacttataaaaaagtcaaaacatgtaatcaagactatctttacaattttaaccaattcaaatcaaatcaaataatatttaaatgaaaacaatgtatattattgaacacactttgatgatttgattaataattttttatcccttaatgttaaagatatgagtgtggttgtggattgtgaaaaaaaattaatcaaagaaagcttatgtctacataaatgaaggagagaaaaagaaatggaaaggaaaaaaaaattaaaagttgttaaaagttaggatttaaatttagaaagtaaaattaattcaaataaattttcaagcttataaaaactcaactagaaattcacaacaatatcttaataaataaataattaaaataaattatacattagcctactatatccacccacaaatagaatcactttattaaaatataaaatccaaaagaatatacatttcattataactaagagtatttagatttaaaaataataataataaatagatccaaattataaccttttacaaaatataaaatttaaaattaaatttaacaaaacataacgaataatgatatgtgtacatataaatcacacaatgtgaacatacatagcaagtgagttatactaaatgagagccatctcaaataaaaataattggcgattaattaaccacacaattctcgtgttcagctacatttgagtccaagctaatgggtttgacatgaaccgtttcaggttgaacacaacattttatacccaactcttcgaaaatctttttaatctcaataaccagttcagaccgccgtcgattcttttcattgaagtcttgaaaattcatggtgtgagtaatattaagagccatttttaacttgttcacatcctcaatgtcaagcaccaccacactgtgagtaggaccccaatgtgatggagtcttttctatgtacctattaaaaataacataaacaaaaaccagaatgtgtcaataaatgaacaaaaaaaattgacattagtagtgttactaagtaaactcacttcttgattttttgtttgagttgtgctatcttttcgagagatgtattgaaatcgatcgaaaactcgacagaatcacccatatctggacttctgtagtagttgctgatgggttttgtagacaagactgagtttggatagaataccttttcattgttgagtttcaagaacacagttgttaagatgttcatctcttcaactaccaactgtcaaagtaaaaaatagagcttaataagaatccaaaccattgaaacaaacatttcaaaagaatagtgtccttttggttttgtactatgttaaattgagtaaacattgtgttagatgtgattgaattaaggttaattaggattttcatccctaaattttaacgtttatcaaatcatgctcctgaactttgaatttttcaggccgttaaaaattttccccaaagtattaagattgttagattcaaggacttgcaacccaattaagaataagaatataaagtataaaactaaaataagaattacataaatccttgaatctaacaatctcaataattcaggaaaaatatttgacggtttgaaaaattcagagaacatgatttagtagttgttaaagtttgggaacaaaaatcctaattacctttaagtatgaaaaacataaaaaatttaggctgaaataaaaattaccgtaacgccatcaatgacacaacgatctccgacgtcgaaaggatgccttatgaacacaaagacaatgtctttaccaaacacaaaaactgccactacaatctgagatgagaaaaaaactagtacttttgtggtatcaattttgatgagtataagccatactacaatagtcactacaaccagaataactgtcacaagtttgtccacttgactaactgctgttttagtgtcagttagagtatgtcctaatgtttttctgccattgtagatcttcacctgcaataagatcaagactaaatccagttacaactgtccttgacgacatggcaattcagttagttttgatcaagtttgtaactttttgtaatcataattgagaagtctaagggaagaaggagtgatctttagagggacttccttcctaggtgttcgaaattgtcttgattggtgatgtgaatacactttttaacacgcgccagggccggttctaaaatatatgagacttaatacaaaattaaattttggaaccctatataaaaaatttaattattatcaagtggtaaatatttttaaaattcttaagagttctaaagttcaatcctccattgctacacattaaatatttctaaagaaaacaataaaaaattagaggttgaaaattaatcccttgatctgttagcttaagactctctaccacaacactaaacactatcttgttatattttttcttattatttaatattttatctatatattgataattttttttcttttacaattttggaaccttgagcatttgggagcctaaaacgcacacctatctcgccttacctcagggctggccctgtctagcgtgtattccaaaatataagttgggatggcgctgcatgcacatatttatagctatagtttggtcttaatcatattgtaattgccaattgtcatagtgaaataatggattcttaagaggagttcaaagagtagtagcacaacaaaaacattgaacaccatgaattcaactgaattcataaaatgaaagtgaagttcatcaatcacaaatgagttgcaaagacttaccacccaatcagtgagagcttttcgatcaattcgaccattctctgtcccaatcataggaagaacaagatccacttcttccctaatcatgaatctcatgagatcatcctcatcaatgtacctatatgtcattacaaaaggccaagttaaacataaaatttaaccaagcaaataaggtaataactcaaataagctagattattatgtcctcacttggaaccaggccgagcaacatttctgaaaatgtgataagcagcagcagttgcctccatctcattagtaatctccttatcatgttctttaccaacattttccatctcatccaacggataagaaatgctcgaaagccccgaactcgaaacaacattgattaaagccttcatagaccaagctgaaaccttctcttgtttcatcttataaagttgaggcatatcaataacttgtgtttcttcatccatgtctcccttttttgtacttgtaaaactcgattgtcgccccatgctcggtgacctcctaaccctctgagcctcctcaatgagtggaggccctgaaagggttt

SEQ ID NO: 22027 - DNA, 2950 bp, Cannabis sativa
actcatatcttgaaatcgatcaatctaaagatgtacaacttggtaacttgaatcattaaaatctactagttgcactttcatagttaatctgagtttgaatgctattgacttgactttgaatatttttttcttcttgatttgagtttgggtaattttaacttttaatcttttgaatattttctatttgcatattgtataaacattagttaatgaaccaaacaaaaataaatctgaacaaaaaaaaaaaaaatcatgtatgaaggagaagttatatagaattagagtaatccttcatttttctttatttgtgtttgttatttaacaccgcgtagttagtatctttggtgttagtcacttttttcttcgtgtctgctacaaccttgttatatagtggagcttgttaagattctaattagatagatagtcatatagagtatatgtgaaatataaccattattcagtcaagttacatcataccttttaatgtatgtaatagaaaaagtaatgcatatattatagttataaaagcttctattcatgtactatgactatgagatagaaatatgtgtagttactgcaatatcgtgtcgtttatacaataatatcaaagggagaactatttatgtttgatgacaagtaattatagtcacaagataatatataaattatatatgatcagtaatgcatcaaatataaatttgtcttaattaaaatagctaaagtgagcaatagcattaggtggtctttaaatctttcattactagagatagtttagtaatggattaaatatagcctatagattaacatagtgcttttggattctgttcgaatgaattaattattagtttagcttgtttgttgaagagatctacaatttgattctcaagggcttttttttactgatcataaataaagtcatttttttttgttccgattttattttttgatttgtgctttttttttttgttatagtgttgtgcgtgtgtgtttttacatgacagcaagtgttgttgaatggtgataactatgaggtttagaacacttaaacaactaacttaactactttgacaattggcagttatttcagttaaatggacattaacctactgctatataaaaaggcattcaacaacagaaacaaaagagagagaaatcaagtcaaagtaagggtgatacacaaagatgattgagagctaatgtgagatgaattctcttcaagattgagtgattttcaaggctgttcttgttcgagttattgacggttttgtaagctcttttagttactggtgtgaagcaccatttgagttctttgtgtacttgattctcaagctattgtaagttgtaatcattgccattaatcaataaatttagcacagccaatagtgttgtttttacccagagattaggtccaatttttatctaaaacttgtgactgaacctcgttactttcttgttgtcttttatttttctggtttgatgcgtttctggtttatcattgtaagccattttattcttgcattgttttcttgttggtgcttgagtgcacaacaataactatatcagtatctcctcattgatgagtcaagtgaattgtattattaattattgtgagatgtcataaatgttgtgtttacattaaacatttagtttttgcaaattatttttaagtttatttaatttttcatattttatattatatttattttttaaaaaataatctacattcagttcttttttaaaataatttatttattaaattaatttatatataatgtgaatgtacattataaatattaaaattaatatattagtcaatgtttcaatttgtgtgtgattttgttttaatttgtgttttctgttataatatatatttttttttattttaatgaatttgtgctactgaggtgtttgtatattttttttagctatatgtatttaccttatttgtttttacattgtagggaatatactgttattatttaaaataaaaaattatttctctttacaaacaaataatgatcaatctatttaaaaaatacattaaatacgtattggtttgacaacctattaatattgattttattattgcttttatagattattttgcaaaacacatatgttgttctttgaatttttcagaaacaaagaataaatgttaaagtcatatgttgttatgacttatcattaattatttcttcacattcaggataactactatgtgagtatgtatatattcagattaacgtactgtttattattaataacaatgtatatatcataagtttatagacacaataacaattttcttaccaaatacactaacacacagtttacttttataaaacaaatcgttcaaataatcataacactttagttaccaaaatctaaaacaaaaaaccaaaccttaaataaaagtaacatttacgtggcttgacacgtaacatcaacctaagattctacaaaagtaagggtattcctccaatccaatctaatccacacgatatgctcatagcacatccaatctgcaaaagtgcgattttattttttggattcaatccaatgtgcaaaatagcacaaatctaatttgtaaaagtgtggattggattagttatttttgattggttactttttaatattatattatttaatatttattaaaacatattttcttttcatataactaacaacaagataaaatagattattgttgttttatgtatccaacaacaaattaaaataaataaagtaacaataacaatatttcatcagaaaaaataaaaatgtatgtaaaaaaatgtttaattttgttttcaattgtatctaaaaaaaataacatatgtaagaatagactatacacttgaatatttgatttagttttgaaatatatttgtattatatgtattcgatttttaaaattactattttccttttacattaaaatgttaattgt

SEQ ID NO: 22028 - DNA, 4530 bp, Cannabis sativa
gactcaatattccaccctccatacatccgcaatatcagttttttactttttcataatccaaataaacaagacaacaaatgatataatttccagtactctcgttttaccaattaaaaataaattaatgagtcgaagtctaatgaataatctaataagaaaattgtttgggatatcgattactaatagtgaaaaagtattgtggaatagagaatgaatattagagttttgtttgctcttctgtagttcctgttgggcttactcagcttgtagtcagtttttctactggtttgttagtcttttgttcagaatcccttaaacagattcctcggtagaggggcttctgttaattggttatatctaattaatttttgaaacgtttattattgcttaaatagctaggcaagagcttcaaatatttgcatttgcttattattgcctaggtttggaaaaatgtaagggtatatatatgcatgcgtgtaataatacaaaaccaaagcttatatgaattattattatgtaactaaaatgatatcatatgttgtaatgataagaatatgatgaagaaacaaaggatgggcttaaaaagttgtcttctttctctacagttcaatgattttatagttctagaccttgcttggttcttctgttttacatttatatagctaaagcttaagtggtacaagtttctttctatatcacattgtctcatatcattttataatttatataatttgtaggttgtgtttaagacttagcaaggaacattggaaacttaattaatttgctgttggttaactgcaagaagtacgtacattaattctctcttttccttgattgtttatgcacatgttagaggagtttgaatatcttaaatattcacccgccgtagtgagattaaaattgtgtgttacggtaataatggtaataatggaggttaacaatttgtgtgttttttgtgaagtatgttttagaaatgttgtgtgctacgaagatatttgaaagaaaatttattgtgtgttcgaattgtttgaaatttttgtcttcccatgaacagccatctaaagttccatgttctgctctatgttagatgacccctcatatgactcccatgaagagtcatctcaagtcttacatgtattcttgtgagagtcattgtaggtccacttacaatggctctagaaacactgactcccctggagccactatatacacactgacatcccatcaaagccataaaatctatttcttgttttttttttgttgtgtagatattgtttatcaaaattgccatttaggcacttatagcttacagctttgtatcctggatctttttattgttttgtttctactttctactcctttatttgctgagacgggactttcaagactaaggttctgaaaaaaatctataaggaattaggtttgagttaatgatgcattatgcaatgctttaacgatttcatttttggggctgtcaaataagatcatatggttactattttttttctcgtgtcgttgtcatatcttggatgaaaagtttgataaacatggaccttttgccaggtatgtgtcaaatctttgtgatcactgggttgtgatgtgatattgttgcagtttaatgatgcattatgcaacactaagtttgctgtaccactttttttctgtgctcttagccataggttgttgtgacattggtactggtggtgcgttgcaaagcttttggttcttaggcattctaattttgggttacgagactgtaatcttaatatgactcttcttatttgtccattgtttcccaatttcacaacttttattgtctaataaacacaacaggagcctcaaaaagaaaatgacagttttgaaacggtatgtattgcggttgttcatgtccctgaagtacattacagcgaatgtggtagacagaaacaatgggcgaatcattgcgacggcatcaacagttgaacattcaatcaagaactcgctcgagtgtggccggtcttgtaatgcaaaggctgccatggttgtgggagaggtgctggctatgcggctgagggtggaaggccttgaccagggacaaggaagagggattcatgttgatgtaaataaggaggtagagaagaaaggttttaagaaccgtaccaaagtttgggctattgttaatgcgcttaaaaacaatggtgtcaaactcgttcttgaagataatgttgaaggtgaaaatccatctgacccaactttctaattactgcctaattaattgagttggctactttctctttcttctgtctatatttgtctttttttagtgaaaagagttgtaaatgttttgcatcaaaaaaaaaaaaaaaaaagaaaagagttgtgaatgtattgctcaagtagtagatagtattatataggagagtaaaatgagatgaaccaaggtgaatgaatgggctagttgctcaatgcaaattatgtaccaaatctttatgtatgaaaccagaaactgcgtaaatttagtttggactagtaacaaagctgttagtactagccacagttttgaaaattggagcttacctagagaaaatggttttaatatcctgtgctgttcatgtaaaaaaaataaaaaattatcagaccttttcacaaataaggtgatacgatttgtgtctcatttttatctttttaaatgtttaacgtgtttagaattgttttaacactttatgacttagataacatgtttatattgaattttattgtattttataaatgctaaatttgtgtaattctttaccaaagtatctgtcttttcattttcgaataagacatatttactcaaaaagcattgttattagtaaagtattcaatacaatactagtatggtacattatgaatggttagtatgccactttgtaatgcttgacacctaactgtgccccagcatttcttttactaaaaaatgactcaaatcacaaatctgcttcttggctaattacttctcgtcatccttttagtctatgataaaataatacaattctattttaatagatagaaatattgcttaaagtttaagcatattactcagttctgaccaagaaaaaagagtatatttcttacaagctacaaagcttagagattatatattaaagacaatattattttgttgcgtttatggatagctggctgtataatgttgtaggttttgttgtttacttacacatttttaattgaaatgttttggtttttcttcgaagtttgccacctatcaataatacaatgtgaagttggagatttatacatgttttgtatttttagttggagaaaatctatttggctctctaaatattattacaggccctctcttcccatcttattttgtcttctcttggaggaaaatagaattcaagtaaatacctcaatttctatgatgagatgaccaccctatttagaagtgttgcgaaaagaaatgagagtaaaattggacaattaagagaaatgaaaacactgttttattgaatgaaaacgagtacaagaatacaaatatatatacaagagataaccaaccaactaagtcggtacaaggaaataacagaaataacggtcaaccactaactgacataatgaacacaaaccgacttaaagacaaatttggagtaaagtctaatatccccccctcaagatagactgtgtatgtcatcaacaaccttcttgtggacatgggaaagaagagtagtagaaggtagtggctttgtgaatgcatcagtaagctgcaatgtagtgttaataaggataagacaaatcgttgaggcttttattttctcccttatgaaatgacaatcaagctcgatgtgtttggtgcattcatggaatgtagggttgttagctatgtgaattgcagattggttatcacaatagatgaatgcgggtgtgtcttgaggtatatggaaatcattcaccaggtattgaagccaagtaatttcactgcttgtagcagcaagagcgcggtattctgctttagcagaacttttggaaatggttgtttgctttttggtcttccaggaaacaagacagtctcttataaaaatgcaaaaaccagtggtggatcttctagttgtaggacaagatgcccaatctgagtcggagaatcctcaaagatggagagaagatttggaactgtatagaagtccttggccagggcttcctttgagatatctcaatagatgatgtacaacctgtaaatgaggggttcgtggtgctgacatgaattggcttagtgtgttaacggcatatgtgatatcaggtcttgagagagtgaggtagagtaatcgtccgatgagttgtctgtatgaagaagggccatcgaggatggttcctttttggtcatcaagcttgttccttgggtctataggtgtaatgaccgctttagtaatttggattagttaaggcaattagtacttttctgttatttttataattatttatgaattatttgtttgcagactccaatatttaggaatgaatattagagttataatttctcaattccggaga

SEQ ID NO: 22029 - DNA, 2126 bp, Cannabis sativa
ttaaaacaaataaaataaagtgatatacaatctaattttctcaaaataaaatgcatatacaaggtcccttcaaaaattccaatctaatcaaagttcaaagggtttgtttggtggcacgtgactcatcacgtgcatgtttctcttcttcttctcaacgacgacgttggtgttggtgttgtttgagtcggaagggcatttgtttcacacagtaatcccgatatcagataccttttcaactagaaaagaaaagttctagggcaacgctgaaaatggaggttgcctccattacttcagattctgtagtcgaaaccctaaaaaacagaggatggtgtttgagggacttggagcagctggacgcagtgatcatgattcagtctgctttggctgatgactccagttcggtcattgattcggtggagtcggagctaaccaacatggacctcaaatccattgggggcaagtctttgcccgatccttcagttcttcggaactcttctcatattgttggccccaaagttcttcaggtacttcatcttctttactctctgcgtttggttgctgagaaaatgcgggaaaatcatatggttttgaatcgcggtcttttgtttttgttcaatcttctctatcagatatcttctgtgagagacatatctagaagcagcatagatgatttgactagaaattcaggcggtcgacgtcttttgagtcttaatctcactgatgggattacggagattaaagctattgagtattcacatgtcccatcgattcctgatgatgttgttcctggtactaaggtatttgtttttggtctgagctcgcgtaacctgctagtctagtgaatttgtgtatgttttatctttcctttcttggaacaaccaggtgggtctatgtgtgtgtttcttgttttctccctacattgatttataatacaagtgatattgttttgcttaaattatgcatagtaatggtataaatatgcactgttgggacctgataagttgggttggcaggagattagagattgacattataattttctccatataagatggctttcaaagataattatcgaagtttgagactgtatcgtagactttggatgaagagagtgattttagagaaaaaaaaaatgatgagtttgttttgtttttatattatttgttggtgatatgaatataggagctcctgaaacatggtttaattctttatcattggagacagccaaatgtactgtgcgtgttaagataaagttaagtctcgttgaagtgtcaaagacaggcttccttttcagtttatgttgtacatgcatgcggaatgaaatgttagaatgatagagtagaacaggcttccttgtgagggttggatagccttaacatgctttatgcaaataagttttttttttgcatatagcatgttactccgagacttcaattccagcagttaatttatttctgtgttctggttggcaggtgtgtttgaaaaataaagctgccatacattgcggtatagtctgtttgaatcctagagttattactgtgattggaggtgttgttccatcactttatgaagagtggcagatgaataaaaagtactcaggtttctcacgttcttctttaaggctgtccaaagaaaatgatggtgccggtcctcctccatttgagaagttgcaaattggggtgtcacgacgtccattggtccagaaaggcaagtattatttatttagtttcaacagttttgatatattaagccatttccttttctttttcccctttatactacaatcgtgtatgttttttccctcatcacagtcatccctagttttaatttagtaccatcataaggttaatgcacgagaaaatagaaagtgaacattatgtagttggaatgcttttttttccccatcccctttaatagcacgcaactcattgaaaacatggacatgatgatatgcagattattcaagtttgaactccaagaatggtgggcctatcaaagataaaagagaacctgggattaggccgattggaagaaatgatgattttcacatcaaagcaaatgacacagataaccatactaaatcagcttctcatactgaaaatactgaagagaaaccaagcagctca

SEQ ID NO: 22030 - DNA, 5140 bp, Cannabis sativa
  modified_base (47)..(71): a, c, t, g, unknown or other
cattatattccgttgcacccaatgaaaggtttcctaaactttatatnnnnnnnnnnnnnnnnnnnnnnnnntcatattaggatgttaatgaaattcatattacatgaacctgcaatctagaagccaacttgagcacctagggttttaccccatgcccaagttggcgttcccaactagggttttaatttttgggaccgtcttagtgcaaatgggtcaaacattgcattggcacatcaactagacataccacagacatatttgaggcattataatcaaattcggagcaattttatttttgagcacccaaagcacccggtgcttgggaacttaatgcctaggttgacaatttgtcaatctaggcaccttccaagtatcatatcgacaattcgactatcacatcttcttcatcttcatcaaaaatagggaaatatgtacttttggagaagaaacaatacttctgggtgccagaagtaaggtcgagcgcccaagttcacattttgtcaacctaggccgatctcgatgatgttttctaaggactcttttgagaatcttctccattttcaacaaagattaagattcaactatttttagggaccaaacacaacttctaaagggccaaaaggggagcccaatgcccaggttaacacccggcactgggcctagcgcccaggttaacacatggaactaggcccagcacccaggttgacatattgtcaacctcggctatttcaaatcaagttctcaaaaatttgttttaggaattttttctcatttgaaataatgaagattcaagtaaacttggggagaaaaccaaaatctcgagaccctaaaaataaggcctagcacgttgacctggtgctgggcccagtgcccaagttgacctggtgctgggcccagtgcccaggttgacctggtgcgctggcttcaatcactcaaatgaaaaatatagttcaaccattgaatatagaatggttaaaaatagggtgggagaccacgtcctcaagttctagaaccttggaagtattaaaacaacatcccaaaagctttgaaatgagtacctagtgcctaggttgacaaatggcctggcgcgctggcatctgcttatctgattctgattatatttttaccgtacatctagtttttcacaataactaagatccataaagttagagaagtcaaattcacaacttttcatttatcattttcaacatgggaaactcactcgaaaatgaagagtttcgagtctctcgtttccatagaacaacaacatctccgagaactggtgaccaactttgctaggacacaggaatagactaagtgatgtcaatatatcacttaggcatcagaaagtatatcccctagaagattttcacttacctagcgtccagtttgacgtcatatgtcaacctaggcgttggatgttaatcagggcattgggtcatgaacaaccttaagtaaaatagccattttcactcaatattgatctgattaacatgattaaactttcattttgaagctatttcaatgatctatcaagttgcatctcacatttcattcgcaactttgaagttattggtcccaaatttcaccctaagagagttacgaaaataagctctagcttagctgaagcatgtctcgccgtcatgacctggactccaaaaatcgacgatcaactttagaagttaattttcacagctatatcattatctacggttaaaaatagccaatttgtattttcccctatttttttgggtcttcttcacctataaaaggagagctcccttaattcatttttcagattcaaaacactacccacaaggtcagagcttctctttctagaaattaaagctttgacactatgcatttttcaataatactatctcgtgagaaataaaaactcgaagtagacatagctctattactgtcacgatacaatgagtgaataactataaatttatgtgtctctctttacttttacttaacaaatatttcattctcgccaatctagcaagagaatgtggcttggaagtctatgtttagatttttgagtaaatattttggtgctttcattgagagcaacaactcaagaaagtcacaagcaaaatggttgcaacatgctcaacaagtgtttgatagagtaatcacaacttttggccaaacaactgggggcactccagttgattgagttggaattgggactactcttgcgccccaagtgccaggagcaagcctcagaaccagctccacaactctccgtccagggctaccacaagctttcgagattgacaccaataactagatcccacctagggagcgtcatgtggagattgatgaacctaaggaggtcgatcctcgggttacccagctcacccaaattgttactaatctacaaaaacaactgtaagactctcttcacagccaacataaatggttttaacactgattcaagaaaaacttgtagaacatcgaaagccaacgagttaagcatgaacatcagagagctaacttgtctcaatagatcagagaagctgatcaatctggtcatggaactactctccacagggttctttccaagttggtgagagggactccccatcgaccaactagtcacgtgagaactagtgctcaaggggaaacccttaatgcacggaacacaactaccacacctagtaattgtgcaagcactaagtaaacactaggcgtggagacctcctagaggaaaagcacattcgagcatgagactcaagctcgtgggagccaaccaataggccctccacctgatgtggaatgacctcagaacaccgagagaactaataggactcttccaccaagtccttctcagcgctctcataacgctaggccccaaaaccctgcaagggggaacggacctgtcactcaagataactgaggtggacggaaaactaactttgaaagtagagtctatgagatccgacaggtgaggaccaatgaaccaattcacactcaaaaatattttaaagatgaaaggggtgagttgtgtcattactttgaatgtggcctcgatggccagcagtatgattacttccctcgagtacatggagatgaattaaacttaagcaaccagttcatttctcttcacactaatgatctgaatgaatactaatttgagggaagtagcccctacaacactctgcatgatcccacagcagatcatcccgagatgatttggagttcatcccaaaaacatctcttgagttgcccccacaacctcgtggtcaggagacaacatcaagacccaagttgatcaaagtgcatgtttaacttggaagactaagggacctacgtgacctcttgacaagaagatgaacaatggaagtaggtgcttatagaggagaccctacctgggtaacaaaaactccaactgggacgcaaacaaccacccatggggtcaaccaggtagaattcgacactttagcaaccttagtgaaaaggatcacgacccctaaattgtcaaagttcaaacttgacagagagtggtgctcaccactctctgaaagaattaaagctcttcccacccctctaaagttcaagaacccttcctagcatcaatacaacaggaaggaagatccactatctcacattcactgcttcaaaatgcaaaccgatctacaaggtgtgagagatgatgtcagttactgaatcttccctgccacactgacaatcctagctcaatgatggtaccttaagctctcccctagatcgatcgagtcatgaaaagatctagttgatgctattggcaaccaattctctcctttcgagcaacggcagatcgaacccaatgatttggtgaatgtcaagcaataggaagacgagtccctcaatgactatatccaacaattcttagaggcagtcgctaagaccaaaagtcttagggaggatgcaagggtaatggtacttgcagtcagactcaaggagatgagtcctctgtggtttgacctttgtctcaagactgtttacaccatgaacgacttcctcgatagagcggatggctttatcaattgagaagaagtcgtcaccggagctaagggctaaaaaggtggcaagaataagtaaccaaactcccaaacccttgctaatgaggtgcaagacaatgggaagaaaggaggaacaaacggagggaagagagccaataatgatggtaagacaggaaactcccctagtggaaagaagcctaagactgggggtaggtccttacaagagtatgagcctcactttaccacctactctattctcttggccctaagaaaggagatctatacggccacatagtcaacagtatcgtgtcgcaaacctcttcccttcaaagagtcagggaagagggatatgaacaaattttgtcactagcacaataattacgatcatgagactaatgagtgtaatcagttgcgggacaagagaaattatcttattagatagaaacatgcttctcttcagcagtatgtatgacttgaagctttaactgggggtaatgcacctctccagcctgcgctagttccaggtaggtcggagaatgtatttaaaggccctcacctagctggaaatacaaggaaggccttataaaggtatgcaagatccttccaacatgaactaaaagccgaagtacatgaggttttagaatgtcctccaaagtctcaacgttatgggtgtggtcctatcacattcgaagaatcgaactcctatcgtgtcagccaccctcacgactatcccttggttgttgaggttcaaatagcatgtatgatggtggtaaaggtggtgattgacgacaaagcattctcaaacatcctattccaacatgccctaatcataatgggtttgaccttagaagacctggaaccatgcaaacaacttatgtattgttttaccggagtcgacattgctctgtgtggcaagatcaaactgccactcactatcgacactaccacatggaagaccaccatcattgtaacaccctaactagcataggtgtattacataatttttaaacgtattgttcaactcgttgctaatcaacgaggtttatagaaatcgtgattaattaaaattttttcttttcaattaaacttataaaatatttatacaaaatactgtgggatcccattta

SEQ ID NO: 22031 - DNA, 2113 bp, Cannabis sativa
taataaataaaactaaaatttttcatttttaaatagaatacttagtggtatggttttaaattctaataatatatatcttatcaataatgataataatatatatttttttaaaaaataacatatacatatttattatagccacataattattagtttgaagatggatattaatttcaaatgtaacaaatgaaagactatcatttctttttaaagaatgacctcaactcatattgctaatatatgattatagtaaatatattatagtaagaacattactattaggcactttatggtacaccaaccgcttaaaacgtcaccacacatggactcttttggaaaggttaaaggatgcatgttgcacctttgtcaccatggttggtgattagagattttctggagcgatactatccccatggagcaaagtgatgatatttctggaacgataccatttccatggagcgaagtgatggtgtactggctcttggattgggaggagactgcagagtcagatcacataatcctagtcgacggcttgggagagtagttttcttgggtagttcatggcttgaaagagttagggttttgaagggtttaatttatattttaggggtttaatgtctatttataaaactaacgttacagttaaagtgtagctaaatttaatagaataaaaagagaatatatagttaaaccaagaattgctattagatagccacttttaatatataaagatataaactttttctttattaaattattatatattgcactttcaatgttttatttaaaaaaaatatatagtgtgacatccatagaaatttcaagaataatatatattattttatttctaatagtattacatccttatattttgccacctaaactttttccctctttaaatattctccaaaatactattattaaggccatctccaatagtaaaatttaaatttagtgttaaatcaacactaaaagactactatttgaacactattttttttttcaattccaaccataatactaaaaatatattcattattattatattatattattaatataataagaatattttaattcatataattatttattttttcttaaaactattatttaattattaaaaactaaaaattatatatataacaaaaaaaaaaattgccgtggactataatgtccactattattaatgggacactgtagatcctcataaaaataggttaaataatagagtttggttggagtgaaaagtgaaaaaaatcacactatatataacattatagtgttaggttggtgatgccaatactgatatagtatcaatattatatttgcaaaatacatagttcggccaatcttttaacaaaatactgagactaatcacatattaacagttatatcacatattcacagttacctaggggcgtatttttccccttagaatattataggttgaatattaatattacttccgtggataatatataatagatactagagagtatatatagttaataataataatacttttctatataattaatatgatatcataattattattgcttttcaaaagagtatttttattcaagccatagatttttcgatgagacttgagactaagctttttcatgtgcaaaagtcaaattagcgtcactagctagctactcacaccaatttcatcacaatcatgtatatttttgtccacactttatttttaggtcacccattatatatatatttatatatatatatttagggcattcccaacattttttttgttctatcatttaaaatactcaaaaatttctcaaggaaagtacataccaaaacatcaaatcaaacataccctttagcaagcttctctctctagggttttttctctcttcttcttgagttagggtttcttttccatttccttcctctttctcgacaagggacccagctgtcggcctgccatgcgtctggtgttctctggccgagaaggagttagggatggcagttcttatggccatagatctctactcttcggaagtgaggaagctattggttaggggcaagctttcattgagacgcctttgataggagatcggtgggtttggggctctgtggtcta

SEQ ID NO: 22032 - DNA, 2582 bp, Cannabis sativa
tctttttaactatttttgtcatacttttttcttggatttaatttatggtttggcttcccataatggaatatattctttcatttgttgaagggaccatataacattatattataatgtagtataaagctatacataaaaaaaagctgaaaataatggacatttaatatatataattgtatgtttattgtcttaattattattaattaattggttaaaatgataccccaaatgactaaacttttatatgttaattataattatattatttaatttacactatgatgatatcatcaatcattgatctgatagtatcttaatttggtcttgtattaatttaaaactatagctagatcttgttaacattaacatatattgttatattttgaaagattagtattataattgttcaagaaaaaaataatgttgtaattaagacacttgtgatctcagtgatgagatgaagtcatacatatatataaattaataagagcactcacaataaatgtatcaaaaatagagattttttaaaatatttaaaaaactaataggtggcgtttggttgggaagagtgaaaatatagaaatagcaatgagaatggaaattgaaatagaatggaataaaattaaaatacataaaaaaattaataaaaaaaattattaatttttttttcaaatcttacattagaatggtcttccatttcaaaatgaaatcatcattacaccaaaatgatagaaaggcggttccatcaaaatagtattctaatagttttaaatgcaaccaaacaaaggaatagaataaaaaaaaattattttctattctatttcatataattaattatctccaacacacgttaagtatatcagattctaaattatttctctattttaaaacttttttaaaattctatatttatactctacatttataaaatactattcattactataaacatattttattaatttaattcgggttgtaatttattttttatataagaaaatgtgtaaatattaatataatatgtttaaaatgaataaaatatattaaaatttgtaaaaaaaaaaaaaaatagaatttttgcaatatattttaaataagtcattatatggtgtaatgtaaaatatatattataccaaaatagtatttacttaaatatatatgaataataattaggggagttattatgtatattatttttttttattttttttaaatatataatttaagttgctctagtggttaccctgatatttttttatgtaaattgctatgtagattttaattacaatttaaattgtttcattaattactatgtgaatttctgtaggaataaaaaaaaaattgctttgaaattataaaattagaaaacccctaataattatatacattattcggaacatgattcgaaaaggcgacccataagttaagaagaaaaaaaaaaagaatagtgacccataaatataaatctataaatagatgccatgatctcattctcttccaccttgtagacacaaaaagaagtcaatgcatatatatttccactcaactttcaagctatcatgactcaaccacaactactaaacttttttctttttagtgactttgtgccatgaaccaatcacacaaacaaaaatgtcacttgtcaagaatcatataaatatatttatatagcattattagaggtgacctttttttagtacgagagccaataagattagttagagattttattaaaatgtaagaaaattaagatgtattacaattttattacaggatagtataatataaggattaacaaaaaaattaaataaatattacaatatataatgtacacaatatatatatacgacatatatattatatatcaaaaaaagtagaagaatatatatatatatatataaatataggaatacactcacttacaatattgagtgtagaatagtgggaatcaccatagtttgaacaaggtattacacctttgtccaaaagcttatttctcactatctaagggaactctctaggaaatagctttagtaattaattatcaaaccttagggttttcaacaatgtattttattgatagaaaacttctctttcaaatgagcaccaaatacctccttttataatatttaagtgatcacacttagaattcaaaatacacaacattttatttctctcatataaatgagttttaatataaaatgtgtaataactatatttcaaaccatttgaatcctatcatcaaattatataacaacctttttattacactaataatgtgtgatcaatacatgagttacaacttatacaatataataatcctaccttatttcttattattgtgtttattttcacacaaacacccataccctaccccaccttatttcttattattatgtttattttcacacaataatctctttataataattctttctaaaatattttgtaaatcacattcagctgtcctcaattagtagaccaaattccttgatacattaaataaagaaaaagaatgaaattataagtgttcataaaataattaattcagtccaattcgcacgatctaatttaatctaatc

SEQ ID NO: 22033 - DNA, 3607 bp, Cannabis sativa
tcagccgcctctgctccaaggatcaagaagtcaaaatctggcaccttggatagagtcgtgtatatgtaatcagagactgcttggtcgtactgcttttttccattctccttctcagccttcagatcgcgagacaactcctcgacctttgtttgagaaagtttggcttcaagttccacctgctctttagacttccggaggtcctcgagttctttgtccttggtattcgcatcttacttcagtttcttgttgttctcctgaagctggacgatctgcttcttcaaaagctcgacctccttggagccagcgacaaacgccctcgaaaacatagtgatgaactgccaaaccaattctgcagagcgaggcattagttcgtaagaaggagtcccttcaacctttgacataaattcctcaaccacgaacttctcttgaagagctaagatgtcgcgagctcgaacaactggatcggtcataattttttttccctttgtcgtgagaaggtttggtttgcttcttggacgagtcagcagtgggagtcgcgatcacatcactcttcctcttttaaggaacaactggagaagtcgtcgttgttccagccttcggcttgtgattgagcacaggatcctgcttcagtaaagtcatctctgcgaggacaagaaaagataagttaaaataaataacttgtatatatatagcttatgtgcaagatgtgttacctgacgttgatcgggaggtctgtttagaaagacgcttgtctattttttcctttttcttctcaaatggctccttgtatactggctcccgatgaaggctagcattctcaagaattagcttgtgttcccgtaacttcaaggtcatgcacagtagtcaccagtcgtgatcttgagcagggaggctaccgagaacttcagtgtcttctctgcgagcagggtcagtacaggtcgagccagcctgtctgcggtcaataaggaagaatgtgttagacaaaggaacaaagtaatatgaaatattaactaagtgctaaaatgtgcgacgcattgggtcgatgattaaaatcggtcctaatccccggtactttaaacacatagaaccatttagatttccaatctcccatatttgaaaccatgccttctaccccattaatctcataagtggccagcttgctgaagcaatagaaactgttatgaaggcccacgctctttatatcataaaaataactaaagtcctccattgaaggctccctatgcgcgtactccatgtacatcgcgtaaaacccaagagctatgcgatagttgtttggggttagttggaagggggatacatcgtaccgcttcagaatagcagtaatgaatggatggaaagtaattgatactccacatcaaagtatgggtattgacacaaccacatcctctgtggggataatcgcagggttagtaaaagaaagatgtgctctctgggtagggcgaggacacagggaggaaagtcacagcaaattcaatctcgtaaaggtggtgaggtcagatttggtgactcgcgagaccaagtcctcgcatgagaagggttcgttcagttgcgtattgtctactgaattagttctgcttccctcagcatcctcttcctcatctgactcgcgatcaagagcctcccagtcctcgcccatttcttcaacttcagcatcaggagcatgcctagaatgaacaagatgttcacaagcagacaccgttgactcgctgtcatagatctcaattgtccctggttcagcaagctcctgaaccatcctttctatatccgcagaggacagcagacctaactctgcagttctggcaattggagtctctgcctcagagatgaggtcagaatgaagctatcctcctagttctcatcgccatcgaaggtatcacctccagagctgagcatctggctgtccgacaagtcgctcatctgaaagatagaagatcttttcagcgtggtgaatgtgcgagaataagacaagtgacctcacctgcacaaaaagtttaagatttccttggaaagatggttttggattctcttgaaaatccaaccagcccactaaggcatatatcgcatgtgtgcgactagtagaatacctcaaaaaatggctgggagttacccagtgacccaaggggcatgcgctcttgagcatgaccatggagttactgggaaatacccaccgctttgaggaatctaaccaatcacaacctgcgaacatacctcgcatatctgactagtggtgtacctcaagaaacagctgaggagtctcctgtatctcaagggacatgcctttctcgcatgcatgaccatcgggcgggctagctaacagaaaaaactcctcactgtttcgagaaaacctactagttgaaacacgcagttttacaagaaaagagaaagctggttatacgtcgcgaatagctgggggtatcatggtacctcaaggagcatgcgatcacacgcatgaacattgggatacgatgacacacccaccatttgaaaaacctaaccagcattcccacataaaaatacacagaaaatataaagaaaaaccccaagttctaaacaatgggttggagtgaccaaaccaccagaattcctaaggaagtacacatgcgagtattcaagatgttcatcctaatacttgagtattcaaaatagtagttaaagaaacgcgaatattcaaagtgttcttcctagaattcacggttatacaagttttacgtctattttcacatgagaattacccagttctagcagaaaaataaagctctatgtgtattccttatgaacaacatgcattttctatttctcagaaaattcgaaaaatacaaaatgtctttctcaaaaatcaaaaaccaaaattcgcgaatagtttcggaaaactaaccttgaaattacggttctctctgtgattggtttcaactgcctccaacacccagaagattgaaggaggaaagacagaaatttgggagaaggattttggacctttaaagtttcagatgaaaagagaaaacaaaaatgagagggaaagtgaaggaatcgtttcgtattaggggcttaaatatcaataacccacattaattgggatcgtgacatgtggcaatgagaatgcctatggtcatcccatccaacggttaactatgggcacgcctacacagaaaccaaagagtttcgtgacgtggcaccataaataggataaaatgtaataactacagccgtcattttttgaaaccctcgatggacaaccaaaggtcaccaccttgtgacacctcatcgcctgcctctcgcttatagtttcccttatgaccgcatctgtcagtcgcgaaagtaggggcatgtgttatgagattttctcacctagaaactcgagaccaaaatcctatttaaaagacacgtgtgctcactttcctcgaggaaaactgagatatcaatgagagacccctcgagtacgaacctcccctgaaccagactaagcgagatgatgcaaatataaccaagtctaatcgtattcgcataactcgcattatgtaggaccaaggaacaattttaatccgcatatatatgcgagtataaggatatatgcgagtatccccacgat

SEQ ID NO: 22034 - DNA, 5370 bp, Cannabis sativa
caactcatattttgaaaaacaccaaagaaatatgaagggcgagcatagaattagaatattttactcatatttaatgtgttgtccaatccaatttctatatgtatagaaagtatagaagaagggtgtaatggtccaaaaatggtgtaataatttggagagaggagagaggagagagagagagggaggaagggatagcggtggaataatgaaaaaagatttgaaattgatgacagtcttttcttgggtttgaccgtttgtattatccaaacaatacaatacacttcactacttgacaaagctgtaacactctctccttcctttattatatttattattattaccatttcacaaatctctcctcaaaaccctaccaagcaacctttcaattctaatattatctctcctccactctcctctctctctctctttctctactctgtcttgagaagaagaagaagaagaggaatctgaagtaaaaaacagagctttgaaggtattttttgttttttattcttttaagctcaattccttcatcactattttattgggttttatttattttcatattttatgtcgtttaattccaagatccaaaatacccagatgctaatttttgttgaaatgctataaatttcgcttgagattttcatgaaaagattgaatttttaattttttttttctgtcttttttaatctgaatctattggattgatgatgtggttaacgatataagcaatcttggtttatgcaacaatgtttttttttcttttttgggaaaatgcattgggctttacagtttataacatttgtgggataatgtattttttgtccaaaatctgatttttaattttttttttggtactttctaagcataatgcttcaaaatgtgttctatgtttgattttttttttctttaaaattttgaatagctctattaaaagtttgtttcagcttttgaagatgaaaaagaaagaacttgcttttatttgtaaatgaattagatctcaagttttttgactaaaccattttcttggggttgttcaggttaacaatgggaaggagtttaagtccaattctaaagagagagttggcaaatcttgataaagatgctgatagtcgtagatcagcaatgaaagccctcaaaacttatgtgaaagatttggattcaaaggcaattccattgtttcttgcacaagtttctcaaactaaagaaatcggtttgtctggtgaatgcacgatttcattgtatgaagttcttgctcgggttcatggtgtcaaaatagttcctttgattgacagcattatggctaccattatcaagaccttgacttcaagtgcagggtcttttcctctccaacaagcatgctctaaggtggttccagctattgctcgatatggaattgatccaaccactcctgaggacaagaagaggcgcattattcattcgctttgcaagcctctttcggatgcccttttgggagctcgagagagtctcacttctggagctgccctttgcttgaaagctcttgtggattctgataattggcggtttgcttctaatgagatggttaacaaggtttgtcaggttgtttcgggggctttggaggacaagtctactcagacaaatgctcacatgggtttggttatgactttagcgaaacgcaatgctgctgttgttgaaccttatgctagactattaatacatgctggattacagatattgaaagcaggagttgatgaggccaattcccaaaagcgtttgtcagcgattcaaatgattaactttttgatgaggtggttagatccatggagtatctgttcagagcttggattgataatcgaagagatggagaagtgtcagtctgatcagatggcttttgttagaggagcagcatttgaagctttgcaaactgcgaggagaatttcagctgataaagcttcgaaattcgagaaaagtcctgcttcagtcacaggttcaaatagtagaagagaacaaaggagcttgtcaacctctgatgatcaatctcctgcatcagagtctccagaatcacagacccttgattcctttgttgaatcgtgggctgagtcaccgaattcaacaatccaatcatctcagatgtctgattatgatcgtaggagtgtgaaccgaaaattgtggagtttagaaaatggaggagttgatgtgtctcttaaagatggtcttttttcacagattgcaagggaaagctcaatctcaaatacattgtctgagcattgtaccgatcatggttgtggtaacaatggagattcagaggagtttgctggtttcttgcagagaaattcgcgaattggaatatcaagaagcacaacaaacagtcccctagtaagtttcacttgcattgctttttcaatcttcagtttcagttctagctttttcaaggtatcgctaacaaagttggcatttttgtgttctttcttttggcttcagaggtcacacaattcgattaatgttgacagcatgatcttacaaactccaaggaagcttgttcaatctcttcaagatcctgatcacatgaactcagattgttgtgataaacaagccataagaaggctcagaaacagaagtatatctctgagtgatttcgattggagtccagcttcaagatttgaccaaaatcatacttcttcacattcacaggatgtaaactatggccatatagcaaatggtgaggacttacaaggagacactgaatcagtgtcatcaactgattacattgctgctaatgttgcagagcaagaatctgataagttatctcaggattacaagaccgaaaatcaagctccagctctagctggaactcaacctcaagttgaagctgtagctggaactcaaactcaacctcaagctgaagatcaaattcaaactcagtctcagttctgtgttcagaaaactcgcccgaagttatcattaaagctggttttggctctaccaattgtgttactggcactatttgttctgcttgtttggattagagagcagcagaatgaatttgattcacattatcttgttccaacttagtaaaactttttttaattaggacttaggagcagcagattattaagttccagataacaaaaatctctctcaagatttttagtttaggattaagaaaaaggtctttgtatctttaagacacttctatttaaattattaatcagaaagtttattggtagctatctttgctatgatggatttgattctcattttactgttatattcattctttgcagttccattagtgtttaaagagtttgagattatcccaaaaacaaaagtgacacaaacataaatccttgactaaaatgaacccaaccctgcataacaaacaccccattatttgctaagatactggattcttaccgaaagaggggaatcgctcgtatgaaaaagtgagaatcttcatagattgcctcccaccaatcgaaggttctcgcataaagaactcttcctcattcggtcagatgagagacttttttttatacaattcattaaactcaaaatggtggcataaatgaaggtaagactcatcaacaatctatcaaaatcagtattgaaaataaccttagtcagcatggctttaaatcttatagttgtatctagagcaatcaagagaatcagtcttgaagattgctagcaagataaacaatcttttttgttctcttctcactgttaaatatgaaaatttgagacaatttatcttattattagagtgctatgtagagttttatactagtgattatggacaatgtgcaagaagagttgcaaaagttgaagaggtcatcatatgaacaatcaatattttcatataaacaaaacttattatatgtaaaaatttgaaatgtaattacaaattatcatgctcaatgacctgagctcctctccaatcttcaccaggtttaacaattacaggtactagaatagaagcaggtccagtgcatgcaaaatactctttcccatatttttcatggaacgaaccggggcttgacacgtatatgtcctcaaatcccatccttatgattctataaaacaactcttttccctacaaaaaaaatatcaacacaataattatgacaatagctgaaaaatactatcatatcagactgactgtaatattttggtgcatatatcattaactttgccaaacatttttaaacaagggcaattaatgtctcataggtataaccacacttttgtacatgttgataaaactctaatattttacctgatcaagtatttcatacttcgaaggaggagtgttataaaaaactttcttcctctcttcaggatgagcagcatagactctactaagtctatttttcaaaatggtaaaaggaacatcttgttgagtccaaactccgggtttagggtcaggctcagaaaaccaatcagaagagtcgtcgggcttcatggcctcggcaggagacaagagctcgaaaggggaagacaaaggaggatgagtggagtaagaacatgttcttaagccttgaatggcagccttgtttctttttttgaacttaaaatgactaagtatggcattagtcattgtaattggctttggaccattgtttttcactatcactgctgtggctaggcttagtggatatagtgtcaccacatatgttatgtccaaacttccactactgctgctcaattccacctatatacataataataaccacacacaaaaaaaatgatttttagaatttatttgttaagaaaaatggtttgataaatatgttaaatttagaagggattattttgtaaatacacaaaaacaacaataaaattacaaaaatatggttgtatggaattttaaatatttttacgatttttataattttatttacagaaagtacaatatttttatgttgtactcttgtaaatttgttgttatttgtattttatttttttatttttttattgttgtttggatgttattttcatattacttttatgtagttcttgttgttttcatgttatttttataaaatactgtaaaaatatataaaaaaaaattgaacgtaaaattgtaaattttttttacaaaaaatagtatttcactattttgtgtgattatcccgatttagaatacattgtgaatatttaaatatgttagaatttaataataatcacacaaaaaaaattgatatatggtttatttgttaagaaaggtttgataaatatgttgaatttagaagattatagatttgctagttcatgcattttacaatttgttatttttacccaaatatttattcgaggctataatttaagaaactttgattatgatcattataactcaaaactaagtaaattaataaagtcatataa

SEQ ID NO: 22035 - DNA, 1240 bp, Cannabis sativa
aactctagcagtctgcagctctggcgcctcgaggaattttacaatccgagcaaatgcaacctttgcttgaatcaccacaccaataacatcaggtatagctctaatggggtcttgaacaaggcgcaaagttgctacgaaagtgaagacattgttggcgtgcaagggaactttgagaaaatagcatgctccaaatgttgcagcagagaccaaaacaggtgatgaccaaaaaagaaatgtattatatgctcttctcatttgcacagcagatagccatttcaactccaccttcctcaaactttcaatcacactcttgaagtgagtttcccaagcataaagtttcaacaccttcatgttcacaagtgcctcagagagaactttcagcctttcatcttgagccgtcatgagtttcgtctgaaactggtgttgtaacttagccactggagcattgcaagccacagttagaatgatagccaccaaggctgctattgtggccaatccaactgctcggaacagaattactaaggcaagacagagttggagactagttgtccaagtttgatggaaccaaaatgggaattctccaatcctataggcatcaacagtaacataattcataatctcaccagcagaatgaaccaacttagcagagttagataattgcaactgcttcttgtaaatgactgctgtaagcaaagacctcactttcaaaccaataagtctgcttctaaaataccattgtctttgggaaacagattcaatattcttagcaaagaaaagggttatagccaaaacataaccttcatacttaaaactctcatgtccttcagcaaccaaaatgaatgcattaagaagcaaaggaccagcagagagagtcaaaatctttagtaaagcaaataacccagatatcaaaatctctttccagtagcaacaaatgataactttcaataatgatggttgagaagaaaaaccactcttccttttctgtttctctaattgctccaagaacattacataacaattttctgctctttcagcttccctcagctttggcatatcttcttccttgagagtttcttcccgacctttcttcatcaacgagtttagccaccaaaatgagaaattgctgaacaatcctgctctggcaaatgaggtgacagactcattatcttcatcaccatcatatttgctatcagcctcaccattcaaaggtctataaagaccatttctaacaatgacatca

SEQ ID NO: 22036 - DNA, 1334 bp, Cannabis sativa
gattgctgattacttcgaggtctgcccatatcagataaatccaaatggttatcaaattttgcccacatttttcatgttttaccgtttgtgggactggcctatcccaacttctcatgagatcaactttttgtctgatctaaaaagaattcccacttgtaagaagaatagcttctaccatttctatcaatataatgtgtacattggcaacatcactaaaagtaactacaatctttatcataaagagtacttctatactcatgtcatcccttcgagacatgttacctttcaaaaagctgaccctttcaaatgacgtgctccattgatagacatgaagcatagagcggatgctatgttgaatgatattaacatacaagaaagagatggaaagatgttgtttacagatgacatttttcgtcgtgtaggtctgatagcaacttgtcaacgagtgtagattaatgctcactttttgttgatgactcttggaaaatgcctattgaagatgaagagagtagccatagtggcactattattggattcgatgtggcatcaaaagatgatggtgttggttttggtgatgaggccaaaactgaacctttgggtcaaattgaagctagtgtgcttgggggagttagggatcagcaagttgctgatgcagcatagtcatcattaacttgagtatttgttttctagtatttttcttacgtactaaccacttgtccttttgttcaatagataagatgagttttctttatgttatggcttcctgtgccaagaggaagaaacccataactaggtctgatgatcctccagaggtcgtcctagctattcatgtagcttctttgggtcctccaaagaagtccagaaagaaagacaagatcgttgtgtccaaaaatccttccacagtgaagattcacgcaaggcaaaagataaggtcattgatattgaagacaaaccttctacttctttgatggttatttctccagaagttgtggatgtggccgagctgagctcttgagattcagagcttgtgggcaacctacgtgcacaaggcatcatgctgctggcatccagggaaaccttgatcacttctaaggctgattttaaacccttggggtggggttggtatctaccaagccttctcatatattgctcaaaggggcttcagtgactcttcagggtaagtacctcaactcacttttacttttcttttttgtcaaagttattttctgaccttgttttgccccttgtcagcttgcatgggctttgcttatgctatggacaatgtgttggatatattttaccaggatctaaatttactaacaagtatgtttcat

SEQ ID NO: 22037 - DNA, 3079 bp, Cannabis sativa
ataaatataaaaaatatataatattcacatccatgcgtatattaatgttggttattacttttctttccattaaaaaaaaaaagtggttcatcatgaatatttaatatatatttagaaagaatatataaattattaattgaaaattgatataaatacctgtatatattcattttttggttacattcatttaaccattaaatgattattcataatgattgttattaattatttttattattgtaaaataaaatagtttaatttgatagcttaaaaaaaataatgaacattactttttttttttttttgagagagaacattacttagttagctaggaatatgttttgtattaattattaagttttataaatgttgttatatatataattaaataatatatatagaacttcagcactttaaaatataagatgttaactatatgggtaattaggttttaggctgttaaaaatattttcgaactaataagattgtaaggatttttgtctaattttactaacgaaacctcatgtggatgaaagttccaaagaacacaaattggtgcatcatatcgaattttagggagcacaatttgatagatatcaaagttcagatgacacgatttaacacatagattatattggtaaaattgagcagatgtgacagaagtactccttaaattcaacaatttcaatagttcgagtggaatttttagcaatccaaaattcatggtggcataatttaatacatgtaaaaattaaaagataaaaatcctaattagctctatatattattgataggaataaattaataattaaattctcttactcttaaattgtaggaataacttaaaagatacatagtactttaaatacgattttgttactattttattttcaaaaaatgcaaagtagtagtatgtaatcttaaaaatacttattaatataagtcatgcacataatatagttagaacctttttgtaatttttgtaaattatttataaatttatatagtgggtgtagttagaacataattgtttagcatctcatcaaataataataatagtgtggaaaattaaattaagaataagggacaaatgtggccacaatcaaccattgaccatgtggggaatccttaattatttggccaattattagatcataaaaatgttgtaataataagaagacaattgacttgattaaaattcaagaagaaaatctaataatgctcacttgtattaaatatataaaaatatgtttatgtatatatattcatttgtgtattttgagttgacttattcctaacttattaataaggccatatatatttatagtttttataaattaaaaaccacttatatatataattaataattagctaaattataagatcatcaatcttttaaattatttatatgtgagttaattcataacatatgtttaagtaactaacttattaagcaagattattattagataaatactacaaatctggatctccataaatatgtgaagcaagatcgatcttaataaattaatgttggactaggtttgtgtcttgagcttttttaaacccccttaaaactttcaaattgttatatttttttaatacttgtaactataatatttacaactaaaattcttaagaaactaagatctttatatttaattttcctagttaaaaaaatctcttatcgcctatgcactaacaaagtttgttatactaattcggtaagagttcgtgtttagacagatacttttgtcctaaattctaagtgctcctataacaattgatttaatttaatataatatcaccgtgttttccttaaaaaaaaatctcttaggagctttcaaatttaatgaggaaaaatagtagataagaaaaatcttttcatcacaattttttttaataacttcttttcactaatttgataagaatttatatttatatatatatatatatatatatataataaataagatatttctctctgaatttttactcttgtagagttttttttcttgaatttttttcaaaaattctccttaaattatacaaattattgcaattgcttatgtacatatattagctctaagaatgcatgtacatatataataataattattagaatgctaattttgtgcatttgttttttatttatcaggatttttgaacttggtcagattaacgttatattagtgctacgtcaacaaattactgaaagaaatgaacataatgtaactggaaggtgatatttgcaacgatttttataatttagggagaatttttccaacagaaaaaaatttaggataaaattaaactctttaaggatcacaattcaggggacaaatactatttattcatacatatacttacataaacttaaattaattataattaattatacacttagaagtaaatttatttttaattgacatatttaataagaccttttaaaaaattaatatatataaatatttttcttaatttcatttttaagtaaacaaaatgaaaatatgttagtataggttacaagtaatttattaattttttttttttgttaatttttaattaatcacaactattttataataatccaacaactaagataaactataatcagtatgattacatattttatgtaaccattgaaacctcctccatatatatattatacaaggtcgggcctagtctaaggcaggctagacccacacctagggtccaactagcccatgggcccaaatataaatagttttcagtattttttaaaaagagattacatattatcggcaaaactccccaaattttttttttaacacttaaacacataaattaatttttttgtggcaaaacctactaaactcacattctgttttgctctttacacttctgttcaaaaggctcaattaaattccacggtggactgcccatgtgtacactattatacacgtggcacatttttagtagtcaacataatattaattataaaaaataattaaataaataaaagaaaacctttttctttcttttttatttttcttttacttttcttcttcttctgcatgcgagatccaacccccaaccc

SEQ ID NO: 22038 - DNA, 3348 bp, Cannabis sativa
aaaataaggatttattttcatgttgttacgttttatgtcgcacactttcatagctaattttaatttataaattctcaggcggatgcaagcacaattgaaggaatatttccaaatgatagcgaaatattcttttcagaagatcaagagcctttgaacttggaccctttaatcttcgaaaaaatgccatatttacgattgcttaaattggcatattttcaaattcgttgtcaacttcctcaaggtcttcactcttttcctagagatcttagatatctgagatgggattgttacccgttaagaacattagggtcgaattttacaccacataatcttgtttatctgagtatgactgatagtgagcttgagaaactatgggatgaattccaggtacgtatataaatatttatatatatttgcaacaattgttcttaagttataatatatttgcagtagtacttaagtataattattctgttatgtatgcaatactcacaatatttatttgctgttataaaagtgtcatagttataagtagactaataattttacaccacacacatgaaaacctaagtacgtaccaaaaaataacttctgtatcgttaagtgttacaaacataacaatttgattatttttattataagaaaaataattaattggtaacctataaaatgttataaacataataattttggtacgtgcaggatatgaaaaacctaaaatatgtcgatcttggaggctcaaagaagttgacttgtctcccaaatttatctagagcaaatatttggaagcttgacctagaattttgtacgaatttagttgagctccctccgttgaagtttcatacaaattttgacgatgcaaaagatgaaacaaaagcaattaatttctacaacggttgcatacttgaagagaaatgtgacttactacttttggagggtgtttggtttggcggattgaaggattgttttcttaatctcaacatgtgctctaatttgaaaattgtttctgagatgtctggtaatatcaaatacatatgtttgcgttccacggcaatagaagaattgcacacttccattggatctctcaacaatcttttcgtgctcgatctctttggttgtcgacatctcaagaatcttcctagcagtatttttgattcgacatcattgagtattcttgatatgcatggatgtgtctctatcaacacatttccaaagcttccgaaaaccctaaaggcattagatttgagtggaacatcaatacaacgaatcaactcatcatcgttcgagtccatgccctttctcaagaatttctacatgaataattgcacaaaactcgaaagcattccaaccaccatttgtaagttgaagtctctccaagtactttcttttataaattgctcgaaattgaaaagctttcccgaaattttagagccaatggagaatctagagatgctttatttaaacggaacagggattgaagtagtaccaccatcgatttcgcttctagctaagcttcaaaatttagatttaagagaatgcaaaaatctcaagtctattccaatatcgaacatctataatatgtgcaatgtttatatcttcattgatgaaaatccaacacaacaacatttgattgtttcgttaccattcgatgtaaacatttctacaatgcttgaccactcaaagtgcaaaggttcttgtttggacatgaatagagtatctttcctaaactcacaatttgttgggctcatagacttttctcgtgacgagttaatacattggaagtttaattattggaaaagttacatttgtagtgaatgcttcttattctacacaatacacaatattttagtcagcaaatataaaaatcaggtatgcctctctttcttacattacaaaacatatatatttatataaatatagatagatattacttattttttttgaccgttaatataacatatgaaggtaactattcttatttttgtcatatatattacagaaagaaaataaaattcgcatcttggtttgacaatttgaagttctgagtttgttatcatctctttcgtgtttcaggtaattataatctatgtttaaatttctgagcttttgaataattataggaatgatacactaacagatttaacacaatgtaacaaaaaaaattaacgtattaaatattttttttttatctaagatggatctcacttattaaaagtatttcagccatcaatctaatttttcctcaccttatccgtaaacaacggtcctttcttcttcatctgcatagtaaagctaattttttttttttttttataacaattaggctcccacacaggcggccttgaattgaaatgagctataagtaaaaaaaaaattcttaacctttactataaagataaatagtatttttaaaattattaaaaaaatttgtatattttttaaaaaatatttttttttatttgggactctaaaataagtgggccctaagcgcgggcttaacctgcctacacttttttcatgaatcttacctaattgcccctctttattttataatttattttatttctaatttatatatattgaaaaacatattttaacatataccaatttatatctttcataattataatgaaattgtacatcactaatttagttttagtcacaataaatattgtaactaaaaatacatttaatcacaatacattataatttttatgactaatatttttagctaaggactttttgatcacaacaaaggaatgatgatttataattagtcacaacttttttacttttaattaaaaaaaaaattctagtcaaactaattacaaattttcttgtcactaaaaatatccggctctacccaaacttttctggttcaccccaacattccccacttgtccgactgttgctgagcagtttttgggtttaattttttgtagtgaatatcttgaactaggtatatcgcatctatcggggaaccaacactgtttcccaaacgagttgcatctagcatcgccgagatcacagccagaaataggcacacattttcgatccgaacatactattcaacattcacataccaattcactacaacaaatcttcgtttccgccgagtgacagtattccccggctactctacaacgctcatcaccaccaccatcatcacaaacattaattattgtgcccacaaatttcttcattttctacatatgtttataatatgtggtgcaaaattcaactaatttatttttctatatcttttttgcattgaggcaacctaccaactactacagtatttatattgattcacctgaaaatatgatttataaatcaagatatgttatc

SEQ ID NO: 22039 - DNA, 3768 bp, Cannabis sativa
  modified_base (3669)..(3678): a, c, t, g, unknown or other
aaaaaatagaaaatattgctcaactaagaaaatagttggcattcttgacatttatatagagttgaatacaagaagaggctaaccgacttacaacagaaaaataaccacttatcaactaacttgagtactgttacattggataaaaaacagataacgaaattacaaataaataactcagccattttcaattccaatagccgccctcaagtgacattggtgtaaaccagatgttaacttgttgtgaagaaattgaaaaggcattgcaggaagtggtttggtaaacagatcaactatttgattttatgtttcaacatatctgatgtcaagctgcttggcaataactcgatgtcgaacaaaatgaagatccaccacaatgtgttttgtccgagcatggaacacaggattggaggctaaggatccagctccaagattatcacaccaaagaattggtggtgatggagtgtgaatgcaaaactcagtaagaagagattgaatccaaattatttttgcagtggcaagggcaagtgctctatattcagatttttgtgcttgatctagcaacaacaaattgctttttagagcaccaactgattagatttcctccaaagaatatgcaatatccggatggtgattttctgtcatcaaagcatcctgcccaatcaacatcagtatatccttgaatgtcaagtctgtttgtgggtttaaaaatcagtccatgtcctattgagccagctaggaatctgactaatcttttacatgcaccccaatgttcagatgttggagcttgcatgtattgactcaatttattgacagaaaaagcaatatcgggtattaacattgtgagatattgtaaagcaccaataatgcttcggtagtgagtaggattgtccataggagtacctgatgttgcagacattttggtggttgagcacttaggtgttgattgaggcttagaatcaagtaactgggtccttgctagaagatctctagagtatttctgctgtgtcaggcagacttcggttgttgttctttgaacttcaaaccccaggaaatattgaactggaccgagatttttgagggaaaagctagtgtgtaaatcagagatgagatgttgtatttcagtggtgtcagcacctgttatgaggatatcatcgacatacaccaagataagcagcagggtgccatttttgagagagaaaaagaggctgctgtcgaatttgctgctggtgtaaccccattgaatcaaagtgttttttagggtgtcaaaccaggctctaggagcctatttgagaccatatattgctttgttgagtttgcacacatgattgggaaaattaggatcaacaaaaccttgtggttgagccatataaacatcctcttgtagttggccatttagaaaggcattgttgatgtcaatttgttgaatttcccatccattagtgactgcaagagtgaacataattctgatggtggaaggtttaatcacaggactataggtttcaaagaaatcaattctaggagtttgttggaaacctttggccattaatcttgcttttagtctttcaatagagccatctgcattaagtttgattcgatagacccatttgttttgaataataaccatctctgaagttctaggcacaagaatccaagttttctttttcattaaagttgacatctcattgttcatgacagcattccattttggatttgtaaaggcttctttaaaagatgttggttccttttcataattggaatatgcaagatgtgtcttaggtttatagatgcctagcttggacctagtgaccatgggatgttggttgttactaggacatattgctggactggtgttgacagcaggtgctgaaccagtagagttggtgttgagagggagggatctagtttgggcaagtggcaatacttcttgagcaattggtggggtttgatgtgtagatagcatgggagggggttgatgtacattagtggatcttggtataaaaaatggttgctgattgtaaatggtggagttgacagtaggtgtggtagtagggaatagagtattataagggaattattgctcattaaaagtgacacttcgtgccacatatatcctacccgagggatgaaggcacctatatcctttaaagttggcatgataacctataaagacacatttggaagacctaaaagcaactttatgtgatgcatagggagtgaggagagggaaacaagagcagccaaaaaattttaaaagagtataatctgattgttggtggaaaagagtttcatgtggtgtttgataattgagagtggaagtaggtagtctatttattaattaagctacaaaagcaaaagcttcccaccagaaagagagagaggcatattggcttgggaaagtaatgtgaggccggtatcaacaacatggcaatattttctttcaactcgcccttgttgttgatgagtgtgggggcaagaatttctttggattatgccaagattctttaacaatttatacagtggttcaaactcttttccaagatcagattgaactgattttatttgagtgttaaattgcctttcaactagagcattaaactgtatgaaaatgttactggcctcagatttggttttcatgggaaataaccatgtaaatttgctgaaatcatcaagaaaactaatatagtatttgaaaccatcagctgaagtataaaatgagggaccccacacatctattaaaatcaaatcaaatggttttgtggttttattttcagtacttttgaaactaaactggtgtaactttccagtttgacaagtagtacaaaaatctaaaggtttacattttacatttcgaacaacatgggaaagaactttattaagtattggctgagatggatgaccaagtcggcagtgccaaatgttgacatctttggacttgtcatgaatcgggttattggtggcggtatgattgagagccttaggtttgatgctaacagaggaagaagcaatgctttgagaggtggatgctgggacatgtagcttatagagaccctcactgatatggccctgcaaaagaacttgcttggttgtcttgtccttgatgagacaagaaaattcatcaaactcaagaattacatggttatgtttggtaaattgagaaatgctaaggaggtttttggtaacattagggacatgtagaatatcttgcaaaaccaatgaatgatttggaaatttagtgccaatagaacttgaaccaatatgatgtatggaaagagaggaaccattacctacaaccacctttgctttgcctttgtaatcagaaacagaggtgagttggtcagcatcattagtcatgtgatgggtggtgccagagtcaagaaaccaagcagtggagggatctgaagtgggattggattatgaggaggatcagtggttgagggagtaaaggttgatccattttatgcacctatgtaagtgatgtcgaatttatgataacatttcacagcaatgtgaccagcacgaccacaaagttgacagattggtctatttccacggccacctctgttgttgttgttgttgttataggatctacctcctttgtgtgaaccacgaaatccacggtttgagggaagtcctctggtgttagccaaatcacgtaatacgcctatgctnnnnnnnnnnttacaatttggtatcaaagccgccaggctgtcttcagaagatcgtcacgacatgtacaatcatcatcagcagttagctcgttctacggtt

SEQ ID NO: 22040 - DNA, 4110 bp, Cannabis sativa
aagaaggcatatatggaggagtatgattacagggtgaaactccttcaaaagaagcaatggagagaggagttgaaacggatgaaagaaatgaagaagaggggtggtaaggttagtgctgaagagttggcttttgctggtgaagatgaccccgaaaatggaactcctgctgctgttccagttgccttacctgatatggctctgcctccttcttttgatggtgataatccggcttacaggtaccggttcttggagcccacttctcaattgctggcaaggccggtattggacacccatggctgggatcatgattgcggttatgacggtgttaaccttgagcaaacccttgccattgtcaaccgttttccaggggttgttgctgttcaagtaaccaaggataaaaaagaattcaatatccatctggattcctcagttgctgctaagcatggggacaatggatcaagtatggctggctttgacattcaaaacattggaaaacaacttgcatacatcgtccgtggggagacaaagttcaaaagtttcaaaaagaacaagacaactgctggaacatctgtgacattcttaggtgaaaatgtttccactggattcaaaattgagaaccagactgcgcttgggaagcgggttgtgttggtgggcagcactggagttgtcaaatcacaaagtgactcagcatatggagcgaatttagaagtgcgtctgagggaggcagattttcccattggccaagatcaatcctctcttggactgtctttggtgaagtggagaggggacctggcattgggggctaatttgcagtctcagttttctcttggaaggaactacaaggtagcagttcgtgcagggttgaacaacaagcttagtggtcagatatcaattcgaacaagcagttcagaacagctccaacttgcactgtttgccattcttccagttgttaggagtatctacaagctcatctgccccgggcctggttcggagaactatgcactctactagattatatacatgtttagtttctcattttgattactattattattgttattttacaattgacatgaatatcaatcagtctgtggcttttgtttgtcattgaactgatatgctttctttcattgttagttaaccttaaaatgttttatattttgcaaatgcattgagatggaaccttgaggtgagatgaggtgaggtgagggaatgtaataaagtttggtagctttcttttcagttagttagtaccaacttttttgaaatatgtgttgttgggcatctgtggtgaaatgggaatatttttctttatacaagtgtagattcaattcaaatatgtttcttgattagaatgcattgattttggagttgatctggactcacgaattgcctcttaatcaacctctttgcttggaaacacatactctaatatttttttcatagcggtatttattatactcacaacatcattcttttaaatttttgaaaaatttcaaatagtttataataccgaaaattagtttgaagttttttggtagtaaattgaaatatcattgaaatatcacactctatttttactctatttttggtatttttggtactataaatactataaactatttaaactatttagaatttttcaaaaatttataaaaattaatttataattataataaatacagttataaaaaaatattctgatatatatttccggcgtgaaagagattggaattatcacttctaaaaaaatagtgttggtgtataggtgagttcaatgagcttaagaagaagcattcttctccaactttgtccagtgttaccataatgtactgaagaagaagaagaaagaaataaacgataagagctaagaacagaccaaaatccccaaaacttagaaccgccccattgtccaaggtggccaccaatcccagccgcccgatctctctaaatggaggccacctgtcattttttagctgaagaagctccgaagggtcaccccagaacttgtggctaatgtccttaaggtacaaactgaaccagctttagcttcaaagttcttccattgggctggtaagcaaaaatgttacaagcaagagttttttttttttttttttttttgtataataggataatggatgctttaattaaaatggcttatttagatttggctttgtctatttatgaggactttaaggatgatggtttggtggaggagaggagagtgttactttcatgattttgataaagggtctttacaggtttggaaggaaatgaagagacagagttgaacctgatgttatagctcatacaactataatcaatggtttgtgtaaaggagggaggggacattggttcaggcttttgttgtagatgggagagttggataggcttgtcatttgttgaattgaaggatttgatggattcagagtaatgttaatcgaggttacaaggcacacaagctctttctagggccaaactctgagacttttaatcccattgtggtgtcttatgcagagatgaaaaaaatggatgagttttgtgagttgcttgtgcagatgaagaagttgggatcttctgtcatggatgatcctgccaaattctggcaatggaagtgtttgaggactggaaagtcagaggttattatagtgtgttgcaatctacaataaactgatggaggctttccatagaattgggatggcaactaaagcactgtcacttttagatgaaatgaatgatatgaatgtttagccagactcatcaacttatattattgcaatcgagtgtttttgttgaagatgggaatgttaaagaggcttgtgcttgctacaataggataatctagatgtcttgtgttccatcagatacactattcatgcttgaaacgctgcagatatccttgcagtggtaagtgagatgatgcaagaatgatgtcctccggatgatgttgtatgctctgctgttatatttggaatgtgtaagcatgatgttatagaggaggcaaggaaggtcttttcgaacttgagagagcgcaaagttttaagtgaagccaggacgattgtgtatgatgaaatactaattgaacatatgaagaaaaagacagcagacttggttgtatttggattgaaattttccggcttagaatctaagctgaaacttactttcttgcctacaaattaacttggaatcacctttgttcacactttaagcttctcatgttaatgccgcaatttcagagtgttgcttttggggtcatcaagggagctgcccatgatgctattaagtgtcatggtgtcttaaacaggttattcactttcacttaattctgattggagaatgtgtttgttgcttcataacttatgattgtagttttaaatttttgtatacaaacctaaggattatagatttacaataattttaagtatgaagtaagaagcagatatttctagtttgaactacatcatatgctatgtacatgttattgatatatatatatatatacatcatacatgtgagattgtttgttgtagcccttattaatgcttaagtgttaatatgttactccaatttcttatattaaaatgaacctttatactaataaagaatgctcgatcccgcaaaaccctaagcagcagagtttgaggcgcttctgcagttcatgttgagtttgggaaaatggttggaagaggggaaagaggaagttgatgatccgaccttcttctaaagtcagcattattgccatgaagaagcatggtaactttatttaatgttcacacttgtacttttttttttttctgataaattatatcgacgagtttgagcatgtcgatgaccactgagctgggaaaattgttgttgagttgaattgaaggctcaaacaaatgtggggttacccttacctcaatttattggatgatcataactgtgctatattaaaaccattgaagtagatggttttgcctagtttgagtgcatgtgcatcaatagcattagtctggaaaaacagaaaaaccaattttattcttgtttctgttatttagtaaatccaactaagtgtcatctaattattacatagtctagccagccacatgtaccaagataatggttctt

SEQ ID NO: 22041 - DNA, 2413 bp, Cannabis sativa
ccttctgtgagatggtggtttcaattcgatggatagcattgcttcatagccataagctaatgtaaaagatttttgcctggtggctctcggtggtcctgtatgaccaaagtacttttggaagttgtttgggctagtttcctttgcctcttcaagatgcttttttagtgtgtctttggttttatttatagcttctactttccccttttcttgggaatgagaaactacagagaagcttttaatattgtcgtgtcaattggagaagttggtgaacatatcgctatcgaattatttaccattgtttgatacaatcttgtgtgggagaccatatcgacaaacgatgtttttaacaaaaaatctaggaacttctttgaagtgatagtggctaatggttcagcctcagtccattttgtaaaatatttgacaacgaccataacatgttgtactcctcctttccctttagggagttgcttgataagatatatttcccatatagcaaatgaccaatgctggactgcattttgaagcctcgtttggtggagctcttgggatcttggagaatttttggtacttgtcacattttttgacatagtccattgaatccatgatcattgtaggctagaaatacccttgtttgagtattttctttaacaaactctgcccttagcatgatttccacaaaaaccttcgtgaactttgagtagtatccatgcaacttcttctttggtgactcacattaagaatggcattgaaaaactatgatggtacatatgtctatctaggattagataaggggcaacttttctcattatctttattgcttaaatcctgttttttggtaggacttttaactggtggtatgttgctattggtgcatctaggttggactatcatccaacacatctatttcttaggtataaagatacttggatctggtaagtattgaacagagactaggttggtcttgtccgttattgtcctactggctagtcgagcaagggcatctgctgttgcattttcttctctagggatctgtctgatggtgtacccttttaactgacatagtaattcttgtatctttctcagataggccatcattttccccctctgacagtgtattcacttagaacatgatttaccacgagttgggagtcgttgtatatgtctaggtattctgcctagacttcatttgctaatttcaatctggtaataagggattcgtattcagcttcattgattgaggctttgaagccaaactttatggcaccatgcagttgctgcccccaagtctaatgaaggcaattcctatgacagataattgatcatacaagaaccatctacatgcagtttccatgccaaattttcttgctcttgctcttgctcttgcttcttctttggatttttcttctacccttgctcttattcagagtccttaggggatacatttgtgcattcagccacacaatcagcgagggcttggccttttatttctactctcggctagtaggttatctcgtattgtcccagcttgattgcccatttaagtaactggccagacacttcccgtttctttagcactttttgtagtggttggttggtgtatactgtgatgggatgagcttaaaagtaaggcctttattttcttgaagctagtagcaagcactatgttaacttttcgattggagggtatcgactttgtacatcgataagcctcttgccaacataatatactgaatgctttctaattcttaaaaggtaactttcacactcttctgtccattcaaacttcttattttcccagaggatattgaagaaaggaacacatttatctgttgactttgatacaaatctacttagtgttgctatccaattagttaaactatgtacctccttgacacttatgggaaatttcatgtataaaagggcttggatcttcccaagagtttctttaattcctcaagcattcaccatgaagccaaagaacttgcttgagttgactctaaacaagcacttgaggggtttgagcttcatgttatattcttgaaggactttaaaacacttgtttaggtcctctatgtgccccaaaaattttggacttgactaacatgtcatccacatagacctccatgttgtggccaattaggtccttaaacatcttgttgacaagacgttagtaggttgctcctgcattttttagcccaaagggaattaccttgtaacaatacaagcatacattattaggaaacttgtatgttcttggtcaagaagatacatattgatctgattgtaacccaaataggcatctataaagcttaagatctcatgaccatttatggcatccacaagttggttgatccttcaaagtgggaaacaatccttcggacatgccttattaaggtatgtgatatcaatgtaa

SEQ ID NO: 22042 - DNA, 2494 bp, Cannabis sativa
gagtatgtctagttttagacatgctgtttgtgctgctgaagggaaactccttgccattcttttggctcttcagtgggcaaagaactaaaattgggatcactttgttatcctctctgatacccaacttgtcgttaggcactcaatcataagaagagtgctctagattggccttttttaagtacatattttttcaagtatatgatttattttactttctctaatgttttaatccgctatatgaatcgtttagacaactcaatagctgatgggttagcaaaaagtgctagaacttctactcgtagagctggtttttgtcaaagggaggatcgctcctgtggttcccatcattttctcttagttttcaattaatttttagttctataaaaaaatataatatggtttcggccatgacatgacacatttatagtaatgagcattctataatattttcattaatagagttacatatagagtaccatgttcatggaatagcctattaaaaaagtttttttttttgtttgataaataaagcaaatgtttctattgcttgttcttcgtgatgctccatagtttctttttccttctttttatcacatttgaatcatgtccttaaaataattctgaaattcctgttgacagaaaaaaaaaaagtaggacaaaattatataaatatacaggagattttttgggggtgcatgtttcatatatatatatatgtatgtttcatattgtctaaaatgtgtgatgaaacttattgatgaaatatgccaataaactagctctatgactctcgacatataaagtaattcattattatcctggtgcctaatatcacatgaatatttgagtacgtagtactactgaaaatgacatgtaattggactggtccgaccaacctaacctcatactgtttttttttttttttatcttagataaatttcataaaagaatagggaggttaaacagaaataaaataaaataccattcaaaagcaagtgagcacatcagacagagcaacaaaacagtcttctctcagttcctgttgaccctctatgcaacttcattccacctggacgcgtaggaggactagatttaaccaatctctttgctactccaaaaaaatataacataatataattagatgtatacctcataacaatgaaaataacattattattaataggtacacattataacacacagtaattaatggaataacttaaattgcaatcaaaattcacatagaaaataacaagtgaaactgtaaattttttttaaaaaaagttaaaacgtgaaatttcagtaattcccctattactaataaggtacttttgggtcaataaatagatacagatatactttcttatttatgtatgaatttcttattaataatatcatttacaaaagaagggtatgtaagaaaaaaaaaataagtacctatttcgtaaaagagctcattaacattctgtgcagttttggcagaagtttctaagaaaaccaatccattttctttagcatattgttcaccttcctgtggcaataagggttaaacagctctgcttttcattaccgtactgatgaaatagaaaagaaaaatcatatactaatagtattgatgaaaggattgtaatatatttatatatatatgtgtatcaatttcaaaaaaaatatatatatatatatgtgtatatatgagagaatttgattgtcaataccttaaattccacttctctcttcttttctaagtcaaccttgttgccagccaaaaacatgatcaaatttggattacctgtttcagtgtaataaatattatatcacataaacttcctgaattgaagttttgagttattactttaattttctcctttgacaatatgtacctcaaaagttttagaaatactctgcatattattattaagccgaaaggtatgaaaaacatttgattcatattatgaatagtgttgttgaattaactaccttgcttttgtaattcttgcacccattttttggctcttacaaatgaatcctgaaatcaaaacaggtattgagattgattattctcgcaattttaagctgcattatgtcatatttttcaacaacactatctcaaaaatttgcacaagaattttaatattacattttaacatggatgagttataaattgagattattcaaatcaaatattgcttattaattagaacatataaaatgtggaccatggtcatgaaaatacaagcctatcataagtaaaatcaactaattagaaagaagaaaaaaagtttgttccaagatatatatatttatatattaatttctagagaacttcgaacaaataagcataatataagatgtagtaaaaaaaccttatttaattataaattattattggctaattaggatttttgccttctgaactttgacatgtatcaaattatgcccctgaatttttaaggtcgttaaaaatgtcccatcaactattgagattgttgaattt

SEQ ID NO: 22043 - DNA, 2633 bp, Cannabis sativa
atataatgaaatatagcactacataaaaattaacatttccatttttccaattttttttagaaatttaataagatgaatttagctagggcattaattgaacatgtcaattaagtttttcgtatggtaatagaagagagaaatgattctatatatcgtaattggaatatgttacaaagaaaaaaaagggaaaacacttacatacacactcatcctcacaagacagataagttagttgtaactaactaactaaccaagaagcttatgactagaattggtttataataatataccccctcgatgatatttaaatgttttttttacattaattttgggcaataattcattaaactaagaagggaaaagtagcttgattaaattaaaggtcaacaaggttgctgagctttgaggaaatgtaaagaagcttgaggagccaagcttgaattttctcccgaacgatgtgacactcgatctccacatgcttcgtgcattcgtcaattataggatattcgaagagatgaattgttgcaacattatcacagcataatgcaacaagtggttgatgagatataaggatgtcatttaagagggcaatgagcaatgtaatctcaagtggcattagcaataacacggtatcttgcctttacgaaggagctagacacagtgggtaattttttttttaattttcagggtataagagaatcacctaaagatgcagtagccaatgaccgatctgcaagtgtctacgcaggtaccccaattagcatcagagaagactttgcgagagacattgatatcaaagaggctggaagcaatataggtagggagttgtgatggtgaggtatagatcaattttcctatgatgcttctttaagtggttggacgagagagaacatcacatgaatccttactaagtttgttattaggctccattagccgagtaggagcaagtttagcacccaaaaaaatatttttcaatcaaaaaatgcaaggcaaaatgttgttaaggtacaaaaatgccactgttagatcgaacaatttcattgccaagaaattttttaggggaaacagaatggagaatccaagacatgatcatgttgttttgcaagtaatccaagaactaaggtttggatcagtaggaggaggtcgaggtaacgtactgtcaatgaatcacgttttattctttgctctaatggagatagaagaaggacgtttccaagacagaaaattttcttgcgagtgagaggtgatggaacaattaaattaacaaggatgattgccattgttatgatgataggggcttttgtgatcaacaggttgagatcgtttgattaggggggataatgagtttgattagcatcgaatcccaatccaggacaatttagaggttgtgagtggaagtcttagattacttctgataccataaaaaatgattctatttttggtaattggaatctattatataggaaagaaagaatattttatatacatactttgtaactaactaactaatcaagaagcctataactagatttagttttcaatataaagtaattaatgtattcttttagggatgttggcggcaaaaccacttgaactttacattttttaatactttaccacaaaaacccaaattttaacggcaaaacctactgaatttaagttttgttttgctcactacacttctatcaaaaaacttcagttaagtgacacagcggagtgccccccacgtgtacatgtggaaaatttttagtggtccacgtaatatttaattattaaaacattataaaaaagagtttaaaatatataaaaaaaaattataagaaaatatttttcttttcttttgtcattttttttttctttttattttttccctgaaacctaatcctaacctatatcttccttaattttccttcttcttctttattattacaaccaccacattcactaccactaaagccaccaccaaaaccatcaatatcaaattaacacaattacataagattgatattgatacagacccaattaagaaaaaccataaaatctctcaattcaacattatccaaaagaaccaatccaaaaaccctaaaaccccaaatatctacaaacaaacaaaataaaaatgttaattttctcatacaacctaactcggaaacaaatttgaaacatgctaaagaaaaatcactattccataattcattcactacaagctccaaagattattacattacaaaactaaatcaaaagattttaactaggtatacctcaatttttacaatagttgttattgatttgggttttgaatgaaaactctgccaactcaatctctcgaccttctttcaattaataaagtagtcattttttcgctttgaagaatcatcttttgattattcaacttttatttattcaaaaattctattgacaattctgtaagagtagaaattgatggatttgagtctttagagaacagagggagatttgacgagttgaggatgaagacgatgatgtcggttatggttttgcgtgagttggggaaatctggaggtgaccttcattttggccaattgccatcgatgtcaagttgagattagcaaaggtgagagagagaaggagagagagaagagggaggatcgggg

SEQ ID NO: 22044 - DNA, 4837 bp, Cannabis sativa
agggcataaaacccaacacgatcttcattggccaaaagtgcccctatcagagtatctttttggataagctttgccttccagcatggttgccgcagaagcatccatgcacttttatcattagtcgttcagcttcagctttggtagcacacctcaaaagaggtatggagaagcttcgtctgtacattatcccgtctaggattaggtacctaggagcttttattcttagtttgcttgcttcatttttgtcttctggcaaggctctagattggaggtaagctgcgataggtgtcatccatgttggacggttattcaacatgttgaattcttcaaggacaataatgtggggttcctctaggaactgtaaaggcaccaagtttgctttattaataatggtgttgcttgccagacgggcaagtgcatctactgtggcattctgttctctaaggatctgcttaatcacgtagcctttgagctgacttagcaagtctttgatcttgctcaagtaggccaccattattttacctcgagttgtgtattaacctaggacttgattcaaaactagttcagaatcgctgaatatgtccaggtggttagcccatacttcatgtgtcagcttgaggccggctattaaggatttgtactcagcctcattatttgaggctttgaagccgaatttgattgctccgtccagttgctaccccccaagtgttgtaagggaaattcttgcaccagaaaattggttagtgcagcttccatcaacatggaatttccatgttagttcttcgggattttgttgttgttgttgctcttgctctcgcttcttctctagctcttgctttcctcttgagtcttgagggatcttaagagttgagttggtgcactcaaccacgaagtctacaaggacttgacccctcatggttgttcttggctggtatgtgatcttgaacttaccaagctcaatggccaatttgagtaatcgacctgatgctttaggtttttgcaaaacctaccacagtggttgatcggtgtacacctttatggggtgtgcatggaagtagggcctcagctttctagaagccaagagcaagctattgctcagcttctccatgagtgggtattgactttctgcatcaattagccttttactaatgtaatatacatgttgttgtacattgtcttcttctcttatgaggacagcactcatagcatgctctgtgattgctaggtatatgcctagctcttcattgtctaggggtttagacaacacatgtggtttggccaattgtttcttcagctccaggactgcatttttgcattcctttgtccactcaaattttttattgcctttgagaatgttgaagaagggtacgcatttgtctgtatactttaacacaaattttcttagtccatcaatccgtctagttaggcttagtacttccttaacaattgtgggagactttatgtccaaaagggcttggatcttgtcggatttacttctatttccctggcattgactatgaagccaaggaatattctcaagcctataccaaaagagctttaagggggttgagcttcatgttgtagctacgaaggattttgaagcactcgcctaggtccttcacatgcccttagcctttttagacttgacaagcatgtcgtccatatacacctccatattgtggctgatgagatctacaaacatcatgttcaccagcctttgatacgtgaccccagtgtttttcagccgaaagggcattactttgtagcagtaaaggcctaggtctgtcatgaagctagtgtgctcctgatctggtggatgcatctttatctgattgtagcctggatatgtgtccatgaaacttaggatttcatggccatctctggcatctactagctagtcaatcctgggcaagctgaaagcagtcttttggacatactttgttcaagttggtgaagtcgatgcagactttccacttcttgttaggtttagccacaagcactgggttggatacccactgacggtagaattcttctgctatgaagtcattagccctcagcctttcgactttgtctttaagcactagggtgcgatccttgtctagcaactgtcttttttattgaataggccaaatacttggatcaatgttgagtgcatgggtcatcacagagggatccattccgaccatgtctccatgtgaccatgtgaaaaggtccaggtttgcctttagaaattttttcaacattgacttgaattttggagccaaacctttaccgatcttcaatcttcctgttgagaaagtgggatcaacttccacttctttcaattcttctataggtgtaaagcttcctgcaggatctccaaagcgaggatctatatatgtgtccccaccttgggctagacttcattgccccttgctgggatcatcttcttgacttttggcgggcatcttctcctttttggcattggatagggccactttttagcagtgatgggcagactgttggtctcccctcatgcatgccattccatgccttattggaaatttgagccataagtgatagatagacgtcactgccttcaaatcgttaaggggcggccggccaatcatggtgttgaaagctgagggaacgtcaatcacgacgatctatgccatcagtgttttggtggttggattttttccaaccgtgaggggtaaatatactctacaggtgtgattccttggcaaaaggcatacatcacctggttacaaggcatcaggtctatgagttggagccccatctcttcatatgttattttgaaaagaatgttggaagaggctccatcgtccaccatacatgttgccacggtcatattcctgatttgcacagtaatgaccagggggtcattatgcgggaagttgaccagtgaagcatcttcctcagtgaaggagatcatgggctctatgggcttctgctacttagagctccggtcttcaacggctaggacttcgcctttgggctcgtgacaaagttttcgagcatagtgctccatagctttgttggtttttccagtaatgtgagttctgcctattatgacccgtaggtggcctaccacgggtggtgccatcagatctccattttgggcaccttgtgcctgagtttcgtcatcttgcacataatgacacaggtggggattattgcgccttatcaggtacttaatctccctttttagattttgacactcattagtgtcgtgtccgaagtcattgtgatatcggcaaaactttgacatgtctctcttgcccatttcccttctgataggaaaggactttcggtatgggaccgttccctgagtggcaatgaagatggcctcgggcttcttttttaggagggtgaagcaagtgtaattctcctccttgttattttgtggcgtggaagaagtgctaaacttcccctttgcaattgttcttcccaaagttgttggtgtcgtgcttgtttctagtgtttttaccactaaaagttggggcagagttattgttgtctgcctatgcacctggtgggttataagactgctaaatgcctcgtgactgcctattgttgacatgccctgcctgggcttgtcgtacggcttcttcaagtttgataaagtcgtcagctctatcaaggaacaccttcatgttgttgatggatatcctttggatatctttctcgaagtcacttagtgggagtatgccccccagtatggccgtacatcgaccttctctagtaaggcctttggcattggtagctttggccatgaatctctaaatgaaatccttcaaaggttccccttgtcactgtttgacttcaacaagctcttccagctgcgatgatacaactcttgcggacgagaattgtgtgtaaaattctcgtgagaactcagaccaagaattgaatcttcccaggttgagtttaaagtaccattttgggctatctctgacaatgtggctaggaatatgtgacaacgcacatcaccagtaaccttctggaggtcgagtttcatctcgaagtatttgatgtgagccagtgggtcttctcatccggtatacttcttccacactagcattttgaactttggcaagggcaaggcatttatgtatgttaagaatggtgatccccttgaccgatcaagttcatggtataaaggtttcaggcaagctatgcctggatcatgtccctgagtttgtcaaactatgcttgcatagaagaatttattattgtgcggaccttattgactggccctccttggggaggctgcagattctacagagatatgggctgactggccataccctgggagagtatatggtaaaggtcagctaggcttgtgttgaactgtagaccctggccgaccattcccaagtacaggagttggcctaggctggccaggcctacacctggctattgtgattgaccagccagagctgtattgggcagggtctggctgcccagtactcctgcatagctagccagaccagtaatccgtagagtttggtcgcccatgatgcttccttggccattaagactagcattaggcagcgtctggccgcccgtgactccacgattgactggtgctggctatgtgttgacagggggtagatcacaccaattactagagtttggtggatctagatgcctgaagtgatcgatttcacttctcgaatcactgttttggtgtttccacccaatcttagtccttgtcagtcgaagatcgatctctgcgcacctcgctccccatggggaggaagtgttgtactctagccagctatggatacccctgttggtggctggccagccaaaggctggacaaacggggggg

SEQ ID NO: 22045 - DNA, 1944 bp, Cannabis sativa
agattcaacaggcaggacaaagtggtgattcaaaggaaatttcgatggtaaccgatttgacctttgagatgattccgaaagcggcgaactcagttgagctgggtcgccgaacacaatgatagccctattttggaatgtccaagggcttgggaacccttggacattaaacaccctcaaatcccatgttaaagattatcatcccgggatgattttcttatctaaaacttgcctgaatagcgctcggatggaatttattcgtgtttagttaggatttgaggggtgttttgtggtggatgctaaggggaaaagtggaggccttgcccttctttggtcgaatgaatattcgattcacataaagtcctttacggaagctcacattgatgcacttgtggaaaataatctgggttttttatggcgatttacaggcttttatggcagtcccgatccaggaggaagagtcgatagttggaaacttttgaagagacttcaaccaatgtttaatggtgcttgggtttgcggaggcgatttcaatgagattgttaatcaaaaggaaaagaagggagggggtccaaagccagaatatttaatgaggaactttcgtcgtgccatttcagattgccaattacgcgaaagtcactctgttgatgatggatttacttggtgtaacggtagagcggcaaatctgatttttgaaaaacttgatagaatcctttgtaattccttttggaaagacaaattcaagaagaataaagtctcccttctcaactggtggaactcggatcatagaccactattacttcagtctcaatcggtagatagtgggaattctttcaatcgacattggggaactcggtttcactttgaacaagcgtgggcggataatgaagattgtcgaagaattattgaggaagtttggcaaaaaaagcatcagggagacccggttctacaactttccaaattgcttacgtcctgtggctccaatcttcatacttggaatatgaaacagaaaaaagaaatgcacgacagaacaaaggaattaaaaggaaaaattgaaagtcttgccaattgaacagagaaagaggattggatgactactcaacgattggagcatgaccttaattgtgtggaggagaaaaaagaaatgtattggaaacaacggagtagagcgctttggctgaaacatggggacaaaaatacaaaatttttccattacaaagcctcccaaagacgcaagaaaaatacaataatggggttgtatgatgaccggcaacagtggaaaacagctgagaaagatttagaaaggattgctattgattattttcaaaaactcttcaccaaatccaatagaggagttaatttacacaatattcttcatcaatgtgttccttttcgtctcagcaatgcagaaaatgaagcactgctggagccttttacaatagattaagtgaaaagagctatgtttcagatcaaccctctcaaagctccaggcaaggatggtctttctgccatattctttcaaaaaaattgggacgtggtaggggctgaaatcactgcagcttgtttggaagtattaaataaggatgctgactgtagtactttgaatgaaactctcatctgcttaatcccaaaggttactcaacccacaaaaatgacagaattccgtcccataagtttgtgtactgtcatatataaagtaatatcaaagtgccttgcgaaccgtatgaaacaaagtatgagctcggttatttcagcaaatcaaagtgcttttattggggggcgaataattcaagataacgctatactcgggtttgagagtctccattgtcttaggaagggccggtttggtaatgggaagaaaatggcaatcaagctagacatgtcaaaggcttatgatcgggtggaatgggactttttggcaacaatgatgacttgcttgggatatga

SEQ ID NO: 22046 - DNA, 3367 bp, Cannabis sativa
aatgaaaataaagaagttatagttaccttaagcaaaaaggcactaacatccaatatttgaagtgatgagctaaagctctaaaaagcatctggtggtaaagttctccaagaaacaaaacatgaaaatattattacttgaaaacaaaagtaccaatattacttaccccttccaatttctagggcttagaatcataactaaagatccaatattgttttatataaataaaattttacttagacattctgtatacacaaatcaaaattaaagaaggaaaatgaataccattgtaattgaacacattagctttccctcttggacaccaagagccaatttctaagacaaaacaacatataccttagctacaaactaaaacagatatcaaaactacacaaattctatatgaaaactacttctcatcttttgtttggggcttctctctcccttcctcacaaacacaaacagagcaatgaagaacccttctctgtcttccactggattggttcgaagcaacttctcggctgcaaaatcaattatacccttctctgtgtataaatgattataatcctaatagtaatatgatttcaaaaaaaatcctagccaatatatatataccgtactgatagtttttttttttttttttatgaaaccgtactgatagtctttagtttagtgagcagagaactcttcttttatatatatatatatacatatatatatataccgtactgctatatggtattggtgatcactttagttttagttttagtgagaagtttcttgtttccagattagtttttgttaataaattgttttttctcataaacaaattaataaaatataaagatgatgagaattgtaataaatatcgtcaagagaaggttagttttgtaatcaaatataataagagacaaagagaagatgaagattctagagacaaactcaagattagagacactcgacttaaagagagttgagaatctgtatatgtgttgtgtattagtatgctttcctaatcctactatgaactatatttatatagttttctactagaaaatttctatttctaaccaatgtgcaactaaataacacaaatttatattttgaaataaaaacattccatttctagttaatatagaaagaaacataaatattattttattcacatttggcaatacattttgactagaagcctttagcactataaatataaagcaatcaaaagatcttataattaaagtttagaattgaaaaaaaaaaaaaagattttaaacaagctgccaaatgtttttggaaagagcttccaccagtccaccacttgagcataaaaaaaataattgtcaaactagttgtacttctgctatacccattggactgtaaggaaaattgctcttaattcagcttccatggctgaacctgctttctccattcttccatgtagcatatgtaaaaagcaccatcaacgatggctagagttcaccaaccatccattccttatgtctcctgggctcaatatttcacctagaatattcttcagacttaacaaaatccatgaaagactttgaactttttgcctaactacctccaatggatagaaaaatgcaacctactccttgtagggagggcttcatttgaaactccccaaagtatcacctcgttttgaatgagagagaatcgaaagaattctttcttatctatttgaatgaaagattacaagctttatatatattgagctagagctaacaacactaacaatgtaaagaccgcctaactttaatatagtagatcatgaaataattagagtttaattatgagattgagttataaatcatgatttacgcatttgtggagatttatatgaattcagattatgctatttatgatatatgtgtatttcttgtttaccgtattttgtgcctagtggcagtggaacgcgacgttgggccattagagagtcacgtttttatatggtttagaattttattagtagcgggacaacatggttgatcattggaaatatcgggaaattgttggattggatcggagtccgagggacaatacttgcattatattcctcttcaaattcttctttgcacctttcatgcttgctttacatgtttttcatttacatacaaattcataataatctaaacacacacaaaacaaacatataagtataagtaactcaaatttaatgtttagaatttggaaaagaacacaaaacaagacaagaccactcatacttcaaacaaacttatcaaaatctttaactataaaacaaagaaagttgtacactttaaaaaataaatcaattattcacacagccttgttatcttttttttttgaaacacacagccttgttatcaaacactaaaaactggcatatgttaataaataacaattgaaaacaatgtaaatttaggcatttggacaggtaccccttctgtcgagtttagatccaattcaagcatctttttgattttaatacaagctgatgttgtcttctttttgttttctttttgctttttttttttttttttaatttacatttatataattttgggctaagacttaagagtacatttattttagatataatcagatggtagtccatatatactccatagtaagattagactatgagtgaaccatatattaagaaacaatgaatctaaaacattttgaaaaaaactaaaaatatagtgacttagttaataaggatggagtttctaataattaaacttgtactgaaataacataaagatatgtaattatcagaaacaaaataaatttggtgtacgttctgccataaagcttaattttttataaactccaaaccatttgcgtgcaagtaagtctacagtacttccaaattcaacacaaattttcaaagaaaaacattattgagtatttacaattcctctttctttcaagtaaataaaatggttgttatacttttcaatgaaaatgaagattatgatcggaagaagaaagacgaagcttatgatcggaagaaagtcgaagacgaagcccaagtcaaaacacaggtcagtcgtagtctagtccaaaaagatagatattaattattttttaaatcaaaattacagaattaattattataatcctaatactaatatgatcatttcaaaaacaaaaatcttatacataaaacacgaaaattacaaataattaaattatcccaataaaagtatctatcatttaattaaaaaataaaacataatcatttttaaaatcaaaattacataactataatcctaatcctaatagtaataggttacatatacatctatatatagctactagtcactagtcacgagagagaatatttttaaacaaataattagtaatt

SEQ ID NO: 22047 - DNA, 4030 bp, Cannabis sativa
tctctctctttcttatttttctcatcatcactttctatataacccattccaacatccccactcttcttctccagacataccaaccctcataacttctttctctctctctctctctttctttctctctgcaattcctagaagaaaaaaaaaacccactttctcaccatccaaacaccaaaagcaaagtaagaggaaacgatgatggttgagaaagaggatctgggtttgagcttgagtttgagttttcctaaccagaatcgtcactcggttacgaagagtactgttactcataataataataataatgatcataataataagcttaataatctcttgctctcctcgtttgttccgtctttgtcaacttcttcttcttcgccttcttctggtttcaatgttaatcctcatcagaaaccttcttggaatgcgacctttccttcttctgcaggtgtggatcattattttattttaacgaaacaaaatgatatatgtgttacaactgttcttttgctttggattctagatctgcatgtgttattttagctaaatgcagatctgctaaactttcccgagaaacaaacatccttttaactttttctttttcacgcctaatactatattatttgtttctcttttcgttatttttttcctttccccttttcctctttacaaaagcatacgtatctttcagatctaagcctttgtaaaatttcattttttttttactttttgattggtgtatacatgtatataatatatttggtattaacacagatctttttagactacaacatcactgagtcaaatctcattaaaattgttccgaaatttttgtttagatccgaattctgagtcgtgccgagttgagactcgaacttttctccgtggaatcgacgtgaaccggttgccgtcgacggtggatgtcgaagacgaagccggtgtttcatcaccgaacagtacggtctctagcgttagcggtaaacggagcgagagagaagcaattaatgtcgacgataacgagatggagagagattcttctcgaggtatcagcgacgaagaagacggtgagacctcgagaaagaagctcagactctccaaggaccagtcagccattctcgaagagagtttcaaagagcacaacactctgaatccagtaagtacacggaaaatacaacacaattcacgtcactccattagattttcctcactgtatatattttctcgcgaaccaaacaaaaaattgaccagaactattttctctattatttgcagaagcaaaagggtgcgttggccaagcagttaggcctcaggccaagacaagtagaagtctggttccagaaccgtagggcaaggtgtgtaatttttcgaaatttataggggtagttttggaaatcgtgtaatattttcaaaaaatattacagctttacctttgaaaacagctttatttacctggtcttgtttttatgcgtggttgcagaactaagttgaagcaaaccgaggttgattgtgagtttttgaagaggtgctgtgagaatctgacggaggagaataggcggttgcagaaggaagttcaggagctgagagcactgaaattatctcctcaattctacatgcaaatgaccccaccaaccactctcaccatgtgtccctcgtgtgagcgtgtggctgtcccaccctcgtcctcctccgccgcctccgagtcccggggccatcaccaagcgattgtcccggttcaccctcggcccgtacccgtcggaccttggggggctgcagcagccactccgattcaacatcggccgttcgatgccctccaccacagaagttgagagagagatatcgtaacgttaggggcagtttggtcatttttgaatatccaaaagtccttgtttaaataatttaaaaagtaaaaaaaaaaagaaaaaatttggtgtcgcataagtatgtacggaagttccatatgtaaaagtgcacccattaacaatggttgaaattccaatggtggagtctgagatatggttgttgggaaatatgatttggtgggtcttcaagttttgtattattcgatggcacccatcatcctcttttgttgggaggtttgtctcctatgtttagaatttagattagttcttatgaaaaggaaaaaaaaaaagaagacttttactaatactagtcttaagtgctaatatgatacttctagcttcaaatctttgaacccaaagaaaaaaagagaaaaatgtacccttttagatggttatggaagcggaacctttgcttgtaaagtttattattctaaatttgattaatttctacttttttaacatttgttaatttttggaatttgtccatcttttaaaaaatagtcgatattgtttagtggtttagattattaagagtatcggatcatatactatatttatctatggtatctctctgtttgaatcttttgtttggtaggataaaaatttgaaacacttgtggggatcttttcgattttaaatattgggtttatttggcttgtgggtccggatttggaacaccaatagtgggattatactttaagttgaatagaggaaagaaaattaggattatagtagagttgaatattgaaatgaaaactaggaacatgatggacccagaagaaagttttaatgtgtagacaagttcctagttctatggaattttttagtctttgacaatcccctaatcatcgcttaatgttattgttttaaaatcatagtttttataatcatgtaagtcaaactttacattcttttaacacttaatttttgtttccaaatattatattgctttgtgctttatgttaatatatatctccccttcaattttggtgaaaattaggtgagtgttatatggtttgagacaattgtttctctaatggttgtgaatgtgaattaaagttattgttgatgctataaaaagaaaagggatgctatgctcatcattcacaaagtagtaaagtagccaataaattttatcattttagactaatagtgttttgcttagcaataccatgctttgaaaggcaaatattattgctaaacttttcattttctatcatgctattgctaaacttgtcattttcttctttctcctcaaatctttatttttaattttttaggggattctcattctatctttattcaacacttaagttggggaaatccattattattagatgcttgtaattacagtactttgatgaaaatgaaaagagacccccaacttggtctttccctttcaaaagaatattctggcagatttttttaatctttcccagcaaatatgtatagatgagacactcattagtttgtagccaccaaagagtgggtcctcattattattattatggtataatatctcagatagaaaaatgtaagtgattgggtttctctgtaaagtaatgcatgattccatttatatggtcctgcatacctgattttctgcttcagaatttattgttgtgtttcagttttgaataatacaataatcaaaaattcaacgaaaaagtaaagaaaaaagattaatggtcatactcatagggctcatattcttaggagagtcatttgttcttctaacatttcatagtactgtttccaaaaataaaaaaggtaaataaattgtttttagcttactacgaagctgtttgtgtaagaacaaacaattatattttgtcgaaacatataggcagcacaatttcttactttttaaacaaattttatgatttttattcatttcaaagaaaatttctttgataatgtgtttattgttatctcataatatgttgaaaactcaactcttaggcccaaaaaaaaaaagttggaaactcaacaattgtgggaaaaatttaagaactataacacaacagcaattgttatcaaataataaaatgatcaaacaatgagaagacaaaacagaaatgacagagatcgattttatactgattccaccaaaagatctttacctaaatccagttgtgacttgtgagcacaaactctctctctctctctct

SEQ ID NO: 22048 - DNA, 1726 bp, Cannabis sativa
cattccctcttccaatcatcttgttgctggtattgtcctgcataatgaacttgtcagatgtgaattttatagagatgggagtgttcttggtaagaaaacggacagaaataatattatacttgaatgtaggagcatataatacattgtcaagtgtcatgttattaccaagatttacagtcccactttgattaaccataaggaaattattatttggaagtatgagtttggttggagagatcttacatatgcattggaaaagtttgatattagagcaaatatgtcttgttgctccggtatcaatgatccaagagttgtgtaatggaagtatataattatgtgataggataatacttgaatttccagaggaagagccaggttcattgacgttgttaccggtttgctgtgaagcgagcaagttcaataactgctggtattgaacattggttagttgcggaagcatagcatgattttctgaggcagtagtgtcttcttctgttccagtttgtacctgatttgcaccagcttctttggatttattttgcttgttgaaaccggggggataactgtggattttgtagcacttctcgattgtgtgtccaagaatgttacaatgggtgcaaaatgggcgatttcttttggggggatgtgaccgagaggcttgagtgtcatccttttgattccctttcttgtcattttgaaaggcaaaagccatagcatggctggaattgttgggattagctgctgagttagtacctctttgatgctcttcttgagtaactaggtgaaaaactctattgacttcgggtagaggatccataagcaagatgcttcctctaacttgagaaaaagagtccgaaagtcccattaggaaagacatgatgtactccatgtgataatggtcttgaagcttcttgactccaccacatgtacatccattacaagtgcatgatggcctgtaatttgttagttcttcccaaatcgttttcagtttagtaaaatgcatactaatggtttgattttcttgcttaaggttcataagatctttccttagattgtatatatgtggcccatttttctgatgaaacctaacctttaaatcattccatatagcagaagcacattcatcatatagaatactagaggaaatttcctttgacacagagtttagaatccaagaaatcacaatattgttattcctataccaagcattataaagattttgatcagaagtatagggtttaggaatagaaccgtcaagaaaaccgattttatttttcaccgaaatggcgagctgcattgctctgcaccaggagacataattgtcttgccctgtgagaggttgagaaacaagagagtttcctagattgtctccatggtgaagaaaatatggactcgctggatcctcgagagggttcttgacaggagcaacttgaagtcctcgattagattgttcaggattgattccaacaccagaaatggcggtctgaacttcggattggtctccatctgctgccatggccagaatgaaaagaacagggagaacgaaaggatcgaatgaagaagacaaagacacagcttagacggagatgaagacgcaacaaactggaagagaacggatcagacgggaaaaacctaagtttcccgctctgataccatattgagaaaaagagaaaaagagttttttattttatttgaaaaatattgtactgagttgcaaaggaaaggg

SEQ ID NO: 22049 - DNA, 2621 bp, Cannabis sativa
agggggcatgttaggttttggaaaatttcattcacctttgcataatgttccacatatcggcgaaattcaagatcctcgactaaaaccttatcagtaggaagtttcaagagtcctttcgaattcccatctaaaagttgtctgcacccgaaaacaaggaaacattgctattcaaattacaaactattagtggtgcctaacaccaaggccgaccttgaaattagtagggtttcgggtaaaaaatattattagacctttaaatataaataaatatatggtactttttaaaaacaactaaaaatatatattttaaaaagaaaaatattgtttttgagtcttgggctaggttgggctaggttcaggcctatctcgctttaacccagactccatcctgcctaacaccaccacgagttaacactttagtagttttctataatagttattagttaaaatttataaaactcaatattaaattacatcaataaattataaattacgaatagttgaagcttttcatatattatcttacttgaagtatgagttatcgaacttcaaagggtcttttgtccatgctccctcaaagcctgatctttctaaatgtgcctttccctattaaaaagaaaaaaggagataataataaacttaattataataaaaaaataacacaaaattttctttaaaatttgttggtttggtttcaccatagaaattttacataccaatgtatggccaccagaaagtactacaatgtccttatcatttaaacacattcgataaaatacatcccttaaatgtgatgcacctataaataaatacattacaaattattatttaaatataaattatcttttaattattattttatatagtttattgtaaaatttaataactaaaaaaactaccttgagtggcatctggaaggcgcccttcttctactggtttatttgaatcctgagttgaaaagaaattaaacaatataaaatgttagtattaataatatttgaattataatttttagaaataattaagtcatgtttggctgaatttttactttctgcttttaacttctcaggaagaagagcaagttaccaaacatagtttctgttaatagagtttttaaaagctaacagttgaaactcattgacaataaaagtgttttcgaagcttcaaaaacctcaaaacaacttttaaaagcttaacaattttcaatgtaacatatttttaattgttggtgattaaaaaataaaaaaaattacataaacggttatttttaataaaaaaaaatcacatttatgttcaaagtttttttttttacatttttacagtattttattaagatataacaaaaccacgtgaaagtaacagcaaaacaacacaaaaaataatatacaaataacaaaataaaaagaatatcacataaaaataaaagtacattaaaaaatcatattttatgtaaatcaaattataaaaatatttaaaatttcgtataactttatttttgtaattttttgttattttaatatatttgaaatattcctatacctttctaccgtagacaaagtcgatagttggacctccagttatttcaacagcaacaacaccagcaagctgagaaaaacatgtcaaaaactttgattaaaatagttgccaaacatatttttattttttttaaaattaaaaaaatatatatttcaatttctatgtttaaaacattgaaaaaaaaaaaccccctagttttcaaattaaaattatgtaaatatattattgtgaaggcatttccaatgattatgaatattgacctggtataagtctgcatatgtgattattggatgtttggacttcacttgctctgtaaataaacacaacatttaatcattaattattttttgttactatatatttatatataattaaagtcattactcaccacaaagatcaactgcaaatttcaaaccagtgtttgctttatgatttaactcttcaggtagccttatagagccattaggacctccactctttgttttagcatcatatgttccagcatcatgccacctgtattatattatattatattaattatatttataaaatgttaattaatatatttttttctaaattttgacatgtactatcgtgctttttaatttttcagaatatttgttcaattctgctcaattttattaacgagcatttgatgtaaataaaagtttaaaaaatatgatttgatacatgttaaaacataatttgatacaaattcaaccaagaattaacttgtttgaaacatgtttatttttttagaattattcaatgagggattataagatattctaaataacgatgtacacttaacaaaataaagcaacttaaattatgaatatgaatttgtaaagtgtgataaaaaaaaaattacttacgccaaacgaagcatgataggagcacaatttttggccgagataagggctcgaaggtctcgtcgtgctttctcaatttcgttagcatattctttgttgttacttgatgaactcataattaacaaaacaacaaacacacaccttttgaagccctttaatttacccccaaattatgttaacaactacactttgatgaacacaattaattaagat

SEQ ID NO: 22050 - DNA, 3667 bp, Cannabis sativa
gatggatttataaagctcgaagaagcagtcaggcaggtggacaatgttggccaaagtatagacgacttaagtcacacaccctccacgactatagccaatacatttgtgcagcccaacctgaccctccaacctcaaactaacaataacaacaataatggtggtaagaggtctaataatgggtataaccaaagtaacggaaagaaggggaagtcgaccgtcgatcaacaaaaaccctaagagaaggccccacacgttactgctttcaccatcctcacaaacactagggaaagtattttcatggcaacccaatcaacagttccctacaaaagaccccctccaattaaaaaaaaatatcagtaagagggataccaccaaattctaccaattttaccaagattttggccatgatactaatgaatgtaataacttgaaggaggaaagtgaattcttcatcaaaagaaataatcgaaacctatgtcgatatataaaagctgactaagaccaaaagaccgcccaacaagatattaatcaaacttacctgatgcccccaccaatgaatgggcatttgcaagtggttattgagggcccacgcattactagagattcgagcaaagccagagagaggtatgcccaaactatccagtgtgaaaaaaaagatgaaaaaacattaatcgtggaggaaccaaagccaaaatagtcacgcagggatgaaatagttgtatcatttagtgaagaagacattgctcatgttatctatcctcataacgaccccttggtcgttgaagtaaaaattacaaacatgacaatggcttgatccatgattgagaatggagcctccttaaacattcttttttaaataacaaatgtaaaacaaccaacaaattcataacccaaaaatattatttatttataccaataaatactaaaaaaaatttctcataagtaggtctaatttctacttttgtaaacgtgagaagtgataaacagtacataagcacaaagttcattcccactgcaatcccatttcagtaacaacaatcaataacaacgtacctgaaaatcttaatttcacaatacaaatcaaacaatcacatgaacaccctttacactacatatatatagtcagtaaagtaaaccatcttatttactaacactaacaaaatacaataagaaaaagaaaaagacaccataacccaatactcaatatcaagacaaacaggaaagacattaatcttggtagccaaaaatatgtcaattcgtaggttgtgtttttttcttgcttggcttactcaagggaagtgaaatctgaatgaacccaaacttctttctctgagttaatagttgttgcttctgatgaacctcacgatcattatttacctctttctcagctttaggagaaaatctcaaatcatttcttaaggcttgaagcatttcgctcaaagccactttgtgagtttgatcagagtgtccatggccatggccactctcatgatgatgatgatgaggttcttttcttgcaacataatcttcagacacgttttgtttttttctaagcacatctcgcattgagattgtgggcttcaaaagaggctttggacaatgatgatgattatcaattaaaccttccctgtgaacatcatttagaggggaacccttgtgatgatcaggagggtggaagatgtttattcttggcgaaaaaggactgtaagcgccagcagcagccaccggcctcttcctattatgatcaggagcagtccatctatggaaagcctcttctgcagcgttttgcttcatgttggcaacttctactctgctcaaagcctcttccaaggcttgtttgctgtacttgatttcgtcggttgcttcctttaacttcctcagtatagccagcttagaagtatgagcttcatcaatatgaagcatggcatcagccagtttcttctttgaccaatccacagcttcatgaggcttacagtagagaggagattgaacttggaagttgaaactcatcttgtgatcaggctcagaaaagagaaactgaggcgggttttcgctgttagtcaatgctttgatctcggcgaaagcaacagcttcagctgcctttgctgcttctctcatctttttagctgcaaccaacctcatttcagcagtcataattgagtactgttcattacttggcattgttcttggaacttctgatttagcaggcacatccatttttatgaagcactgatcatctcttgaatcaaatttcgagttctcgaaaaccctattagtttctccatcatccattactgccatttgtggcttgacccttgagttttccacctcgtcctcctgtgacaacacccctgcaaacttggtcgttagcttctctcgggttttttcaattatctctttctcttttctcattttcttatttaaagtttcaacagagttttgaatcactccaagatcatttatagttttaccaaggttgagttttgcacgcttcaactccataaggatcaaatctgaagaagttggacaaggacttgaatttcccattatttgatgatcatgcttgttattaactacatttccttggttcttgttgttcatttctttgatctgttcatctgaattcttgtctgactgaactgccagacatttcagagcttcttgctggagttgtcgttttaattcttccacaatcctttttgttgtcgttagttcttcaaggacatcaagtgtttcaagttctttgactattagatccttctccagctctgctgcttgttcttccactttcttcaagtcaaattcttcgttatcattctgcttataacagttagttacactataaattattcattttataaagtaaaaaaggaaaaaaagaaaatcatattccattgttcttgtgatagatagtacattagacaacatctaaagaaagctacatatgtggaatcaaaataataaacagaaaaatcttattcagtacaagaaaatattaaaattgtaaaaatgaagacaaaatttgattgccttaataatagtacaggcaaaattatgctaagctagaagggatatcaccaataaactaaagaaaatgtaatttttaagaaaaaaaaataaataaagataaagtaaaagaagaataaggcacgcattgattatgtaaaaacaaggaggaaaaaaactttaattatacaaataattatggccaaagcaggctaataatgaagatttttttttttggtaatttcactgtctttgggttctaaatgtgtgatctttaatcattaagtttaaagaacaactaaatccgccaaaatgttctacaaactaacattataaaacaaaaaggactttattcaaaatgaagaagaaatgtcctcaattcctgagttagaaatacaatttggaacagcataaaaaatatatatactttctcaataaactcttaacacaagcaaaaatcacagtttatggttatgaataagatatcaaaactacttttccacaaaagatacaaggaaatctcagtaagggtataaatttgagtatgtgtacaaaaagggcttaactgattcacaaagttcaattacttgtagtttactagtttagaaaatgtctcagaatttaataaagaaaatggctgaattgcacatcaactgaagaa

SEQ ID NO: 22051 - DNA, 2968 bp, Cannabis sativa
tcttatatgtaccacatttcgaactaatatactaattagataaacacattttagtttttttctaaaatagataaccattaaaacaccattaatcgattattattaatatctgggtgattgtcttaaatggttccaaattgaggtttcatagtttttccaaacattttttccatgaccaaatggtcattaatgataataataaatgcacattggtcaaaatacaagtttgaatttatattattcaaactattcaaccattaaaaccttaaaattattattatttatttatttgaagatccaaaactgaaaactattcaattttctctcaacttttcattttcccaggaaacaaacaccaaaagcaaagcaaacccagaacaaacaaaaactatcatagaaagaaaaaggagcaaactttctctcttcagacgaattttccgggaaaatgaaggaaacccagatgagtaatttcgtggaaaagacgaagatgagagagaaagattgtgtctttgactttaagccattgagaaagagaaaacccattttttgtattgggctcagctcggcccattaaccaaattaaatgggccgtgaagcccgtttctatcaaaagactccatttttaaggaaagggtttaagactcgtatataaagacagtagctttcttctccaaactaagctttgactggttctctctttctctctctctccttttccctccattgaagaagcttggtaagatcatttctctccttcctttccattttttgttttaaatgtttggaatgtaaatgaatatctatatatctatataggttttggttgtttgtttgtgggaatggctttaagcctttaaccctaacttcttcaagtttgttgttcttgattttctttcactttctcagccaccaaacaacgtagcattggaaatgacctgtgtgtttgataacttctttactgtaatttttgtagctttgtgttaatatggatattgataatgaagttagcaagatgaatataaaatcaactgaggatactggtgttgatacttcaattccaatggactcccaagacgattctagtaatcaggtttgctccttttatgtgttttttgagtttgaagctaaaccccattattgaacttgttcaaaattgactagatttttttgtgtttggagagtgtcatatgactgatttggggtttcatttattgtttggtatgaaggtaaaaggtaaagaaaaggaagaacttagtgactcaatggggaaactaaacattgatgagggttcatcatcttctctgggaggagcttcttcaagtacctttaagaaaaaaccagtcatcattattgttgttgggatggcaggtaagaatacaatttggttggtgtattgatttataaatcatagaatcaataagaattttgccccttgaactttgtcctctcgaattattagcaatgcgaagtattgttcctcaactttgaaaacagaagtaatttgtaggactttggttaagtagctagcaattttacctcctggaatatgaccactgccacattatgcgtccgatttggcaatgctaaaagttcagagggcaaaatatgatagtggtcatagttcggttggtgagtttgctaattatttattgaaggaaaatatttaacctcagtaatagttcaacaagcatgatattttctcggccaaagatcaaggggcaacatacctattttttatgaatgaagtgaagtgaagtgaagggaataaataactgaaatcttatgagtttgaatttttgattagggagtggaaaaacaaccttccttaatcggttggtctaccacacacatgtatctaactataggggttatgttattaacctcgaccctgctgtgatgacactcccatttggtgcaaacattgatattagagataccgttcgatacaaggaagtcatgaagcaatttaatcttggacctaatggtggaattcttacttcacttaatttgtttgctactaagtttgatgaggtaaagcacacttagttgaatttctgctctaaaccttttttcggattctactttgcttgggattttaactcttatgatgaactttttggctgtattttaggtggtttcggttattgagagacgggctgatgagctcgattatgtacttgttgatactcctggtcagattgagatatttacttggtctgcttctggtgcaattatcaccgaagcttttgcttctacatttcctactgtggtcacttatgtagttgacacgccccgttcgtctagcccagtaacttttatgagtaatatgctttatgcctgtagtatactttacaagacacggttacctcttgtgctcgcgtttaacaagaccgatgtggctcaacatcaattcgctttagaggtgcatttgatcgatcacttagttatgttaataaatatgatatcataatctgcataactgataaaataaattgtttttcatgcagtggatggaagatttcgaagcatttcaagctgcgataaatgcagacgactcttactcctcgactttaacccaaagcctctcccttgtactggacgagttttataagaacttacgttctgttggtgtatctgcggtttctggtgctggaatggatgacttctttaaggcaatcgaagcaagttctgaagagtatatggaaacttataagtactccctcgaaccctttcactcgttctaatttgacatggctaccgagattatcaaacaattgatttgaattgttatgttgttgtttttatagggctgatcttgacaagagacgtgcagagaagcaacggttggaggaagagcgaagaaaggagaatatggataaactgaggaaagatatggagaaatcgaacggtgaaactgttgttttaagcaccggtttgaagaacaaagaagagaacagcatcagtaaag

SEQ ID NO: 22052 - DNA, 3196 bp, Cannabis sativa
  modified_base (45)..(55): a, c, t, g, unknown or other
atttattttattatagttaaataaaaagtgatccatgaatttctnnnnnnnnnnnttatttttaatataaataaaaactcatcactcatgaatttttcataaaacaagaattctattatataggcacattttatatagaatagatattataacaacttcagtttaaacccaatgaaagatagtcaatggtcaaccagagagctgctccaatcaatacctacaccatgtatgtattactttcattttcagtggttctccaaagaccaattgttgttcttttattatttgaccttgtgttagtacatacttcatcaatttctctttccaatcataattaatgattattcctctacaattaatctataaaagcagagactgtgccttaacattctccaaagaaaatattgaagatagctctagtttcacttgtataagaagttgtttgctagctatagctatctccatccagtcatctctttcgcagctggtataattaattaacaactatctatgataattttcatgaatcatcatctttcttgtttttgttcccactctactaaagataaataaaatttttattacaacatcatcattattatgtataatattattattagtttgatggtaattaaatttagtatacatgcaaaatctaactagtacttattgtgtacgtgcgtgtgggcggaggtgaatgcataaatatccaatatatatagtatatagaattatcatttttattttattttattttattttttcaataaaaaatcattgatgtgattgataacttgtagattacatgccctacatgaaaagccgaacagttctattaattatacatcttattatttattgaaatatagtatctaagattgtcctatttttggctttccttttatcaatttcttatggtgctatggcccttatattgagtcttttgagagaatattagaaagacccacaagggagtgtgtaaagggatgtttaatgattggttaggcacgtaaagttgtaaacccaaattggtacgattttggattaattagctagcaaggcttattctcttcaccaaatccttttgtctcaaccttattaattaccttcaacaccatttcagctgccaaataagtctcgagagaaagggctctctagctaactagtacttgtactgtgtacgtgcgttggtttgcaggtgcattaataattattaatttataattaatcatgagtggaagagttggtgatgaattccaaacgaaggaaatagaagcatgtgaccattcagggaggctgccatatattcacaaggtgggaaaacctcccaagcaaaacctgctcaaggaaatcaccaatgttgttaaggagacattcttttcagatgaccctttgcgttctttcaaagacaaaccaaagtcaaaacagttgatgctctgtgtccaagcagttttccctatctttgattggggtagggactatagtcttgccaaatttaaaggagatctcatttctggcctcacccttgccagccttgttattcctcaggtactacacttacaaacacacttttatatatatatatattctacatacaagcttcttctaatagttattttttgttatatactaggatattggatatgcaaagcttgctaatctgcctcctcaaaatggattatgtgagttttgtaattttgtcactggctagttagaagagctagctttgattgaatttctttttccatatatatactagttacgtacgtgtgtacaattaattgtcaatctcaacatataaatatatatatgcagatagtagctttgttccacctcttgtctatgctttcatgggaagctcaagagacatagccatagggccagtggctgtagtgtctcttttgcttggagatcttcttcaggctgagattgatcctaaagatgccattccctatagacgtctcgcttttacagctacatttttcgccggactcactcaattggcacttggttttttcaggttaattatagttttcaaatatattcataattagtagcaaatactttttcttcttttcttgattttattggctgccttggatcctgctgccatttcagattgggcttcttgattgagtttctatctcatgctgccattgttgggttcatgggaggagctgctataacgatttcacttcagcagctcaaaggtttgcttggtatacaaaagaaattcacaaagaagactgatattgtctctgttatgcgctcagtcttcaactcagcccaccatggggtacaaatgaaaatatataactaattttaatttactattttgtcctactgctactattttagctttagatatgaattataacaatgttcaatcaatttatatttccttctacagtggaactggcaaactatagtaatagcggtcactttcttggcttttctcctggccgccaaacacatagtaagagcaatccaattccacatgtctcttcaaatttttgttgcgtatactttaaatattaaatactcattctttttaattaatttttttctaccttgtttggattggacgaacaggggaaaagaaacaagaagtatttttgggtgccggcagttgctcctatgatctctgttgttgtgtccactttttgtgtttacataactcgtgctgataaagatggcgttcagatagtatgttggatcttgtacaagtgttaccaataatatgttttagtgatttaataattagcctcatgagttaagctgcaatgaatattaattgtgctatattcaggtgaaccatattgaaaagggcataaatccaatctcagctaatgatctattcctctctggagaatatgttggtaaagcctttaggataggcgttgtggctggtatcatagcgctaacagtaagtactaattaatgcttgataaaattttatattggaaagccaaatggtttctcctatgaacatataatataacaaaattaattaactatttataaggccattttgttttcttaatccatatatcaggaagcaatagcaattggaagaacatttgcagccatgaaggactatcagattgatggcaacaaagaaatggtggcattaggaacgatgaacattgttggttctttgacctcttgttatgtaactacaggtactgatcagatc

SEQ ID NO: 22053 - DNA, 2036 bp, Cannabis sativa
  modified_base (200)..(215): a, c, t, g, unknown or other
gacaaaaatcctaattaaccataattatatgtaatttactcgagacgagagagtgttatgaccaacatgcttacatgatcgagcagttaattttaaaatattgagattgaaagttcgtgtgtaagggccttattcattccttcagttatgctactactatttatatatgtaatatatatatattagagagagagagagannnnnnnnnnnnnnnngagagagagagagagatgagactttgtttatggcacagcacatgcatgtgaccagctagtgtccacatcaaaataatattattgtcaatatatatgtattgtagagatatggtgctgattttgttattgtgacctaaagctagcctacctctctaagtttcaagttccttttcaactaggaaaattagagactatatatattatatatttatcacatgactcatgttcataaagctatcattttattatgctccagcccaattgcctcccgcattcaatctttttgaacaaatcaaaaatatataatagacttttatataaagtgtatagagtaaatttatcggattattaacaagcctttatttaataaagtatgagtgtatcgtatcgaaaatattactttataattaataaaaagaataaatatatatgtggaatgttgtataaaataagttgcaaaagttaacagataattcaatatctaaaatgctgatcgaataaaagaaaaatgtgtgtgaagcttcgtttcctctctccatgaggcggaggaaaaagttcgaaaaattcaggtcatcgcctatgttgcgaatgctaaaaatgttcgggttcgatccatggtggtgtagaagacttgaaccaatatgaagttttgcaagatacctaatctgatttaggtaacgatttggggcctatccaggctgagattggtaatgaattgggaatcaatccagggtcccaatagtgtctgctcagcgagcgggaacttgggcgaaagagctagagagagtggattaccataattcaatgaaagatgtttggagtaaattcaaagctaattaagtttgtgctcatactactaaacttgaattactgaatctttgaaacatgggatcaactcattgctaaaatttatgctgatgaaattgttacggaaacttttttttttgggaaatttttgtgatatgggttgttttattaggagttaattcctcattttcgagtgttcgaaggtttcattaaaagggtatggagaaatctaggagtggatcgtatagtacgaatgcactatggtttcactcttgtgagtttttgtgagatagctactagagatttggtcttgaaaattgaggtaatcaattttgattaaaaaaatccaatggtaattagaccctggacgagtgatcttgattcgattcatatggtgcattcagttttagtttgggttcgaataaagggtttggtttacagtactcgggtaagaatggcctaagtgctcttgtgagtacgttaggaaagcatattatgattgataaggtaactcggggcatcaatcatgttatatatcattgaacttagttttgaatataaaatacaatgatgataaccatttaactattctatgatcataggtgaatgtgatatctaggattagactaaatagttagagctcgagacttgaaagcttaggattgtctttttggacaaagtttaacaacttgggggagagttaaggactcaacttgattattggacttgattttattgtgatgaatagcatctgacatatacatgttctaattttattgatttataaaatgtttgaaaaaataaaaatttaatctgcatatttttctagactattctagaattattgagtgccaaatatatttttgtacaattatctatgcatgttatgagttttaagttttatcaaaaaattacagtcgttatgcgctgctgaattttctaaaataaagggaatatgtacttttgttatttttgatacttgtatttgcttttactggtgagagccatatttat

SEQ ID NO: 22054 - DNA, 3575 bp, Cannabis sativa
attcgcacaaaatcgattgatgaaataattggtattacgccactagagctgtcggaggaagaggatgatgtactcgtagggagaaggagctgtaactcacaggaagacttgtttcaacctcctctgtctcctaaatcctctctgaaggaaattaaacgcattgatgatgcgaggaatgatctgttgcattttattcatgcgaataatcaatgtaacagtgatttatctcgaggtaagatctcaaatccccctattttgcgatctggttcaataattaggaatctggaacaatcgttgaatcaatcagagaaggtaagcaaagtcaagattactttagatgacatagaagatgaggtgaattttctgcaaccatctattgtatgttatgtcttgggatctaatccccctctgcatatattagaaggttttgctaaacgtctgtggaaagacaaggtggataaggtgcgaatgctcacctatggagtgttcatcattcggttcacttccatggaattcagggatcaagtgctcaacggagggtacatttttttcaatcgaatgccaatgattatgaagccctgggatgcagatacaaacttcagaaaggaggatgtcaagattattcccatatggattcagcttgaaggacttgagctcaaatactggggacagaagtctctctttaaaatagtggggcaaattggcaaacctgtgatagtagactcggtcactcgggaaagggatcgtttgaattaccctaggattatggttgaagtgctcatgaaccagaattttcccaatacgctggagtttgaagatgagtatggaagtaatacatacgtgggagtgaaatataaatggaaaccagacctatgtactaattgctctggaatggggcacttagctgcagaatgtaaaaagaggaatggttctaaacaagaacgggttatcaaagaagataaaaggaaggagaaaatcatggtagatgaagagggatttcaggcagtatcgaaaggaaagaaagtgcaagagcagaaatctgagataaaggcaccaagcacttcgaatggctttcaagtgctagcaggagtaatagatgataatggagatgctgatctacagggggctgatgttgtagcaatggacaacacaagagaggggtggggtccctctcttggttatggataagttccttgtttggaacgttcagggagccaacaaccagcaaaaacaacaacagattaagcagtttattcatactcaggatgctggttttgttgggcttctcgaaacaagggtaaaggttcacaaacttggaaccttgtaccttaatgtctttaatgggtggtgtttttcatcgaacatagcttcgcaccaaggggggagaattgtcatagcttggaacctgaaccgattcattgttgatattatcaagtgcacaagccaatttatgcacctgagaatctcaacaatggatggtacatataacagtctgttaactgttgtttatggtttcaatgacaagaaagatagaatagaaatgtggaaggatttaatgcagctaaaaacagatgaaagctagatactaatgggagatttcaatgccatcacaactaaagatgagagagtgggacacagagtaaaatgccatgaggaatctgagttcattgaatgcatacaaacctaccagttagaagacattaaagctactggtagtttctttacttggacaaacaagcaacaaggtcaggaccgtattttctcaaagattgatagagtcatggctaaccaaagatggttagatgcttatccgaatgctgaagctttatttttgaaggagggaacctatgatcatgccccagggattctgtctttattccccaagtggaagtgtggaaaaaaaccattcaaatacttcaagatgtggaaatcacaccctgaatatgatggcaaagttactgcagtttggaaacagcaaataaatggcaccagcatgtatcaaatggtgcaaaagttgaaggctttgaagaatgtattttgagagattaatcagaaaggtttttctgatttacaagcagttttgactcaagctaaacagctccttgatgaagctcagagcaaactacatgcagatccactaaatgaagagttgcaatcacaagaacatgatgctaggaactcgtttatcttagcacaacaacattattactcttttctacagcagaaagctaaggttagctggcttaaagatggagacagcaacacagctttattccacgcaagtatcaagcaaaggaacaggcagaatcaagtcttctcaatagagaatgaatctggggtgagggtttttaaacctgaacaggttacggaggcattcatctcatattacaagtctctcctgggatcaaaaatggcaagtaggaagacagtttctaacaagattctgaacagaggcccaaaggttactcccgaacaagctaaattgcttactagtcccttcacaaaggaggatgtcaagaaagttgtttttgagatctcagggaacaaagccccaggtccagatggtttctccagttttttcttccaagataattgggagctagtaggagaggatgtgtacagggcagttacttaaattcttacttctggtaagattctcaaggagataaacaaaaaaattctcacaatggtaccaaaagtgaagtgtccaaacactgtcaaagattttaggccaatagcttgttgcaatgttatttataagattgcaacaaagctattgttctctagaatcaaatggattctccctgatctgatctcaaaatctcaaggagggttcattcaaggcaggtttattgggcacaacattatgatctgtcgggatctagtgaggcattatgggaggaaatcaaacaaggcaaattgcatgatcaaacttgaccttcagaaagcttatgatacagttgaatgggagtttatagaggagatgctcattggacttcagtttccaactctcttcattcaaacagtaatgaattgtgtaagatcacccagattctccatcatgtttaatggttcgattcatggtttctttgaggcaaaaaggggcttaagacagggagatcctatgtctcctctgctgtttgttcttggcatggaatacctatcccgaatcttgcaagaagttggagacaaaaaggattttatctttcatgagaggtgctcagacttgaagattaatcatttggcctttgcaaatgatgtaatgcttttttgcaatggagattttaaaagtatctactatatgctttaggggctgaaattattctcattgacatctggtttacaaccaaatcctcaaaaatcagcaatatactgcagcaatatgccacaggaggaggttagtagagccgtttagcatctggttttttactaaaagatatgccttttacttacttaggcgttccaatttaagctaaaagaatttctggaaatgaatgcattgctttggctgaaaaaatgactgcacgaataagaacctggagctttaggatcctttcctttgcagctcgagttgt

SEQ ID NO: 22055 - DNA, 4059 bp, Cannabis sativa
tttttttaaaagttaggttgtactacttttatcttttagctgtagtttatccataaatttatcaataagttgttttttaattttttaccaaatatctttataacacaattttttcaaaaagcagcttttaaccttttcaaaagttgtgcataacgggccctaagcaaattacattgtaattgagaggggttatccatgtctccggatagctagcacgtggaccattacaaaggcccatcaaggataccaaacccattcactggccccatgaggattaacttacccaatctatcaatcatgaatgggcaaacgggagagatagttcagttttcaggatcgcttcccagtaacgaatttgaataccaagattcagattattgatatacacttagaagataaaagagcatgaactcttggaggagataccccagggggtcatctgggaatagaatatgaaaggaggtctgagataagttggtgtcccaaaagccgccccatgtggcacttctctaacatgatttcaagaaatcaggtgtggcctgtcccctgtgttaggttttggaaacgcgaatagcaaaaaggaaatttccttttggagcagatacatctgacattccttcttcccaataatggctcatgcctcagttgtcacagtcaacagtacgaccgtgtacgaaaggaagcttaattcaacttgcgtctcacctacccgacctaatagctcaaagtattttgtattttaccccaccagtaggattttacacaaatataaccctaatgactctgaatcagtccatcccatcatttatgaaatatgcctataactatggaataaaccatccatgcgaagggttgggattcctaacgttcaaaaaccagaatatacattgtaatttcataaacaagagctcagttagagtgactcgtgaactaaggctcgttagcgtgccaacaatgtaaaaatcttgtcttactttctctctaaccatactttctttagcttcatcttcattatattcagtttttgcaaaactcgataaaaattttggtactttcattgcgagttggagaaagtcatcaccatttatgtcatatacaaagatggtagctacaacaaacatgaccagataggtagaataccaaattggtcaaaaaaacactaaaaacctcattgttggcattgtggattcccctccactgattgatgctcaagcggccacctaggagaggggaagctctgacagcgtgcgaagatcctccccaaaatgataactattatctgtgtttctggcaaggggcacgtggattcctggtcagcagcaaaatcccatcagtgggtcctaaagaagataatttgggccatgcccaagttctacaagaccttccaagaacgcaccttagctctatgaccatatgagcttctgtatccagaagcaactctagtactgtgatgtcagagggccagacaatgtgttcttggaagacaagttcagtttccctttttattcaagcgcatagtataacaaagtaaatgctcctcaaatctcgacaaaagatcatatcaatctagaaggggaaactacataaaatagaaatcaagaaattaatttataattaattgcctaatattatagtacacagttttgaaaaattcaatcgtatccaatgtgtctagttaacagatctactccttcgtgggctgggcttcatgagaacaatccaaattacgtaatttcatgtaaactccccattagatggaaaaataaaaacatattataattctctgaacactataaatacccaacgaatccttcaaattaatgattgaattctcttgcaatatttacccaaacagaaagagagaacttgttgtcattgtattcccaaaggcttttccagcttaagatacataataatatcgactcgtaaactaaggctcgttaacgccccaaccatgtaaaaactatgtgtgttgttcttatttctttttctaaattatttctttcttcatttctaatttattataattggttttccgaaaatctctgtaaatattttggtgctttcattaagagcgaaaggaagcagtcacaccatctaaagattacgctcattaatcatggtactcacccgaaacaagtctgatctttactttactgatcccaatgccaaggcaggagatacagaagatcagaatgaagcaactagccgtcacaaggattaacttggcaaagatacagatctagacgctcctatattcgaagatgatgatttagaggagaatagttctaatgatgctgaagatgatcctcaagatacctcgaaggatgatccttaggatgcaccgaaggatgatcactaagacaagaatattgacgataatgctaggggaaaggataaattgacgagtcatatcccatggttattatggccaaatactccaattaactgaaagcgggttatctcgataggatcaattcaatgagatacggctcaggaatatgacgagaatggaagccatgatgatagccctgaccaaaggaatccctaatgtgcaaacaaatccaacaacaaatgatctcggaagagttgatcttaaagatcatggaaactcaaatcctcgcaaggataaagggaaagggataataggtgaaactttaaagaagacaccttcgactaaacaacaaaagaagtctaaagttattgaccaaccttaacagaaaaagaaaggaaatcatgctttaggccagggcgactagactaattctagaggtagagtcgcacaaaaagataagactgttgtcagagtcaagaagtctgcttcccgaaaggacaagcatcgtcacaataactctaatagtgaaagcaatgatgtcaatgaggtatgtctggtttcagatggaaacagtgtaagtctttctgcaaatgatcttgaaagaagattaaatgaaaacaaagagaaatttagacggaaaaagccaaactccatagagatgatttgagatatcacatcaatgatcgctttcacagaagggattctacaagtgataaaactcaacacttggaatacaaattcgaagagttaatgaagctcatggagaagatatctaaaaagaaaaatggaactgtgtttgatttagaagaagacacaaaaccaagtgtgaaaataattatagatgcaccactgttggagtgcttcaaaatgccccaaaaggaattgtatgaaggtaggacggaccccatggaccatttttccaagtacaaccacacgatgcaaatttcaaatgctagtgatgatgcaaagtgtctttacttttcactgactctgacaaaatctacgatagaccagtggaaaaggttatctctgagatcgatccacaactggagggacctacaagcaatgttcagaaagaaatttgttgcagcaaaggcctttgacctggaagctagttccctgacaattgtcaaatagcaataagaagaaagcctgaagaaatacatccaacgtatgatggatgttacagctaaaataaaggttattgatgatataaagatggtggctttgacatgaggattaaccataggatctttgctatggggagaactccaacgtaagagcgtagaaacattgactgattttttgtgaagagcccaaggattcatcaatctagaggaagcttacgcttaagcttactgagtacttctagcaccttccaccaacataacaacttcccaagcttcgtagatgactactccatcaattttccctcaagcaactacctttacgactcctaccgtttacggaccaagtgcttctacacatgctagtttttccagatttggagcagtacaaaccagatatagtgtcattcccaaataaacgaaccaaatagcagatgctgcagagtccaatgtaatttaatcacagagcaaaataagttccaagggcccaagtcaaaatgattctacgaagaaaggaaagacttgagagtcaagatactctgagtgcacaagccttgttgatacttgagagaatgtctataaggtaacttgtaacat

SEQ ID NO: 22056 - DNA, 2502 bp, Cannabis sativa
aacttttagcactacctaattttgcaccttaaaatatacggcttgttaaaaattctccttaaaatataatagttacataattatgccccttctgttaggttttgtttcttttaccgtcaaaaattcatatttggtgcttttaggtgagacatgtgaagagatgtgacaagtgttaaatttttttaaagtgcctagggcttcgcccaatgaattgatccaaatgtaaagtccatggttgtttgccatatggagaatagacttgatcgaacaactctcaaagggaaaatgtggagtgcaatacgcagttgctgctattgactattttacaaagtggacggaagccgaaccactagccattataactccaagaaagttttagactttgttcagaagaacattatatgtaggtacagactttcttaaaaaattgtgtcaaacaatggaaaaaaattgacagccaaacgttcactaatttctgcacaacacgtggaatttcgaaaagcttctcagcagctgcacacccctagaaaaacggtcaggttgaagcagtaaacaagatacttaaggacattctaaaaaaacatcttgaagaagctaagggtaaatggcctgaggaagtacccaaagtactatagtcgtataaaaccactgagcagacgactaccaggaaaactccttttgctttagcctatggatgtgaagcaatattgcctgtagaactggagcctccatcccacaaaagaccaggtaaaagtgaagcaaataccaggagatcctctgaaggactacatcaatcatttcatgactgaggtaacaaaggtgaaggggcttaatgaagaagaaaggttattcacaatgttatgaggtattgaacctaaagttgaattgtgaaaagacatcacgagactcactgtaggttcaattagagaaattctggactgggcggatggatttatgaagctcgaagaagcaatcaggagactagtgtacacgatcagtcaaggaaaagtagacccaagtcacacacccccttggatgttgccaatacatccgttcagtccatccagaccttccaacctcaaactagcaacaacaatggaaatggttgtaaaagatcaaataatgggaataaccaaaaaaaaaaaaaacaaaaagaaagagaagttaaataataacgccaaaaaataaaaccctcgagaaaaagcatcaaagttcccttccttcattgtactcattgacgcttgggaaaccatttttatggcaacccagtgggttatgccgtagaagagaccccctctaatcaagaaagatatgagcaagagggataccaccaaatactaccaatttcacatagatttcaaccatgataccaatgagtgtaacaacgtgaaggaggaaatcaaattcctcattaggaaaaatacgttggtatattaagactggccaaaccaataagccacccaacaagacaataatcagaattaccttatgcccccaccagtagacaggcacttgcaagttattattaggggcccatacattacttgatatttgagcaatgccagagaaaggtatgcctagacaatccagtataaacaaaaagatgaacatgtattggctgtggaagaaagaaagctaaaacaaccacacacagaggaaactgtcgtcttatttaatgagaaaggtgtcgatcatgttatctatcctcagaatgatcctctagtcattgaagtgcaaatcaccaatatgacagtggctcaatccatgattaataatgcgacttccttcaacattcttttcaacatgacatatgaaaaaatgggacttcttcttatggacttagtcctttgcgcacagctagtgtacgagttttctagacagaatattactttgttaggacacttggtatcaaagtctcacgaaactgaatggaaggaactgttagcctaaagcagtccgggtacattaagaaaattattccaaagttcaacatggaagatgcaaagaggacatccattatgttagggggatattttattttatcaacggtaaaatgtcctaaccacgaaagagaaagaagaaatgaagggtgtaccttatgcagtggttctaggatgtttgatgtacatgatggtgagcacaagactagacatagcttacgctttaagtaatcctaagacggttcatgtccaatccggacatggaacattggaaaatccttaaatggttattgagatatttgaagagcacatgggattatggtctgacctatgagaaaggaaaagaagaattggagctggaagagttcgtggatgcagactacgcctcaaatagagatactagaaagtcaactacttcctatgcttttttgacaaacgggaactgtataagttggaaagcctagtttacagtctatagttgctctttcaaccacagaagcataatttatggcgactacggaagctttcaaggaagcaatatagcttcgcgaaatactatatg

SEQ ID NO: 22057 - DNA, 4894 bp, Cannabis sativa
  modified_base (4859)..(4869): a, c, t, g, unknown or other
aaaaaatactctccatcttgccaccttttcgttcggtcatctccatatatccactatttcttttctccctcctccctaccatagtataatgtgtgaatattgtgctttttaagtatatgtatttatagtgacatattactagctcatcattctttcacttttttgaggcaatttatatattaactttgatgatgaggaccataactatacaatccgtgcgcgtcggtgtggatacatatatgcattatacccttctgtttttcttttcttttttttttttttttttctgtgctgatatctcatttttattcatatatatatataattatttatgtatatgttcgtcttcaaaagtggtcagcagactgcaggcagatcgaagatttattattaatttataataaacttttggctttgcttattagggcttggatatctaaagatcaaaaagtcttctacggccaagtagtactgctctctatttttaccatacacgctttattgtcattccctgcaactataaattaattatatatgtatatgtatatatatacatatatatatataaattactctatagttataaaacttgtatctagaagtgcatgtcttatgtgtggatataatcatataaatatatattacatgaacatgagagtgaggcctatatatttatcgtatatatattcatgtatatacatataaacaaacttgtacctttactaagtacatatattattatcatataataccttttgcgatttttctgtaatgtatttttcatgcaaaatataaaattaatataatggcactgttacagttgacacagtttgattttgatgaaacaaggatataattattctcaataattgaatcaacacaaacataaattcggctgttccttgaaatctgttataggttctactagctatatatgttataagtgattatttacataatattatacacttaatttataattaaaaattggaagtattcccctaaatatatatttatagatagttaataatctgcttgtttccgaaatacattatgcatatttatattattatattattacaatggcgtactatagtttggagtagtagtgggtatatatgatcaaaatatattataatgatgattaattataggatcggagatttatattaattatacaatggtttactattatattatatatataaatatatatggtcacacaaatatatacaagaaaaagacattgcttgaaaatttcaaggagagaatctaactaaaggtttgcttttgtttatctcgaaatcttttttcattttatgggaaaagcttaataaatcagcctaagacaaccagagaactttttcaaaaataagattctttctaaactagctataaccaatcttattcgttattattttcctttctatatatatatatacatatatatatttactccaatgaaagggatcataggattggtttgatgattggggtgtgatatatacaaccaaacaaacggatcatacaaataaaaaaggaacaataatgaacaaattataagacatataaatatatatacataaaaaaaattaagtttgatccccaaagttgatcgttttggtgaaatcggtgccaactttttatatatataatatatttatatatttatttatttataaatatatttcatataagatatattcgctttgtacaaagcaaagcaaaaggaaggggtagagaggaggggtagggagatttgctttgtgacaacaaattgtctatttcatgtaaggaaaagagatttctttggaaacctttagaccagattacaggatctattgtaacatcaatttctgcactcaactttttatttttatataccaatcaatttccatgcatggtctctggtattaatgtctcatcccacatttctacttttcctttttttttttttttttttctaaatatttaaatttttaggaagaagaagaatgaatgaatgattgttatttaaaaaaaaaaaaaaaaaaaaaactgattcggtttagttaataaaaaaaaatatcacacttatcaatgagtaatatttctaaataaatttaactataaatattaattttaaaaataataaattattaaatattaatttggtaaataataaaataaaattttaaattttaatgtttaatttaactatttaattatagaaagacatcaaaagatacttcctttaatattattttaaaaatatgtttatataaaaaatatttaatttaaattcaatttttttttttgacaaatagaataaccttaactcatatatagtaaaaaataaaaaaaaaatataattaaaataaaagtttaaacataaaaattttaattttattaatattatttatttataagtaatatttattaaaagtgcatatatatattaaaagtgcatatatatatatatatatatttatatatataagatatcgtacttaattttgggattaggaatgtggactaagttgtgatcaatgttatagtatcatggtccatggtcatgttgttatttatttatttatttattttaaatcggtcatgttgttatcttttccttttattatactttacatgtggctttcatatatgcaataagacaatataacaatattcaatatgatcacttaggttttggctcttagcttgcttgatctaataacccttatcacaaatgagcatacttattgttaattttgatggagccatgggaattgggtgaataaaaagtagagaatcttgtcattgcatatcccgctgtgttgtatttgagtgttttataaaactaggaaacaaattgcgcttcgcgtgcggttatattttgtttagagatcattaaatcataataataaattaaatttcaaattttagtatttttaatataatttcttttaataatatgaataataattcaataatattttttacatagaaaaacaaattgatattgtagaaaaattattatacaatttcttatcttaaaatgaaagttaaaaagaggtattttcaaaagttataattaaaaaaaaaataaaaattgaagaatattcatataaaatagaggtctaaaaagataattgataaatctacaaaaaaatcatgataaggatttcaaaattataattattatcatgaccgtatctcatttgttgttaccactatattcaagattgttgtcttcactatatctcacttgtagttgtcactacattaaaaactgatgtcattaccgtatctcacttgtagttgttactatcattgccattagctaggtttgccctcaacataaaataaatcaaataatgagtttactatagaagaaaagtattatgttactactttatgtctcaatcattatgagttaactactactatgcaatgagttaagaaaaaaataatagataaagatatttaaagtaattttaaaagaaaaatttaattaccaatattgttatatatactttttaaaactcaaaaaaattaaagtagagatgtactatcaattatctctaaatatatctttatacacacatacatcattaataaatataattaaagtggtaaatttacagctttagaaaaaatatgctacaattattttagtagattataaattatattaatatcatcaataagtttatcgactatgtataatattattaatcctagtcgacatggtcccaattttacgctttgatgtccactactgattctgcatagcacatacctataaatatttaagcaaacatagaaataaagtgttagcctcaagctcccctctaatatgtatattataaacacaaattaatacataatgacacttaattgtagatacaaaatcaataataaagtgattttttttttttaaaaaaaaaaacacttcagtgaaaaataattttctcatataaaaaaaatagaaatataaaaaataataagatttaaggatatgttaatatcacttggtctcaattttacgttttgatgtcaactattgatcattcataccaccagtcctatttataaggatttaagcaaactaaaaaaagagtgttagcctcaaggtcttgctctaatatgtatattataaatacaaatcaatttataatgaacttgttgccgcagagaacttgttcacatttggaaagccttatgtctaagtattggtggagttcgagtagtaggaagggtgtgagctggtttagttggaggaaactatgcaaacataagaactctggtgggatggattttcggagtctgcgtgattacaatctatctctgttgggtaagcaaggttggcggtggcttctgtaccaggactcccttgtgggtcggatatataaggctcgatattttcctaactgttcattcttggaggccgggttgggtggcaatccgagctttatatggcgcagtgtccttgagtcacaagcgctgctcagggacggtgcccgtaggagaataggaaccagttcatctactgcggtgcttaaaacaccttggcttttgtctgagaccaatccgtgtgtggtatctactcatccggcactggccaattgtaaagtgtcccaactcatgaagccagatagtagacaatgggacttggaacttattgacgacctgtttaattcccgtgatgttgagctcatcaaacaggtgcctttgagtgttaatcttgcgagtgatagttggtttaggaataaggatccaactggttttttcactgtcaaaagttcctataatcacttacaatcggtcaatggtagtttgcactcctccatggaggatgatgttgttggaattattttacnnnnnnnnnnnatttactaacaagtatgttatttaa

SEQ ID NO: 22058 - DNA, 2605 bp, Cannabis sativa
tttacatgacagcaggtgcgtgctgttcaattgcagttgcaatagggaatgaaaattctaagatgtggcaccagagacttggccacatgagtgagaaatagatgaaacttatgtattcgaagggaaaactcccagatctacgatcagttgagatagacatgtgcgaagaatgcatacttggaaagcagaggaaggtaagctttcagccaagtagtagaacccatatcaagaaattgatttttttatcaacaaaactgtttttttcaaaacccatatcagaccatctctaatgggagatgtagaagttgagctatatttggcacaaaaagtgattttgtgatatttttacatcaacttttactattgtactcctatgcataattgtaaatcttgatgcaaaattcaatatgttatttaatgctcacttaataatttattgaaaaatataaaataataatatataatggaaaggtaaatataaaatttaataataaaataataatataaatgagcatgttcactaaaatttaataataaaaaaatattacaaatggcataatgataaatataaaagcataacatttattgtgatgcaaattttgtatcatgctatattgtgatataaatttagatcactttttgttgtgtgacatatttgcgacataatttgacacactattagagtagactttaaacaaaatgaactatattttatatttacatcacttatttgtaattctattagagatgctctcagtacatattggtacattgttttagtttattttaggaatgtaataggaaggtgtctaatttatttttaattagtagtaattttttagtatcatattgcaataagttaatttctaactgagtaattttttctgttgttaatgtaatgagttgatgtataagtaatttttagttgttttcaaacttagttatttttgtattattttgaagttcattggtgaatgtctagtactcgtgttggttttttatagtttattttggatataatttgaagtgaattacttgttgcttttgtattattatattgttatttcttattaatataatttaggttaaatgatattgttgcctttattatttgttattttttgaattggtataataggagtttgatgtcttattactttgttttgcttttgtgttattattttgttgtttcgtagtttattctttatgaatacaatttgggtaagatgtcttaatgatttttgttgtttttttagggatacataccattcggacacgtgttttgcaaaaattatcaatgagacattttattttgttaaataacaaattagaacttatatttttttctaaaataatacacagagcttaattttcgccaatttttcttcttcgtataactagcctcaagccaagtcttaacacaaacaatcaaaaaatataagttttatttcgacaaaaaatcagttcgaggtattattttgtacaattataaaaaatacaaggtttgttattatttgataaaataaatggtctaattagtaatttttgcaaaattaatgttctaaaattatatgttcccttttttatttgttataatttagttgatgttatgttgtttttaaattacttttgtgttcttattcttacactctttttattgctgggtaaatatattttttattataaaaattgtatttttaaaaaaattgtaaaataaaaaaataaataaataaataagactataaatatatatataagaaaatatctaattatgaaaaatttaataaaattaacctacaatcatcatataatttttggcccactttggcactattctctttttttttttctcaaatcatcttttgggcaataaaacctaactctctcttcttctattttttctcttttgcacttttttattgtggtttctatggatgagcagtgttcacataattatcagcaaccacatctgaaatagagcatgcatcaaagacaaattgaaaataaaatgttaagtgtaccttttcattgatataattagttatttcatttatttaatataattagttgaaaagatataaaacagtattattaattaaaagaagaaacgtacctccataaaaaatgggaatatactggtgcttggtgaggaatccaatgatgatgtagtcaaattttgctcccactcaaccttacagagttgaatcaattttggtaacctttttagaaccaatttctgtagtttgagaaactcaatcttctggtgggtgccattttctcttctatcgaaaacaatgttctccatcatatcacaagactctacttttatttcttcaagctgttcaacaatatttgagactggaaatagacttttcagtgtgtgacattcaattacttgcaccgcctttaatttactgaatgtacctgctaccaattctccatcatacattttttgcaagtttgatagtcttgtgagtttcaacttcttcaagttttgaaaaacgggatgattgcactccatcaagtatctaacattagaagcatcatgtaactcaaagacctctagttcagggaaaccatcagtatatgatacataataatcaat

SEQ ID NO: 22059 - DNA, 2450 bp, Cannabis sativa
acaatctctaacaagtgcaccacaccccagaattttcaaatcaatattaacagcagcatcaacatttaatttaagtccttgattggtaggtggtgtccatgaaatggacctgtgaggtcgctgatctatcacagcaggattaacaatcctggaacagtgctaattaaacatttaaagtaaaaatttatttttggtaattatataattaattgtattaaattaattattttttttaaaaaaaatcacttattggtgaccgatgattatatagataggtcaaaagaaatgtaaccatggttacaataaaactgatatgcagtgttaagtcatatatattattgatgatgtattgatgttatcatgttatgtattgtaccatatattgttgttgtatatcaaattgctagctatgataatagggtaactcaaatatgcaatttattttcgtgctgagaaattttttaattaagtatttgatgatcaacaacattaaggagaagaaatgccataagtactaatcaattatttctacgcactatatatacatatgtttctactttctatattaatgtggctcgaaatataacttatatatgtttctatatacatgaattattaagtaatggtggtggaacagtacactacaggtttatttgtttgtttgttttttttcttaagaaatacattctttcttatgagtgctaaatctatcaaattattcagctgaaaagtttctccagaaaaaagatgtggtgtccaatctgacatcggaaacataaagaagaaattgaataaatataatgaaaagtagaagaagaaaagaaattaaaaactaatttacaaatccatatttctaacgaacatgtgcactcatttgagtttcagttggaacaatattaattaattcacaaaaccaaaagctagccccgtgtggatcaattatctccaaataatggatcaatttttttttcttcttcgtgctcatcaaataaataaatatcaataaaaacataaaattccgtacgaaaataatttcaccaccaatcccgaaccccaatcagcaaatgattagacaatacagagtactgtgcaccacaagactccaatatacaactgttcgagtcaatattgggccctagttcttctctaacaaaaaaaaaacaaaaaagagagtgagagaaatatatataaataaataaaaagtgaagcaaaacagcactagattttatttggttgtccttattattgtaatattatatcacatgaatgagactttgggagcaaagaaatggagttggttttattttaatttttctttcactttctagcctggttttctccactcatgtcttttatgtccttcagcttttgctttccgcgtgtacattttcagaaaatgacatgagatgcaaccaaattaattgggttttaaagcattttctatagttttgccagaggagaagagaatccttttttatcaatcagtctaattagtaattagtttactaaataatactaacccttacactgtgcccataacccggaaataatgacttaaagtatagcctgtttccattgaagtagtatataaagatgtatagttttagtttataaataatgcactttttcttaatttggtaatttttactatatgctgttattttgagagattccttttttattgattagtaagaaattaagatttatatagcatatttgtatacaaaatgaagaacacaccaacgttatgatgtgaagttttgattttattttacttttctatatttcatttctagacaaaactgcaggctctagatctttctcattgtcgttattatatatcttttcccggttttgttttgagttattttgagaatacagaaatggacaaaagaccaaggggccatatagcctagacagaagaaggtgtgccatctcattgtctagctaaccggaagcttataaatatacatacatcccccaaatggccacgaccttcttattatttgtatattatggttttcaaaagaactggttcaaaattgaaagagaaacttttaaacaaaaaagaatataaatttataaaaaaataagaaaagtttatcaatatgtatattgtgttgttggaaaaatttagacaatataaaaattgtgaatactcacttaaaatagtgagtattcaaatattctaatgtaaaaatgtattcgagtatgtaaaaatataatagaaaagacacataaattataggggtttaacaagagttcgagatttgctctatattttattatttagatcagcccccattgaatgggagtaggtgcacttacaattataggtagtaggtgacggttacaaatgtggtcataatgatagccttacaataataatagttattgattgtaaaaaggtagttatatttacatctcataaaattataattacaccccta

SEQ ID NO: 22060 - DNA, 1675 bp, Cannabis sativa
ggaccctgagagatacacgacctgaaaactaagaggccaaaaaaaccccataagctaggctaaacaacagtgagcccccttgttcctactctcacgaatccagaaactagtactagcatccacccagttcattaattatttcttttctttcttctctattttctatccttcattatttttattttctttgaaccaaagcttaattcattcaaacaccatgcatactccattcacatattttatatttcaattctttttcaagtttatcataataagcaattcattaactaaaatactatttcttcaaaactaaatatatgacctccaattataagagatccatgacatatataagggcaaattacatgtatattatttatatttttatccggccgtagtcttgtaattatgtactattctatagatttttattgttgtgaattattgcataactaatgagtttttacatatttataaatcgataggtatcttaatcaatagaaaaaaaatatatttaaaagttatactgtttcatttggtccctaccaatacaacttcaatagctgcactttttgaaatactgatcaaagttaaaaaggatagataaacgcaccaagagtttttttttcttcctcaaattgaaaatgacttgtcatccttccacttgcttcattttattctctagctctctcaattgagttatcatttcccttcagaattgttttcccaagaattgaaaaggcgcatattaagtttacaatatcatgcactgagtgacctctgtttattttgggttttgttttagtttagaatcttattactcacatgtgtctacttatctatatctagtactatgtaagttgactactttaattttcatgaacaatatgcttttcttttccatttataatttattcttgttggggaggaaataaaattatgtgacataatatccttagaaaatatgttcttattgcactattaatttattctgggcactcactctcctctcctatagactatagtagttactgattaagccacccgaatctgattacacatcaattatatcccatattatattataccccttccaaaaaaaaatatcccatattatatacatgatgatataatttctttatttatataacttttatcatgagaacagagacctatcaatatagaccattcaaaaaataaatgaaagaaaaggacataatatgcagaccattaaccaaaagaaaagaagatatgaaaatacaaaaaacaaaaaatataggatttagacacgtgtagggtggataatcactgcataatccctcaatttcattataaatagcaagcaaggccccaaccaaggaaggcatccaaatccaatataaatcttaattagcttttatcatattttatagtctttttctcttcaaagttcaaaccatatactaaaaatatgtcttgctgctcaggaaagtgtggttgtggttctgcctgctcttgcggcagtggctgcactgggtatgcactttttccttttatttaaaatttaaatatacagtgtttgtctttcaatttatgtgagatttaatcacaagtttctagctagttcattagaataatttatcctcgtcatgatactcaaagttgtcatcatgatattatatcatagtaatatata

SEQ ID NO: 22061 - DNA, 1268 bp, Cannabis sativa
gaagtgtccaacaccttccatgactatgacctcttcaagaagaggaacatcttttctgaatccacctttgtgtatgtaatccttaactcccaaagaattgtataaaaggtccacatcccctactatgaaccttactggcacttttattttagccccagtccatggtgctgtcacttcccaatttctacattaattattcaaatacacacacacatttacatgttaacatatattgggaatcttatgcatataaaactatagtaaataaaatataagaaatattgagacctgttaatgttccggtaatagttgattccaccagtgaagcctttgttgtgaaatttggttgtgtagtaatcaaggtcttgttgggttaaccaagaaggcaactcagttggagttttggcatcttttgagtgtggaaaacttttgcctttagggagcataagtgggccaggatttctatatgtgtagaattcctttataacttgttgggttcctatttgggcaaattcaccttctatttctccaatttcctgcattattatataatcagtatttccaaaaagagtccccctttttatcttcatatattattgcccatgtcacatcatttcatgtcaaacagtaaaagttatgtaaatatatatataaaaaataaatcatcaaagggtatatatgctaatctaaccaaccattttattaattattttttaaaaaattaatttacttaagtcttgtttgccttgaatttaataatatgactttcattttcttaaatatttgaactggattaataaattataattttatacttttgtattatatttttataattgattttttatttatttataaaaataaaaataacataattttaaaataaaaacaaataaaaattagtataacctcaaaacaaaacaacttttataaaaatataaaaagaaaaaaaaaagaaaaatacaggcaattccccattaataaaacacttttagaaaatattaaatgaaaatgtaagtacattaataaaaaaaaaaaatcttttgcacaattatgggtcacacaatcaaagaacgaggtatatgtaattctaaaatacactaaacaagattaatcataaaactaaaaaaaatgtataaaatggagaaaaattgaaagtaataacaaatattaacaaatatacctgaaatctacaaacgtagtagtcatcaccatagacggctctcaaagtctcataaggcttccttttagggttcctagggttaaaa

SEQ ID NO: 22062 - DNA, 2200 bp, Cannabis sativa
aggagcttacaatcaaactcaaatcgctcgtcaggttttcaaatgtcattaattattttctagttttttattatgattaacttaaaatattttctctctctttttatataatatatataattattgattttgtattattttgtttagatgggaaagataggagagaaactaaagataaactttgtggtgtcaactggtgacaatttttatgatgatggattgaagagcatcaatgatcctgcatttcttaattcttttaccaaaatatacaaagctaagagccttcagaagccatggtacaatggtaattattaataattaagaagagttgatacaattacatatattaaattttttaatttttgtgttatatctaaagtggggtgtgagtatcattgaatctatttcacaaaaatttacaaaaaacatattttttttcaatgcataaaagtactaaataaacattttgggcattgaatttgagtaggcgctaagcacgagtttaacccatcttaatttaaggtcggacctgtacatatatacaacaaaaatatgcaacctagttgcacctctcactttttgccacgtggaagagtgttgtggcatgatcatcatcgatattgaattataatgttaataaaaaaaaattgaattataatgctaatattataaggatgttttttatttttggtatcttgagaaattatatcttaattttttgtaaggttaatactatttttatttttctgttttgttaaatgattaaatagactttgtaatttttaaaatggtataaataaaatcctgaacttaatttcaataattttttttaatataaccaacttaaaggtaatttctgacacgaatacagaaaatataaccaattttgtcatcacacttttacattgggttattattaaatttcattttgacaaaaattaattcatgatactatttaatactattttaaaaattacatgatctaatttatcatttaataaaatagatggtccaatcaataacttttataaatatatggtctaaaatggtatttaacatttttatatgacattttgtattatagctataacaaataatttactttttaaaaattctgaataatttacagtgccaaaaaaaaaattcaaaatattatttctataagattctctattctcaataaatattggtctcttataattttgtttatatttaattttttttgtttaaatcttccattaaattaacatgaatttactaaaatgaaatttgatcagtgttaggaaaccatgactacagaggaaatgttgaggcccaattaagcccaaattttagaagtgtggatagccgatggctttgcatgagatcatttgttgttaactcaggtaaagtaattaattaacattaattaaaccaattacctctcattaattaatgtattaattttcattggtttaataaatcaattaacctaaaaatgggtgataaatttgcagaaattgcagagttgttctttgtggacacaactccatttgtggacaagtattttctaaggcctaaggaccataaatatgattggagtggtgttcttcctagacaacattacctttcaaatcttctcaaggttactcactaactttttttattattagaagtcaaagtacatcaatcaaaccaagtttatataatacattaaattttgatcaaaatatataaaacaaatctacaaaataaattacatatacaaatatgataagttacttttgataagtgagacgcatcttaaataaaaattgattgaagttacctgccacataaatgtatatcaagtttgtatgtgaattgtgtgtgtacacatcattactcgaagagaatgtatctcacagaatatatatgtacactatttaatgccaaaggcatcaatagtatctaacaccctcttaggtgttatattattattgatgtaattaaatattgagtgtcatataatttttttttgaaggaagatggaaactttattaataagaagaatcagccattacaataaaaagaaaatcagtgggaacattatccttactaaaaatgcgatctgggtacaaacaagaactacgagtaagccaatgtgcagctttgtttacagaccgtttaacaaaagtaattgtgactgactgtagatcggccagaagagaacgacaagccg

SEQ ID NO: 22063 - DNA, 2879 bp, Cannabis sativa
catgcaaacataaatcacttcatatttcttatattgattactaatcagattgtaaagacttttatttagggcataaaacccaacagttcgctgatgatagttatatcttctgcaaagcaaatgatattgaaggggctagtgttcttcgtctcctgagtatttatgagaaagcttcgggccagaaaattaattttacaaagtcctcagttttcttcagcaacaatgttcagcagcatgttcgggctcagttatgtggtttacttgggatggtccccgcttctgaaaatagcacttacttgggcttgccgtgcactatgggtcgaagtaagaacgtgattttgggattccttaaggataagatgatgaagaagatacaaagttgggagactagatttctttctaaagcagggaaagaggtgttgattaagtctgtggcccaatccctttctagctatgctatgagtgtgtttcttctcactaaagagatatgctctagccttgaagggttaatggctaagttctagtggaaatctcagtctaagaatgtgtccaaaggagtgagttggatgagttggcgaaaactatgtcgtcataaggatgctagaggacttggttttcgtaatctaagggattataatctggcttatttaggaaagcaagggtggcggttgctaactaataataattctttggtggcaaaggtttataaagctagatactatcctaagggtgatttcttaactgctgagttgggtccaaatccaagcttcatttggcgtagtgttttggaggctaaatcgttgcttcagatgggtgtttcaaggtctataggtgatggtaaagccacttctatcttggctgacccttggctccctgatttggacaataaatttgtcaccacttatcatccgagccttgttggaagaacagttgatagcctgctgcagatggaacgaaaagcttgggatgtggaggtgatcaatgatatttttaacccacatgatagtgctttaattctttctattcggctgtgtgattcaaggagggaggattgttggtcttggtccaaagaaacatctggtatttattcggttcgtagtgcttacaagttgctgcaatgtaccaatggtgattggccgattgctggtgtggatagctactggaagaaaatttggcaattgaatgtcccagcaaaagtacaacatctgctctggcgtgttgttgcaggttgccttccaaccaaaattcagctttcaaatagacatgttcatgttgatctaacttgtccaatgtgtaatctcgcacctgaaactgcctcacatgtgttgtttagctgcaattttgcccattcttgttggaatctatcatgtgcttctgctgctggtgtcggagaggagttgtttcttgactggttttgtgacctgctggttcatggaagcagggttgtagcagaagatgcagcaatgcttttatggcgtatctggacagcacgcaatgatcaactatggaataacaaatcgacaacagttttggaggttattcggttggcaaggactaatcttggcacttggcaaaatgctcaatcaaatgggtcatttccattactcaatgttaattttgggaatgggaaggagcattggacaaaaccaatttctacaaagctcaagatcaatgtcgacggggccatcttcgaaagtgagaatcggtttggctttgggttcatcattagagactcggctgggaagtttgttcaagcagtttcaggaagtcgacttggcgtggtttctcctgagattgctgaagtggtgggaatgaaagaagtcttgagttggataaagacgatgcaagtaactaatgtggaagttgaaactgattctttagtcactgttcaggctatcaatggatcagttcaaatgccatctcagtttggattaattgttcaagactgtcgtttattattatctgagttacaagatgtttctatttcttttgttaaatgatctgcaaatagggttgctcattacattgcaaggcaatcctgttttatgtcagattgtatgtttgatgagtttactgctccatcaaatttgctttctattgtaagggatgatatttcttcaagttaaataaaactttacccttactttcaaaaaaaaaaaaaaaaaaaaaaaaaaaccttaattaaaaagaaaatttattatatatagcatcaatttagtaacatatattttaatgagtaatttagtttataagtattattaaaaatatatttgtaaatatatatattttacatttaatttgaattatttatacattttttttcctccccattctatataagattacctaaaaatgatcatagccaccgagttttttaaggacaaagtcaagccttgacctctgttcaattcttttgtattaaggtattttccactgctagattattgataatgataattatctacttatatataaatataataattaatataatgataaacaaacaaacaaacaataataaatgtaactagatgaaataacttaatcttaatcaaaggatctttttgtttgaaaagatcttttcgaaaatgactgaatttttaattgcaaaaacaaacaacaataaataattttaataattaatgtaataggagtgaatgaataatttaatatttttttttttttggagaaaaaaagatcacacgatgtaaattttttctcgataagttagacaatttttagaaccacatccacatgccaattgtaggagacttataacatatttggtattgttttctagttttttaaaagtaatattgaccaaaagtgaattattttttaagatagaaaataacattttgttgttttcaaaattctca

SEQ ID NO: 22064 - DNA, 4110 bp, Cannabis sativa
ttctagcttatgatatttgttaaatgaatagtttcatttttagttcatttcaatttaaaaacaaattgcacttatttttgcaatatttttacataattatttattaaataaaaatacaaaattacgaataatcaataatttttttataaaaaaataattgatgcctattatattttagaattaaatcatgaatccagttttaaacttaaaataattattttttatatttattttattataaaaatatatgtactttctttataaattctactacttttaatattcgtcacaaaatttctatttttctacattacaaaacaatacatagaaaattatgtttctactcttaaaattttactcttttttataatatattacacacattaaaaaattatattttaaattacattactcaataagtaaaaaaattaattgaaatataaaaatattataaaaattggacaacaccgcgcgaagcgcggttttgttccctagttatatataataaaaaaaaatcacctcatatattatttcttaacttttttttttatttctgtaaaaatatatataaaaaaaaactactaaaaataaaaaaaaataaaatagtttcaacaattttattatatttttcttctattgagttagatactgtatgttcaatcttcaattcaataataaagttttaagcttagtgttgatacaagttagatacggtgataagtatgattttgaatgtaataaccaatagaagtgagatacgcatacagtaataataataattttaaatgtagtgacaactataagtgagatactgaaaataattttaaatatattatatagtgacaactacaaataaaatattgtgactttaaaattttttgtcttttaatttacataactaaaatatggtttcaccttaattatattagaactttattaatcacatggcataaattttgtggtttgcaatgttcaacacagctctaataaactacattaaaaaattgtgtttcttttttgttagtcagaaagatttttcatttaaagatttaaacaggttttgagactagattttatttattttaaacggattttttttaagaaaatgcgttaatattaatgaaagttagaccatgaggtcatacaaaaaaaattctaaaagtatgtctttaacatccaaacaactatatcgattgtgggtaaaaactcacttaaccacattatgggccaaaaaattacgagaccgaactacattagaaaacacacaacccgcaaataaagaaaaagtgcttaaacggtgacttgagtggttttcaatttcccatatggactccagtccattgagaaagttgatcaccatttgagtgtcacttttaacaataacaaaattgcacccattctctgccgccttttccaaaaccaaacaacaagtagcaacctcgccacacatagcaattgtaaaatcaagtcttgatgtaaccacccaacaaaccatcctctggtgatctctagcaacaacagcaatacacatatacttcatcctcactctaacatcacaattcagtttgatccaatcaagcgaagggggatgctaaacatccaaatgggtcacagaatgagtgggaatgatactatagtagctctataatttgtgtaacaaaaggaaagaattaatataatgtttaatgttgcctagattatcattgtgtaccttattattttgcggccgccagatagtgtccaccacaataaaagcatacagatcatctcgttcacatcaatgtccctatcttttagattccagataaacataactcaacccacatatggatcccatagtatgataaagcaaaaatgccccgcaggaaagaccgcgataagtgataagccaaattacactgaagaaaaaggtgtttcatggtttcattcttgttcccacaaatagggcaaagggggttatcaatacgaaatctatcgctcagaatagagcgatcaagaaatgcatttgagagaatactccaccacatgatcttgtgacgctctagaattttattagttcctgagctaattctagaggtaaggcgatatcacgcaatgaggagctcgattaagggcctggattaaataagcgaacttctaagagaaactaccactactttccttagtccgaacccaagagtcgcttcccctactagaaggtttacccccttttaagatggtcacaatggtatcatgattaaacaagtagttaagtttttagagatcccaatccccattttctgtcaagtggtctgcaagattttagggtagaaattgataccatgagtaatcgaaggatcctcacaaattttagtatccttcccatcagcaaccaatttacatgatcctttccaaatcgtcgatttagcttttaccacaatctttcaaaaccatgaataagagtccttataactacaatgaaggaaaaaattttcccgaaagtacttggctttcaaaatcttgcaacaaggagagttgcctccagattacaaattccaaccccgcttagttaagaaggcctgattcatttctctaattttacgaaagcccaaaccaccatgagaatttgggagacacaacttgtcccaagccttagtggagcccatgattccctttctcaaaaccccaccaaaaatctctaaccatgccatcaattttagtcaccagcctattggtaagcttggtggtttgcatagcatacataggcatggcaaggcccacagacttcataagagtagcatgatcgacctttgagtgagttttcacctatcaaccttggagttttgaagtaatattatccataataatatttaaattgatctctttttgtctcgatctaaagagaggccaagcccaaatatttaatattaccatccaactcattaatgcccaagagctctctattgcttcttttcatctcattcagagtattgttattgaaaaaaatgaaagttttaatcttgttgacttgttgtcctgaccaagaacagaagttctccacacatttccaataacctttagcttctgccaaattggatcacccaacaaggataatatcaccaggaaagagtatatgagagagggcagggcctcccctgctcagtctgacacctttaatgtttttcttttgtaagagaaatctctaagagtcttgaaagaatttcttcaacccaaatgaagagataaagagaaagatgaccatcttggcggatgccacacgaaaaaacaattctcccaacttggcctccattgagacacgcgttaagagtagcaatggagatacactgattgatcatgttgcaaaagatcatggggaccccaagctatccaacacctcatcaatgaagctccaactcaacttgtcataggtcttaacaaaatcaatattaatggcgatttttttttcttccatttcttctttttgaacgagtggataatttcttgtacaatcacattattatcttgaatatttcttcctgggacaaaagctgctttagttagccagatcaatctgggtgaattggtttgattctatttgtaatgattttagaaataaccttatacgtaacatcacacggatagataagcctaaactgactaatcctcctgggattcatgacttttgggatataagcaccaaattagtagcattaacacccttgtggatataacaccagtcctgaagaaatccgacagtacttcacaaaaattaccccactgaatcccaatagtgtttgaaaaagagaacatacattctagggctgttcatcaaaccgctcacatcgcacaaaccgctcgctctgtaccacaccgcataaaaaaatacggtttgaaatcctttgcgatgcggacgtggtttgcattttttccaaaccgcgcgtgcggtgagatttgtgggtttgaatttaataattgcggttcaaattgcaccgcattatacattataaagttaccgaattttacaatatgatttttattctttcttcatataagaataaatatatgtaatatattacattgtttttttagagacaattcaatataatgacttaatgattagtatatatgtta

SEQ ID NO: 22065 - DNA, 4994 bp, Cannabis sativa
ttaatataatagcttttaaggagtatcgctaaccaatcgcaacgcaacatgtcaagaaggtactaggcaccactggtgactaatagcaatgttcaagaaaaattgcccatcttcatttgttgtagatagacggcatggacatgaagaccaaatgaatgacgcgtggcaactcatggttgggagaagataagaaaaatggaatatctatttgaatggctctttaattttccttaggcacgcgcatggaataaaataggagccactgattgatatgaaaaattttgcaattaatgaagatcaacctctgatatcggtaaacaactgttaggcagctcatatatggcaaatgactaaatgctatctggcacgcgcaaataaggcaaagaaataagctgatggcgtggactgggcctaagcaattgggctttttccttgcaaaatatcacttttttatttttcttttctttttatttataccataatgcaacataattcctgcaaaataaattaaattaaattaaatttaaaataaatattttcacttataaatatatattcaatagatttcatgaaaatatcaatttaaacttaatttaatttaacatttgaaatcgatatgtacatttttttaccactaatcacttacaaatttaaagtcttcttctaaaactcattttttggctacccctgaagagtggtataaacttagctcttttatactaattcatgtacggtgagttgtacaggagacgctactgaagagtagtgtctttaagttggtcactgatagtactttctgagatgtttccccattccagtaccttggtaggagaactaattctatgttctcattgtatctgcccatcttgtacgcacctttacttcttatctctgtcacttggtacggaccttcccagtttggcccaaacactcttgttgcatgatctttcgtattcaagaatactctttgaagaactaagtctcttatgaagaatttcctctcctttacttgtttattgaagtacctgacaactttttgctggtaggcatgcagctttaaggttgcttgttctcttctttcttctaatttgtcaagggatactgttagcaggtgtggtttacttcttggtcataggctgccctcctatgggatgttggttccagttcaacggatagcattgcttcatagccataggctagcgcaaagggtgtctgcccagtggtcgtcttctcggtggtcctgtgtgactaaagtacctctgggagtaagtcgggccaattttcttttgcctcttctagaaactttttcataattatttgagggtcttatttatagtttctacttgcccatttgtttgagggtgcgtgattagagaaaagcttttaataaaatcgtgtctgttgcaaaagtcattgaacatatcactgtcaaattattttccattatctcacatgatcttctgtgggagttaaaaccgacatatgatgtttttaacaacaaagtcgaggactgtcttggaagttattgtcaccaatggttcagcttctatccacttagtgaaatagtcaactgcgactacggcatattgtacttctcctttctttttaggtagttgactgattaggtctattccccacacaacaaagggccaaggggactgcattagtgtgagcttgtttggtggagctctcgggatctttgagaatctttggcacttgtcacattttttgacatagtccattgaatccttgatcatagtaggccaaaaatacacttttataggtatctttttgagtaggctttgccctgcggcataattaccgtggaagctttcatgtacttctatcaatagtcgttcagcctctgtcttggtgacacatcttagaagtggtattgagaaaccgcgtctatacataaccccttccaagattagatactgagcagttttcctcccatttttcttgcttcattcttgttttctgaaaagattcctgtctggaggtacactactatgggtgtcatccagttggactgtcatccagcatgtctatttcttctgaaatagtgatgcttggttcttttaagaactatatgggtactaagtttgccttgtcttccaaggtgttgctggctagacgagcgagtgcatcggttgttgcagtctctattttgggaacttgccttatagtatagcctttgagctgacttaataagtcttgaatcttgctcaaatatgctattattttttcacctcgggctgtatattcacttgggacatgattaacaaccaactgggaatcactgtatatgttccaagtaacctgcccgcattttgtgtgctagcttgaggccagcaattagaacttcatactcagcaacttctttttctcatatttatgaaaaattcccttttatctagggataattttataaatacacaaaaataataaaaaaaaatacaaaaaaatatgcttctatgaaattttaaatatttttacggttttaagattttatttacagaaaatacggtcttttgatgtatttttacgttgtactcttgttattttgatgttgattttttgttatttgtacattatttttttatgctgttttgatgtcattttattgttgtttttctattactttcatgtgatttttttggtttttttttttttttttgtattattatagaatattgtaaaaatatttaaaaaaaaaaaatactttaaaccggacccaagatttaaagtgagggggcataatttttttttttttttttttgtaaggcaaggcaaaagtaaatttaaaaaggaaaaaaaatgttcatgatggaatttaaacattacctctatcctatatataatctagattattatactaaaagttcatattgtctataaaaatcatcttttattataaatatatgttgtaactaactaaaatgtatatatattttttcttctaagtgccctacctcgcttctatgtggatcgctcctatttaatctgtaaaaagtttatcaaaaatttagagcatgtttagtattattttttgttttttgttttaagtatgtttagaaatgagaataaaaaattatttttgaagttttcaaaacacaagtcccatttggttagcgttttttaaaaacaatattgatcaaaagtgaattgttttttaaaatagaaaacaacattttgttgttttcaaaatttttattttttgtaaatttgttttctaaaaactatttttaaaaaataattttttagttatgatgtcagataatgcaggtaattttctctcttatctaactaaccaatgcaggtaattttctcttttatctaactaaccgaggcacacaggaatgaatgggacaattcaagaattttatgaaaaaatgtaacagatatcttacctcccataaaaaaaaataacaaaaaaagaaaacatcgaaagttatacgagttgaagaaaaaagcttctaatttcagttgactaaatcttgtctttaattaaattcctacaccgttttcatcattaaaaaaaaaatctgaaattaggatatctttctctccaaaaaaaaaagtaaataaataaattattatatttagtccaattattcgctttttaaaccagcaggtgattttaatttgggagctaaactacaggctaaaggaatgatgatacacctattgttttgttttgtaatttatatggactgttgtttatctatttattacatatactttaaccagaatcgcttatgaaaaattactagtgtagtggttgcccacgtaaaatttcttatgaataacaatcatccagggacaccataccatggaatatatataaacttttccagttttgcttgtgaattaatggtggatttcaatcccggtaggacttatttaatcaatttatattataagccaacttattaggtgcctgactaaagactttttcagttttgtctacttttatataattgaatttaaaaaatataaaaatagatatgagaccaacagcgctcgtcgaaaatccaaaccagttatattgaaacgaacaacatcccttttttcttccatagaaaagaaaaatgaaaatcccattaattaatatggccgattgtctggtattatattaggctcagccgccacatgaattcatatatacacaagagactagcccaccgaataacatgtataagtatcagattttcacgaactaagctacttactaagtttttctttcgtcttcgttgataatataatcttctcctacactactcagcaatccacatatcatttgatattttcttttaatttggtccaaaaatattaagatggaatatttatttgatgatgatgaacccataatagaacgacgtttagagagtaaaaagagtataggagttggaacaattaggccttcttcttcttcttctccttctcctaataatgataaaaaatcttatggtggtctttgtaatagtcgttcggagtcattccggacattggaaatgggtgtacccaagtctgaagctgcagaagtgagattagcttggattcgttctcagatcattgggggcaattatgaagtggaatatgattctccttttggcaaacgaaccattgtttatgcagatcacaccgcttctggccgatctcttctctacattgaaaacttcatcatcaataatgttcttcctttctatggtacgtacgcactcaatccaccccaccccttccactactaactacctcttcttttatatatttacaattacattgttattaggcatcttaaattcttaatcacaaaagagcgatatattttgtatttcttactaaattaatattaatatatatatatgacactttgttaatggtttgaacacttgtattatgtataattgtatattatatgtctaactagctcatccactatataatatgttaatatatatgtaccatacgtgtgtagggaacacacacac

SEQ ID NO: 22066 - DNA, 4121 bp, Cannabis sativa
gagagttggcataaagattggtgaggcaatgaaccaagctggtgtaaattgcctatgaaagggagctttggagggcttggaggaaggttcttgttttgtttttggacacatttctgtattaacgcaataagcaatggaaagaggagaagaactgaaacaagcaaagctggtggagcttcaattattgccatttgctttaatttgatcaccaattccaaggccactcttcttctcaacgactatatgtaatagggaaatagtgttttctttctgttgtcttcttcagagatattatatccaaaataaaaaatccatattacagttgtctattttgatatcgttggagttagaaaaactaaaatgatgtggagtttattattcatatagtcaaacattcttttgttttttttttttcatttaagcgtttatattcctccaaccctcggttggtcaaacattccactcaagtttaatttattatattgttgttaagtagtcttatccaataatatttttcgttgttaatgaaaagtctcaccagattgtttactcaaatacaattgagggtaaatatcattttgtaaaaattactaattgaatcatgttttgttaaatgacaaagtgaaccgtttattttttaaaatggttaaaataggaacttgaacttaatttttaacaattttattttttaatataattaactttattctaatttttaacacgaacagatacagaaaatataaccaattttatcataacatttctaaatcggattaatattaaattttattttaacaaaaaattagtttaggatttacaattttaaaaaatacaaaatctattttatcatttaacaaaataaagagtccaattagtaaattttacaaatcacatgatctgaaataatatttattacgtgtaataatgacttaaaatatatttattataaaataaaaatatttattttaatatgttcttatggttttttttattattttacggagaaatttgcggccaaacccctttaagtttcaattagtatacacttaacccctgttctttattttttggtggcaaagcacccttaacttagcttctgtttgcaaattcaatgtaaccgttaaatttcaatgttaaatgccaactaggacaccaacttgtattgtcactgtgtacataaatacagatgtcatgtttttattggtgcaaacaattttaattattttaataactttattattttagtaatttttaaattattttaaaaggtgttaaaataaaaggcccaaaggcagcccatttggttgaggatattcaagaggctaactagactaattcttaccgttgccaatcattgataaaatgattccctcaatcttcatattattgtgtgggccatatggaatatatttctgttattgtactgtccaatagggtaatagcttctagcatattccattgtctatataagggaacattccctactgtaattgttgcagagaaagaggcattaaattaaataatattcagagctttattcccttaatttcctctgtttttctcctacttttaagcttggtatcagagcgggaaatccgcaaggctgaccatggaaaaccccaccatagccgaaatgtcatctgcatcaaatcgagctgatgctacgcctgctgccgaacctatcaatacaccattaaacgcctctgccacaactatacagccttcaccctttcaaagcttagcccctcttaccataaaacttgaccgaaccaattacccctattggagatcacaagctcttcctgctctgcgtgcgcacgatcttgaaggctatgtgttaggaactagagtgtgtccaccacagttcgtggacaacacagttggaggtccgattcctggcgagactcgtcaactcaatctcggctatgctatgtggaggcacatcgatcaatcaatactcagttggctccttaattccatatctgagtccatgtttggacatgtgacaagttgcctcacttcatgtgatctttggatcactcttgaacgtctctatactactagctctaaggctagaatattgcaactgaggtttcaattgcagtccctaaaaaagggcagtcttaatatacatgattacatcttaaaaatgaaaaatatagctgatggtttatctgctgcaggacaattactttcagatgatgatctcattttatacatcttgggaagccttggtcatgagtatgaagctgttgttgtgaatctaacctcacggcatgaccaagttactttacaggaggtgcaatatatgctgcagagccaagagattaggcttgaacaactcaactcaacatcaagtgactatactatgcctgctgctcatctcgcaactcaaatgcgcagatctctcaatatcgacaatcatgctcataatccaaatcagccctctggaggccgcacctacaactcccgaggtcgtggtcatggaagaggtcgatccaacaacagcagaccaatatgtcaactctgcagcaagcctggacatgtagcatcaaaatgttatcaccgttttgacatctctttccaaatccctggttcaagtcagtcatctgcctctcataacatcaacaacaaccactcgaataatgatcaacaagcctatttcgcaagcacagagactcaagttgacaattcctggtacattgacagcggagctaccaaccacaccacttctgaagcttccaacattcaacacaagaatgacatgaaaggtacaactcaattacttgttggcaatggttaccctctagccgtgactaaatcgggctcaagtaagattcacaatactgctggttatttggtgctaaatgatatactttgtgtacttgaaatttccaaaaaccttcattccatatctcaactaaccaaagataacaaagtatatgtggaattttatgctgatttttgtgttgtgaaggacctaatcacgaatgaggaggtgcttcggggggtgcttaacaatggactatatcaattgaaacttccagcaacatcatcatcaaaagtacatgtcaactccatctctagctttactgtttcctccaagagcagaaatactgccaaacttccacagtcgagtcattcccgtagctgtttatctttgtttgctgagtctagctttaattctgatgccaatgtgtggcacatgcgtcttggtcatcccaatgtcaatgtattaaagcacatgttggttaatgaaaaagtttctttcaaaaacacaacccctttctgcaatgcatgtcacataggcaagtcaaaatataaacattacagcacttcacatactaaatcacaatcaccaattgagcttatacacaccgatgtatggggaccttctcccatattatccaaggaaggctatagatactatgtgcacttcatagatgactatagcaacttcacttggatattccctctcaagttaaaatcagatgtcaaaaacacatttcttaacttccaaaaatttgtagaaagaaaatttgatgccaaaatcaaaactctccaatcggattggggaggagaataccgcaatttagcaccattctttgagtcaattggagtgcacttccgacatccttgcccacacactcatgctcaaaatggtaaatccgaaaggaaacaccaacacattatagaaatgggcctcactctattatctcaagcatccatgccattgagatattggtgggatgcatttagcacagccacttttctcatcaaccatctatccacaccaactttagcacaccaatctcccatagaaaaactgttcaaagtcactccaaatctcaaatttctcaaagtctttggtagtgcttgcttcccacatttacgtgcctacaacaaccacaagttgttagattttagatccactaaatgtgtttttcttggatatagtccaaatcataaggggtacaagtgtcttcatccaaatggtaggttatatatagctcatagtgtctcatttaatgaattagaattcccttttgccaccggttttggacagctcaatgacaactccactccctccccacccatcatacactatcaccattggcttc

SEQ ID NO: 22067 - DNA, 6561 bp, Cannabis sativa
ctttccgcatcatgtgaccccttggtcacatcgagactcccattgcaaataaagtcgtgaatagaatattagtagacaatagaagttctgtgaacctgttgttcaaggacgctttcacagccattgggctcactgacagagatctctcacccagcggttcgtaactcagaggattcaacgggacgaccctcatccctatgcaaaggcttaggcttcgagttaccctatgtcctgacacacccaagagcacgttcaaatatgcacctttgtagtagtggactgtcccactgcttataacaccattctcggtagaccggccttggtttacttcagagccattacatccatccgacacccgtgccttaagttttatacccaggaggcaggagtaagaaccatgagggtgaaccaaggggaagcaagacaatgttataacgctgcagtgcattttttggtcttaacaatataggggtcggaaccgatgttggtagcagaacaggacgaataggaccctcatattagttttgaatcagcgttagaacccatggaggatattaaggaagtgagggtatgtgacctcgatccatctaaagttattcatcgagggaaaagcctagaaccgaaggagtggagtaaaatgataaacaccataaaggcatctacagacgtattttcttggtgccatggggacatgatcgggataagtcttcacatgatcacccatgtcctaaatgtcaacctacatatgcctctggtgcaacaaaagagacatccactagacccggtaaaggctaacaccctagaaatggaggtggacaaattattatccaacattttcatctgggacatatactatccagagtggttggccaacccagttctggtacctaaactaaacggaatgtggcaagtttgcatatacttcaccgatcttaacaaagcttgcccaaaggattgtttcccattgcccagaatcgattaaacggtagatgccacctcgagtttcaagctattatcttatatggatgcttattatgggtacaatcaaatcaaaatgaatgtcgtcgatcaagagtggataagggggtatactgttacctggtcatgcccttcagattgaaaaatgccgaagcaacctatcagcacatggtcaaccagatgttcaaaggtctcctaggacgaaacatggaggtatacatagatgacatgctggtcaaatccaaaacatgcatgggccatgaagacgacctcacagaatgctttgaggtagtctggagatatgagatgaaacttaatcccaagaaatgcacttttggtgttaagttaggaaaatttcttggattcatagtgagtcaatgcgggatagaggcaaaccctgaaaaagtacaagccttattaagtatgccttccccaaaagacacaaggacgtgcaaagcttaactggaaaggttgttgccttgagtcgcttcatctcccgctcaaccaacaaatgcatcccgttctttaaaattttgaacaaatgtcagaagtttgaatggaccgaataatgcgaggaagcattcagaaagttgaaagaatacatggctaagccaccagtattgtcaaaaccggttcacaaagaagacttatatttatatttagccgtttttgagaatgcattcagcgcagctctagtccgggaggaaggaaaggttcagcacccagtacactatgtcagcaaacgcatgataggagctgaaactcggtatcccctaatcaaaaaactagctttctgtctcttgattgcatcaaggaagctcaagtcttacttctaagctcactccatcaaggtattgacaaatcacccacttcgacaagttttacagaagcctgagacctaaggaaggctcctcaagtgggccatggagttaagccagctcgacatagaatacattttgcgcatatcgattaagggccgggcattggcagactttattgtagaatgaaacgaggcagaggccagcgccagtatgccaactctggatgtgcccacatggaaagtgtatgttgatggagcgtccaatgaaaatgggtcaggggccaaaatagtaataatctcacctgacgggttacaacttcaggctaccgttcacgttcctggcctccaacaacgaggtcgagtatgaagccttaatatcaggattgaaattggccaaggttgtaggggccaacagagtagaggtgaacagtgattcgtaactggtggtcaattaggtgtcaagagaatatcgaacccggggagaatatcagttgttagggaattgctacaagaattaaggaatacaaagtggagtaaattccacgagaaaaaaaatgcccatgcagactacctagccaagccagcctcaaatagtgcgataaagaagcaggggtggtacctgttgaacaccttacggaacctagcattagggccaaagaaacagtggctactaatgggcaagggtcggattggatggaccctatcattaagtacataacaacaggataactacctcaggaaagaaccatgtctagaaagctacagtaccaagctcgtcagtatttaatgatcgacggtattctctatcgaagggggctcagcatgccacatttaaggtgtgtgtcggaccctgaagctagacaaatcatgcaagaagtccatgagagattctgtggagaccacatcggaggcccaagcctctcaaacaaaatattaagacaagggtatttttggcccacaatgaagaaagattgtatagactacgtccttaagtgtgatccatgccagaggtttgcaaatatcccaagggccccacccaatgaatttactttgatgaatagtccctggccctttacggtatggggaatagatctcattggctccctaaccacgggaaagggtggggtaaaatatgccatagtggcggtggattattacacaaagtggaaggaggccgaacccatcataactgccaagaaagccttggactttgtcataaagaacatcatatgtcgatattggttgcctcacaaaatagtctcagataatggaaagcaattcgactgtgacaaattcacagactcctgcgatcaatacagagtcatcaaaagtttctctacggttgcgaggccacaaacaaatggacaggcataagctgtcaataaaatactcaaggtcaccctaaagaaaaaacttttggcctgcaaaaataattggcctgaagaacggccacgcgtgttatgggcctactggaccactacaaggaccacaaccggacactccccattctcaatggtgtatggatgtgaagccatggtcccagttgaagctataatcccgtcccacagaagagtcacctacggtccagcaacgaatcatgtcttgctgcaagaaacgctggatctagtagacgagctccgggaggaatctcaaatacgcatcggagcataccaaaagaaagtggcgaaatactttaattccaaagtcaaaaacaggaaatttaccattggtgatctagtcttaagaagggtctacccgacctcccaagagccaggagtgggggtacttgagccaaattaggaaggcccgtacgaaattgatgatgaaataggctttgggacttataaactaaagagaatggacggatccatagtacctagagcctagaaggctgaccatctccacaaatactatcaatacttaggagttcaatacttaaatttttctttattctgtaagttaacttgtgtcggacaaaatatatgcattatcacacataaatttaagctaagtgacccaaaaaatatgttttatgtcacttaggggggtactaaggcataaaatatgcgcaggaacaagccaaacataagaaatgcaaaatatatataaacttataatataagttgctcaaaatgtcaataataaaaagcctggagtcgggccataatagtctccccttacctaaactatagataataaatacaaaaataaaattgtcttgaaaggggaggaagtaagtgaaatataaagagaaaaggagagaggcttaatcaatcaactcgtggaggaagacggggacccctacgctcagccaggacaacttctaatttcttattcttctcccaaaatctagctataacagcctcaggatcggggaagaagggaaggcgaggttcgaacttgttggccttccagcacataaatgctccatcttcaaagtgcttctcacagtgcttgcaagtaactaaagccagtaaagcatccctcgcagccttggcatcctccttttgggtttggtctcgaaactcgcaaagtttcttgagttcaacagtcatattaattgttgtctccaagtcagtctagtgtagctactctagagatttaagcttcacgatgagttcctagttctcctctctgtaatcccagagttccttccggcctgaagcgatgatgtcatccttcactttcagcactacctgatgatttcgctccatgagggccttctcctcttgggcttcattacgaagagcctccatctggtcctttgactccctgagcttcctcatgaccccgttcatgccaccagacaccgatacagtgaaaccttgatcgatcaaagtcttggaaagtctattggccttcgcagcaatctagcaacaataaagaataaggttagaactttgaaaataaagcataaaaaaggcgcggaaaattgacacttaccgcagtcaaggcaacactcgtgtcctggatttgataaacagggttggaagaagcgtaagctgcatacctcttggtgggaagctgggttaaattagcagcaaaatgactcaccatctctaaagcatacaaagccaagttagggcccacgaagcgtttgaaccagtctgtcatgggatccaaatttaaatcccagacatccccagaatattttcctcaaaagggcccatcttgagcctccctcaaccacttctttagggcctcctcttcagcatctcccttggataattcccccacagtgtaattatgtttggcgatgcagagctggatcctttctttgtcaggatgggcatgagtcgaaatgatgcctggaggtgcaggatactcgtcgaccttggaaggaatcccagaatcgatactagagcgggcggtgtcgaccctctttagcttttttgaaggctccggctcagtaacaacactcttacacttccagtcgagagaatgaaccacctcctcttcctctttgtcaatcaagaccacctcctagttcctaatagcttcaactaggcccccccagagtcacacttactcgggggtgctctggcatgtctaacttaggactgtgagtccggccaagggcatccaaaagatctaccatgggttttgctgttgaaaataagcaagaggtcagaataacaccaaaagattacaagtgcaggtatagtgcaacgagactaatcctacactggtgatctaattttgccctagcaaattcataaattaaaaagctggtgtcgtcttcccctaaaaaactatctgagggaagaaatcaacttgaggtcatgtaggaggaatgatccaaaagaattggtacaggaggaccagagcccatccgggatcgaaaactatataatcttttatcaaattccactggccttaagttagcatactcctggacagaaggaacgaagtgaatattcataggagacttacagggtccagaggtgcttgcaccaggggctctggagttagggaccgagaacggaaatttgggccaaatcagagttttctccttccttgcctcctcccaggagaccctcccagaggcagcctacagttgagcgtacgcgagctcccgctccctcttgtatctatacttgttgtatttatcctttacggataaaatgatgtctaccctgagcgccttctcactcccaggattccggacgttgaggcagaggactttggacaagttgaattcatcaaaatattgactctctagaatcaacttggccctcctgcaattgacagtcggcatgtcaaaaagatcatttagttagagcgggttggagctccaacccgacggattacctctgatccaaaacattcggatacttattggatcttggatcagatccgctctgctccgcctaatttttttctggatcggatctgatccgacccgatttcaatttattttaaaaaaaaattaattcaagactcagatcccttgggacctagactcggacccggacctagacttggacccggacccagactcggacccagacctgggaccggaacccaaactcgaacacggaccaagacttggacccagacccggaccgagacctaggacttggacccgggacccgaaacccagaccttgaccatgatgcgggacccagacctggatctcggaactggaaccggaccctgacccaggactcggacctgggaccccggacctggacccggacctagacctgctcgggacccgaacccagacccagacccggacccagaccaggactcggacccga

SEQ ID NO: 22068 - DNA, 3772 bp, Cannabis sativa
gtatttttggcaaaattaagggcaacagtaccgaaatgatacttttaagggtgtactatagaaattaaaataaagtatatatgtttagtataagataaggtataactatcataaaattttaaaatatttttatttgtatcataattccacttctcaacagaaaattatcttacatttaatttttgttgttatactcttttgaaccttgcgatatgtgaaaaatgctgattggacactttattttgttaaatgataaaccagattttgtattttttaatggtacaaaatagtatttgcacctgtaaaatggccaacaccaacttgctagattagcgagatgaataatgagtttaagaaaataatatagagagatacacaaaatttatagtagttcattacccatgtttcgatggtaatagagctacatctactttgagtttttatttctcacgagaattacaagagaattaactaaggaaaagggctttgatttctagagagagatgctctggccttatggggacttagtagaatgtgaaaaataaatgagaatagctctccttttatagggaaggtagtcttattaaattattaataaaataatacaaaaaatatgaaaaaatcactttggagtgattttggttattgatgatgatctaatggtaaaaagtgactcttgatgaaaattttcaatttttagagtttgaatctcgtctattggattgttatgaggtaattacgaaaaaaaattgggcttgttttgggcacaaattttggacctgaaatcttcagaattgaaatatggatgttagacataacttgataaatccttgaaatatctttgaaacacaagttgaatcgcatcagtaggatgaatattgagggagttattgctattactgaaggttatttagcacccaccgtccaggttgataatctagcacccaggttgacatcttggcatcaacctagacactaagttagtggaaaaacatcccaaacttgtatgttttgatgccaaacttatatgtttacatcccttaaccattttcttagttttggtgaagttgttcataacttctcagagatgtctctttttggtgaaactgggtagactcgaaactccctgattttgtcgatattccaacttgttgaaagagtaaaatatcaaagtgtaaatttgacctatcataatttgtagctcctatttactatgaaaaaaatagtctgatagtcgagatagaaacagattctaataagcagaacccaacgcaccaggtcacacgcaaacctgggcgttgggtgcttcctaggtgacttctatgcgctcattttaatccttctaaagaatttgagattgcaaaagagatctcctgccccatttttgagaaaaataagaagaatgcacaaaggaaaatttatgattgacgagcgaaaacattcgaactaggttgcatgtcaacttgggcgcagggcctagtgcccatgccaacctgggtgttgggtccctattttgacccttaaaaaatatcgtttgcttctcaagatcactatatgtccattatttctaaagatgaaaaagatgtccacaacacattttggaaaaaatgactagaaatatcccatgttgataaaatatcaacctgggcgctgggcgctgggcccagcaccactgtcaacctgggtgttgggtctagctctttaccattggttggttttgtttaatttctaaaaatactaatatcccagttatttgttaaaatagagaatatgcttggaagatttcttttaaattgttgctaaaaatagccaagttgataaagtgtcaaactgggcgttgggtccccgttttggcctccatgtcaatttatttctttcccaaaagtacttgattcatctttttggatagagataaaaaaattgctctggatacttcttcattatttgtaagaaccccaagttcacaatatgtgaacctgggcgttgggtgcactcaaaaatgcaagtgctctgattctaattctagaacctcaaatatgtttgtgacagctcttatttatgttaagtacaaagtttgagcaatttgcattaagacagacccgaaaactaaaaccctagttgggatgtcaacttgggcattgggtgaaaatcctaggcccccttaattgactttcagaatgttgtcttgtccctttttaagtcttgaggccttggacttcgatttttcttgtgttcttggtttaaaatattaaagatagtgagttggaaacaacttggcaggatccaagcacccattctgaagttcctggagtcaacctgggcacagggctagggaccccacccaggtcaactattataactcaaaactactcaactccgggatgtttccttttctgtcacttgttggtgtccacattgtcaaggcaagttttcgtgtaagcaaatataacatgagctcaatttaccaagttattacaaattgaaacttaacaagtttacatgctaatgctttcaaaataataaacatataagacaatcctaaataataatgtttctataatgagatttatgataaatgactgtgtgagatttttgtctatgacatgttattcgctaatgtatgatcatgttatcaatcaactattaatgaatatttatttaaaataaataattaaataaacaataacaattaaccaaataactattaagtattttcaattttactataccatttgaaaaaattagtattaataattaaattacaaaataagctctatcttagattttctcttcaggcaatttgataatattttaggattcccttaagcactcaaaataattaaattatttttaattaatttatttttatataacaatttcattttagaaaattttcaattattaatacttttatttatatttaattaaataataaaattcttttactactcaattcatcttaagtcattatatgtcttaatttattaatttttatttattaaataatcatttaaagataaaatattatactggaaaaaatataagaaccacttttaagggcatacactaaaagtcgccgccatggtcagcaacttttggaggatccaccatggccacagtggctttaggacttagtgtgactttgagcaacatatagatcatgagactcaaaacctgtaatgagccactattaatttgcacaacatggtcgagccagtcctagaccgtgaggtccaaaagaccattacgaattcattgacaagtctcaatggcctaacaaagaccaaaaaatagtggaaagtaattaatccgtgtcagttggtagcctcactcggctaaactaagtttccatgcaagtcagccaactattaaacggatgagacctgggaccatgaagttttattcgttgacatgcatgtgttagtttttatggtccaaatttgagtctaaagtggaagcagcttttagaaaattaaattttagataaaactaatctaaagattctaaaccataattctcaagatctcaacataattacatagattaaatctaaactatctaaaaaagtaatttacctcttaatgcctatcggaggttcctcgattatttttataatttttatcaatcatccaatccaaaggcaaattgaacttattgaagatttcacaccagtgttgtaatatcctagaattaagaaatagattagtaaaatcctaattagataattatgaataattgagaaattatattattatatagttcaatatatgag

SEQ ID NO: 22069 - DNA, 5939 bp, Cannabis sativa
  modified_base (72)..(76): a, c, t, g, unknown or other
atgtgtttatttcattattttggagatattcatatttaggatgttaattcaacatacttattagtaaatctnnnnnctggtaaaatattcccaacactacaacccttatcaccaccataataccattattgccaccaccattctccccaccatagccaccataatatttttactaaaccttacatcagaaaaacaaaatcaccaccactacttttaatatcataaaccataaaaaattaatactctaaattaaaatcacaaacaaaatctacctaaaactctttcaccaaaaaaaatccaccctatattaattttttaaatttttttaaaaatccattcagatttgataatggttttgatggttgacacttgaagaagtcaaacctgaggttctcgtagtttggggtgtcgaggtcgactacacgactggtagcttagggtcccacagtctggggtcttgcatgaggtcaacgataggtttgataggaagtggtcttgatgttcttagggtttcaagatttagatggtggtaataatgacataagaaaaagaagaagaagttgggttgcgccagggggggggggtttatatataatttttaaattatttttattatatttaaaattaaaattacatggacaactaaaatttttccccgtgttcttttgtgtacatgtaggcgacccaccgtggcagttaactaagagttttggacggaagtgtgaagagcaaaatagaatgtgagtttggtaggttttttcgttaaaaaattagtttttgtagttaagttttcaaaaacataaagttcgggtggtttttccccaatatccccacctatataaagccttgttgtaatttcaatacacaaaaaaattcattttagactaataaaaaaattccattgtcgttgtaatattcattcttttcactccgattaattaataaaaaaattataataaactaattctacatatatatagttgcattacaaaaagtaattaaaccatatatgtaaatggattatacttttttttaatgaataatgttagataataagaagaattttggagagaatacttaaatggaagaagttatattttacatctcaatttgtgtaatttttaacttggtacaaaatgatgggattacatctctatttataggactctatagactaatctagaaacatattttttttgcaatgactaatctagaaatattattaaatgacaattttctacatttttctgcataattcccactactaacaagtgaaagataattctagaaaattcaagagtactcacacaaacaagaaaattcttgacactttagtaaatataagaataatctaaaaactttagtaacattaaaaaaattctagaaattaactatattaaatcaagtttaatatttcaacaccccccttaaacttgatttgttactccaataatacttcgtagtttgatgaatgtttctctctagagtgggttcgtaaaaatgttcggtgcttgatcttgaaatttgatatattctactcttacttcttttctttcaatgcattctcttatataatgatagtaggtgtcgatgtgcttactcttttcgtgaaagactagattctttgctagtgcaattactgatttgctatcaacacaaatctcaattggttcctcttgtggcacattcaaatccttcagcaactttcttagccaaaaatcatgacaaacgcatgaagttgcagcaacgtattcaacttcataagttgatagtgtaacgattcgttgcttttttcacatcaaagtaaaatgttgtgttttccatgaagaacacaaatccaatagttctctttctatcgtccaaggctctactccaatcgctattactatatccaattatctcatagttgttagaggatggataaaatagcccataattggtcgtacctttaatgtactaaagtgttctctttgcagttttcaaatgagttattgttggagcttccataaagcggctaacgattccaacaacatagataatatttggccttatacaggttaggtagcaaaaacttccaacaaggcttttaaaaagggttggatccactttttctccttcgttatgctttgacaattttattccacattctagtggtgtgctaactggactaaaatcatgcatcttgaacttcttaagtacttccttagcataaccttcttgagtgacaaaaatgctttcgtcttcttgcttcacctcaatgtcaaggtaataagacataagcccaatatctatcatcttgaactctttgtcatatctttctttaactcctcaatcatactttgagttacttccagttaagatcaaatcatccacgtaagtatacaatcaagatatattcattcttaattttgatatagagtgcatgctcatatggacaattagtaaaaaaaatttcttgaaagtacttgtcaattcaagtactccaagatcctacgcttgctttaggccatagaaagcactcttcaactttaaaacttttcattcatgcctttttacttcatagcccaatggttgcttgatgtagatgtcttcctcaaggaaaccattttggaaagcagactttacatccatttggtggatcttccatctatttttggctacttaaaaaattattattctaataatttcaagatgagctactggagaaaatacctcatcatagttgatgcttttcctatgactataaccttttgctacaaatcttactttatatctctctccctcgcctttagcattcttcttttccttctacacccactttactccaattttcttgcatccttgtcgaagattagctggctactatgtgtcatttttttgttgttgaattgatttcttcatctatcgcatctctccaattcttgcttcttactacttcttggtaacttagaggtttacaatcaccaaatatacacaatagagaaatgtcattttgattctcagttacctcataatgttcttggaagcttctaaagcatggcatctttttatttgagttctcacttgaatcttcttgtatatttccaattggcaagatttgtagagtagtagtttcttgaagttcttcttctatccttggttgcttcgctgcatcttcttcttcaatgtaaggaagaaaatcatacttgttttcttctctgttccaattccaacaatcttcttcatcaaactttgcgtcgtgactgatgataggtttgccggtaattgggttgcaaaacttgtagcctttggatcttgagtcatagccgatgaagatgtacttctcacttttgtcggcaagctttgttcttttctgatcaggaacatgaccactccatgcttcttgaggtatattctcatgtacacttcttgttggagagcgattcaccaagtagactgttgaagctatcgctttagcccaaaactcctttagcattcttttacttttgagcatgctgtgagccatggtgagtgtagatggattcttcctctctgcaactctattttttgggggatcttggcactattaatggacgccaaattccatgatcttcacagtatttgttgaactcatttgatgtgaactctcctcgtcggtcaaatctcatggcttttataggaagacaatttttttttcaactagagctttgaatttcttcaaattctcaaacacttctaatttttccttaaataaataagcccatacttttcttaaaaatcatcaataaagaggagaaagtatgtactcttaccaaatgagtttggtttaattgggccacagacagcagtgtgtatgagctcaagcgactttatggctctttatagtgactcctttaaaaaaaaaaatcgggatttctttccaagcgaacatccttcacaaagttgatttggttggttgatgcatgaaacgcctctcaccgtctccttctctaaaagtttaagtttaccaaaattgagatgtccaaagcgtagatgccaaaactatgatgactcattgtagcaggcctttaaacactttcatgttgaatattcaagagaaacattctattctttgtcatggaaaatttggtgattaaattacttttatcatctcttaagaatatgttattttttttaagtgaatatcataacctttctctaatacgtaattcacccaaactcaaaatattatttttcacgttgggcacaaagtaaagttttgagatgaattgatggcctccatttttcaagcgtataagaatattaccttgccttccacaagtatttttgattgatctccaaaacagacattctcttttaccatttgattgagctctacaaatattcttctttctcttcacatgtaattgctagcactggtgtcaagataccatttattttcttgaccttcatctttctgttttcatgcaagcaataatgttccttcttctccacctttgtcttccatgaaattggctcgcccgtcaaccctccttgatctacatttgaaggcataataaccatgtttgttgcaattgtatcacttgatgtgagatttgtcactccttgacaatgagttgcctcttccacgccctcttggtgcttgtgaattttgacttcgttctccattgttgaaattattgctattatagccaccccttccttctcttcattgtccttgaccacgtccatgttcgctttcttagtcacatcctcttcctttttgatctttttagttgtcaaaattttcttcttcaaaggtgagctttagtaattgctccattttcttcttccgctttattttcctattttaattttcttcataataagcttttaaagaactgatgaattgctcaatagtcatggattctaaatatttattctcttcaatgattgtagcaatgtacttaaaggttggactcacagtacaaagaattttttctataacctttacttctctaatttcttcgctagttcttcttaactgattgacaattgataatgctctagtgaaataatcagaataagattcaatatctttcaaaaataaagtttcaaaatcacctttaagagcttgaagattgattttttcacttgcttcgctcctttgttgtaagtttgaagcttctcctacgcttctttggtcgtcattgcatatgagatcttctcgaatgcatctccatccactgcttaatagatgaggtagagagctttcttatccttctttcttgaatcccttaaggcctctcattgagcttgggaacgagcaccgtcatctttctccttatggcctttctcaacaatatcccacacatcttgagctcctagtagtgcctttaattcttaatactcccattctcatagtttctcttggttagcattggaactttgaaggggatcattcctctacttgctatttttcttcacgaacttggttctggtaccactttgttggataataagaagaattttggagagaatacataaatgaaaaaaactatattttatatctcaacttgtttaatttttaacttggtacaaaatgatgggattacatctttatttacaggaatctcactacaaaatatttcctaattaggggcggacaaaatctgccgctaataatagtagtattagcggtggatcccaatgtccgtcgctaattgggggtttaatttttttaaaaaaaatattattagtggagggttttccacctctatttccctccgctaataccccaccgctaataagtgggcgggaaaaatcctacccattcagtttgaatgttattagcagcagaccccaccgctaataataattaaaaataaaaaaagtaaaaaaaattaaatacacccaaacataagggagctggtattggagaaggcttgtcttgctgaaagatactctcaaggaagcttgtg

SEQ ID NO: 22070 - DNA, 6567 bp, Cannabis sativa
  modified_base (3060)..(3060): a, c, t, g, unknown or other
ttcctttaattgcatttcactaataaattcataattagcttaagtaggattataaccctactctgataccctcttaatcacatatttaataaaatacacccacttaactatcattgtaattttcggatattacattaccactcactaaattttaataattatcatacatatagcttaagtaagaccataatcttacaccaacattaatacaatcacatgtttaataaaatatgtccaattaattaccattatatttttgggatattacagatggcaaataagattatattgaaatgagttttatttagagcataaaataccaatagaaacatcttggaagtacccaaatgtaacgagtatggagtggtgtgatcttcaactagaatcacctttctaagcccactattgctcgaaacagaaactcgagccttataaagtagcataccagtatcagaatctgtgaagtccttagcatgtctagctaagacatcctcccgagctttgataaactcaggatcttcgagttggacacacttgattctctgtaacaagtcaggttactaagttttccaaccataaactcaatacctccattgaccatgtatgtggctaactagggagagatcatcttggtactaaaagattgtctagcgtccttcctacataggacatcagccactacattggctttcccaggatgataaagaatctcgcaatcataatcctttactaattccaatcgccattgttttctcatatttaagtctttctgctaaaagaaatacttgagactcttgtggtcagtataaatttcacaatttttccgataaagataatgtcgccaaacctttaatgcaaacactgctgctggaagttccaaatcatgtgttgggtaacattgctcatactccttcagtcgatgagaagaataagcaatgaccctgttggcctgcattaggacacacccgaaaccctgtctggatacatcacagtaaaccataaacttttctttatctgatggtaaggctaacactagtgctgtgattagtcgcttttttcagttcatggaaattggcttaacacttataagactacacaaaccattggttcttcttagttaattttgtcaatggcatggagatcttagaaaatccctctacgaaatgacgataatatccagctaaaacaatcaagcttctaacctcagaaactatctttggtctcatctaatctccaactaattcaatctttcattgatcgaccataataccatcttcactgacaattttagaaaggataattgggataaccaaaactcacacttcttaaacttagcataaagtttgttttctctaagtcgttgtaagaccgttccgagatgttgctcatgttctgctttcgactgagagtatacaaggatgttattaataaaaactatgacacagttatcgaggaaatccttgaacactctattcataagatctataaaggctatcagagaattagtcaatccaaatgacatcactaaaaactcataaagtccgtaccttgtacgaaacacagtcttcataatgctttccacttggattcttaactgatgataactcgagcaaagattgatcttatagaagactgtcttcccttgaagttgatcaaacaagtcatcaattattggtaatagatacttgttcttcactataagcttattcaactccttataattgatgcgaatttgaggagatccatctttcttcttgaaaattaaaactggagctccccaaaaagatacagtgggataggtaaacccaatgtctagcatcccctgaagttaactcccaccataccaggtgttacagtgagaactcgtcagctaacttgtgggcaaaaaatcaactttacgcttcaaggtcaaaaatgagatgaagaaaaagataaaatgtaaactcaaattgctatcttgaaatggagagagtaattgagaaaattttattgcattcaatatggttttacaagtatgattttccaaccccctctcacatctgagaaggggttatttataggctttaaaggcctgaggtatatagtggtcacagaggacaaagcgccgctttcatgctgcatgccacaagcgcaggaggtggccttgcacctcgtaaccttgtctagtgtcaggtggtcccaggttgcaggcatgtggtccccacttagaggttacatgagagtagtttcaatgtaccgttatttgggtcctcagactctgcaggtccgctgtcgctgcttctcgtacctctttgcttttagagtctttagaaggcatggttgtacacttttcccttgcacatcttgtcctttgattcctcctctaatgtcctccttgccgatatgtattcccctctcacctgtcacttataaccccaaaacacactcacacaacacacaccatggatcgcatgcaatgcccccacatgggctcgcatgtgggcccccaacactcaacacatgcacggaacacaatacacacacacactatcgcgactggagccctaggccatggcagatatgtaatatccataacttgggttgtcaaaggtcacattttgacccttgtacgaagataacactaataaatgatccttgaatttatatatctcacaatacttatttaaaaagaatggattaactcctatatcgaagaaaatatcagtaacaaaatcacgaccactcatcaatataaaagaacaataatatccgcacagttatgtagccaccagataaatagacttactaagttaataaaatatcaaaataatatctagtatccatcatttctcatttctaactagtacatagctaattaaattattcagaccttccattccagcataaatacaaaatcaatttcataggaagtttaatatgtagagtaagactaaactaataacaactttcttcctcgatgataccatcctcatcaacttgcatcaaactgagttttcagaagcggagaaaatagggggtgagcttataaagcccagtaggaaaacaactaatatcaaaggncccttggtttaataaaaattcctgcatggttagcttttaaaaaaataaaatatctcatcaccattatcaaaatgtataaacaaaatagagaaaccacaaataatcacaaaatcaagcgtcaaaggcatatcacactgtccactatatccctagctctcaataccaatcatagaaaatgacattcaaaattgggtagttgcacctgataacaaccataataccagggctcaaatgcaattcactccatgtacagattgtaggtctttcacctacaggtgagtgcacacttgatctacatatgatgatatagagtctgggtcttgaaacactaatatgcacaaatcatgatcaacacgacgctcatcagtataaccaaagaaggcaaataataagaataacaatgaacatattcctttttattttctaaaagacccgtcagcataacggctgtattttgaataaatccaaaaatcataatctgcataaatatttgtacaaaatatatttggcactccgtgcccagaatagtccagaaaaatgcacagatttaaaattttcaaacaatttacaaatcataaaaattggaatatatctaatgttattcaacacatataaaaattaagttcaataatcaagttgagtctctacctctcccaagtcgttaaactttttccaaaagacgatctcaagctctcaagtcccgagcccaattgtttagtctaatcttagatattactctcacctataccatcaaatggctaaataattatcgtcatagcattctacattcaagattgagtccaacgacatataatatgacaatatttaaagtttgaagtttcgcaacctcctctaaacggtgcacattacctatcagaggcggtaaaaattggtgtatcgaaaatgtcgatgaaaatagggctagcatatatcaaaaagaccaccttgatgagtagatcacacccatgccaaccatttgtcaaaatggtacacgatatcgccgaaaaattaccgaaaaggggcagagctagaaaaacatcactgccaaaagtagtgagctgggtgaaatggtttagtgtaagttattctcctcgacgagctggatttagtggtgaagacgacttgtcaaacagacaccggaggtggtaggaaaaattgttcgaggtttgaaccttcaaactttgacttgcgatctcatgctaacgatgacaaaaggggtggcaccgcttggggttgaggtcgctggcacctggggattcgattgctccagtgtgaggggtcggatggtggccaaagagtggtccctgtagttcgctggtgatggggtttcgtgggttttctttgttgtttgaagaaaaaaagagagagagtgggtaactgacaggtaagaaaacaaaaaaaatggtttatgtttttttatatacatatatacaaatccttctctttttgactcagtcaaaccgagtttcacattctcccctccttaagaaaatttcgtcccaaaatttcgtcccaaaatttcaaagtacaacttcaagttggaaattaaacaagtgaggatacttcatatacatctcagactctaactcccaagtagcctcgtcttctctgtggtttttccataagaccttgactaccaatatctctctattccttaacactttttgctctatcgccaagattttgacaggttgttcttcataagtcacatctaattcgcagtcttgtagtccgtgtaagactgtgcacaagaatcctgccacgtccaattcttgttggctaggcacctgttgggagcaagctggtcggccttgtgctgtccagaagctggccagccagcccccttgtggtggctggtctgtcacttatcattctgtttgactgttgggatccctgttggctgaggtactgacttaacctccttgtcggtgagctgtaatgccacatggcactaatattgtccacgtaaacatgccacgttaagtaggcaaaaatcgagataatacctattttaccacttatctcttctaattatttaaataccaattttattttaataattataaataattatcaaataaaatacaatttaaatatgtttattaattagacccacaaattgtactaaaaaacaaataaacgtctatttctcttttcttctaaaaaatgcccaaacttggtaaaaattctcacataagacatagtctatttttgaattctaattgacttaattaattagttgagtctataagatgatactatcccagacaatgtggagaccatgggcctatgtaaccaagctttaaataagtagatctaagatttaccaagtaaatttcctaacttattaattcttcctgactctactatagatactaaattgcactgttgattacatagaatgctctatataaaccaaatatagatacgctatgaattatctattgtttccatctaataatcaaaaatcctcgatagatgatttacatcgagtagggacaaatttattgttcaaccatttaatgtattttatcctcagaacacttatcttcctataaataatatttcagtaaactaatataattactaaaataagagttcttccatttatgtctgttaagccaatttcaaaggaaatcatcctttcatttttatatagttattgacgctatagattcaatatctatgattagggctcctactcaattacactatcatgttcccaagatgtaagtattgtgctaattcaattggtcacctttaacgaacaagtcaaagaacacaataatacagttaatttataacctaagcatctcaggattaagatttattgatctaaaatcaactaagtggtattgacttagaaaagataagacaataagtttttgatatcttttctactatcaatatcggtctagtccaatgtgtacccaatacatccgatactcgtatactttgctaatgctttagaaaggacatttcacatatcattgtgtaagtaaactttattgttgattatcacgttagtgttaatccaatgcactgataaatcatgggactaaatactttgaagcatatagtcataattattttccactgtgtggacaacactataatcatgaataactatatgttcatgatttaatagaatctatacattaaacatataatcatgaaagtaatcatgtaaaccatgcaacataaaatgactcctgatcttttattaattagtaaatctgattatactgaaataggttttatttagggcataaaatctcaataaactccctcttgtactaaataaaactaaaagttcatttcaatcaatctcaacatcttgatgtctagatcaagtgtagtatgtagtactatcattgtaatagaatctgacaggctatattcaatttcaaccttctccacaattacatctccttagtcataaaattcttgatattttgaaattcctttctatatgtttactcctcttagggtattagattctttact

SEQ ID NO: 22071 - DNA, 1793 bp, Cannabis sativa
  modified_base (1722)..(1730): a, c, t, g, unknown or other
ggactgtacatttgtttatttggccaagttaaagtatttttatgatattattacttttttttttttttgaataaaattaaaaaaaagtcctatttatcaacttaaaaatctacatatagtaaaagaaaaaaaaaatctatatatattgttatttaatttttttttggtaaaaaaatattcaagtttctaaatttaattattttaataattaatgattttttttttttaaattaatatcaataaccgtaactactttttaaaatttattttatttaagcttataataataattaaataaaaaaatactacacaatatacatggttgtacagataaaatttttttttttaaattattctacactatattattagattttttgaaaaaagaaaacagatatataaaacctacatacatatatcatattatataattttgaagaaaaaaaataaattaacttattcttttttttttttaatttttttatataagtgttcaatttattttatttaaacttttgaaaaaaaaaaagaatctttaatttacggttatttaataattaaaaataaccttacaaaaaaaaataattgttggacttagttcttcatattgagtaactaaattcatataaataaggtttaaatgatttgtcaactaaaataaattattaatatattcatatttttacccataaagtttaaaatttagtttttaaacataaaatgcccaaaagaataataggctcatatatgattcaaaattaaataaaaccttagccaaaaatataaatttctatacaaaattacacatagataatttttttttatatatatatattttaataatttgacaaaatataaagcctaaaattagggtattcaatccaacctaacatttttcttctaatctaatccaattcgattagtaattaaatttaaaaaatcatcacgatccgatccaatttaattagacctcaaaatccaatctaatccaattacttattggatttgatcgttttattttttaattagatatccattacacacttaaattttcatattagctaaaaatatgaagaaaatatgtaaaaactaagtatcactcttactttagttaggtttaatactctataaagatatatttataagtttaatgccactaaaagtttgaaaaataaaacaataacattatcaagtaataaaatagaacaaaatatcatgcaaataaatatacaaaataagtattataaattcaacataataaagaaagagtcactaaaaatataattaatacaaattttttattaatatttaaatattgttaatttatatataaaaaaataaatattttttaatatatataaatgtaattagactgaatcgatttttaattaaattttgagattgacatacaataactgatccaattaagatccaactttatacattcaatttaatccagttaattataatttgatatcaaatattttgtaattagattgaattcgatcgattgagttcaattagagggttttattttttcataaataaaatataattgaataatataactttgtattataatatattgaaatattttttaattattatttattatattaataaatttttatttttcaaattatacaaaaagaattaatatagccgctcgacgtgcagccatattacctagttttattatattatgggtaaataccattttgnnnnnnnnnttttgcaaaagttacagattggatcctgtgttttgttaaatgacaaaatggacactgtatttt

SEQ ID NO: 22072 - DNA, 2790 bp, Cannabis sativa
ttcatgggataatcctaccagttgcactaacttcattgaattaatgttgtataaaaccaatcacataagctgtagcaacaaggtcaaagctcctccattttctctcacttgcatacttcttcaaccccatttcaatgttcttatattcctcttcaagttttaactcaaagtaagtttacttgaaaatattttcttgaaattgagccttgccaatagcattagttttcacatgagagaaattaaaatatacaagccttttgaaaccttaatttcggataatcactaagtttattagcagcatattggcaataattagaagtggcagtcaacttcatctatctctacttataagattaatttactcttaatagggtaaaattctaatgtcccctaaaagttatagcaacattaattcaatcatcaaaacttgaaacatcgtactgatatgttaatttactccttagttatttttctagtttaaagttatgatcaaacaacaaacactgaaattgagtattagatcagataccattaatatatagaccaccaaaaaaacagaggtgtaatggattcacatacaagaaaaagtattcttaaaaatcaatatcaaacacaaaataaaataaacagaacaatgagtatttcttctatattttagaacaaacaaacacaatatcaacattaacccctttaaaccttaccagcgatgatcaatttaaagacagtccaaaagaaatcaaataatataagagcatttgaaagaaaacaacaacaacagcaaatgggtgaacaaaacccatgttgttgtaacagtaagaacaaaaaaaaaactgtgggaaaagtgatgagggaagcaaaagagctgcaatatcaattagaaatgagagagagtacctttggttgaacctgagaacgttgaaaggcggcaccgttagttctctttctgaggaagttggcttaagttgtgacctgatcagagacagaacgcgggacctgctcaagccgagatgggatgcaacggtaagagaagtggcataacaatggtaatgatgaagaaatgggttgttttagaggagagagtgacagaaaaaaagagataggttttgaatgagatgagatgggagagtgatggggaagaagataaaatcagatctaaatcaataataataataaaacaattatgtataatgtagagagagatacataccagacgaatacaaagagggatagatctgaagcacttgcaccaaatcggagatgatgactgaaattccggccaaatcggccggagaagatgactggaaccagtgagacaatggcagtggtgagagagagagtttgggttaataatacaatacagccttatacatcacttttattccgtatataataatacataataggttgtattaaaaattagggatgtaatatttattacaatacaagctcccacccaaacattgtagtattataacttaatacaatacaaggcccttatacagggctccaaacgaggcctcattgtgttttttaaccatacccatattattgatgttgacaattttactttttttatttggctggaaagtaatggacatcttgaagggttcattctgggttttaaggaaactgagaaaattttcattcattgcgtagggtttgttattctccggcatattatagtttatcattgtttcattgccttttcctttatgtgattttttttaacgaatgttgatgttttgatcatttgttgaatgagggatttaacttgggctcctaattgggttcagcatcaggtggaacaatttgggttcagcattaatctctagctttatgtttttagaaaaaaaaatgtattttttaatatagagtttaaattttatattaatgattgttaatgaaattagtctgtaactttatgtttctaaaaaaaaaaagtattattttatatagaatttaaatttaaatttatataaacatatttatttgtaaaaagattaattcataaaaaaaaattatataaatacacaaaaaatacacaaatatataagtccaatgaataaattaattcaaagagaacatacttctaatttcagattgttggtgattagtcgtatgcatagtaaagaagagatagaaattttttgggtttatttttaaattttaatgaaaaaaaacaaaaaaaaataatagacggttaaaccattatatatatatggtttctatatctatattatataaataatacaaaattaaaaaaaaaaaaataacaaaaaaattgaggatatacggttttttagagaaatatgtgaaacaaaatagactcaatgcttaacaaaattttagaaaataaaaacatgcagagatgaaaatcgaggtattgctggaacaaagatcaatacggttaatgtgatcaaccatgacttagaatgcataaaaatgaatcaacacaattgccaatttccaaatatatgaaagtacatctatatatattatagcaattaatagctaaaaatatgatttttatccagaaatgatggctagctaggtgcacacataagatcaataatgaaattaaatgtcaaacagactgcaaactatgaagattccagtgacattgattatccattagcttgaaacagaaacagccaaagaattgtcctttaatatattagagtttttttttgttttttccctgctctggaatgttctagggtcctttctggtttttccagtttcactcccagtccctcttccagttcacttccacttcccaaccgtcgtttt

SEQ ID NO: 22073 - DNA, 5392 bp, Cannabis sativa
actgaggaacttagagaacttccctcaacaaatcggacccgaccaaggttttcaagattagaacaaatagaggtattgagagagatgatcatgtcttgcctcaagagaaatcaagacatctttgcttggtcccatgaggatatggtcgggatcgatccccaagtcatctgtcatgccctcaacatagaaaaagttaattttaagcttgtacaatagaagtacaggctccttgacaaagagctttccaaagctctcaaggaagaagttgaaagactacgagaaaataattttatcagggaagctttctacttggttaaggtatccaaccttattctggtgcctaaatcgaatagaaagtggaggacccgcattgtatagaccaacctcaaaaaagcatgccctaaagattatttcccactaccagaaattgatcaactagtggatgcaacaactggccattaactcctcacattcaaggatgcatattccggctacaaccaaatcaacatgcatgcaccaaacaaagaacacacgagtttctaaattgacatagggctttattgctataaagtaaagcccttcggactcaagatttcaggtgcaacctatcaaagactagtcaaccatatgttcgacaaccaaattagaaataatatggaagtctgtgtcaatgatatgctggttaagtcgaaaagatctgaagaccacatcaaagatctagaggagtgctttaatatcctactggaatatcgaatgaagctcgaccctctaaattgtggcttcaacgtccaatcaagaaattttatcagattcattgtcaactcaagaggtattgaagcgaatccaaaaaagatcaacgccttactagacatgaagtcaccatcgtagataaaagatgtacaaagcctaataggacaaattgttgcatttagcaggttcatctccacatcaacagacaagtgtgttcccttctttagtttacttaaaggaagcaagaaggggtttaaacagactgatgaatgcaagcaaaccttccaagctctcaaacatcatcaagccaagccacctatcctatctaagccaatagatggtgaaaaactatacatctacttcgaaataactgagcatgaagccagcgcggctctagtgcgtgaggaagaaggagtacaacaccctgtctacttcatcaacaagcatcttattggggctgattctaggtatcccccccattaagaagctagcctacaacttggtcttggcgtctagaaaactaaggccttacttccaagctcacacagtgaaggtgcgtactgaccaaccacttaggcaagttctgatgcagctaggagcatcaaggtgcctactcaagtgcgcagttaaactaggtcagtttgagatcacctaccagcctcaaaaagtaacaaaaagattagcattagcatacttcattgtagaatgtaatagcctcgatgaagacaattccatgatatgtgaagaccaggtccacacgcctaaggctacaactcaggaggacactagaccttcttagaaataatatgtagatggctcctccaacaagaacagttttggtgctgaactcatcttaatgactccagagggattttgaagtcacagtgctttaccgtttgagttcaccacaaccaaaactaggcagagtatgaggcaattctagtaggactaggattaccactagcaattaaattcaaatcacttgagatctacagggattcacaactagttgttaatcaaattctaggtgagtatcaagcctgaaggtcaaacatgattgcatacttgagtaaagctaaagatatactacctcagcttaagcactactccatctaataagtgtcgcatgagcagaacaccaatgcacactcactaaccaccctggatagcactaaaaattctgacactcttagtgtagttcccattgaatacttcgccaaacggagcattaatgaagactcagagcctatcttgatgatagataacactccatcatggatgatcccgattgcccagtacttacaataaggtattcttccaactgactggaaaaaaattaagagactgatgagaaaagcaacttgcttcatcatcatggatggagtaatgtatggaagaagcttttaaatgccacttctaaggtgtgtcacaaaggaagaagccaaactcctcatgatcgaggtacatgagggcttttgtggcaatcatgctgggagcgaagcctctcaaagaagatcttaagataaggatacttttggccaacaatgatagaagacgtaatggaatacatcagaaagtgtgataaattccagaggttttcaaaattacctagagctaccccaaatgagctcaaaagtatacaaacaccctggtcatttgctatctaggtaatcgacctcataggctcattgcctaaggggaaaggcagagcttaatatgtcgtggtggcagtggactacttcaccaaatgggtcaaagcagtgcccttagccagtatcacattaaataagattcttaattttgtggtcaagaacatcatttgtcaattcgaactcccacagaagatagtgttagacaacgaaacacaatttgacaatggccgctttactaatttttgcatcagacatggaatcattaagagtttctcagcggttgcctatccacaaaaaaaggacaagtgcaagcagtcaaccaaactcttaaggatatgctaaagaagcatctggagcaaacaaaacggaattggcctgaataattgctcaaagtactctgggcctatcacactatagaaaaaatagaaataggtcacactacccatagagctcacatctccatcccttcaaaggcttacatacaaccagtaaactaatcatcagtgccagtataactcacagaactgacaatgctctctaagcattgagtaaaacttgtaagtctgtcttcagataacttccgttatttcttaagtgagttaaacactgccacccatgaatcctcagataaatgaagagtgcccacacatgtaacaccactcaagagtaatgatcaaggtggcctatggggatttcgtatggcaagtgaccaatgaaggtacttctttgatcacttggggggcacataggttatgctatggtataagagagccatatgttacacgagcattcaatttttttttcacatctatgtaactgctctcatggtaatgataactttaagaaatcagtgacgttgttccaagtaaccgagtttcttaagacatggtctactgtgcaagtgttaaacttcgaagccgtaactgataaagtaaataaaaaatattagaatcaaagttttattaagttgtaaataatttcttattcaactaaaacaaaatttaaatcatattttactaaggcttatccacatcaaaagaacgcccgagaaaaaccaactaacacactaaagctaaagggtaaaaataaaaaagaagaatggactcaaagaaggtcttggaagcctattcaacaagagtttcctccttacctttactctccctaggaggcacctcactagcagtaggagggaatttgggatgctaagggttgtagccttcaactcctaaagtttctctgataactggttcaccaccattcacagtgaagtctatttccttgagggctggtttggtacgcaagattggactggattggactagaaaggattggactggactggacaagattggattatactgaaagtaatccgtgtttggtttaagaatagactggactattttattttttttaataaaaaaacttaaattaaaataaaaatatataataataaattgaaataaaaatatataataataaaaaataaaaaagaataattcgtagcaaaaaaataataaaagtaattaaattataaaataaataatatatcatatataattaagtatatatcataaatatataataaaaaagtttatcatattttttatttataaataattaaaataacaaaataaaaatacttgaataatataaaattatttacattaaacaataatttaatcactaatttaatataaatattaattttaaaaaatatttatataaaatttctagtaatttaaaaataatatataattttattgtcatatttttttttctcttagaattaatttaagtaactattgtttaattaataatatgttaagttttgaaaggttatgtatgataatttaaaattttacatttttactaatttcaatgaataaatttttgataaaaaaatttataaataaattttaataattctttcatttaaattcttattaaatttaaaatatattaataaaataaaaattaaataaatgataaaaaaaatctcatctgcatgggattatttatcccaccatgctggatgggataaataatcccagccagatgagattagctggattagttatctagacattgaacatacccaaacactggactggacaaattagcctgtctaatctagtccagtcctgcgtaccaaacgagccctgagagtttttgcatcaaaacactgctcacactgtttgatgaagtctgccacatctgtgtaaggaaaactttcccagttgaacgacttggctccatcatttgcagcccaagccttataaatggtattaaagcatatgccattgtaataagtaacatcaaggagggtcttacctttgagagtagttactttcttctccaagaccttgacctggtctgtcaagtcatcaaccataacaactttcttattcaaagtatcgcgagaagagtcttcaagattagaagctttcttttgagaagctaccaagctttaattcagagtactttccgaagacttggcacctttgccacttcttaaagcttggtcacctcactctcaagagaaataactttctccttcaaagcagtcacctggtctttagtagtgacaacatggtcttcagcgaccccaagcttctcaacaagctccaccaccttattgtgttcataatctatggtgcaggcataaccaacacaagaataaagataaaagaaataatgtacggcgatgatacaataaaagaaaggtaaagctagaaggagacaagaaaaagcacttaccccgaagatattggtgaagcatctttgagaaattatatgtggaggcttggtgttaaccaattgctgcagtggaatgttctcagacctagcaccaatcaaggcctcattattcgtaaggagctaggagcctcgtgtcagaaataatttaccaggatcttagatttactaataagtatgttgtttaacaccctaaatatgaacttcaaaaatgataataaataaacacatataaa

SEQ ID NO: 22074 - DNA, 6573 bp, Cannabis sativa
  modified_base (54)..(59): a, c, t, g, unknown or other
  modified_base (4581)..(4589): a, c, t, g, unknown or other
  modified_base (5439)..(5440): a, c, t, g, unknown or other
aatgggttttatttaggacataaaacccaacattggattcttcacagtcttacnnnnnntgattgagtactagacttgctataggtgggcatgcacttattcactataagctcaaaatttttgaagaacaataaaagagattatgaaaatagaagaagaaagaatggtgactctcaaaaactctagttatctgacagaggtcatatgagttgttggataatagaccatcatttattttatactattcacctagagttaggatttaaattatatggaataaaaaatgataaaataatagcaaaaataaccctataatggtcggccatatagacaggccccactagctatacttttgccattttttttaaccatttatcttttatttaacaaatatcatatttttcaattttaatcctataaacaccaaaactattaatgtaataattataattaattatcaaataaaattatcattgaacttatttattaattagactctacaaagtctcttaattaacaaataaaccttaaaacctcttttcttcacatttaagtcattgcttggtgaaaaaatcataaacaacatcccggaagctcggcttaatgaagtttgggtatttagcaaaaaaaaaaacatcccgtaagctccaaaataagtacccaacgtgcaggttgacaaatggcctggtgcgttgggttctgcttatccgaattttattccatttcgaccgttcgtctagtttttcacaataactaaaattcatgaaatcaaagaagttaaattcacaacttcacatatctcatttccaacatgggaaaaaccactcgaaaatgaaaagttttgactctctcatttctgtaaaacagcaacatctccaagaactaataaccagcttcgccaaaacacgaaaataggctaagtgatgtcaaaatatcactgagacataaaaaaaagtacatcctaaggacgtttccccactcacctagtgtccaaatggatgtcatatgtcaacttgggcgctgggatgtcaacctaggcactgggttatgaactgctttcagtaaaatggtcataactcactcaatattaatttgattaatgcaattcaacttgcattttgaaagtatttcaatgctctatcaagtcatgtatcacattttaatcgcaattatgaaattatcgacctcaaattttaccgctaagggagttatgaaataagctctggcttacccagagcgggtcccgctgccgcaacctagactcagaaaattgactatcaaccttcagaaattagtttttctattgctttaagatagtgttgttggcctagtctttttgagctaccttgtatgtaaaagcttttatttattgaataatatacagaattcttccaactctctctcgtctaacaccccacaaataaagttttgcttgtcctaatttgacatcattgagtaaaacacccataacttactcatgtgaactccaaatacgatgattaaaaatgatttgaaaagcttaaaatgagatatgcaacttatatttcacaagctttctcccatagttctgagcatggtcaaattcaaggtttaagttttagctaattgccttgagatcctcactatgtttcagagcatgttaatgtgggggaccattgtcctgcttgcaaatgagccagggaaacgattttccatagtcttgtagactgtctatttgcaagactttgttcggtttgttttgtagtggatggatgggtgagtacttagactaatggactagctaaagattaaaatactacatattagtaacttctccatccttacatatcactctttattccctaaccatttttttcaattgaatgattccctgctcttctcaattctcattacttcaaatctaaaatcaataaaagagaaatcatgtgtggtttattgtagtagttacatgaaaaaatatggggttttatgacattttaaaaaatggaaaagagaactcattggaatactcttattagaccattctaatatcctcttcataagccatgcttactgctccagcaagtccaactctgacaagaactttcgattgcacctgaaatgaaaacaagtgcatgcttgatattgttattctttcttcttcttttctaccctgtacctgggtacaaagaacactaacttaatatctgctcaaacagaaaacgacaagcaaacgctaaaattgaagggtcgtcttctccagcaagcaaggagacttttctctgagccccaaggtagaaaagctagctctccctatcatttgcattgggcaagtgaaattggctacacaacaattcttactcttccagagaaactagttcatcacaggtctgcttttcttatataactatatagtttccttcaatgacttgcttgattgccctcttgattttgcttaaaagaactcccagataaggcagttgagattcttcctcataagttttaatcattaattatgaagaaacatttacacccaacaaggaggaaaaaaaattgtaggcatattatattaaacattgaattttaatgtcttctttgcacactcactgtgaggtcctaatgggattgaaaaaaaataataacagcaacaaagagcctagaaactggtagtaactagagaatttccttcttcttgcgctcaagaactggaggatcaacatcaattcccatattagctgcagtgccggctataattctcatggctgattcaatggttgtgcagttcaagtcaggtaacttctcagcagcaattgttttcaattgctcaatagtaatcttccctactttctccaactgtgggtcttttgaacctttctccactcctacatacaacaagatataattgaacaactgatccaaagcaatagaattcaaatgtggattaaaggaagataattgaaaggaatcttaatttgtaggacaaaaccaggtcagattatgcaatagcacgtgctgtaaaatgcatacaacactgtcaacatatcttgtcagtgcaataacgatttatgagaaccggcttatgaaaaatgtacgcattcccatcaatcatagtttgataaagatctaaataagggccagttcataactaagaatttcaaaattcaaaaaaaaactcgaataagacatgattagctctaagtacatgttgagcaagaccactatctattttgtttacaattgtaaggtgttttcaaatctcatattcattttcctgttctttacaaagattattaaatatgttcattctagcctcattaacatcaacagacaaaaagatatatcgaacaaatgtggttaagagattgctcatcctcaaaaaatttgacagtacaaaaccagaagtgaacacaatgtcgaagtactaaacattatacagttatatgtccaaaactaaaatgctaaaacctaaattacagacattttaatccccaagttccaaccaaacaagtttttgttctgggcagaaaaagttaatagaagacatgtatattattgagggagctagtcagagtggcttagtagtttacctgcagctttaagaagcagaaccgaagctggtggagtctttagtataaaagtaaagctcttatcctaaatagaaaaaggtaaagattaagaaagcaacaaaataagaagaagaataataaaaaagagggttaaacagaaccaagataaactcacatcatagactgtaatttcaacaggaataatataaccagccttgtcagctgtcttggcattgtaatccttacagaaggccataatattgacccccttagcaccaagcgccggccccactggtggtgccggagtggcttttccggcctcaagggcaagctttatcaacccaacaactgcgaaaaaacagtacaaaactcataattgagtacagcgcttaatgggtgacaaagtgtttgtgaaaatgtcaaaaccgggatagatgtactacctttcttggctttgcctccaggtttggcctttggaggagccatagcaacgatactgagacgccttgagggagaatttttaagctgagtctgctgggattggaggaatctgagagaaaattcggagcttgaagagaggctggtaatggaagaaggagatcccaaaagagaagaggagaggtgcttgttgacatttccatggagggaattgttcattgtctttgtggaagtgtagtggggaattatattggtgtggtaagtgcagagtgaagacgccattgatgaaagttgttggaagctttttgcctggaagatagaccctgaaagatttggataaaaaccccggaacaggatactatcactagctagcatcctcttccatctttgctccctcaaatgatgagtacgttttccttcgatacgttgcgttttgttattgggccgctactgttttgggccataaaaacattttttcttggaccaggcccaaactttctcaaatgttttttttctttttttgaaagggattttctcaaatgtttaggtgctgtttggtaacacttttgtttcctaattttttaatcacaaaatgaannnnnnnnntttgtttttaaaaattttgcttttaaaaaataaaaatgtgttctgtaactacttttgttttaaaattttaaaaacagaaaacaaaagtgtgttctgtaaaattcatttttattttcattttttgattttatttacgtcgggtttaggtccgaggtcggatttggattacagtcagaggtcgggttcagcgccaggaccgtggggggatttagattcgagtctgatcgaagtccaaaatattgattaaaaaaaaactatttaaaaaaatattgaaagtaattttttttatttttaaaattttgattctcgattaaaaaattgaaaagtaaaaacagttttaaagaacatatttttaaaaaatattttcactttttcaattttaaaaacagaaaactaattaaaaaagtgttactaaagaaacctaatttttaagtttttatattaaaatttctcacttttttattctgtggaattttttataaaatatttttattttcaaaaatacgattgtgtttcactgttgttctgtaaaaaacagtatatttaaagaaaaaaataaaatcatgaggcactatttttataacttaaaaaaataacttttatagaatatgaatatcgctaatacgagacgctacataaagtacttttaatcttctttttctttccaaaaacaaactactttcatttcccttgaattaatattatgagatagtgttgacggaataaaaaaaaaatcatttacgtgctcttcatttttattgttaataacatctttattacaattctatactatgtaaacaaaaaaaatacattattaaaggattaattagtaatttttcccccgaacttnnacatgtactaaatcatgtccctgaatttttttgtccattaaaatttcttccgaattattgaaattgttaaatttaagaacttttgtctaatttcattcaattttaatgtttcattcactttcattttaaaccatgttagaatttaggacatgtcaaaattcgatgagaaaaattactaattagtcaagttaaaatggatgaaagaaagaaattaaggtattggagatgaaaaattagacgtcaaatgtaagataaatttaatctcataaatacttcaaagaaattacaagattaattttaaaactttaaaactgctcaaacgtatagtaaattttcatggatttattttctcttaattaatgtgttgtaacttcgttgttgaaaaacaaaatggcaatacacctataactacattatttaaattaataattaaataaaatacgttcaaaatgcaaaaggttgaatgattattgataaacacctactaaaaagaaacctacagattcaacaaataagatgataaaaatggtcgaataactttgaataattcattgcatcaaaaaactttaaataattcagtgtccaacttatacaatcaatattaccacaacccgtagtattggtacttcgtgcctaccatttcgtgtctaattccaacctcaaaaatatatgcaacagtgaaaacattcttcaaatctcaacttcattgcaactccgtagtattctttttacgatacaattcaataaaattttaattcacttggtcacattaacaatttaaagaaacgagattcatattagatcgaaaatcagttaatgagaaattacaaatttaaaaggcccaagataatttcgatttatttcctcacaatcacaatttaatgaagcgaaactcaaattacactgaagatcaaatcatcagatcatgagagataacaaatctaagtcaaagacccaaaaaggaaaagaaaacctaaaaaccctaaaagaaactgattgattgtacatattgttatgagaattaaccaccgaaaccgtaaagggtgcgaccttgcctcttcaaagcgtaaactacatccatggcggtgaccgtctttctccgagcgtgctctgtgtaagtaacagcgtcacga

SEQ ID NO: 22075 - DNA, 3289 bp, Cannabis sativa
  modified_base (2294)..(2299): a, c, t, g, unknown or other
ttattgttattattgttacattaatatttttttgattttttttattttttttttaatgtaactctattaagtgtattaagtattaagtattagtgcctcgtaatcatactcgagattctattatatatatattaggagccacgaagctaaagctaacaatgttcaaaactataaaaggacaactaggatctgacatcatgctacacatattctgacgtcattaatatgatttagaatttttttgctaaattagtataagtaaggtttatgaccgtacactaactacagtaccatacacaaacaaacctaaaattcctaaaaaaagagagagacaaaaaagaatttatagatggtttttaattaataccaatatcaatcaagtaattggctgaaatcccaatatatatacctcccaaattcccatataaattgtcctaaaataataatattcataatcaattcacacaccatttgggatttgtaaaaacaaaaaagtaaaagcacaacatattctcacgtttacctatgatttttcttttttaatttttctctcttttccaatatatttatggattatttacacccataaatatatataaagaaaaagtgaaaagaaaaaaaaagaaagaaagatgatgaattaaaattccatcatatatcaaattaaagttgaaactttttttttttacatttaacattaaataaaaaagtaaaaaaaataaacaaatgtgtatttatattattgttaggttttattttttcaactttcatatactaaaatatactaattaattagcattacacacaaaaatgcgcatgggttgaaactttcacttttgggtttggtgaaagttataatgaaatggtccatagctagctaggtttaaattttttcattcatttatttaaatagtgctttaattatgttctttttcttttcctctctaattttttttaaaataaataattaatgggtatctccttttacactcaaattcgaaacagtagatgacaaaagattaaagagagggataaaaaaaattcccaaacaattaagggtctacaaaatcagaatcaatacattatatatctacataataatataatatgtatatactatatattatataatgaaacataaaataggtgtaaaggtcatggttgtgtagtgtagtggtaggcatgagaatttataagttgaggagataaattgtatagaaaattaaatgtaggggtacattattaattactaaagataattatatgtgaattatgaaaatatatataaaaaatttgttgggagggctacaccgctacagccctctcgtgccaagagtggctccatcgatagtattatgaactggttttactgacaattttctttttacgttgattaagggttcgaaatttactatagttccttttgaaatgaattgtgcatgatttatctaaaggctaacttgttgtaggtgttgagccgactctaaaatttaatggagctataaaaaaatatacatttttggatcattatttagaaataaatatagtattttttaaaattagtacaaaaaaaatataactttaaaagagacaaacttcttttagatccttgggataggtgggctccagacacaaacctagtctgcttatacatagagtcgggcctgtgtaagtggcaccatcttatctgatgaaaaccctaaatataatttactgattactcaataataacctgagatataaaaaagaatatgcaacatataatcctgttaacacatgaatgatgataatttttttttttaaagacaaaacctttttttatgagacaaaaccctaattcacgtaatatatataagtactgttattggatataagtatagtatttagtactttatagataaattgttttgtgattggttattgatatttcttaaaacttattacattaaattatataaaattcaataattagttaaatcaataacgatattaatatataagagagtagtaagtattattagtaacttttaacatttctttatatatttatataaataacacaatgattaagtactcctcatcactccccaccaaattaccaattatgcgaccacgtaggtttcacatgctatcacatttttttccgctccactccagctgtaatctgcttattaccttttttatatgattttgtagacttataatcttatttatttttgcataagtgctaattccaaattctctcaagccactaagactagcttagtgctgagggagggatgggaaaaagggannnnnnatgggttcgaacctaggaccttgaagctattaagctattaaatgattaatgctacactcaaaaaaattccaaattctctctctaacttcttaagtataattttgttcatgatggtatgtacgttattattaacacaaacattattttttgtaaatattttaaaagttatgataatttacagtaggttaaattttttatttttaaatataaatggtaaataaaacatctaacaattttgttgctagtcactataagaaatatcaattttaccagtataatttattattgcactgataaaagtaacttttacttttaccagtagatttcgtaaactgcgttggcaaaaaggtcaaagctttaccattgcacatttgcagtggctaaaattcaactttttctagtgcatttacgcgctgggaaaaatcatttttcccgtgctttttattttgtgctggcaaaaattctaataccaatgttgatttgccaaccccttttgccaacacatcaaaagtaaattctattttacgagctcaataccaaacttataccagtacaaaaatgtactgacaaaagtaacatttcttgtagtaaatattgtagcttatttagattttttttttttaaaaaaaaattaatgttgtaatgatatttatttaattgagtattgttataggcgttagggtggtgcctaataccttttagatgtatcttgtgattggctagcgatactccttaaaaattattacattaaactatatgagacatgatatttaattagactaatatcaatattaagacataaattgagtacttgacatcactattactctatgataatttttttttattatatgcatcaacttggaggttgaaattaatagtaatttaatgacaataacatttaaataataataataatagtctaccttaagaagtagttagaacttagaatgataaagaattaattatatgaaggtttggatcacttga

SEQ ID NO: 22076 - DNA, 3282 bp, Cannabis sativa
  modified_base (3213)..(3214): a, c, t, g, unknown or other
aaaaaatttcaatagttacatcaaatatgtagtcatgataattacatttacttttaatagttagattattattagaaggttgtaatttatttaaaaatttactaaaaattattaataaattacttataatttgatattaacctagttttatctatttcttttaaaaaattataaatattaatttttaaaaagattttaattatataaaaatttaatttatttattttaaatattataaataattaattaattaattttttaagtttaaaaataaaattttttactccttagttaaaacatataactatttaactattgaatacttacctataatgtataaaaatatattatattgatattaattattggaggttacaactaaaacatatgtcttgattgattattagagactgaattaatgaaaacagcgcaaaacaactaatatatatgagagaaatttaaaaaaaaaaatataaggaaacttacaaaaattttaaatcatttggattaacttttataaaaatattgtcacacggatttttttttaaaaaatgctgtgtttttataaaacaacagtagaacacaaaataagaacaactaaaaaaataatcgtttaacaacagtgaaaatttaacatagtacataatatagaatagaactatacagtattttcgaaaaataatttatcccacaatataaaagtaaaaaattaaaaaattttagtatgtagtgtaattattccaaaatataattaaactggtattgttcaacttcaaggcccatttgaattgccatattcacataatatacaatataaagtcgtgccaaatgaaataaagacttttagagtgtgaaaaataaaagaagaagacaaagacaaaacataaaagaaaagcagtcgagtccttttcttaatattaatcaataaatgaacttttatggcctgctcatcttaaagttagtaaactattattaaattttggttgatttattggcaataaattattattaaataatttaatccataataataataatgttaggttagctaagacttgagttaaaatgttagcataattttcattggttttaaatatctttaggtcattttcctcctattattttattgactttgcaggtccaataattactggagttctattgtgtaagatagtatttatattattatttaaataaatcatatgctttttaaattattattattattattattattattattagtttcacttggagtacatttgttctgttgttagggttaggtgggaatatttaactagtagtgctcttttatttttggctctatatatattataccttttcgattttctacccaacacttttctaatagtaagtaaattaatgctaagattaaaataatggatggagagatatggtacattagtaaaagtggtttttagaaagaaaaaaaattaaatttttagataaaaatttacaatttaactgttatacgaattttttttacaaaaatactattttttttataaaacaaccgtaaaataacacaacagaacaattaaacaacagtggaacaactaaaaaacaactgttaaaacttaacataatacacaatataaaacttacacaatatttttaaaaaatattccgtcccgttaaaatttttaatatatatatgatataaaaactccttaaaaaatctccaaaattagcttcacttttcagaattagaaagcaaaaattaaaaatatttcaatatcataaaaaaaaaataattatattaatattaattgagagagcactttcaatatattttgattttatatactatattggatgtaaacatatagtagtagcagcagctggaaaattatgattatttaaagaaattaattaattaattatattggcgatagatcatttaatttggaccgttaacatttgattaatatatataatactaactactaagattacatttggtgacattgctatttgtactttcaagataaaatgttaggtatatatatatgtcatgaataataattattatttactatatattaaattaatatatgttatttttttttttgtgtgtgttttgattgagacttaaattaatatgtgtagaatgattgaataaaaagaattagaagtttgaagaaggagaggttgtgtcactgtttgcccatggatttgttgctgtctctcactctatatatatatttatatataaatacatttatataatatatatatatgtggtcctacattcaagtggtgtaagtatctaactctcagtgctttttttcatattgtatatttatatattattaatggatgatattttgcattgtccttttcattattttgaatttgttgctgtaattttggcttctctaaacaaattgttgaatattctttgatattcatattcatatatagacataatttatgtacatataaatcatacattattagtctttgaaattaattgaatcgtaaaagagaaagacagaccattacattaaataaagagatatttttatttatttatttgtaatggaattaaataaaagacgagatttaaacaagagagttatattgttttttttagtaaaagaaaaaaaaaagaaagagaaatatattttcaatttctagttttatgaaaatatctataaaatgtagatttttcaaataaagcctaaagtgttgtagtgtagtgatcagctctggtaaatgagttgtacttgtataattgtattagaataaataatagatatataaattataaaaatataataaaatatataagatatataatttattattcttataattaattagtcttaagatcgatgaaattcaatacatcttataattttaaaagatttttttttatttttaaattttaaaatattttttttttgtatttttacgaaatttcacatcaaaattcatattgcaactaatagagcaacttaaattgtaatcaaaatctgtataacaactaatataaaaattatcggacaaactacttgagaaactcaaactgtaaatttaaaaaaaaattaaaaaataatgtataagataattctcttaaatatattaggatcatgaactaaatgtatagttaataatgaaagggaaaattgatttttaatacttacatatacctaatattttatttctaaactaatacatatcaccatnnaaaatatatgaccactttatctaaaacccaaaaatactcctctcaaattttcatactttttttagtgc

SEQ ID NO: 22077 - DNA, 2363 bp, Cannabis sativa
tgcgagagagatattgggcgagagaggcaggcgagagagtgtgtgtgcgagagagagagagataggcaagagaggggttgggcgagagagatgggtgagagagaagagttgtacgagtaagagagggttcgagagagaaagagagatgggtgagagaaggggtgcgagagagagatgtgcaagaaggagatggatgcgagagagagagagagagagatgaaggcgaagtttgcctaagtgttggagagaagaccgttaagagagaaaccaaaggacaaggcatgcacgcgaaaaagtacaaaacagagtacgaccacgccttcagcatgacctggtgacaagagggtacaaaaagtggaggcacttcatctacatccttcaatgtcctaacaataggtactctgcaatgaccacctctgcaactcaggaccacctgacacccgaccatagtacaatgcgcaagaccacctccttcacctataattcgcagtcttataaggtcagcttgtcccttggggaccacaagtgtatctcaggccattagagcctataaattcctcattctcaaatgtgaggggggttggaaaattttgtaatacacgatactctcaagcaatatacttctgaatattcatattttatgttttgattctaattcttgattctaagttttcaataccatcttcaatcttaattttgtcgaccatttcttagttgacgagttcttgccattaacgatttaagctcaggccatgttgtttccttacatacaatcattgaaaaaggcccaggcgctcttgtcgtctcaaaagtatggaagttcgcctaaacaacacttaactgatctcttcaaggcaatagttgccaccactcgtcattggggaagaaggtgtgaacgatcaaaggccttaagtaggagtagaaggtgtgaacgataaaaggccttaagcaagagaagaaggtgtgaacggtcgaagatctcaagcaagaggataagacaaccaccatgaagaggtcccagtggacatgcatcaagatggagtgattgcttccgtcacacctgatggtgaaaatggatcaaaaaggcaaagagttctgtcgtgtataaggtgcccactgtcgccaacactaagaaatcttggaacctcgcaccaccaacatggaaaagagaaatgggtttactcggtgagttcaagctcctaaactcgtattcacaatgaggagatgaacgagttgaggacaaacaacttatagctggaagaaaccattacaaacatgccaaaagtgcttgatgaactcctaaaaggtcattccgaggcacctttgattaggtgaagagagccataagcaaggaagaaaggtgggagtgagctaagggaagggggaatgtccaaatattaaataagtaacacactagacactccatctaacatctaatctgattcaattggatatttaaaaatgacatccaatccgattcgatcataattggaaatctaataattagcgataaattataattagatcggatcgatttatgaacacccctaaatttgaagaggggcaattactcgcattcaaatacatgtgagtccgtccttgattgtgttaacctactttcgactcacacttaatttttgactctaactcgtaaaatttgtattacgtggtattgtcaaaatgttttggcacccctaaaagatctatagcaaaaaaaaaaagtaattaatttgccaaaaaaaaatggggactgatatatagttgtctaccaaacatatatataaaataataaaaggacattaatttgatgttacacatttacacgttcaatctccacgaactaatcaaacactattaaattctagtttttaataccataaataaataaataatgcttttctcggtttttcttcttttgatatatattactttggttctgctttcaaccacctccgatctccatctcaaacccaactcaaagccaactctttttaccagctaacccattttggaatcatcccaaaagatctgtaaaaagaaatggtagattttcttcatctctatccatctctttgaaagcaggaaaaaaaatagaagctttagtttattcacttgctgatgtctttattcaatatctctgctttgctttgcatggttttctggcatctgggtatttttcttcttccgatttgaagcttgcccatttcgtttttttcttaataattcctgtagtgggtcggacttttttagattggaatgcttttgtgtttaaagattgaatgtgaaatgcgtttgttcttctttgagattcacgaaatttgagcaggtgggttttgtgttttgggaagttttaatcattttga

SEQ ID NO: 22078 - DNA, 4341 bp, Cannabis sativa
  modified_base (4291)..(4303): a, c, t, g, unknown or other
aacttctcacgagatctggaccacattcgctcaactctttaccactagatctcgagctcgacttccacaacttcgcaacatactttaaaccaccaagaaaggatctctttcaatttaggagttcattctcaaaatgaaacaacatgttgatcagcttgccgtagctggtcagcctatccatgacgaggatttagtgatgtacaatcttggtggactaggagcagagtatgaagctgtagtcatcaatttaacatcaagaactgaacctctcattctccaagaagttcagttcatgttgtagagttaagaaatgagaattcagcagcataccactgaatctctccacaatgtgcaagccaatttggccaatagcagacgatctccctcaaattatggattttgaagctccaatagaggaggcagatattccaacaacaatagaggtggtcgtggcaacaggcctgtttgtcaactttgtggctgtacaggtcacaccgcggtgaagtgttatcacaggtttgacatcacttacactagtgcctcaaattgattgattcctcctccttaaatggtgatacccctcaagcccttgtgcctgaatccactcccacattagattcttcactgcctggtatcttgactctggtgcaactcatcacatgacaaatgatgctgatcatctcaactctgtgtctaactataaaggcaaagccaaagtggtagtaggtaatagttcctctcttcccataaatcatatttgatcaagttctgtttgtcctaatttccctaataattcattggtcttgcaggatattcttcatgtacctagtgtaaccaaaaacctacttagtatttctcaatatactaagcataaccatgtcattcttgaatttgatgaattgtcttgtctcataaaggacatacaaccaagcaagttcttctgcagggccatctcaatgaagctctctattagcttcaagtcccagcatccaaatctcaaggcattgtccctgcctctgtcagtttcaaacccaaggctctcaaccatacaaccacaagtaatcatgttcatgacaaatccaaaactgtcaatgtttggcactgcagacttggtcatccctctcagcctatactatataaagttctttctcatgttgttccaaatgtaaagtgcaaaccactagatttttgtaatgcttgtcaaactggaaaattgcaccagtttagtttcaaaagtactgaaaataaaaccacaaaaacctttgatttgattttaactgatgtatgaggtccttccttttatacttcagctgatggttttaagtattacattaactttattgatgatttcaccaaatttacatggttatttcctatgaaaaacaagtgtgaggctagtaacatctttatatagtttaacacctttgtggaaagacaatttcaaattaaaataaaatcagtgcaatctgatcttggtaaagaatatgagccattgcataaactttttactaatcttggcataatttaaagaaattcttgcccccatactcaccaacaacaaggtcgagttgagaggaaacatcgacatgttgttgaccttggcctcacactgctgtcacaagccaaaacgccactatctttctggtgggaagcttttgcttctgctgcctacctaataaattgattacctactcccacactcaattatcaaacatcctatcaaacacttttttagcaaatatcatattacaacctactcaaaatttttggctgctcctgttttcctcttttcaaatcttgtgcatcacacaaagtttctttcaggtcttccaaatgtgttttcataggctacagtgtcaatttcaaaaggtataggtgtcttcatccctcaggaagaatatatgtggcaagaagtgttacctttaatgaacaagaatcccatatgtcagtctcttcctcccattcaacccactatcaacaccttaaccaataattagcaactctttctcataccaagttcaaacactattcatccaccaaccccaaatcacatctcaccacctccaaatcctccaccacctccaaacagagcatccattcaagacagactgtctcctgtcaacaccagatcctcttctggttcagtaactctaccagttgccaatccacccatctgtcccaacactaaccttcaccctatggtcactaggtccaagttaggcatctacaagccaaagacatttcttgcatactccaatgatgaaaaggaaccaacttcatttaaggaagctttttccaatcccaaatggaatgcatccatgaacaatgaaatgacaactttaaagaaaaagaaaacatggactcttgtgcctagaacttctgagatggttattgtacaaaataaatgggtctataggattaaacttaatgcagatggcattgttgaaaggcttaaagcaagactagtggccaaaggtttccaacaaactccagccattgatttctttgaaacctatagccctgtgataaaaccttgcaccataagaattatgttcaccttagctatctctaatggctgggaaatccaatagattgaataaacaatgcttttttgaatgggcaactacaagaagatgtgtacatggcacaaccacaaggttttgtggaccctacttaccccaaccatgtgtgcaaacttcacaacgaaatatatggtcttaaacaggctcctcaagcttggtttgatactctcaatggtactctggttcaatggggatacaccaataaaaaacctgacagcagcctatttttctcaatcaaaaatggtaacttgcttcttatcttggtgtatgtggatgacaatctcataacaggtgctgatacagctgagattcaacatctaatatctaccttgaacaacagtttctctctcaaaaaccttggaccagttcaatacttcttgggttttgaagttcaaagaacaacaaatgaaatttgcttgacacaacaaaagtacaccagggattcttctggccaaaacccaattactcgactcaaaacctcagtccacaccaatgtgctccacaaccaaactctcagcaacaataagtacccccatggacaacccaacacactacagaagcatcattggtgcacttcagtacctcatcatgtcaagacccgatgatgcctttactgtaaataaattgagccaatatatgcaagctccaacatctgaacattggggagcctgtaaaaaaatactcagatatcttgcaggtttaataggacatggattggtctataaacctgctactagatttgacatccaaggcttcactgattctgattgggcagggtgctttgatgacagaaaatcaacatcagggtattgtatattcctaggagaaaatttaatcagttggtgttccaagaagcaaattgttgttgctcgatcgagtacagaatttgaatatagagcccttgctcttgccactgtagagataatatggatataatctcttctatttgagatatgtatccactataatctacctccaattctctgctgtgacaacctaggagctagatcctgagcttccaaccctgtgtttcacgctcgaaccaaacacatggaggtggacctccattttgttcgagataaaatcattgccaagcagcttgacataagttatgtggaaacagaaaatcagatagcagatttattcacaaaaccgcttactgcaatgccatttcaatatcttctcagcaagttaacaactggtttacacaaatgtcacttgaggggggctattggaatttaaaatggctaagtctccaattattatttcattttctattttttatgttttacttaatgtaacagtacttgagttagtttttgttactcttttcttgcaattaactatatatataaatgtcaagtagtggtacctattggaattgaaaattgctaagactccagttattgtttcatttttttgtttattatgttttactcaatgtaacattacttgagttagttagaagtagttagaagttagttaaagtttgttactctactcttgtaattaactctgtatataaatgtcaagcttggcaaactgtttttcagttgagcaatatttttccatctctatctctctctcctccattgtcttcttgctcaagctcaagtattgaaaattcagtactcttacatggtatcagagccatgtcgaatcatggcaactattggatatattttactaagatctagatttactaacannnnnnnnnnnnnaacatcctaatatgaattataaaataatgaaataaaca

SEQ ID NO: 22079 - DNA, 1578 bp, Cannabis sativa
aaccatttaatagtaatccaatagcttagaaaaatgtaaccatgatggttacaataaaaatgtaaccattgaaacctgttccatatttaaaattaataatataactgaattttatgtaaataagttttaaaaatggtaaaaatacttaaaattttgtataatcatatttttgtaattttttttgtttttttttttttttgaaataatccttttttttcttgggattttcatatttttttttttttttgaaaagcatattcatattagttttgccgtattaataaattttatcaagttaatttattggaaccaggactgacatgacagaatcctgtaatttaaatagaatcctttatttttattcacaataacatattattgttaagagaaaaataaagacagcagacaaaaaacattttggcattcaatatttctctgagattttttttcgaaaatatatagaatcaaacaaaaaccccagtatacatgttataattatctatatataagttagtatatatcatagagaatttgaatcaagtaacttcttattcctgaatcatgagtagggaaaatatgaattatataattttaactgactcaatacataaataaaaaaatgaaaccatctgtattaaaaaagaagaaaaagatgactaattaaatttaatattagactaactatactagtacactatgactatctatttttctttatttaatactattatagtagcacttgcagttggagataacaatgacaataatcaatcacatgttaaggttgagataattttaaataaagtaattttaaatataaaacagaccttcctattctattatataaaaaattaatcatacctaattataaataagaataacctttaataaatttaaaaaaatatgtatatttatataaaaataactataaataatcaaatatttatatagtattatttatctgtaatattctatcctttgtttataggagaattagtcttgttgagaatcatagggttacatctcaataccaattggcaatgagtggagtagcccatattcttatatatggctcaataagatggtggctatttttgctcaccaattttgaatcaccttatcataagtagtattatttacttgcttattttttttgttttgctgggagttccatttgcttgcttattcttgttcacagctgggagtaccattttgctcgcttgcagctagctaactctttgataggtgtggatcgaaagcccgctagggatatggctctaataccatgttgagaatcatagggtttcatctcaaaaccaattgacaatgagtggagtagcccatgtttttatatatggctcaatacttttacatttaatccatgtgggacaatattctccaataagtctatatactattttttaacttttcttttttcaaatttacagtttgggttgttctgatagttttttcggtaagttttatgtggtttgctattagattttttgttacgatttatgttgcttcgttagttgctatagggatttttgtgtgaaattttgtaaaaatacaaaaaaa

SEQ ID NO: 22080 - DNA, 5110 bp, Cannabis sativa
gataatataaataataaataaactaaaaaggatcattttgctacaagtataaaataaatatatttactaacatagtcctatattttgggggccatttactatcatttcccatttataattagtaaacataataaaatataaagtagttaagaattttttttaaaacttaaaaaaaactagatttattttttaataaaataaaatcatttaatctgaatagcttttcgtttcctctgctttctccctccatggcgagaaagaaaaagttggacggaaaccagtcactcggctcacgattgacgatgctcttgttggaattgaaagggagaaggaggacaatgatgatattcactcgacggagggtttggaactgattgctaagatggttaaagctcatgacctaattgaagtagaggaattgaatcgatctgaaaaaagtagatcacagagttgggctgaggaggtggataatgagcagaggttgtcggatgtccaacactcaccagaatcagctgaaaggacctgggagacatttacgaaggagaaggttagcaatcgtgatcaacggcttctgtttacagaccattgattagagatggaattaaaatagcacaggtcgatctagaggaggtctgagaagaggagaattgctggaaatcaacagtgatctgcaaatttttgggagctaatccacccattacaatattcgaaggctttgttaaaagggtctggggccatcttggagttatccatgttagtaaattgtcaatgggattaatcatggtgcggtttaatgatgaagcaactcgagatcaagtagtggaggcaggagtggttcaatttgatcggaaaccagttttagtccgtccttggtctgcggatttgaacacaatgaatctggttcacactattccattgtggatcaaattacatgacttggggcttcaatattggggcaccgaaagtctaagtgctttggttaacacaattagaaaacctataatggtggaccaacataccaaggatcgaactaggttgcaatatgctagaattttggtagaaatggaagtcacagacactccatcccaattcattcctttctttgaatgagtttgggcagctccaaggtcagaatgtggagtacgaatggttgccggccaaatgttctcactgctctaagtatggccatactaaagcaacttgtagacactacaaaattatgaaaacgaaggctgaaaaacagcaacaacaacaagataaaaataagcagaaggagaagaagggagagaaggaaattgcagcaaacaatgtttagcaccaacaagagtgggagataccaaagaagactaaagtgctgtcaacaacaacacaactttgagtgtcaagagaaaatgcaggaagctcaagcaactctttaacagtgctgtaggaaaaaaaggaggatggggtagcttctcaggtagctactgaacaataatatagggtgttggaatgtgagggggttgaataaaatggagatgtagaacagagtttttgatttgtgttgtttgaataaaatcggggtttgtgggttattgcataccaagttaaagagtagtagaattagagaaatgatggataggaaattcactaatgggagtattatacgagtacaatcattgagaaccgtattctgatcatttggaggaaaagttttacttgagttattgttgttagagaggaccctcaatttgttcattgttatgtgaagatggctggccatgcgaaagctatgagcattacttttgtgtatggttttaacactatagaagaaagaaaagggatgtgggatggattgctcaatcttagtttcaatgctaaaccgtggattgtgataggggatttaaatgctctttttgatttggaagacaggttgggtggtattatggtaactttgaatgatatcagagatgcaactaactcgctagctcaaagccacttggaaaagctccttaagactggatcaggttgtacttggaccaacaatcaagatggagataagagaatctactcaaagatagatcacacctttgtaaatgaagactggacagataattttccctcggctaaagctcattatagctgggagactatatctgacattgcttgtgtgttatatcgatggctactaacgagaaaatcggtctcaaaccgtttaggtactacgatttctgggctgagcatcctaattttaaagaagtggttcttgaaaactggtatagaccgatgaagagagagggaatgacagctttgtacttaaagctcatgcgattgaattacaccatcaagaggtttaacagagagagaattggggatgttggtaagaagtatcaagaggccaaggagcattatttggagaccagaatgcaagctcaagagcataatcatgatttgtcctaccagcaagcagagaaagaggctgccatgaactttaatgccgaagaaaagatgtatcacaacttcttgagacagatgagcaaggttacttggttgtgtaaaggagatgagaacaatgcttatttccatgcctttctgaaaaaaaagaaggatggaaagtagcatagttacttatacaaatgagcaaggagatatcatagatgactttaatgaagtggtaaaacactttattcagcatttccagggttacatgggaactagttcaatcaccactcagagcctgagaactgattgtatggagctgggaaacaaactcaatttggagcaacaattgattttgataaaaccattcacaaacaaggaaataaagaagacattctttagaattcctgattcaaaatcccctgggccagatgggtatggagcaggttttttcaagacgatgtggcctgaacttggagctgagtttaccaaagcagtagagaacttcttcaagacaggttctatgcctcaggattttcatgcaactatgataactctcgtacctaagacagaaacccccaccaaggctgtgaatttcagacctatagcctattgctcaactgtgtaaaaatgcatctcgaagttgttgtgttccagactctctcaagtgcttcatgtgttgattaatcagaatcaaggagcatttgtgcaagggagatcgatagcccataatgtcatgattcttcaagatctattgaagaattataaaaggaaaaccatatctccaagatgcacactcaaggtgggcatcagtaaagcttatgacatagttagttgggaattcttggaagccctgctaaatgactttaaatttcctaacagatttttcttgtggataatgacatgtttaaaagctacctcttactcgtttttgatgaacggaagagtgcaagggagcttcaaaggcaggaagggtttaagacagggagatcctttatctcctctcttgtttgtcatgataatggagtatttgaccaggagattacttctagcagccaaccaatccaagataaggtatcatcctttatgcaagaatcttaagataattaatctttattttgctaatgaacataattattctgcaaaggaaacttaagtttaactcaggagttaaaagaggttctggatgaatttagtgcaactttaggccttgccatcaacactaacaaatctcacctctactttggggggtgaaagaggaagacaagcaggctatgatgacataattggcccttcaagaaggatcctatcctctaaaatatctgggggtccctctaagaccaacaaaatggaaaactgaagattgtggtgataatcaagaaaataaagcaaagacttcatacctgggctacaaggtatctcttgtatgtaggtagggctcaacttattcattctattcttcttgggctaagaatatattggatgagcatatttatattgcctcatagtgttacaaaggaagtagaaaaactttgtagagggttcttatggggatggaatggaaatatacgcaaactccatgtggcttcttgggaaaaagtatgcctcccaaaatcttatggtggcttgggattcaaagacggagtcaaatggaataaagccattctagcatgatgtgatcaaaccgatcacaatgaccaaatatcaagaacaaactaatcgatcaaagtctatgacagatttaacaaaagcttagtgcaaaggattataagtaaaaacagtaagagtaactgagttaaagcaagagagaatgaaatcaagattcagccattaaagaactttccattaaacatgtatgcaaagaatacaaggtacatcaataggtgattcaaactagagaatgagtgagaggaaattgaactcaaactgagcacaccagaaactggtttcttaataccagtcctatatcacctcacagcctctctctctgtctctctctattgtttctgtaaaaattggaatgtgaaccacacttagctaggagttagttgagtctatttatagacaaaccaacataactaacataactataaaaccggtaaggtagttaggaaagtcctaaaagtattcagctaaggctaagtttctaggccactttacaacatagcaaaatatatttgggccatttcttcgaaaagagacaacctttgggtgaaatggatcaataatatctatctcaagaacaagtctttgtgggactatgaacttaagagtgatactaattggtattggaggaaattatttcatctaaggggaaagttcactcgggaagctattgaaaaggaaagggatggtgtgaacaagtttaaatcgacattattgtataatagttgccttccccaaactcagtttgagttcaacaaaagtatctggaattccctaaacatgccaaagcgcagattcatttttttgcaagctatcaatgttcagcttttaacttgtgacaagtttgtgcaatttccgatcactcttgacaacattagttgcccagtttgtgacacagcagttgagagcaatgctcatatgttttttggctgctatttttcatagcaggtgggggagaaggtctgtttgtggctgggagttaggagttggccgactggtttccattcctggcagcaatggctgctgc

SEQ ID NO: 22081 - DNA, 2250 bp, Cannabis sativa
atacggtcggtattgaccccactgccatatctcacgccttaaacattgatccagactttcatcccgtccaacagaagataagactgatgggcaaagaatgtgcataggcactaatagaagaggtagaaaggctacaagcaaacaagttcatcattgaatctttctacccaacttgggtggctaacccctactagtacctaagccaaacaaaaaatggcgagtatgtatggacttcaccgacctcaacaaggcatatcctaaggaatgttttccactcccaagaatttatcaacttgtggatgcaacatccatgcatgaaatcctaagctttatggacgcctattcgggctacaaccaaatcaaaatgtatccacctcaccaagaacatacaagtttccaaatagatatgggtctatactgctataaagtgatgacgtttggtctgaagaatgctggggccacctaccaaaggttagtaaacaaaatattcaaaaaccagatcgagtggaatatggaagtatatgtggatgacatgctcatcaaatctaggaaggctggggggcagatagaggatcttaataaatgcttcaaaatcctcaaaaaatacaacataaaactcaatcccttaaaatgttcctttgaggtcagctcaggtaattttcttggacttattattaatgctcgaggaaaagaagccaacccagagaaaatacaagccctccttgatatgaagtcaccaacaaaaacaaaggaagtacaaagcttaactggttagagagccgcactcagcagattcgtttcaaagtcgacgaacaagtgcgttcccttcttcaacatcctctgaggcaacaagaagtttgaatggatagaggaatgcaaaaattctttccaagaactaaaaagacaacttgcaaaatgtctcgtactctcgaaacccttagacggagaagaattagggatatacttggcaatcaccaaatacgctgtgagtgccgtgctgataagagaagaaaaataatgtccaacatcaagtctactatattagcaaatgacttgttgaagcagaaggtcagtatatcctgtaattgaaaagcttacttactgtttgatcttagccagaaggaagttaaggccctatttctaagctcaccctgttcgggtttataccaaccaacccttgtgccaagttttgcaaaagcctgatgccttttgatggttactcaagtgggccatagagttgggtctatatgaaataatcttttaaccccgcacagtagttaaagggcaggctttggtagactttgtggtgaaatatacgtacaggcaaagaagaagatagttcaaaggatagccccaagtcagtatgggagtccttactagaagagaataaagaaaaacatatctagaaattacatgtggacagatcaactatcgatcagctttttggtgcgagaatcactctcatcacacctggaaggcaacctctacacaaagtaatcaaatttgggtttagagtctccaacaacaaagcagagtatgaagcactcatagctcggctaaatcttgctcgagaggtacacgttgaatacattgaagtctacagtgattcacagctggtggtaaatcaagtctcaggggagtacatggctcgtgcagagaagatgatggcttattttagcaagatctaggacttgcttgcacaattcaagggttacaccctcaagaaaattctgagggaagaaaacacaactgttgatgtcctggcacgccttgcgagcagcatagtgatagataagttcaacctagtcccaatccaattcttggaggaacccagcatcacctgtgcggaagaagtcaaaatgatagacacgatgccgaactggatgacacccatagcagcttacctcaatactagagaacttccaaacaattaaaaaaaaaaaagactcgaaaaatgatgagaaaacttgcacgacacatcatagtagataatgtaatgtatagaaaagacttctccatgccactgctaagatatgtaacaaaagaagaagctacacggctcttgtccaaagtacacgaaggattttgtggtaatcatgttgtagggaaaattttatcaaagaaaatactaaggtaaggatatttttggcccactatatatgaaggaagatttaaagaaccacgtaaagaagtttgataagtgccagagattttcaaagatcccccgcggaccccccaatgagctaattc

SEQ ID NO: 22082 - DNA, 3779 bp, Cannabis sativa
taaattcttaatacgatcactctagattttaccttatgcaaagaaatttgaaatatttaagaaatttcatggatttctagcaatggtgaaaaaccattaagggacgtgcttaaagatcttgcaaactaataacggtggagaaatatttggtggatatgcagttcaaggatcattaagttaaattttttgaattgtatccaaactaacctccctagaaatttgatttgaatattgatgacagtatagggtttatgattagttactagcagtttcctaagttcttctagggatatatatttgtgataggaaaattttagaatgatggaggtcttattgtaccttactgttccggaacaagcatctttctaggaataaccccctgttcggtgcacaagattaggaattcaagcctactgtcctaaaacttgttgctgtgaccattgctctaggttctccttacaaaatgtctgtgctttggagaaacattccacttcctgctctattcctgctgtctcctgagaatttttccactttcacatcctcagctcatattctctcttggatttttttgaaactttttttttgactttagcccgtctcttattttctaggagtttctcgaactctatcccaagaactattgtctgaacaacttgggaagcgttctccacttttcccatgtcgcaccgtacctaaagaaataggtccacgtaggtgaagacactgacatattccttaacaatcagatttctaggggttctgggaacaagtactgaagaggcaaactcgagaacgaaaatagagaaggcgttgatattcgaggggcttcagtagacttccagcgcatgtaccttccatgtcaaaaacttccctaggcctttgacataggcttggacaaagttctttcccttgtcctacgcttaacgttgtgctacattctgtagcccaccataagctgctcgttgttagaataacattttctgacccctccgtcagactcacgtatttatacatcttgccctctctgcatggttgtgcctctgttgagaaaatagggtgcccaggctcaaaagcaccagtggcctcctcgatcattagagggttaactgggcagacccgtgtgtttctaaagaagcttgggggcagtggtaacaaccagattgtccacattcacctttcccttctcctctcgccagggtaggggaatcggcatttgcaaggctatctctattactctccacaatgcattcggccgaagggtccttaacataacctcctttggctggatctctagacctggcctacagtcaagccactaactttcttcatctatttagcgagtcctcctttacgctcaatataacaaccacaacataggttttagatctttcctcaacttttaatgaaagcactaaaatgttaactgagattttcagaaacttattaattagagtttaaaaaagaagcaaaacaataaatagtagacacgtgattcttacatagtttaggtgttaattattcttagtccatgagtccattttattagccttgtaggcaagcactgcatattacaagtgtatacactttggacatgcactctctattcctctcgtttctctctaaagaaggaactaataggaaatttcagcagaggttgtgtaggttgaagaagttctcatttttttcggtcacaaaatatatgggtatttatgggaggtttcttgttcaatatgccttcaaggccagccctactgccacagatttgactgttgatttggtatgtggaagttccatcgtgtagtgctcaaaggtacgatggatccggatatcccctatgtatcgtccaaatgtctttccttttcaaatcatctcctcacatggccgttggataatgggaaggtacaatggtgcgcatgccttgtactatgacctgacattgggggacaaaaattgatgttgtacccaaaaaagcattaatgtcactcctgtgatctgacaagtgcaggtggtggcccctcgcgacaccgtattaaaggaaaaactgtcctaagcctttctgctatagactcggagagggccttggcttttataagtcatttttgaacccggaagggacatattccctttcgctacaagtatgcacgttaatctttcatgtgctcctgccttgtggtggatgtacttttcacgaaagtccttcgcggaagctagagccacgggcattaattaactacaaattagctttacttcttttgctggattctacttgtcatgcttgcaaaaatctaaataaaacttaaaaataggacccacattataaaataatcacatataatcatataatataattaattaatgttaattgccttattaatctcatattcttagttagtggtcattatactacatgatatgccttgaaagagataataacaacatgtttatttttatcttatcatctgtcaatatcggtctagcacaacataaacaaatacgttcgatcaggcctactttactattggcttggaagcaacattccactccctgagtgtaagtagaacatttctttcattattacgtcagtgtaaatcctgtgcactaataaatataaaactaaattatttaaaggatacaatcactattatatttcactgtgaccctatgtcactatgattatatttatgtatatgttcaagatttaataaatatttcttcgtagacctatattcatgtaaataaatatgtaagtaattaatttgatgaagaaaattttaattctatttatcaatattgataacaaaagtataacataaaaaatatgattttgtaagggcataaaaccaacagaacaaaattttgacttcttagtactttgtgatctctacgtgagttatgtattttttctaagggctcgtttggtacgtcgtattgtattgtgttagattgtattgtattagtattatttaatacaatactatgtttggtgttgacttttattaatagattgtgtaaagatataatatattttcaatacacttgaccccaacacctacgggtctaggtcctaggtgtgggtccaagtcctgagtctaggtctgggtatggatctaggtctgggtctgagtctgtgttcgggtccgggtctgcatcctgggtttgggtccaagttcgggtccgcgtcccgggtctgcatcctaggtctgggttcgggttcgagtctgggtcccatgtcccgggtcaggtcagggtcccaggtctcgggtttaggttcaagttcgggttcgggtccgggtctgagattggtgttaactccgaatcttttgtaaatattataatagaaggtaatacggatcatttgttatgtattaaataatacaacatacattgtattaaaatttttggccgtaataattaatacaatacattgctttatctaaacatagtgttatttattatttaatgcaatatgattcttatacgacataccaatggagctctaagaaaattgagtattccaccatgtgatcctctccaagagagtgtagcatttatccatgtgagtttctctaagggggtttgtgtgtttctctatgtgggttttgggtttcctccaaggaagttgacggattttgatgtattattatgagctgagttttttttttttttctagctagttccattgtagaatttgtaatttcatctggcggtaaagttgcttttgttcatttgagcattaagtttatattttgaatcttaatttggttcactcttttgattct

SEQ ID NO: 22083 - DNA, 3267 bp, Cannabis sativa
aaaatccaaaatgatttagcagagtgctaaagtaaatagagatttgacagtacgtatatatttgattgcattcattgaggttcacttgcgtattcttgaatgtgaattgtagttctgaaccttttcaccctctacaatttgagcttgaatggatgtttgggctctacgatgattacttgtgatctaaacctcttattgtttgaatttatatgctcgcgttcatgttaatgaattggttcatcacattctttccgcagaaagttctgacccagcaaaatttcgtggtaaattgggaaaagatcccactgtggaaactagctttctaccagacaggtgtggtatccctctttgtttgtctgtctgttgtctatctctttgtgaccttggtctaacatttgagcttagagttgttgaggatgctgtttcagtgagcgtgaggctgaggaacaagctgagcgtgaaaggttgcggaaacagtggcaacttgagcaagagcaaatacgaagtaattgggtttattaccttggtttttggtgctcaggttttaaaatttaatttaatactgattgaccccttataatttcagatgagccccttgaaattacttacagttattgggatggggcaggccataggcgaacgatccaggcaagtatagaagctgtccaactttgattggtttatctcttatggtggttcttttttctaatctgtttatcttcatattcttatccctccattcaggtacgcaagggtgacactataggagaatttcttcggggtgttcagcaacaacttgcaccagaatttcgagaaattcgaaccacctctgtggaaaacttgctttatgtgaaagaagatcttattattccacatgtaagatttacatttgtgaaagtatttaaatgcaatccctgcataagatttctctcttttgttaacaaagtgatatctcttgtttttgtggaagtacagcagcatagtttctacgagctaattgttaacaaggctaggggaaaaagtggtccggtaagaacccttttatttatttatttgtatagcataattgatactctgattgaggagaacaaataagagcttcaatctttttttttttcttctttttcataagttataatattttatggtgtgtgtgtgttacaaaaactgaaaattatattttccttgtactttaatcgtgtagtacatctttatattttacttgttttcaatggtaaatccaatctcatgtgtaagattcacgaaccaaagtggaaacaaatttgtaatcggtatataattatattcttcctgccaaacggtaatgttgtaattctgctagtaaaatttttcaataaacttgcaagtggtgttaaggtggattaactatcttatgtcttgagttttcaatgtgacatcccatccacttacagtgacataaaactgaattctttaaagcaaaactatagtgtttctcttatgtccgtttgcatgcacatgttctgttatttctttcgtggtagacgatcactttgtaggagctagctacttattgtaatgtcctttgtgacttgaactattattttttttaacagctgtttcactttgatgtgcacgaggatgtgcgaacaattgctgatgcaacaatagagaaagatgaggtatattttatattccttataacttttgtgttttgaaatattttattgctctctagctaaacacatttttctgatccttttccctcaagtaaaaaatggttattattcaaattataccaaatttccaaacgtttttccatctaaacatgacatgaatgacagatgaagatgtgacaattggccttgtttatatttatagtactctgaatcaccttcggtctaagatgatatcttatcatcttttcatacctattataattgcattatactcaccataataagtccctgtttcacaagtaattatgtgggtgttagtttctcatccataatgctgagataaaattttaaacaacaatgatgatattgattatagcaatattaaaattagtttatgataattgatttgcgaagaagttatttgccatgctattttatatggatgcctttgattgtgaaaccgaaacatgactatctatagcaacttttcttttggggagcctacttttcaaatgaacattctttatcgtttacatataatagtgtattgattctcttatattgttggtactcttattttgggaaaattcatttgaatcatttcttaagtgacctttctgcagtctcatgctgggaaggtggttgaaagacactggtatgagaagaacaagcatattttccccgcgtctagatgggaggtactctttttctctctcaatgaaatgaaaaagtatcaattgttgatattgtgaatcaaattcttccatagatttcattttttatttctttagggtgaaattttcatttagtaaaattaaagaaaaagctcattctaaattaatgaataattcattatattatgatccaacacaagggacttttagtaaaacttgagttatggggatgtagaaagacgcaggactttcttatctaaacataaactataccttttaattaacagctctactactacttagaacttgataatgagaatgatcggaatccaacagacttctcattgccttttctttttacttaatctattatggcagatatatgatccaacaaggaaatgggagcgatacaccatccacggcgactgataggattactattaaggacttggtttctcatatccccagcttttgcttagatttttttataaattatttagctgagtatcatgtgatgcagttttcagtagtatttcaattgcactttaaggaagaaaatatgtattttaacagatttttggacctagttgctaacccatactgatatgtatcttaatcttttctaccatctaataatttgatactctttcagtttatttgatttattttcccctttttttgtatggtttctaccaaatgacataagcatgccaatgaaaaggtaatggaatgatttaaaataaaattgattttttttttttttttgataaatgctactttggtaattaaatctattaaaaaaaaatagaaattttgtttatcccgaaaataattattagaatgagaattattttatatggttaggtttgatttgagaatagaacgatactgtattgtccaaaatattcatcaatcaatacatatttatatattta

SEQ ID NO: 22084 - DNA, 6550 bp, Cannabis sativa
  modified_base (1713)..(1725): a, c, t, g, unknown or other
  modified_base (1860)..(1869): a, c, t, g, unknown or other
  modified_base (2275)..(2275): a, c, t, g, unknown or other
  modified_base (2386)..(2396): a, c, t, g, unknown or other
  modified_base (2640)..(2640): a, c, t, g, unknown or other
gtactgttaattttattggtaattactaataattaattagatatactattaactattaacggcgttgtctaggattgtattgtattaaataataaataatactatatttagataaaatatcatattgtattaattattatgatcataaatttaaatatattgtgaatcgtattatttaatacataacaaattataagtatattaaattgtattacaatatttaaaaaggtctgtaattggggacccaaccctaatctcgaaccccaaaccaaaacctaggtaccccgccccgaaccccacctcgaacccagccccaaactccaaacctgaactcagtccaaaacccagaacctaggacttgaactggaatccgactccggacctagaccctgaccccaccccagactcgaactcagaccccaaaccccaacctggcccccaaacctcgaactagaacccggtcctaaacatggatctcgcccccatccaaatcgggacctagacctcgaattcgaccccgaaacccagacttggcctcgatcccggatccgaactcgaccttggactccagaaccagacaggggtctaagttggggtcgagtttatggtaaaaataatataattttacacaagctattaatataagtcaataccaaatatagcattgtattaaataatattaatacaatattatacaatccaacataatataatataacaccacgtaccaaaataacattaattatctacactacaaaaaatcttacttttagtcacaacaaaatttataatttattatgactaaatgtatttttaatcacaatacttgttgtgactaaaacttatgactaaaaagttgccatcactaaaaatagtaattttttgtagttctaatttccaaactctataaaaataataacaaaataaaacaagaaaagtgggacatgtgcacatgcaagcacaacgaaaccacttcagttttcataattttctcaatttaactaataataatttcttgtttggtataactaatttgttcacttataaatatatagtggacaagtcataaatctcagaataatataatctacatgaggtcataacaaaaaacaaaaatgagtgcagtggagttatatataaaggttaattattagacatttataagaagacttaattatatataatataagctaataattagtaacatgctttaaggtttaaatatgacttaatttatagaaagacttgagtctctgccaaaacatattaattatgtatcaagttaatcaagtgttagatttctttattaatattcttggcttccatagaaaaaaacaaacaccttaaacggttagattcttattgtgataagattgaagattccatatatccaaaaaataagttcaaaaaaaaattactcaaattcaaattgcataacaacaaatctctatgaagcatacaatttaatttaacttaaataaaacattaaatcctaataaagataaattaatttaggtaataataaatcaacgcaatatgtaatttatttaatttaaattttatttttcatcacactcaataatatcattaaaaataatattaattacaaattatcactctattagaatcataaactattaggtgaatatcaattctaaagaaaatagtaggattatgcaaaaactactataaaaaactgctacttttagtgannnnnnnnnnnnnacaacataaattttttgtgacttaatgtgacttttagtcacaacaaaaaattatttgtgactaaaacataccatttagacacaagttatcactaatttagttttaacaagtattgtgactaaaaacacatttagnnnnnnnnnnttgtaatttttgtaactaatacctttagccacggaatttagtcacaacataaaaataataatttataattagtcacaaatttataaaaatttgtgactaaaagtaaatttttttgtagtgaacttagataccatttggtaacacttttactttttaattttttaatcagaaaatgaaagtaaaatttttgtttttgaaaaataaaaatacgttctataagctcttttattttttaattttaaaaacagaaaacaaaagtgtgtatagtaaagttcatttttatttttttaattttatttaagtcgggtctaggtccgggattgaattttgcttcgggtcaaaggccgagttcggtgcccgagccatagggggatttgggtccgggtctagtcggagtccaaaatantgattaagaaaaaaaaaactgtttcaaagaatattgaaagtgactttttcttattttcaaaattttaatttttaattaaaaaattggaaagtaaaaatagttttatagaannnnnnnnnnnaaaatattttcactttttcaatttaaaaaaaaaactaattaaaaaaatgttaccaaacgcagggccggccctgaaaatatatgggcccaagacgaattaaattttatggcccttaaaaatatattgaaaaaatataaaaaaagagtgctatggaatttgaacccatgactttagacattatgtcatccacctcaaccaactaagctatagatatttgttacttataatacacttaaattttacntaaataaaagcctaataattttttctatttttttattttgggcccccggaaagtgtgggccctaggcacgggcttagcccacctatacctagggcaaacgccaccttaattagttgtatgcctaacaattaagatattgttattatatattattaatagatgttcaaatcaccaaattaattattattataaatacttgattgtatttctctttattatattgatttagtttctcattcttttagtcttattcttgtataaataggtattcaccctatgagattcgaacccataacattgtataatatgtgatacaccttaaccaactaagctatgaatatttattatttacaatatactagattttacttaaataaatttttaataaattttttttatttttttattttgggtctccgaaaggtgtgggctctaggcacgagcctagcccatctatgcctagggtcggccctgcacccatcgaatagctaaataagtgctagattgtctagcctaaatgttggtgttttccaaaaagaaggaatagctcccttgattcccatttattcttcctaattttatgaagtgttccttgaaaaaaaaaaacttgtgtttagaagtaactgtgtaattactatagtttaattattagaatagtaattacattatatcttaaaatacaacgtgtgtttagacattaatttactagtaattatttatgaattcttaattttttatttagctaaatagttagtgattagaccaaaaaataataattttagtacatattatccaaaataaaaagttttaagtaattacacgaggattagaaggtgcaattgaggtctctcaattacacaattatagtataattacgtggtcagacaaacacacaaaattatataattactttcaattatctgcaattccaattctcccttcactttccaaacacactcttagtaatgtcaccattaaactgtgtcgttacgcttttcagttaataaatttgagtcgtggctcatgagtagcaagtgaacttacttagccttacaaaacgatgtcgttatgtaactatcaaagacaaaaacgacgtcgtgtgacaatgagaaaaaaaatgttggtggcaagcggattagctactcgtatatatcagagccaggtttcgatcctgggacctgtgggttatgggcccaccacgcttccgctgcgccactctgatttgttgttctaacattcatcattatttataaaacaaaaaaacttaaaaagtgagttaaattttcaaaaagtaataatctacttctttttaataaagaaggattaattaattaaataaacaaacatgcttaacaataattatttgttttattacatttaaaacatgatttcccatatttaacagttcccaagtgtttttacctttttcatggaaataattacttttgaagtacttaataataacctaattaaaggtacttcaaatgaataatcttcaagctagagaaatgttttaacagttggataaatgtatatgacatagtgtctcaaatttaatcttcacaatttcaatttgttaactcttatatgtatatacttaaatattagagaagaggatggaaataacttttattgcttctactcaccacaattagtacagcccaagctctttatatagagttattaactctccacttgcactaagaaataggatcactaattatccaacatgtaaacatgcatcttctagaaaatagcaactaaccaaaccactacttacatagtcatctaattacacgtattaacaaaaaaaaaacataataaagataatttttccaacattctttctcttaagctaatgtgtttataaacactcaattgacattctcttaaacttaatcttccaaagcacatactcctagcatcttttttagtttctaaaatatataccaaaaactataaataagttcaataacgccttctacagtgcgtttccttaagtaatgatacttcacatcaatatgcttgcttattataccaagaagaattagatttttaaaaagtttaattgttgagctattgtcacaataaattatggtggctcgccactagcttgaagtgtaactcttcaagaatctttctcagccaaacagcttgacaggcactagctgttgcagctacaaactctactagttgttgataaagtgacaattgcttgcttctttgaaaatcataaaattgctcctgagcccatcataaaaatataacaagatatgcttcttttatcatccatatctcatgcataatcactgtaagtaaaaccaactaaatctactttttctcctttttagtagaagagcctgaaatcagttgtgttgcgcaagtacctaagaattctatttgcaacaagaagatgtatctcccttggatattctatatacctgctaatatgactcacactgtgcattatatatggccttgttgttgtcaagtacatcaaacttctaactatttgcttatatagagtgttgtcaaccttcttttcttctggatctttgataagcttcaaaccaactttaaatggagtgcccacaggattgtaattcttcatttggaacatgtctaaaaaaattctttcgagaacgaaaaataccatcattagtttgcacctcttctattctaagaaaatagtgcattaatccaagatcaatcatttcaaattcaagcatcatagatcgtttaaattttttaatcatgacactatcatttccagtataaattatatcatccacatataagtaaataatgagcattttacctccatttgaaaatttgatgaaaagtgtgtgcgatcatatggacatttatgaaaaccttcctttaaaaaataagtttcaatacgactataccaaacccatggaggttgttttagtccataaagagccttttttaatttatacactttatgctcatttccaatcttaacatagccatgaggctgataaataaatacatgttcctctaggtctccatgtaagaacgatgattttacatccaattggaagataggccatgagttatgtgcagccaatgtaatgaccaatctaattgcatcatgtctcgctactcgagcgaaaaatcctttgtagtccacaccaaactcttgcttatatcctttagccaccaattgcgctttttgcttgttaacttcaccattttccttcagtttcgtcttttacacccatttaacaccaatagtcttttgcccttttcgaagcatcatcaactcccaagtatattttctttctatggctgaaatttcagcatccatcgcctttctccacttttattctttagtagcttcttcataagctacttcatcacaatctgaaaataaacaaaaatgtgtgagtagatcctcttcagaatcattagaaccagataccccataatccatcatccatgcaggtctttttctctctagttgaggcctttgttcatgggtgcttcattagcaggtggactttgagtgattattgttgttggttgttggattgtctctataggtggccactactgtcttttctcttaatcaccatcaaaatctactggaatttgttgctgaacaatgttctccttccatgcccagattctttcttcatcaaaactttggtgttaggattgtataatttgtaggcttttgattgatcactaacaccgagaaaaatggatttttctcctttgtcatctagcttcttcctattctcatctggaatgtgggcataagcaatacacccaaaaattctcaaataatctaccactggtcttcgtccactccatgtttcttctggtgtcatattttgaacagcaaaagtgggacttctgttcaaaatatgaatactccaattca

SEQ ID NO: 22085 - DNA, 7113 bp, Cannabis sativa
  modified_base (4824)..(4826): a, c, t, g, unknown or other
tagctaattaatatgtatcatttcttatgaattaaacaatatgattcagtggtcatagacatagtctaatggttctacacttctcctcacaaagaggaagtctcaagtttgaatccccctccctcaaagtaaaaaaaaaaaatatgattcatattcgtatggtggtgatattagtataatacaaatttttatctaaatttagtgtttcttgttatttaatacaatatgatccttatatgcgctactaaacatacctgaaatttcatgcactattaattcaattaattaagtattattagatcctgcatatttatttatttaatataagactaattaagatttttgcctccaaattttgacatatatcaaattatacctcctgaacttttaaggtcgttaaaaattctctctgaactatagagattgttggatttatggacctttgtccaattttagtaaggaaaatctaacatggacatgatatatatggtaaatattaaaattgagaaagcataatttagtacatagataatcactaaattaataaaattaaattattaatatcaaagtttagaaaacaaaaattctaattaattatcatattataataaatattagacactacttatacctatcaataatgctcaatataatcataataaactaatggatgtgcaaattaatattagtgtactatcatatatcaatatggggtcccatatatttaaatttaaaataaaaataaaatattattagaccatttgcctcaaaaagaagagtaatagtgtactagctagaaatgtctataaattagattgatcttcacccataaactctcaccaattcataaacatattatatcaaaattagacttattattattatttatttgtatgaagcaaaagggcagaggcttcaaccgtagatcaagaagcttttctcgatctcgtcgagccattgagggttcttaattaattacaattaattttcatttttctttatttctttaaaaaaaaaaaaaaccaaaaatataaaattatataagtaattaatttggaataattaataaaatccaaaatcaaagactataattaaaatggcttctgctgctgcccatgtgaataatggtattgaatccctttaattttttctacctttctttattataattattattattattattattttgggtaattttataattgtaaaatatatatttatttatttattttatagtaattgaagaacgtgaaatacaaaagtgttactggaaagaacactctgtagatttaacattggaagccatgatgcttgattctaaagcctctgatcttgacaaagaagaaagaccagaggtattattaattattactaattaattaattaattaaataatagttacttaattaactatataattaagctttattcagtactgcattatttcatttttatttatatatatataaatattaatattatttataggtattatctttgctaccaccgtacgataggaaatcggtggtggagctcggtgccggaatcggtcgtttcaccggtgaattagctcagaaagctggccaactcattgctctggattttattgaggatgtcataagaaaggtataatatcactatatatcataaatatttaattatgaaaaaaaaaatagtttaatgatacatgaccatatttatgaagttttttgtttattattattgtgtattttaaaattttaaaagctaatattttgattttatttttatttactggttttatattgaaagatttaggctaattaaaatttttatctaaattattggacatttaataatttatttttaattttgttcaattttactaatgcgataataactgtttttgtactaaactataccctcaaattttaacatatattaaactgtgctctccaactttaatatgtataaaattatattccctaaatttttatttatattaagtatttttagtaaaattgaatgattttctttaaatctaataatttcatatagtttaaaagaaattttagtgacttgaaaaatttgtgtgacacaattttaatacaaataggaatcatatatattatttctcatatatataagagaatccatgaatttttatttataaatatatttgtatatgtatatatatttgcagaatgaaaagatgaatggacattacaagaatgtgaagttcatgtgtgctgatgttatgtcccctgatttgaacatctctgatgaatcagtggacttgattttctcaaattggcttctcatgtatttatctgatcaagaggtatatatatacacgaagagtgttaccgtcaacttcttattacaacctcttagttaatttttacgcccaaaaacatgtcgaaataactttttttgaattttttttcacaggggtgtttgtattacaacatcatttctgtaaattttttgaataatttacagtgctaaaaaatacgtttaaagttttttgaacgcgtgtagtaaactgaaatattaggaactctgttttcgatactgtaaactattcaaaatattttaaaaatttataagtttaatactgtaattataacgaatactgctgagaaaacaaatttaaaaaagaaatattttgacttgtgatttcagacgtagaagttaactatttaagagattgtaataggatgttgtatatatatatatatatattaattattaacactaatttgttttatttaagaagaattattttatatattatttttaattttttttccttttaaatttacggattggtttgcttcaatagtttttatgtagctaggctactatgtaaattttagttacgatttaaattgttccgttgattgctatgtgtgtttccatgtaaattttcgtaaaaatacaaataaaatctgcttttaaaatgtaaaaaaaaaaaccctttaaaataaattattgaaaaattgaataaatgatttattattattattttccatttgaggctaaaacataatgatagtcacttccttccactaccaccacaaactctcattctcatgattattctactacataactttacacaattacttaatcaccataattagttatacaaatatagtaatatttacatgcatttttagtaaaataaacaagaaataattgaccaaatccccttatctgatgaaaaaaaaaataaataattgaccttagttaaataaacatttatttatttatttttttttgttggacatgcacatattgtacctaattttttatggtatcttattttataactatataatattatcatatatttttttataattattgtacaaggattgagtttgttttgttttgattattatatgtattaattaaatttttgaattggaatattatatatatatatataggtggagaaattggcagaaagaatggtgaaatggttgaaggttggtgggtttattttcttcagagaatcatgttttcatcgatctggagattctaagagaaaatataatcccactcattaccgtgaacccagattttatactaaggtaataataattttaaattcgtactaaattatgtttttttttaaattttaaagccgttaaaattttttattggactattgacacggttggatttaaggatttttgtccaattttagtaaaaaaagtttaacatagataaaagttcaagagacaagattttatacattttaaaattcgagagatgattcggttgatattaaaatttgggcatcataatttagtacataaacaatcacagaacaatattagtaaaattgaataaaatttgacaaaaatccttaaaccaacaatcttaatatataattcatggaaagtttttgacggttagaaaaattctgagacataatttagtacatgtcaaagttcaggggtaaaaatttgaattagtttttcaaattttaatattattattatttagtaaaatattcattattatttattttttggataattaccttatatatcattttttttaacatttttttaaatttaaagttttggtcagtgatgaactcaaaatttttactttgtgaggacttattcatcattaaaaaatatttatatttatattataataatttttactagatttatttaattttgtggagacttttttattattttggtctctaggtatcaaattaaaaatattacatttaattttttaaaaggtaatatttttgttagtgggactatagcccccacattaatactagtgggttgttcctagttttggttgctttcgtaattactttgatagtttctatgtaaattgttatgagaattttagttgcgattaatgctgttctagtagttgctatgtagatttttgtaaaaataataataataaaaaaaattacttgaaatataaaaataaaaaaccctttatttcttttttcattattttatttttctaaaaaaaaataaagataaattaggtccacagaatattcaactaaacaaatatgtagggtacatagctcaattattgcaagtacaattatctatccttgattatgagaaacagtagttttctttttctgttggggtcaaatttatgattgatatttttaataatgtattgaatagtaattatattttgtccggtgtggtatgtgaaaaaaaaaaaattagggtaatttttaaaaaaatttgtgcataatatatctacaagtacttgactttaagtaaattgttttgattagtttgtacttcatcaaatttttatttttatttaaaaatnnntttaaatatactaataagaaaatcacacgtagataataggcctgcacataataagaaaatcacacgtaatgacttgatatttaatggctaagtacttacgaaagtttaaaaaaaatataacttaagtattattaccgctaaaaattaaatttaagtatttatctccaatagaaaattaaaattaggtatttacaccataaattactctagtttttatagtatatttcttagaatattccttttttgtacattttttttatctgttttgttatttatcagagattttttagtttcaattttaatatatattttttcaaaatcatgtatgttgtaattatttataaatttttagtaaattctaaataatttacaatactaaaaataaaattgaaatattttattacatgcataactattaagtttgtaaaattttcttgtacaatcttaacatgttctctctaaattaattactattattttttgtgaaaatagctctaatttttgttattaatttatatacttaaggtattcaaagagtgtcacactaaggatgaatcaggaaattgctatgaactttctttggttggctgtaaatgtattggagcttatgttcgaaacaagaagaaccaaaatcaggtaattatttcaatgatctatttttgctattgtctcggcttttattacgagacattcttaggatcattgttatagaatgtaacatgtcatttagaattttaagaatgtccctgattcatgtacatcggtcggccaaatgtgattacacataaagtaattatgcatgttttttggactagatgactgactataattttattctttgacatgtataatcttttaacacgtgggacattatttaattatcaatagtattggtcgttgcctaaaaaaaataaataattatttcaacattaacaaagtgctaaataatagaaaattataatatcattagaaagaatttttgtttaaatgttatgcagatttgttggacatggcaaaaagtgagttctcaagatgacaaagatttccagaaatttttggacaatgttcagtacaaatgtagtggtattttacgttatgagcgagtttttggaccaggttacgtgagcacgggaggctttggtaattctttatttatttatttatcactaaatatgtattgtggttcctaaactatgtcattagtaaaattaagggcggacccacatagaggcgaggtggggccgtcgtccaacctgaaaaaaaaaaaatatatatgcattttaattagttacaatatatatttataaatgaaagtgatatctatacacataaaataagctttggtataattgtaaagtcatttcatgcatttagtattttattttactttttgaacatctaccaataattagggctgaacattttgagtgagttcaacccggacccggccaacccgcccggacccaacccggtcaacccgcaattttttttttaaaaaagtattcgggtgggttgggttcaacccggtgcctttcgggttcaaatatttattctttatttatctatcaaatttctttttacttaacatgtgttcgatgaaatgtctgaaagaaatgatggggtgtttttatttaagaaaatcacgggctcttaatttattgagttaaagaacattaaaaactgttatatttgattgttttcttgtgtagaaacaactaagaaatttgtggaaaagcttgagcttaaacctggtcagagagttttagatgttgggtgtggaattggaggaggtgacttctatatggctgagaattttgatgttgaagttgtgggcattgatctttctgttaatatgatatctcttgctcttgaaagagccactgggcttaagttttctgttgaatttgaagttgctgattgcaccaaaaaaacttatcctcataattcatttgatgtcatttacagtagggataccatattacacattcaagtaaatatactttcttcttcttttatctcattagtcatttccttttacttaacttgttcttgttagtggtacttattatagggtacttaaaacgtcgttttggtacatgttttatttgttttggtattcgaaagagttttttagtttaatttatattatcatcgtgtacgttgtacttatttaggatcatctcggtaaatttttaaattttttgaatagttttattgtcaaaaataaaatttaaatgtgtgataaacaattattttaaacctaatgtttgattttttaaattattca

SEQ ID NO: 22086 - DNA, 1970 bp, Cannabis sativa
gacaaccttgattaataagttagaacgacaacacagcagacggttatgaagaactctttattaaccatcaacaatacaatattacaagcagatgtaacccaaaggcagcaattataaaaacttctcagagtcataaatgtaatatacacacaattagaatctcaaacagctaatgggttacctattactcaatggaccagtgaatcctaattcatcagcagtcatgaaccgatcaataggaaggccggtaccagccaatgcacaagcacctaaagggcagaaattcagcctagctctacaatctagtaaacgaccagcatcacgttcaagctacaagtcaaacaacagaattgcccagaattaatactaaatcatggctcattctatttaacaaaaagagctatcataaaagtatctggatgagctgaactctaaaacataaactcattgttatgaaatccacagaaccacatgctttcctatcagtctactcttctgctacacattaatttaataaaaaaaaaattcaaacctgctcaacaaatgctaaaagaagatgctgcagaagaacaggctgtgccctttgcaaatgggtataaccaggtacaataagagcctcattcttgattgccaatttcagcaatgcaacctgaagatatttaacccgctgaacaatcaaatctatagcatcacggcaccatagacggaagtcagttagcacttgatcgtttcggctccgagctgtgtgaagcttctttccaggttctccaatcatatcaataagcgctgcttcaatattcatatgcacatcttccctatcagttctccattcgaatttaccatcctcaatgagcttctctatcttattaagaccttcaataatgatatccctatcactgttactgatcaatccctacattatagatagtgataaaaagattaaacatttcatagaacttgatcaatccgacattttctcagcattcaaacaccaaaactaagtccgaaaacagagaaaaagaaaaagcaaaacctgtttagcgagcatagaagcgtgagctctactccccatgatatcatgcttatacaagagcttatcaaatgaaatggactcagtgaacctctcaacagcgtcagtaacgctctcctcgaatcgacctccccagagcttgttctccttgggctcaggcgtggctagggtttgtgaagcggaagcgatgacgtctctcctggacattgttggtttacgatgagcaaaagagagagtgggagcagagaggttggtggtgatggaggaggagagagtgggaagtgagggaggtgagtagggtgaggcagttaaagagtaatgggcaataatggagtccatggtcgattatcgacaatggcggcctatgttacaagaaatgcactaaaccctctctctctctctctcactaagttttaactgatacactgtatatggcgcgtgagggatcatctttgagtttttgtgtattcttttcgggcccactattttatttgtccacgtcaaactccaacagcagctgcagcagcacacttgaaagagaattactaaaagagaaaagagaaagaataatgtgaatattcttattggttaaattaattattaagtcttagaaattattactagtcaatcacaaaataatatgtttaaaggtactaaatactactagtattcaatagtaatactcttattaaaaagtactactggtacttagcactctgtgtgataatattattggtataattaaatattgattcacatataacttaaaaaatagtttttaaagaatatcgctaactaatcgtgatgtgtcacctataaaaagtataaacaccacccatatctaataacaatactcgacttgaacagagcttcttttaaaaaaaatggtaatctaacttacttttatgctatttagattttgaaaataataaaaaaaaaa

SEQ ID NO: 22087 - DNA, 4479 bp, Cannabis sativa
  modified_base (29)..(31): a, c, t, g, unknown or other
  modified_base (2489)..(2495): a, c, t, g, unknown or other
tccattgaagtatggtgctctatttgtgnnnaaaccttttaacatgttattttgtgaattacttggaaacatcatgctctagattatgaaatctaatcaaacaaatgagccctagctctgataccaattattaaccaagatatgttttcaaaagaagggtgaattagaaatttaaactaatttcggtaaaataaaattttcaacacaaaactatgcaatttaaattaatcaagtaaatacaaataatatgacaagtaaatatagagagtaaataatcaagcttgtaaagtacagagtttaagggtaagaaattactaactctcaattcttacaaggttcagtagaccaaagccacctatgtccttgatcttcaaagctatagagctagcttggagttccattatcgagccaagctaatgggcttgactaagccttataattgggcatttttcatcaaagtgtttccaaacctcttacaataatttttcactgccaaggactatcaaactctttttcagattattgtagtgccaatctcactctaactcggttttttacgataccgatgacaatctcacctcaatcacaatttgaaaatgtgtttagaattacaagcaaactcactcttaaagtataatgatacaattaagaacctagaatgattaataagcacacttagaagaaataagtacaagttttagctcaaagtgtgtgaaaaatattttgttagattttagacttaggagctcttaaaatcacttgaatatttttggtatataaaataaatgctcaaccaacattgatttttgagtaaaaaatgagtttatatagtattggagtgaaatataatcatttatagttgttaacacaattttcaaggtgcattctgccgtgatccggaataccgaatggaaaccataattttggatggctttatattttttttgaactaaaacgtgcacaactttttactcgtttatccgatttcaaaaatttcagttgccttctcttaattaaatgatatgttatcttaaaaattaatttagaaaatttaaatattatttttgtaaaataacttgctgcacaagttagtgagccaaatttcatacttagaaaattttaaatgtggacttataaatcatagcacaagactaagatttgtaaataaactataatgaagtcttgtcttaagttccttgagtcttgaaatctactttgaatcactttcgagaattttggtaaaaattactatttttccattggagttaattttgctttaaaatgcttaattatctttaatttgtactacaaaatcaacaaatcattagtagaaaataataatcaaatatttgttaatcatcaaaacaaagagggtcaatagttcttgtatatatctcaacacatgagcaagaataatttctcatgtgatagagagaaaaaagtttttggtaaaaactcttttttaggctttcaaaaaagttacgtgaaaatttctattctaaaacttatattcagaactttattatactatatatttgaataaacacaatatagattttatttaattaattatttaaattaaattatatttattaaagcatatttaattatttgaatttacaatataactgattcgattataggtatttatataaatataacaaataacccattgagagaatctctcaatcacttaagagaatatctcaactacttttcaaatttaaatatttattcattgaattaattaattaatccaaaaagacaaagccaataaggactccccacacatgtgggacgcatgcactgtgtctgaacacagtgcatgtggtgcctccaatgtcttatttaagacaatgaatgtgccttttgtcgcgataacttttgtttttttttctatttagttaatttgataaataaattattcattacaaaataaataattactattttgctaattcaaaatagatttttctaaacttctatatacaacatttatcctaccccttgacagtgtttcaatgtggcgatctgaggaccatgaatctatacttctaagctccaataaactagatttatttattgaatttcatcaatcaaataatcttgtttattaattctatgattactccactataaatatgaaattgaactcttagtaattatagaattatatatactaatttttactgaagtgtccattgatatgatcaattatagtgattagcccccattgtgtcggttcgtaattagtttttatcaaattactattttacccttctaattacttatttatcttttagtaaagttaattcactagtgaaagtataatttagatccaatctaagtttgtgcacaactttttagttctagaattaacacttaaagggaactaacatttgatccgttaggaaagtcaagattctataattatagatcatgttcccaaccatccacattattgaattctcaaaacagaagttgtaagnnnnnnnttctctgagaaactttaacgagtaaatcaaagaacctaataacatgaacaagagttcatgattacttaagatttaggctgatatactattgatcatctttatgatatgaattaggtctttgtagtagattgtaagtttgataaaggcaactttattatatcggtcattgtcatatataatctttcttatatacaatacattcacttagatgtcatgctacatcaataatctgaatcaagattacctgcaccgaataacgggcatcagtgaactgcactaaaactattgattaaagatttcctaaactttaatatgttgctgattgttttattcttgactaagtgatttaaatcacaacctcgtgtatgaataaggaatttttcgatatttatatgtaaattattcaatattaaatattaataatttaatatttatgcatttatcaaaatgttcaactcttattaataatcagaaatatctttacaagtttttagggcataaatcctaacaagttgatggttgggcgacgagttttgttggtgatagcggcgacataaggtggttttactggaggggaggtcacgagtatgtggtccttggtttgagggtaagattttggggtatcagcccaagtcccacattaaaagaatgagcaagagttgtcttgaatataagtgtttttccaactccattagcatgaggccttttgaaaaagtacccaaaataaaaccgtgagggcttcggtccaaatcggacaatatcatactaatgtgagagttaaagtggactagtggaggaatgaggcccaacaaattgtatactcatttaaaatattttgtaattttttcttttaatcagatttaaataatttattttacaagattattgaaaacaacaagcgcaacaaaattattctctgacactaaaatataactgtgcactgtcatataaaaataatagaatgactacattttatatgctgaaaatatgatagagatgtatattgtacaattagtttttaaggtgcatttaaatttatatatatatatatatatatatatatatttgagtggaaatagttttcagcttacaaataattaacaatatgacttgatacttaataatattgtacaacaatattaataacttatactaattttgagtactagtagtattttttataaatattttattctacatgcatgacacgtataactttcactagtaaattgataattagcaatgctttcatgttgggagtttcttaatcttaaaagcttaaaaataaaataattagcaatgctcaattttttttgttgaaaaaatattgggagcttttaaaatggaccaaaaaaaataatgcactgatataggaaaaaaatttagtttaatttttttcataatcgtatacggttatttaaaaaaaaaaatcaaaattttaaaaatttaaaataatttataatataaaaatcagtgttcacacaatctatttcacacaccgtataaaacaaaaaagacatacatacaacagactgtttaaatcttatttttagcgtgttaaatttttctaaatttatcaaaattttacagtttgtcctaaataactataacgcacacgaccataaaaaatattttttttttttttggtaattacagctaaactatttgaactttaagattttgtataatcaactcttctgaaattttagtggtaaaacccaccaaacctcaattactttttggtctctacttttctgttagtttttaactgttaaatgcctaagtagattacctctatgtatacaaatgtacacctggtagattttcattagcccatgtaatcttaattaattaaaatattacaaaaattaatttaaatcatactaaaccttaaaattcaaataatttagccgctgttataaatattattaattatgtggatgttcaaatcttttatttattaccattaattgtaattaacatt

SEQ ID NO: 22088 - DNA, 5383 bp, Cannabis sativa
ggtctaggtctgggtctcgggtttgggtcgagttctcagtccgagtccaggtctgggtcggggtcccgagtcggggtcttgggtccgaattcgggtctcaggtctaggtccgagtttgggtctgggttcgggtccgagtccgagttcgggtctaagtctcgggtctcgggtttgggtttgggtttgggtcccggtctcaagtccgggtctgggtctcgggtcccatctgagttcaggtatgggtcccgtctcaattttgggtctgggtcctggtatgggtcccaggtcctgggtctggatctcgagtttgggtccgcgccctagtcttaggtccggctctggtcttgggttcaggtccgagttcgagtccgggtttgggttcgagtccgggtccaggtctcgagttcgggttcgggtccgagtctgggtcccaagtttaggttcgggttcgggttcgggtctgggtcccgtctctagattcgggtaggagattggtgttgaccccgaatcctttttaaatattataatacaagctaatacagactatttattatgtattaaataatacaacatacattgtattaaaaaaatttagttgtaataattaatacaatatattactttatctaaacatagtgttatttattatttaatacaataagacgacgtaccaaacaaacccaaacactattatataaatttaattaattgattagctaattcaatatattagttgaacaagttcccatataaaattattatggtgagctttcaatcaaaatttcaagttggttagaaatatattggtacataaatatatatatatatatgtggaaatttatgtagcagattctctatagggttgttctggtaaattttttatcggttttggggtgcattttgaaaaaaaaaaaaaagtctaatttttttgttataatcgcgtgtgttatatttatttaggactacttgtaaattttttaatttttttaatagtttacagtgcaaaaaattagatttaaacagttacttatcacatatattagaaaaaaatagttgtgtgtgcaacaaaatatgtaaatcttatttcaatattataaactatttgaaattttgtaaaaaaaattcaagtagtcttaaataactataacgtacgtgatcatgaaaacaaaattaactaaaaaactccttcgtacgtatgttgaaaaaatagaaaatctactaaaatatccctttaagaaaatgcattgtagacttactatatatataaagatggaaagtactttatcttgtatttagaacttttggtagagtctataagatgagggattattgcccaaataaaaatatgtagtgttcaaagttttttttaggtctcaaagttaactatggacagatttttacaatttcaaatgaaagaagtgaatttttttggcaaaatcacgatataggatatattgatggattcggttaaaatggcagtgtgctttaaattcttcacaaatgtgtcatcgatcatcgtcttcaccgagtgaggaggagcttaacctagctaggataaaggaggactgatattacttgtaagtttggtgaaatgcattggagaggagaatcattaagtcccacatttgctaaaaatagccaagtaggagtatctccatccatataagcaatttcatgccttattttaagttgaaagcgcacaatatcatataacaataaataaatatgcgagtagtgtcgaaaattgtatatacataaaaaatgataagtttgagaaaaatgaatataagatctatcaaaaataatagagaataaagaagacaaacacgtataacaatatatcattaattataaatataaatgattagatgcaacgactaacgagtagatgaatacatcactttcattatttcagcgaattcagattattacactcactttatcactttaagacttacgaaaaaaaacagagaagaagaaaacgaaagagctttttagtgagtaactatatttgttggtgtttttagaattaaaggtgacgccttcttttataggtttcatatagagtacaatactaagtatgaagataaaaaaaattaatgtaaaaatttccactaattagtgatattaatcaatcataattttcaccataatttatgatattaatcaaaatatttatcatattatgctaattacattattgaccgaatctatatttattagcaactatcaatattttaaggcattaattttccatttacacattagcttaaattggctatttattgcatattaaatatatttttttcaataaatatatagctttacatatttgaaagaatgaataccatacatttgatattaattaaacataaaataatgataaagacatactcttaatctatacatctaaaaaacattaatgcaaaattaatagatgaatacatcacaattaattaattaatgcaaaattaattaatcttaatacaataaatatgatatgcactatccttaaaaacattcacaattaagattaatcacttatcatcgttttgagtgtacaaatttatgtaacaaattattatgagcattgtacattgatagtttccaatattagcacaaggtggtgtcttacaaataattaataatttttttatataattattgaattaaaatatataagactgaataatttttgaataaattatacaattttattaataataataagttaaaataataacctgcaatttaatcgggacatctcttttgttggagacacaattaggattagaaataaaaaaaaacgagttaaataatcagccgccgcctaatttccagatctttgaaccttgtagcttgaacacaaacgtaattgtactactaacaattccttcagtcccagaaaacttgttattctcaactactaacattgaattcatggtgagtcatttaaaaaccaacaacgaaacaaaacaaaagcatattatatagacaagattaaaacatttaaaattatgtcacacagacaatactaaaacacttaatcatgtcaaagaaacaagacaaaatgtagtaacaaaaattaaattgcaatagcaaaacacaatcctaaccaagatgtatatatgctcataaaaaactaataaacctggccgtataaaactcgatacttaactacgtcaataactatataatatctcaagatgcatatatgatcataaaaaactaataaatctggccgcataaaactcgatacttaactacatcaataactatataatacctcaagatgcatatatgatcataaaaaactaataaacctggccgcataaaactcgatagttaactacatcaataactatataatatctcatttagcgtatttggctataattatgctcaaattttcatgttcttaattaaggcacgcacaaacataaaattacccacgcgtgcactcatttcgaatccatttaataatttaatatagtatcacaaagtttggttgaaatcacatttaatttaataatttttattttatataatattttaaactagacacattaaacttgatttctttcttactatcataatcttcttggaccatttaaagaatattatttttcagccattatcttcttgaaaaaagaaaaaccaaaagtttattaattaatttttaggagttatccaatgaaaaattaaaacaattgcattttcctcaatattaattaattgtgaggactaactattttttaagataagaattagagataattactcaatcttacctttaattatatattaaagtgaaaaattataggtaaaagagtgcttagcacaataatgatgagagagattatgttaaaagattattacaattacctttataattaatatatagaatttacaaataaaatttaattccatcctaatttttcacttttcttcatatcaatatattagatatttaatcttttttcttttccctttttgtatggcacaaaatataataaaataatgtgagtattcttttttattcttttctcatcattctcattatcaaatttacaaaaacataattctcctaaataaataaacaaagtaaattacattaacttataatttcttatttcattttaaatttatgattaagaaaatatatacttattaaatactaaaaaattcacaacaagaattactcactgaaaagagtaaagaccccatattaataattttgattaaatatgtattttagttacaataaatttaataagtactatatatatagtaaataaatagagataattattaattaccatgcatgcagctaaaagttaattaaaccaaatagggtttttatcacatatttatggttataatcatgattagtgtaagcatgcttacttaaaagacatttaatatcaaataataaaaaaaaaaatagtagacaaagaataaggtccaaaaaaaagatttggttaatcatgtgaaaagaaattgatacccaccaaggtggcagagcctttgtcaaaccaaagctcactgcagtaaaagacattattattagattaattaattaaatgaaacactacttaattaattcgtactcttaattaagctatgaataattaatcatattaagaattctttcagtagcatatttctgtcgtattgtaatcggtcaaaaaaccatgttgttcattctttagcaaaacgagcattaaatttagatgaggcccgaatgtggtagtcgggcttgcccgctgatttaactgtttaaattgcctatcttttgtatcccgatcttttggcttgatgccttttaatgaaatttctcagtttcaaaaaaaaattatgttatgaataattcaatttcctccttatatattatgagaattgctaaaagatattactagtatttagtacctttcttcatgtcatataatttttggtgtaattaagtattatatcccatataattttaaaaaaatattaataattacctataatttttggcaactatttgtgtccaataacaatactcatgtaaatgaataataacctacaatatatattattgcttgttatgaccaaggtgggccttgttatgacgaaaaattgctttgtgtaaaatatataaaatttaatttagtttgaaatttatttacaataaaatatatctaactaattttattaaacaataaaataagtaaataaatttaaatattttaaacaatatagctaataaattttttataatgtttgattaattaattgaattatcgtttaatttaaatttaaatttatataaaaataattatttaattttgtagatacttttaaataattatcgaaattatattttaataaataaattaaa

SEQ ID NO: 22089 - DNA, 1613 bp, Cannabis sativa
attttcttgtctcctaataagcctttcttgttctcctcctatagtacaatccaatattgtaatattgaattcacgtctcgatcgtaactttttcatatataaatatgagatcatgatcgaagatttttgctgtgtgcatgcaccatttttttgccgtatgatattaaattaaacaatattaatatatctagctagctatatatattttatggaatttaatttaatatatttacgtttttcctaattaacaaaaccaaaataaacctatattaattttccattcaagaaaaataataataaaaaaaaaacctatatttttaaacacccagccctattaaatggtaagatattatattacatatagatcttatttaatatattataacaaaatcttacaatttaccttttgaaaaagatatattgatcatgtacttttatttagagattttttttttttataatcgtgtacgttatattttacaaaattttgagatatttagaaaaatttaacatgccaaaaatatggttcaaacagtttattacacgcatgactcttttattttatatgtatgtgaaatagacatatgtttgaatactactttctatattgtaaattaatttaaatcttttaaaattttataaaatatcttaaataattatataaagtatacgactataaaaaattaattagactaaaatattcttctaaatactaaaattgataaaaagagtctatttaattactttgctgatacaaagttgatcgggattaataacgtaggttataaagtacattaatgcattacaaagatggccatatatatatatagatgtacataactttaacatggtgtatatataagaaataaatatgaaatactatatatgtaggtgtagctagacaattaggtaaacaatcttttcatctttaagacattattaattcatgtcagtgcatgaatttaggcgaaaacattcacaaaaccagtcaatcatatgtacacagagatatatatacaagtagttaatttccacatcaataatcatagtaattaattaattaattaattaagctccatctaaaattcaatatcatgtaaatgtcaaatcatctacttaattaatgtacattatatattctttatttgtataagaagttggcatttgcattgaaccgaaccagctatatatgctatatgtagaagaagagaactactcgaaattaataaactataatattaatttaataataatatacaaaatgaaaatgaataatttaatgtaatgtaatgtagtccgtccgtacaatagagaaattagaagtaaagagagagttgggtcagagagttttgggttatgttatgtgtatataaaagagagatagcagaaccacaaagccaaatattttggtcggagttctgagagacaaaagctgcagactttcacatgcatatatatatatatatatgttataataatatatacattgggctggctggggttaatttattggggagttttcaatattatacttaaaatttattttatttataaaaatacctttaagaaaattatttgcacaaataccgctgtgccacgtcagcatatatacc

SEQ ID NO: 22090 - DNA, 2815 bp, Cannabis sativa
acaggggcaaaattggtacaatgtttaaagaaaaggtaaaaatgatactttaaaaaaaatggtaaaaataaaagatgacaatataaaaagggtataaaatttaatttcctcaatattcaatggaacggcccaaaactaattagtagtagcagagtttggagtttgcatatatcaaggcccactataaaaatacccgaatgggccttcagcttaatgaacctcaaatcaaacaatatataatggtattttaataataaggaaaaataaaaagtaattttgagtaaataaaagaaaatacactggaagttcattgtcaaaaaaaaaaaaaaaaagaaaatacactggtcttataatttttttttactgaaaatatattatttaatctacataaaaaaatacttattgttttaacaataatctataaattgttttaggcggtgatattgatttgggcaattcgatttgaacagaataaattcttgtggaaaggtaagaaaaattgagtggatttcattgtcaatttggcttgtatcacccttgattagtggaaaaaagttcaagaaaaaagtttatttctttaatttgatacttagtatttcagatagggctgagctattgtttaaactaagttatgaaaaactcaaggtgaatattaatactgccttatttgacgaggagggaaggcatggttttggtggggttgttcggcatcactagggtcaggtcgtggctgggatttcaagattataaattatgcaagttcttctagagattgttgaagtcgtgactcttaaggaagttcgttcgtggttgaagcatgctttcccaggtgttagtattatcgaatctaattgtttggtattagtacaagatgttagaaatttgaagattttgtcatctgcttttgatggtgtcattgagaattgtaaacaacttttatcttcttgttgtgatgtttttttacgttttggcaaacgatctgcttatagttagagcgtctcgtttatcatattttttagagtctaatcttccttttgatgttactcatattattgagactgaattaaataaaacttccagttaaaaaaaccaataatctataaatacttatttcaatcgaaatacaaacataaaatttaatatttgataattttactaaaatgtatgtactaaataaaatcacggttgtttctagcttttatggagcttatgatttcttttataaataagctttttatttgagaaattaaataaaattcaaatatttaaaaaccatttttctagtgaagaaagaaaaaacgacgatgtaagagattatataagcaccaaaattaaaatcttagaatttttgaattgggaagagaccaattatctatatagcttctttatttttaaaaatttttaaaatttattattaatgctctataaatatagagtattatattttatatatatttaattattttttatatatttttttatatgtaaatattagcactatatatttgaaataaattaacaaagtgagactcaatttagaaaaactatcggaattgtgaagcaagtgtcaataataaaaagcttcatattaacgaaaaaatatgaagtgtttttaattttgtaactgataaatgtaacgatgtgatagtattttaattagtgaatggtgagacacgataataataaagaatagggtttttgtatatcctcaaatagcaccttaattaggaaagttacaaaaattgaaacttatatttgctacctaatataacatgcacacacacacacacaatcacttgcataaaagcatggcaatttgtcacgcattataaatggactttcgctgtccaaaggagtcagaacaagtcatgatatatatatatatatatatatatattatatatcattttgttggtggtaagcataactatacttggaagcttagttttgcttgtattgaggagcattttgttttcttacacaagacaactttcttctttgtttggacttcattcttttaaaatttcccaatgttattatcaaatacaaaaaagatattctcaaatttatatgatggttcattgcttgtgggcaacaattcttcccatttgtctaaactctaatgctttcccacctttttccatcttttatagtgacatgtccaaatccacacatatcctttgatacacttatccatttctattattctttgcaaaggccaaagagtatttcactaattattatggaaattctactatgatatcactaatatcttaatagtgggtagttctattaatgcatgtctatttttctacttttattgaacaatactcctatttgtattaccaatgacaatgagttgtataaaatgcattcctttataaatacataaaagtaatctcaccagtccggtatatattagctaaaatacattttttttacactgttgcagtaacttctccatatatacatgttatctgttttctaatttttttttttaataatacatctattgcaattacttatacatattattaaaataaaaattaaatgtaaaataataatttaaaatgccaattattgatacattatgatgtgtagagatgttattagagtgttctttaactaatatgatatgtaaacttcagagtatttagtggcagacctaaaaattgagggggtgtacctttttttttttaagagacttgaattattgatctctattatatatgtgtaagataacttaattattatactaaagctaatagtatacttatatacatcaccattacttataaatatatattgtataata

SEQ ID NO: 22091 - DNA, 2838 bp, Cannabis sativa
ggaaaaatattgagcagttgtggaatgattacaaggccaagtatgggaatattaactgatcatttatgaaatatatatagtgatagtatatgtatgtgttctgagagtgagccgtgctatatgtaagaaagctttgtaataaaacatggaagggaataaaccatgtccttattataaattataattatatgttatatatagaacatgttgtgaaagtacttatttttttcaagtttgtatttgttcttatttttttatattttaaaaaagcaattttcaataaatcaatatatataaaagtaacttggtaacatcttttctaatttatatatttatatattatatatctatatattgaaaatgactatttaacgataattttttatttaatgattttttataattttttttgtctaaaactaaatggaagattaatgagacattaaaatctctaagatttttttctttgaattgtaatctcctaacgatcccaagaatctcaaccatatttttcgttcacgttaaccttgcttacgagcttttttctcttttttactaaacactttaagaaagaaggtttttgtcgacgcaaatgcgtgttggcaaaaccaggtacaatgcgtcagtaaccttttgtcggcatatgcagtgataattttgatcaataatacgtggttgataaaactgtttttactggcacaattgataaatgggtcgacaaaaggggattataccaacaattttcttcgccagagaaaataggcttgccaaatttaagtttcgactaaattttccatttcatgagtaaaacggtttttacatcaaatagtatgatggtggaatcaaagtactgtcgaacataaggcacattccaaagttaagacgaaacctcatatccctgggtgtgatgagggttacaattacaagtccatgcacgaaagcttgaggattaccaaaggttcgttgatagtaatgaaaggttaaaatatcaatgatttgtatattcttcaaagagaaactgttccagtcaaagaagctagttggtgaaagggctagaatcaaatgtgcaactatgacatcacaggcttgaacatatcagtgaacaaggcctcaaagaactgcacaaacaaggtataattgaaagtttaaattcttatgtcttaccattttgtgaagcttgtgttttagggaaacaacataagctgaaattcacaccagcaagaaatacaaggaagaagatactcgaatatgtgcatgttaatctttggaggccatatacagtatctactcattctggtaagcaatattttttttctattgttgatgattatagtaggtgtgtttggtcctaattactagcaactaaaatgaatgcctacaacagtttagaacttggaaaactcaggtgaaaaaccaaattgatctgaaagttaagaaccttaggactgacaatgggttagagtttattaactttgaatttcacaagttgtgacaagaatatgggattactaggcacagaatcgtagttaagacccaaaaaaaatggtattgctgaaatgatgaatcgaatcctgttgaaaaaatttaggtgtctgctattcagttttagatttgagaaattattttgggaggaagctctagctattacaacctattttataaataggagcccaaacaaagttataggattgaaaaccccttatgaaatgtggtacaattgaaccccaaacctaatgcatttaagaacctttgggtgtacagcatatgtacatcaatctattaacaagctagaacctagattagttaaagaaactttcctagattatgccttaggtaccaagggttatagaatatgtatttccaagaagagtagaccaaatgtagtaattgctagaaatgtgatttttaatgaattagaatgtcccaacttgacagctggaaaatgtagtgtgtctccatgtgatacaagaaagtctagaaataagaacattacacacatgaaaaggaaatacaaaacaaaacatcagaaagaaagttcgtagtcgaaagttattgtggaaacagaagatgatacatagatgaaagctagagctgaaagataacaaagaccaaacaaattttctggaaaaatccaaataggtaggtctggaatagttggcgaatgatagaactagaagagagattcacccttcgaaaaggtttgtcaaggaaaatttgattgcgtttgcactagtggtggtacaacaaactgaaattgaagagcccaaaagctgtgaagaggtaatttcatgtgtaaacaagtctaaatggctccagaccacagatgaggcgatgggttcactctgaaagaataagacttgggtggttgtgtcaaaatcggagaacaaaaagattgtagagtgaaaatgaattctcaagatgaaagaggaaattaatgagaatgaaccagtactgttcaaagccaggttagtggctaaaggctttactagggtggaaggaattgactacactaaaatcttttgacctgtggtaaagtagaagacgataagattgatgttatctttcgcaactcaaatggagtttgaagttgaacaacttaatgataaaactgcatttcttaatgggttcttcgatgaagagatatacatgaagcaactgcctggcttttaggtggaatggaaaagaattgaattagtatgtaagctcaacaagtccttatatggtttgaaacagtccccaagataatggaataaaagatttgatacttatatgcaacaaatcgggttcaaacggtttgcatatgatcactgcttatattataagaatttagagcaatct

SEQ ID NO: 22092 - DNA, 1434 bp, Cannabis sativa
ttattgtaatccccttctctcttgtaatgagaacttttttaacaattggattggataatttatgcatacccctactcaccttaaacatctattaagaagaatggtccaatgttccttcaagttcttataactcgtttccttcttcggggatgtttaagtaagtgtggatgcttctattaaagaacaaggttgtaaacatggttatggagatgtgattcaagactgtgaaggaaaactcattgcaggttgttactcttcaattattagcggtcttttccctatttatgcagaaggtgaagcccttcttagagcaatggcttggtatttggcagttcaatttctacttgacattattgtttatgattgccaagttttaattaagaagattacaagtaaatggagaaataaatcatctccttcaaatattgtttatcttgccttcctaatgcttccatttattatgtacctagaaattctaatattttggctcataatcttgctcagagagcattaggaacccatagagaggttatttgaaacggttgtgtttcaaactcttagttttggatctttgtaaactatactaaattgtttaatcttaatgttaccaatcttgttttaccaatcttgttattcaaaaaataaaaaataaaaaataaaaaattagggtaacgcttaccttgtttaatgcttatttggcattttaaatgaggtgacaaaacttaattggttgggataggaattaaacaaaaaaaaagtgagaggtgatttttctccccaaaacaacttttatctttcctaaaaaaactactaaaattttaaaataaaacgttaatgttttctatttatttttatggaaaatttacaactttatactttatagtacttttttttaattaatcaggagatttattaattaataaacttgctcaaaacaatagaacgcacttcagaggaacaatcctcaaactgaagcacacaacctgtaaagaaataagagtctcttgccaagcaatgagccaacttgtttgctgatttaacaaaatataactcaacaaaagataaagccaaaagtaaattcttaacatcttgaacaataagaccaaactgtgatgacataaagactttactttggactgcttggacacacaccaaactatccgtttctaacactacactgtcacagggatgagtcgcaatccaactcaacgcttctttgatgcctatgacttcagcaatttcgggttggacatacccaacctttcccttcttgaaagcttctaccatggttccatgatgatctcgagctacacaacccactccaaactggccctcttcttgaaataaagccctatcaacatctactttaatcttgtttaacacaggtgcaatccaacactcacagttccacccccatcattcaaaggagacaac

SEQ ID NO: 22093 - DNA, 2049 bp, Cannabis sativa
tggtagtgtggataagaagcactattctgcgctgagaagttggagtggcctttgtcagcccaagaggtgtgggggtcttggatttagaagatttaaggatatgaacttggcgttattggctaaactttgttggatggttatggaggggaaggacaagccatgggtgaagctccttagagataagtactgtaaaagtactgatgtgtgggatgtggagaagactgggaatgattctagatgttggagaagtatccttcaggccaaggctatttgtgtgaatggggcaggctttatgatagcagatggttcctatgaaatctgggataggccgtggctgcctaggagaggcttcgaagaaattaaagataatttccaatttcagcacaaccagcctttatggagggtggtggacctatttataccaggatctagacagtggaatgagaaggttattagtgattgcttttctgctgacattgcagaggacatactccgaattagaattttggatgaggggggagatgttttattctggaaagctgctggatcaggtaaattttttgtcaagagtgcttattagttaagccagcaacacaggttcaatgagccgcatatgctatggaagaagttcttgaagacagagatcgacccaagattgaagcacttctgctggaagttattcagtgacttactccccaccaaaagtaatctcggtttcctgcaggctgatcaacaattgtgcgatttctgccattctgaagtggagacggctgcccatttgtttttcaatgtaattgcatgcgagctttatggttcagatttggtatcaggatacaagagtgcaactgggacaatatgttagagtttggcatgtggtggtgtaatttgaatgacctgaacctgcaggtgatgattgtggttctatgcaattcaatttggaagtggaacaatgatcgtgtgtttaaaggacaagcagatgatttggaggtcatttacaggaaaattatccaccgttcacgggactttgtgtcaaagacaatctggtttgagcaaggtgaagagcatcgaatggagactcattgatcggggactgttgtgcctcattgtagtgactcgattatgccgtggtgctgcaaggtagatgcttctatctctgatggtgttgctggttttgcagcaatacagattaatgatgctgatgttggaaattctctggtgtacttgggctggaataaagtcaggggtgtgttggaaggtgaacttcttgggattgccttggcactgtggatggcaaaggaaagtcacgcctcagttgttaaaattgagacagattctttgattgctgctacagcctttggaaacgctcaacttccttatggctgggatacttacccgctgtttcgagattgtttgtgtttgtgtaaggcttttgacaaggtctttgtttgtcatgtgaaccgggaacacaatgtaatggctgatgcacttacccgttgggcgagagtgcataaggcagaggccactggtctattaagggatgtagccccctcttagggttactagttttctttgctttcaataaaagttttgttcatcaaaaaaaaaaaaaaaaaaaaccaccatcatgcaaataccactagccactaccactgcatgcacaccactacaatgccactactgacattgcatttattagattccatgcaaccacaaaactaatcaaacagatctacatccataaaataaaaatgaaatacaaaaacaatctcagatccataacaaaccaaacaaaatacaaaaattaaaaaatcaataaccaaaaaaatagaaataaaaaataaatgatgaacaaatctgaactcgtggtgctcatggaggagagggatggagttagggtggtgctcgtggcggcttgtggttgcacgattgtctccaaaagagagacaaatgagtgacggtggtgacaaaggagagggacggacatcatagaggagagagaacagaggagagggaaggagagagagagagggagaaagagagagagagaga

SEQ ID NO: 22094 - DNA, 3373 bp, Cannabis sativa
aaaagctgcagagattgcaattggttcaatagggcgaggatacgacatctcaattgatctaaggctcaaatactgtaaagggtactcagctaaatcttgtttaattgagattgatcaagatgaagggcgtcagatcgttttacccggtgggattaccatcccaaatgtatctaaatctataaaatgtgacaagggagagcgaacccgatttaggtccgatgttctatcttttcagcaggtaaattctttacgtcatttgcctaacttagtgctcattttgctcatacgggttatgataggttaaactttcacctgcatgtgtggtgtacttgaccaaccgacctaatttgccaaaagcagaaacaagtatatattactcattaaccaaaatttagtctttggatcgttcagatttttttgtcattttttttaaccgtttcgtgtcaccatcgagtatacttgtaagttgtaactacaccaagtaatcatgtatgtatcattgtaaaaacctgaaaaaagaatatttacaaaatgaaaagtacaaaaggggatagctcaattcttttcggtctcgtttggtgggtgggatatgataacattgagttggataataaaactaattttaacaagaatgagtgaaaaattcatgagaaattgagatttaaagctgtaaacttttctctcaaaatatttctttagtgggactaaattatcacattctaggtggattaatttggtagtcggattagtttttccaatatattctctaatatcatactctctttatgtgaccattagcataatgtagagtagagtagtcgatggagatgcttaaatcatgcttataattttttttttttcaaattaatggaatgtatttgttctttctcattcttttctctgtacaacttttcaagttctaagtgctaatacaaaactaggtttcttctacagaaattactggtgatgagtaacctctgtattttctctcacagatgtcggaacagttcaaccaggaaatttctttaactgggaaaattccttcaggcctcttcaatgccatgtatgatttctcaggatgctggcagaaagatgcagccaacactaagaccttagcttttgatggagtgtttattacactctacactgttgcattggagaagtctcagatggtactacgtgatcacgttaggaaagctgtcccaccctcatgggaacctgctgcattagcaaggtacggacagagtttaagcaaagtaatgttctgtttatagagtttctctctgacacccctctctaaaatttatctttttttacttcgctattacaggtttattgaaacatttggcactcacattatcgttggagttaagatgggagggaaggatgttatatacatgaagcaacagcactcatcaactcttcagcctgctgatgtacagaaaaaattgaaagatattgctgataagagatttttagatgccagtagccagtatggcacttcttctcaacaagtatacaagaatgacaaggtttgtatgttttttttactctctttctattatatcatattagattgtctttagtaccatatgcatgcaaatttcaaacctcgtgtattgatttacgtctgtatagcattgcttcatgacctatttttggaggaaagtgctctatagtatgtattctagtatctttatctgataacttttttaacagtttggaaccagggaacagcgcctgcaatttgcagaggctaatccatcaagctcttattcacacaaggaggtaagcttcagatgtaatgttatttttgatagtattgtcaagtcttatgcaaaatgattcataacattttttggctcgccaaattatgtatgattctaatattgttactaatgtaatttagtttcaggatattgtgaccatttgcaagaggagaggtggaactgatggtagatccttatcccataacgaatggctacaaactgttcagatggaaccggatgtgatatctatgtcatttatccccattacctctctgttaaatggagttccagggagtggattcctgagccatgccataaatctttatttgcgttgtaagcaagtgtttatttgcttgcatattcacgtatcccgttattaatagttgatgtttatatttgacaaaaacgatttaatgtgatacagtttaactgctgcgtgaaaactgaaatcctgaactcatgatgtctgttgtttcagataaaccaccaattggagagctccatcaatttttggagtttcagctaccaagacagtgggcaccagtgttcagtgaactaccccttggtccccagagaaagcaacagagcaatgtatctctacagtttagtttcatgggtcccaagctttatgtgaacaccatatcggtatagcatctcttctcataaatgttgacctgtgtggacttcattttatgaccttgaactattgctaatatgaaatgttttgcgttagagtttattgatcctttttgttttttcgaagttctatttataagaaaatatttgttgacgggtttccttatttcttgtatgtagtgtagtggagaattccttgtttatgtaaatgtatatttctgtaaaaagtttggcttgctttcctagttgcctattttgtaactagcaaaaagttcaaagtatctttgatacttttcagattccagattcttggttatttgatttctgaaaatttcttgatttactgtgcattctttattgcaggttgacgtgggtaagaagccagtgactggtcttcggctatatctagaaggcaagagaagcaaccgcttagccatacatttacagcacctctcttctctacccaaagtctttcaacttcaagatgatccagatggaaacttctgtcgtgaatcctatgatcgtaaatactatgaaaaagttcaatggaagaacttctctcatgtttgcactgctcctgtagaatctgatgaggatctctctatagttacaggagccatgttacaggttgagaattatggtatcaagaatatcctattcttgagacttcgcttctctagagtttcaggagcaacagttgtaaagcatcccgagtgggatggatcaccagggcttggagccaagtctggattaatatcgacacttatcagccatcactttacaacagttcataagccacctccaaggccagcagatgtaaacattaactctgctgtctacccgggaggtcctcctgttcctgtccaagcacctaagcttctgaaatttgtggacaccacagaaatgacaagaggaccacaggacaatccagggtactgggttgtttctggggcaagactcgtcgttga

SEQ ID NO: 22095 - DNA, 6320 bp, Cannabis sativa
aattaacccttaaatcatgcataaaaaatcaaatttcccttttattattatgattattattttttatttttatttttttcctcactaatgtataatttgtttatttaccgttaaaatattttctgtcttcgagagagtccttcttcacaagcacaagattctcactgtcatgcaactaagaagttcccctcccgcccaaagttgttcactactgggtctttttatttcttttgtagggagtgatcctgaagttgttgtgacttcaacccattcttattctgagggtgtctccaggtgtagatgtttattaaatctattagatcattgttatttatttttttcgagtgtatgtctataacatgtaatgtaaaatgataataccacagcatatggtgagtttatgcactacagataaaaatgaagtttcttggttggaaaaaatttccctcttatttaataactaatgtattgtttgagttttaatattaaaaaaattaattatttaatatgtatattaaacaataacataacattatcttaataattatttgagatgttattattggaacattttagaataaaaaatgctaaaaaataatatgaaagatagataaataaaaattatatttttaaataatgtaaaagttgttgacactcttaaaaaatatcactattaaagatgcgagagcggaacagacttaattttcttgcttaaaaaaatggctctagttttaaagatatttaaagatatagtaagagggaggaccggtcctaaggtattaggcgaaattaaattttggggccactatatatatagtttaactattatgaaaataatagttttagtgcttaatgtaatggtaaaatttaaaaactttaccattgaatattttttaaaaaattaaaaagtagatgttgggaattgatcccaagatctcttacactatgtttggtaggaggaggagatgggtcaatgaagaggggtgcagtgagagtgatggaaggagagactaaatcacttgtttgacaagagggatagaaggaggaagaggagagatagagggagacattctccctccaaatctttaaaatttaattttttatccatctttcccaccttatacctaataccaaacaatacaaaggagattaacaattctctccatccctcttactccccatcctctctaatctctccatccatcctactctctctccctcccaccaaacatagccttaatttaaagtaagaccttttaccactacaccaaacaatttttattatatttttttcttatttaattttttatctatatattaatatttttcttttcacaatttcgaggccctgaacgttcggaggcgcgagaagtacgcctaacccgtctaccctcggggaggccgaccctggtaagaggtgacaataataaaaaaaaaactaaattcaaaaactatcttttcttatgttttatttaccgaaaaaaaaaatcaaaaacaatcttttcttataaattgcaacataataaatatgagatttcagaaattgcaacataataaattttctatctctatctatatgtttcagtagaaataaatattagactgcagttaggtagaaaatcatgatttcatcagaaaagacataattgattttctatgtgtgtcttcagaacgaagcaaaagaagtaaatggttttttttgtgctttggaaatgaaaacaaaaaaaaaacgagggaataaagaaaataataataacataataaaaatggattgacacgtgtcatttagctattatagcgcgtagtttaaagcccgttatttctttgcaccatactctgttttgttttgaatgttaaaactgaaacgtattgagtatgactgactactcaaagaggaggttctgttctataaaacattcttgaactaaacaacaaaactaacccaatcaaatactcatatttatgggagaaggagaaagagtggaccaaagaccttttctgagttttctcttctgcttactattcctcggtttcgaagactctttacttttgtctctctttctgggtactaaccatctcaattaacttcatattcttgttattaggtgaaatttccccccttcaataatatttattatatccctctcagtctctttcaaaaggtttttctccatacaagtctcagctctctcaaaaccaggtgcgtttcattttcctttgaatagaacctagctattcaccttttttttttttcacagggtaggtggtttgggttttctctgtttttgatatgttttttttttttttttggattgtttgtttgttttttttcatagggataagaattcctgaaaggtacaagctttttttttttccgcccttttctatgaacgaatgaaaaattaaattttgaaatcaagtggttacttggtatctacaagttttggtcttttattcaattttttattttggatgatagaatttttggtgtgtgtctcttgcttttttcttttcctcctggatgatcagtttttgctagagccctgatttcatttttatgtttagtgttttctggaatttgaccctaaattgtttgctttggtgctttaagactaagacgaaaataaaaatgaaatgtttttttttttaagaaaataaaataaaattatagaaatatttaataaaggattctgaatgttcttgcttctgattttgggtcagagagaagcggatttagttgtttgatactaatctttagaatctcaaaaagtcaagggcttttacctgatttccccttcttttctaagatactgtattttttttttttggattctaatcatatagcttcaaattcaagctaaaacatcccaactttttcatcagaatctgcttttcttttcttttccccctcggatcgaaaggtttatagattcctgtcctttattttatcatatatataaatattttctttttgatgaattaaaattattatggattggattttgattgtattttattactggagtaaaatgcagacaaaaactttattttagtattgggcttctgtctaaaggtatctaatgaccaaaaagagaggggtggggggaacgaacaataatagttttgcaaaatctaacaagtacccagatattaaaataatagcaattgagcttaatataactgtagattgcatgagtgtctattttcttttatttagtaagtagattctacaatattcattcttgttaagtaatgactgaagtaagttatctcttgaaactagctcttactaggctgtatatttgaagtggcgacttgtttttgttcttatgaccttttttgtttcctctgtttcaggttgcttctattttgtaacttcaaagataattaagttacaatgagtaacttcaagttaggggttgaggttgtgggggctcatgatctcatgcctaaagatggtcaaggtgcatcgaatgcttttgttgagctccattttgatcaccagagatttcgaacaacagtaaaagaaaaagacttgaacccagtttggaacgagactttctatttcaacattactgatccaagcaatttacataatcacactcttgaggcctttgtctacagcctcaacaagaacaacaacgcgaaatccttccttgggaaagtctgcctcacgtcgacctcatttgttccttatgctgattcgcttgttctgcactaccctcttgataaacgacacttattgtctcgtgtgaagggagagattggtctgaaagtgtttgtgatagatgatccaagtataaggtcatcaaatcctcttcctgccatggacaaccctgtaaaggccgagccaaaacagccaaaagttgcaaattttgtctcgaatttgttctcaaatgagaaatccgactcgagacacacttttcatcatcttccgaaagaaagtccagctgaacagaagagtgttgctcctgctccagttgtagttcagcctacacagaattatgggttgtatgagatgaaatcagaacctcaggctcccaaagttgttaagatgtttacaggtgccccggctcagccagctgattacaccataagggagacaagtccttttttgggtggtggacgagttgtgggaggtcgagttatccctggaaacaacagacctacgagcacctatgatctcgtggagaagatgcagtacttgttcgtaagagttgttaaagctcgtgatcttccttcaatggatttaacaggcagtcttgatccttatgtcgaggtgaaaatcgggaacttcaggggaaagacaaagcattttgagaagaagtcaagtccggaatggaatgaggtttttgcatttgccagggataatcttcagtcctctgttcttgaagtagttgtgaaagacaaggatcttgttatggatgacttggttgggacggtcaggtttgatctacacgaggttccaactagagttccgccagatagtcctttggcacctgaatggtacaggcttgtggacaaggatggggacaagaagaagggggagcttatgcttgcagtttggtacggaactcaagctgatgaggcttttccagatgcttggcattcagatgcgatcggtccaacagataatgctccgtcggcattggcacatatccgatcaaaagtttaccattctccgaggctgtggtacgtccgtgtcaatgtgattgaggcgcaggatttggttacttctgataagtcgcgaatccctgattgttatgtgaaaattcagcttggcaatcagattcagaggactaaacccgttcaggctcggggtatgaatccaatgtggaacgatgatttgttgttcgttgctgctgagccatttgaagaacaattggttatcacagttgaagaccgaactggacccagcaaagatgagacacttgggagagccgttattcagttgcacaccgtagagaagcgagctgatgatcggaacattcgtgacaagtggctacctcttgaaaaatctatgtctgctgccatggaaggagaaaacaagagtgaaagcaagaaggagaaattctctagcagggttcgagttcgggtttgtcttgatggagggtaccatgttcttgacgagtccactcactacagcagtgatcttcgtcccacggcaaagcagctatggaaatcctccattggtgttcttgaactcggtatccttggagctgatggacttcatccgatgaagacaagggacagtagaggcacatcagacacttactgcgttgccaagtatggccacaaatggattcgaactcgaactataatcaacagcttgaacccaaaatacaatgagcagtacacttgggaggtttatgaccctgcaacggttcttaccattggagttttcgacaatgctcaaatcggtggcactgatggtaacagagacatgaaaattggcaaggttaggattcgaatgtcaactctgcagacaggccgagtttacactcactcttaccccttacttgttcttcatccttctggggttaaaaaaatgggggaacttcacttggccataagattctcctgcacttcgttgacaaacatgatgttcaagtacactaaaccccttttgcccaaaatgcactacattaggccactaaccgtgattcaacaagagtcactgcgtcaccaggctgtcaacatagtggctgcaaggttgagcagagctgagcctcctctgcgtcgggaggttgttgagtacatgtccgacgctgactcccatctatggagcatgaggcgtagcaaggctaactttttcaggttaatgactgtcttttcgggcttattctccgtaggaaaatggtttggagaagtctgcagatggaaaaacccagttacaacagtactagtacacgctttattcatcatgctggtttgttttcccgaactcatacttccaactgttttcctctacatgttcttaatcgggttatggaactttcggtatcgaccgagtaaccctccccacatgaacacgaggctctcacacgcagatgctgtgaatcccgatgagctagatgaagaattcgacacttttccaacgtcccgggccactgatattgtccggatgaggtacgaccgtttgaggagcgtggctggcaggattcaaactgtggtgggcgacattgccacacaaggggagcgcttgcaggcgttgctcagctggagggactctcgggccacaactattttcataatgttctgtcttgttgctgccattgttttgtacgtgactccttttcaaattctggcccttcttgccg

SEQ ID NO: 22096 - DNA, 3520 bp, Cannabis sativa
  modified_base (1841)..(1861): a, c, t, g, unknown or other
tcttcttctaatctctccacccatttgtttacaccttaataaatgtcaactattattaatctcattttcaaccgttcgatcgtcatgatcaggtggggttctacgataaggcatgtgaagaagagttacaccatttattatcttctcaacgagctcatgagcttcttgcagggtttgtgagtttgcaaaatgacagctgacactaacacatacagccaacattatatatatagagagagatctagagagagagagagagaggtaataagcttaagaaagataaagtttttatttttttttattaaatttttcttcactaccgaagaagagtccatcacgttaatcacgcaacttcatgttcttattataaggtgtagcttgagccacccatttatctttttctctctctaatgagtagctaggatcgtgtttcttaatacattaattttttgttgtagtattgataatataatatatatatatatatataaaagataaaaagtgaaaaagtaacattagaaacgtataataattttgtgatgagaataaaaacaagtgagtaaatgattggctgtcaagcttttgagggggggtttcgtatatatatatatatgactttatcgaatagggtgagtgtgcctgagtctgatcagtacgaattaaaaagcaccaatatgtaaacaaagaaagaagaaaatcggggcccttagcatgagtgagagctaggacgttattgaactggcatgatcaagattatgtttatgcatatatatatgtatatactaattaaatgtgtaaaatggtttatcaaaatttacatgtttgacttgttgatttaaatcactcatcattagatgttatagtattaagttaatatataattagattattaataacttaacgaatgtgtacacacatatataaatataaataattaattcagagaaaggcttgtcatgtgtcatgtatatgccaattttttacagtaggcttttacttttttgtggtgatgaaaaggtaaaaaagagagtattgcatgcagtgatcatagctcgaggtaagagcaatattatagtgggaaaatgctgtagatatcacagacatatgcatctatatatagagtcagacaatacagagatgctctaaattttactgtgttgaccatttaaaattcagaccaaattgcttttggtcacttcactttgagtgaaaaaggcaaaacacaacccggtgaagataaaaaagagattaaaaataaatataatccatctatgttatttgtattaaaagaaaaaaaaaaacagaaaaaagtaaacaatggatagagaatttataaaaagtgcaacatatacacattaagctcctcaaatatgagaagaaaaacttaatatagatatatatatatatacatgatatgtgaatcttattctcaaggttgtgtggaagcaaatttagaaaaagcaaaggaactttttttttttttcctttcattattctctcctaattgtagctgtgtgtatagaggagttattctgatttgaggctgatgtgagtgagcatatgcatatcaattgggaagaaaagaaaaggctccttatccaagactaaaaagctatttttgctaaacaaacaaaccaccgaacccataagcttttagattccacattttcatgtctcccatctctctctctctctcattcattcattcaaatgttgacagtctttcattcaatacactttcaaaccaccactttttcagacaccaccaaatcacaccacactacttctaattattataccaacaacagcccaccccccacaagagagagagagagagagannnnnnnnnnnnnnnnnnnnnagagagagagagagagagtatatgcttttaacacacatttgcagggcctatatagctagggtataggcatagaaaagtagtgtatgtggctgagggaggagttgtaatatcctagaaaagagattaagctgatgagtggtaatatgtagtactgtgcatggtgggttgtaagtgtttgtgtttcgtatgtattatgtaaaaattaacaagtgttcataaatggcagctcttgatcagaaagtctgagactcagttttcctttgttatgtatgtgtaatagagacaacagcatagtaaggccttctgcgctatttacataaataaatcgctactgagtctctctgactggtacataaaacgaatcaaagatatcatgatcccatattcatttcattaattattaactgttcccccttccctttttataataataacactgaaattcagtacagatcccaagaacacaagaacaagaagaagatcaatagaactatctagctagctagatcatatcgtctcagatcagatatcagatataatttggaaatacccaatagcatatcaagcctataaaacaaaagttaattggtcatgatgaagatttattatttattataaatatatatatataacgtacagtaatgttcaaccagctggcataaacagaaagtagaaaatacatattttaatgcaggtatataataaagactaaagactactagagatcattttaagttaggagagatgatcatataaatacgaaaataattacacaattatattacaacactgcaaattaaagcgtatttttaaaactcaaaaaatcatacaataaaataataaaaaaactgttgatatcccaaaatatataattgatgaagatataatttaacacgagtagtactgctcattttagggcaaaacgctgttttctttgctagctgttacgaattacttgtacattttgaatatgagtacgcaaccatggaattaataaaaaaaaaaaatataagaaaaaaccattaacaattaataataaacatgttcctggctaaatgaaaggtgttatacataattttagcatataattcaataatatgaatttctatgtttcttttttccttctctttagtaagaactctagctatacctcttgatcatttgctataggggcaaattatattaaagccaactaaatagctgcaaagtgatcactagtactccatgtttgatttccattactactattaatccaagtagtagtattcccattctgatgatcatgcccaatattattagtactaccactgttactcggcgtcacagtactcacctgaaactgcagctgcggtactactggcggctgctgcggctgtccgtaattagaattaccaaaaaaccactccataccggtggctgttgcggaatcattcccggtcgaaattacaacttgatcctttctcggtggctgatgatgatgatgatgatgatgatgatgatgatcttcttgtcttgaaatctccagattatgaaacaaaagaggcacagaagatgaagattgatgaggctgcttctccggattattattattattattatcatcattatcattattattgttgctattaactagagtttcgtctttctgatgagtctgat

SEQ ID NO: 22097 - DNA, 1447 bp, Cannabis sativa
taggtctagatcaggctctgggtgtgggttcaggtcttgggtctgggtccaggtctgggttcgagtcccaagttctaatcctgatttgattggttgttcagttctgggtctaagtcctgggttccaatcatagtctgggttcgagtttgggtgtggatctaagtctatgtttgggtctaattttatgtctaggtctgtgtttggttcctgggttcgggtctcattttgggtttaagtccgggtttaggtttggtcttggtctttgtcaaggttcctgtcctggtttgggtctgaagaaggttttggttctgggtctaggtctcacttcagattcccgggtccaggttaggtcttgtttcaggttcgcatcttagattttgatctgggtcgaggttttaggtccggttcctaggtccaggtctgggtccagcttcgggtttgggtcctgagtcttggtttgagtagaggtcccggtccgaattcaggtctaggtctcagtcctagtcttcgtctaggttcgagtttgggtccctatcaaggtcttgatcctagtctgggtccctacgcgggtttaggaccacgcccggtctaggttcgggtcccaggtctcaggtcccactcctagtcaaggtctcggtccaagttctggtccgagtctgggttatggtttgtgttttattttggtctcaagtccaagtcctagtcacagttctagttctgattctgggtctgtgtttggttctgggtcaaggtttgagtccaggtaggggtcgaagtcccagtcttagtctgagtctcggtacgggtttttcgcatctcgggctaggtccaagtttgagtttgggtcccaagttgaggtttgggtctgcatttgggtccgagtccaggtctcttatttcgatcccactttgggtctaggtcggtatacgggtccgggtcttggtttgtgtccatgtaaaggtcataatcccaatctcggtcaagtgcgtaaaatgggttaaagatcgagtcccgagtttgggttcaggttttggttggagtctcagtcctagtctgggtccgggacttggaccgggtttgggactggatccgagcttgagtttcggggccatgttatggtctagttctgggtgccggtccaagtctagatcatggtcatggtcctggtcctgttctagggtcttggtcacgttctggtccaagtttcagttttgggtcccatgtctgggtctgggtccaagtcctggtccagcttttggtccttgttcggctcccaaatgaagacaccgactatgggtcttgtccatgccccggttcctggatcccgagacaagatctgaatcccaatcatgtgtcccattctagttttagttcatgtcccagcacctggtctttgtcttggtctaggttcgtgaccgagactagggtgcagttttgggtctcgatc

SEQ ID NO: 22098 - DNA, 2735 bp, Cannabis sativa
catcaacaactcgaagtgaatcaattccaataaccttaaaatcaccatccacaaccttccccactaaacatccgccgtgataatgccaaaacgacgtaactgaacttcgacaatattcttccatggaagaattatctgtctggtaattatcaggcaaaggaggcccaaaaaatgtaaaatctctagtaccattcaaattatttttgtacttaaaccgatctaatgacttagtttttagtaagtcacccaattttctcattgcactaacacaacgtgtaaggtcaattggattagagaaatagttgaattgaacatgtggtgtgactttgacatcagttgtagaagccaaccaaagtgaaccggttgataaaggtcccacaattttttcagcaatggatcctaaacttaattctaatggatttgatgtgttggggtaaatgctaaatggtaatgtagttggaaaaaatggtaggctataagacatggtctctatgtaataatctttagttatgccaacaatttgtatatatgatgcttctaatgggaatgggattacaagattaaggttgttgcgaggattatcagccatgaattgtccaacatttggttgtgaaaggattatgggaatatgttgtgatgtgaggtttgattttggaccaattccacttagtagcaaaagttgaggacttccaagtggacctgcacttaatattacttctcctttattacgtattaatgccttgtgggattttccttttgtatcggtgtatatgactccaatagcattcgggtgacctacttaaacaaaaatatatatatatataataccacttgtcagcttattaattatatttgaatatatatatagataaaataatagaataagaagtgtaacacacttgaattatacacattttatacaataataatatataattaatatgtgctagtatatacatatatgactttttttgggggcaaacatgtaagttaatacataataattattggtatctaatttttgaataaaattttaaataaatatatgtgtataatctaatttgttaactttcttttagattgaatattctaaatttaatttaataatttgttttaaagaaaatatatttactattatattgatttcttttctgctgtaatttattttctaatattttggtaaaaaatgatttatttgagctcccagcaattttttctgttttgatttaaaaaataaaagtagtggctatggtctctagaaaaattgagtatcaaaatcaaaatgcttatatgcgtagaaaagaaatatgctataataatgtattcaattatctgctaattataatatgctatagtgtatatttcatttaaacgttatccaaattcttaatttgaaataataggcatgacatgatcatataccaaaaaataattaaaaaaaaatgaaaagaaatgaaactatagcttgtatacatacttgaggaattagtagaaaagataatttttgttacgtaggcaagaattgcaatttgcaaattttttaggtttccattattaagcaactccacagctccatgtcttcgtccttcatcatcgaaaatcgaaccagatattttagttccaaccttatgttttgtagtaacaccattgtcaggaccaactccagcttctaacaaagcttctttcacagcaaattgccaagttgagagattcgagtatgacactatgctatcttcaacccacttgtaagccttttcaacctcattcatgtcccatttcacaccagaatacttcacaaaaaaatcatgctcagcttctgaaaagaagccagcattaatcatacttgaccctcccaaaaccctacctcttacattatcaacaccatctttcgaggtgaacctctgcgccggtgtattagtattgtcatcagtgtcttcttcagatagaagattcacgaaccccgaggacaccaatgtgttcgggtgagctttagggacgtttcctctttcgaggacaagaactgagtaattttctgacaaagttgccgctatagggcaaccggttgtgccacctccaatcacgatgtagtcatattcttgtattaagggtaaatcggttgcgttcacaacagatttcatgtaactaaagtctgcttaaaataataaattgaaattaaagtacttaatttcttgagatttaaactaattaaactaataaggatgatgaagaaaaaaatgtaaaaacatacgaaagataaattggaatatcattatagaaattaagatataaataccgtaatcaaccgcgtaactcaacaatattccatgaaaacatgttaacaatattattataagcagagttataagaagggatagaagagatggggtcattttaattttttatttctcaaagtgaattaagctacaaaatatatattttccttattatctatcatcttacctatatatagtatttttttaaacccactatatatacagttttcaacaaatgagtagcatatatagatatataaataaggtagctaaatgtgaggctaattaattttagccgcaaaaaattaatgtttgctcaattgctacgtacgtacatacctaactaagtattatgtagacaaaaccactactttaagctagctcaagtgaccatagagagtgtgtgttggaggtcctgagtttgagttctaaattatttatggttatagtatataaacattt

SEQ ID NO: 22099 - DNA, 4092 bp, Cannabis sativa
ccggaaaatctgttcaaagtttgaaaccctaaactttgacttgcgatcctaagctaacggcggcgagagaagcagcgccgcttgggggtgaggtcgccggaactaggaggtttgagtggtacgacacgtgaggtttgtcggtggccgcagataggtcgccggagtgtggtggttatggaggtttatgggttttctttcttgtgtattgaagagagagaaagagaaataggtaaagagagagagaggacgaagggggctactgctttatgcaaatatttaattttttttttacatatatattatattatatttatttaattattatatatatacttggtttgactagtcaaaccgagtcttcacaggtaaatcttcaactgacaaggatagagagcgggtgaaaacacccaaaatagcgattgaagaagtgaaagtgatcactttagacatttagatccaccaaactttaacaattggcgtgacctaccccctaccaacacacagcaaacaccagtcgactacggagtcacgggtggccagaccctgccctttctaggtctggtcggccaaaggattatcacgtgcctttttgtaggtctggccggccatggaggagcacgggagccaaatccggcccaatgcaggtctggccgggcaagtacagcagctaagcataggcctggccagccgaggccaactccagtacttgggaatggccagccagagtctacaattcagtataggtctggccgaccgtcaccataccctttcacagggtatggccagccagcccctatctctccagaatctgctgcctccccatggagggtccgtcagtctagtctccacagatccttttgtgcaagcacaactggaccaactcaaggacatgatcgaaggcatagctggtccgaagccttcagaccttgaacttgatcggtcaaggggatcacctttctcagcatacataaatgccttgtcatttcctaagttgaatatgtcggtatggaagatgtataccgggcgagaagacccactggctcacatcaaatacttagagttgcaactcgatctctagaaggttactagtgatgtgtgatgccgtatattcccagccacattgtcgaaaacagctcaacaatggtactttaaactcaccctaggaaggttcaacttttgggttgagttctcacgagaattctacatacaattctcatcctcaagacttgtaccatgacaactagaagaccttatcgaagtcaaacaatgacaaggagaacctttgaaggattacatcaaaaggtttatggataaggctgccaaagtcaaaggccttacaaaagaaggtcaatatacggccatactaggggacatactcccattgagtgacttctggaaagatatctagaggatctctaccaacaatatgaaggagttccttaatacacctgatgactttatcaaacttaaagaggccatacgacaagcccaggtggggcatttcaacaacaggcagtcacgaggcatccagcaacctcatgacccactaggcgcacaggtagacaccaataactctgcccaaacttctagtggcaaaaatactataaataagcgccgcaccaacaatttggggaggaatagtggcagaaaggggaagtttaacacttctcccatgccacgtaagaataaggagaagaagtacacctgcttcaccctcctaacagagaagcctgaggccatcttcatggccactcgcggaatagccccataccgaaagcccttccctatgagaaatgagatgggaaagagggacatgtcgaagttctgcagatatcacaacgacttcggccatgacaccaatgagtgtcaaagtttgaagaaggagattgaatacctaataaggcgtaacaatccccacctacgttgttatgtgcaaggcaaccaaactcaggcacaaggtgcctagaatggagatctaatgccaccacctgtggcaagacacctatgggtcatcattgacagaccccacattgcgggcaagaccagcaaggctagggagcgctatgctcagacactacatcacgagcccaaaagagatatcctagcagttgaagacaaagcaacaaaagcccatagagctcttgatctccttcaccgaagaagatgctgctcaagtcaattttcggcacaatgacccctgatcattactgtatagatcaggagcatgaccgtagcaagatgtatggtggacgacgaagcctcttccaatattcttttcaaatcaatagatgaaaggatggggttctaactcactgacctaggtacttgcaaccaagtgatgtatgtcttctttgccaaggcatcgcacctgtcgggtatatcagattaaccctcatagttggagaaaatccaaccatcagaacattgatggtgtagtttatcgtgattagcattcccccagctttcaatgccataataggccaaccggccctcaacgacctgaaggcagtaacatctatctaccactgatgcctcaaatttccaacatggcattaggtggcatgtgtgaagggagaccattagtctacccgtcactattacaacttggctctatacaaggccaaaaaagagaagatgcccgccaaaagcctagaacataggcccaacaaggggcagtgaagtctagcccaatgcggggatgctgacatagatcctcactttagggatcttgcagaagttttggacctgtagaatagttggaagaagtggaggttgatcccacttttctgatgagaagcctgaagattgggaaaggcttagctccaaaaattaaatcaatattgatagaatttctaaaaaaaaacctggacctttttgcatagtcacgtagggatatgatcagaatcaacccctccgtgataacccatgcactcaacagtgatccaagcatctagcctattcagtaaaaaaggtaatttttggacaaagaccgcacccaagtgctcaaagatgaggtcgaaaggctgagaaccaatgtctacataacagaggcattctaccctcaatgggtatccaacccaatactggtgccgaaacccaataaaaagtagagagtatgcatcgagttcactaacctgaacaaagcatgtctaaaagactgcttcctactccccagaattgactagcttgtagacgccacagctggccataaaatcctgagcatggtcgtgtattcaggttacaatcaaataaagacgtatccaccaaatccatagcacactagcttcatgacgcacctaggcctttactgctacaaagtcatgccattcgggctgaaaaaatacaggggccacatatcaaaggctggtgaaattgatgttcatagatctcatcgcccgcagcatggaggtgtatgtggacgacaagtttgcaagtccaaaaaggctgggggtcgttgaggacctatgcgagtgcttcaaagttcttcgtaactacaacatgaagctcaacctcctcaaatgctcttttggtgtaagctcgggaatattccttggcttcatagtcaacgctaggagaatagaaacaaacccaaacaagattcaagcccttttggacatgaagtcgcctacaattgtctaggaagtacaaagcctaacaggatgcattggtgcattaagaaaatttatgtccaagtctacaaagaaatgtgtacccttcttcaacattctcagaggcaacaaaaaatttgagtggatagaggaatgtgaaaatgcattccaggagctgaaaaaataattggctcaaccaccagtgttgtctaaactcctagacaatgaagagctaggtgtgtacctagcagtcacagaacatgctatgagtgttgtcctcacaagagaagaagatagtgtacaataccctgtatactacatcagcaaaaggctaatcgatgctgaaagtcggtacccactcatggaaaaggtgatgtacaacttggtcttggcttccaaaaagctaaggccctacttccaggcacatgtgtttgagatcacatgggccattgagcttggccagtttgagatcacataccaacca

SEQ ID NO: 22100 - DNA, 1706 bp, Cannabis sativa
  modified_base (953)..(954): a, c, t, g, unknown or other
tatataaaagagagatatgaggtggtgatataggactctgaaatttttctaaatagtattctttgttttctccttaattttgtcattttttttaattttttattaagtttataaatattattaattattttctctaagtttctctctttttattctattttctaataaaaaaattaaatatctaattttaaaacaacacaacttattctaactttaaaatttataaatgttaattaattaaaaaaaattctaccgtatcattaaaaaaaaaaaatctaaaacaacataacctaaactttttattttctctaattttttctctttttattctattttctaataaaaaaaaataaatatccaattttaaaacaacacaacttattctaactttaaaatttataaatagtaattaattaaaaaaaacttctaagaaaaatctaaaacaacataacctaaacctaaacacctaaacctaacccatatctcttatctcttatcacataatatttaaatctcttaatttcactcaaaacttttacgaggtatagttatattataagtggatatcttcttttgattttcatggagccattgtataatattagacttcgagtacacttcacagcccaatcaaatgaaattctatgttttgatggagtacaatatcaaatgtcaaatttaggtaaagctagcattatttgtttatttgatattttttaccatttataatattaggagatagttatataagcatatcactctcagctatatattcaaaattttaatcatgaataataattacaaagatctgtttgatgttattagggagaaaatttatggtaaaaattaggctaatttagatttttgccccatgaactttgacatgtaccaaatcacgttcactgaacttttcaggtcgttaaaaattctctccgaactattgagattgttanntttaaagacttttgtctaatttaactaaagaaagtctcacgtggatgaaaattaaggggtacaatttggtacatgttaaagttcagagagcatgatttaataggtattaaaagtcggggggcatgatttagtacatagacaatcgtcacattagcaaaattaaatgaaattggatagaagttcttaaatctaacaatttcaatagtttagggagaatttttaatggcttgaaaagttcagggatattatttaatacatgtcaaaattcaagagacaaaactcctaattaatcccattatctttttaattgcttctaaaaaaaatgtgagtagtattcattatttttttgctagataagcagcatttgttattatttgtgtgaactacatattaacttttttttatacgatgattcaactctttttctctctttttcttattgtagtttttggaggaaataatattaatatagtttattttatataatatgggtgttcatccaatccaatccgcactattttttatagtatatctgattcacacaaaatacagattttatattttagatccaatccaatatgtacaatagttcagatctaatccaatctgcactatcgtttatgtgaggaccgtcgaacaccatctatttctctattggtatgatattggggaaaaaatagaaaaatataaaaaagaaaaaaaaattacaaaaatattatgggtcggcccattaaacatttatacagtccaca

SEQ ID NO: 22101 - DNA, 2953 bp, Cannabis sativa
aaaaaaaaactagtgtttaactacttcaccaatagaattaattacctacaaaaataataaatcaagtgaattagtaccaactatttaataaatttgtataaaacattatattttaaaaaatattaaacataactttatgatgaaaatactaaaacaatatctaataaaaaagatgaatataggaattctattttaaaaataactcatcgtaaaaaaaaaaaaaaacattattttgtctttgtttttgttgttatatctatatgaaataacacaattttgtcttattttaaatgattggaatgaaacttaaattatgaaagagagtctatgtgtgaattaaactaaaaatctttcttctacgaagttctattaataaagattctttgcccattccttaaatgcatgcatccccattgaacaaaagctcaaataccattaaataaaaaacccatactataattttcataagaataattaataattttaccacttaaattttcaacaattctaaattatttgctcgctagttaaaatatacagcttgttaagaattctatgaatttttacatttataaaaatttaatcatcttattaagttatgtctcattattccgtttaaattctgacgtgattttgtaaattaacaactttgacaactattaaatcgtatcccttaaaataaaaatgaacaaaagtcaatcattttttagtaaattttaaaaaattaattcagatcttaaaaaaatattttaaatgattaagataattaaaaaagaaattaaaatttataaattaagtgatttaaaaaattatttattattttatttaaaaattcatttagatataaaataaattatataaaaaattcaatttttgtaaaaactaattttacggaaacaagtttgagtctattttattctaaaaatatagatttgtttaagtaaatataattttttttagtttaatttttattttatttttcaaaataatttatatgtttattgaattttaattatctttttagatacaagtttataaatatataaaattattttgtttttcaaaaaattttagtttatttaaattatttattagattttcaataattttagtgttattttaagatacgtgtttataaataaaataaaatttaaaaatacttttaaggaataatttatgttttctcagtaaatttattatttttgtcaaatttattactattttttattaattttttcaaaatcaacagaatattataattttttaaactgattttttaataaaatagaataaaattttgtattgagaaagtaaaaatgctaattattaacgataaaagatataaaatctaacacttttatattttagagaaattttttaaccaattatatattttaagggataaaattaaataagtagaaaaatactaattattctcttcataaattattgtaaaaatgctaccattatctcattacttaaaatttgataaataaagcctatcagatatcttgttttgattttattaaggatattccaagtaaaatgacttatggatttgacatcatttactgttttaactgttgttaataaaaggttttgtgactttcaacaacaaaaacaaaaggaagaaaaaaaaactcttgaaattaccaagatagataaaaagaattggaaaataacgaatttctaaagacccaattttattccaacacgtaaaaaaataatgaaataaataaaaataaggggcataatttaattcatattaagaaaaaaaaaaataaacgaaaaaaaggtgtaagagggcagtttggacattttcttagcaagttggtagtgagggagagaagaagagaagagaagagaaaaaggaagggacccacagagctgagagtttcgtctaatggaaagatatggtttttgccgtcagcaaagacttgttgagataacagtgaaaaacagaaccttctggacacaccatacgctaaaatatcaacaactcccatgcaatcacagccgtccattcttccatcgctactatcatttattaacacattgcatttaaatcacattattatatatttatatgaatttaaaaaattaaagtattaaaataaaaataaaaatgtgataaatatattctaaaaaagctatagtatttatatataagttgggcttgtttctggagagttcctgaggctttagcgttaagggggaagaaagggtgttgtgtgttgatcctctttttccgccttaaacccacttcccctttcccctcaagctacctcaaactcaaatatgccgaatttctttgtcccaattgggaaagatgtagtctatgatttgtgatttgttataacatatatatatttatctatctatatgggattgtagtttgctttttgggtttctgggttctttaatctgtcgacaataagtgagaatcgggggttttttggttctgggttttgattttctttgaagaagaagaagaagaggaagtttacagtaatggctaatggggaagagaaaagcagtgacttttatgcagttttgggtttgaaaaaggaatgcacaactttggaactgaggaatgcttacaagaaattagcaatggttagaatttcttcgatgacctttcttctaaaaccctctcctgtttaatccttctaaattcttcatatgggtcattttcaaaattaaattttttcatggagtttctgatttatgtcttgttttttcctctccaaggagacggttgacttgggttcaaaaaaaaaaaattacaacatacaattatagagaaaagtcatagttcttgtgggatttatttgaatccatgcagttcactattatcattatttttttcaacttttttaaatagagatggcatccggatcggtgttcggcttccgggaattcaaagttcgtggaggaagccaaaaagaaattc

SEQ ID NO: 22102 - DNA, 2670 bp, Cannabis sativa
catgccaaattgtgtaattacctcaaattacacacaaatccaattacattgtggctttccaaacacacccttagtaaatatatctgtattaatcatacttttacttcatctttttttaaaaaataaagtaaattaaaataaaaagacccatctttttccattaatgaaaatttaatgtaatttcctatttcaaaaattcacggattagtattaattaacaaaagataatcttttgttaaatatattaattaaaagatttcataccttctatatttcttaatattaattttctggaaagaaaaaatatttcttttggtaaggattctaaacttaaaatgttgttcttttcttttataagtgagtgattaccattatttaatttaaccattttcaatattaaatatagagtaattagtgtcaaaacctcttatgttttgatttttacacatttaattcttttttttttttggacaaaacactcttaagttttactttttttttgtaaatttgaggccagttcgttaaattctaattgaaagactattatatacacctgtgtatacgtgacagtaaaatctcaaaattaatacactagtaatccaattggtatttaacggttatatcaactgacaccgtaaattaaaaagaaaaaaaataaaaataaagggatttcactgctaataacgcttaaatttacacgattgttgcctaactagtaaatgacacaaatatataatgcataatttattagtttgaaggagagtaaaataaaggtttttattagaccaatattttagttttgaatgtattaaagcaccaaatcccataagaatcctaggataaacacacagacacatcaaaagatcagcaagaacacttgaaactactgttaaaaccagattgaagatttgaaagatgtcgtaggaccgagttgttttgacatcggtgttccaggaaccgaacaatacaaaaaagttcctcgctttcaacaccattagcagaacaatgctgtaaagttttaacatttgagggtcttttagagcataagctctgcaaatactaccaagttatatgaaaatcaataaaatttagaacagaatataatctttgatgtgtatgaatgaaatccaataacttttcaggttgaaggtttgatcttttctattaacttgtcagcttcaatgaatcctaatggtcccaaagacaaatactttatatacttccatctgttgaaatgacacattgagaattgttcagcatttcaaagcacaagaatttaaggctcattcatatatcaccattgaaacttgaaagagctttttaccttggggtgtatggtagtgcaaaacagtggagatgtaaatggtttacactgttgaatggaggcctatgaaagccaaatctgtcaccacataataagatcacaataaaatcaaatccgaattcatgtaatcaaattcacaaaaatgttatctagatgaagtatgcctgctcttcaagtctatatatttgtctttataataagttcaaaactgtgcataaaaccagttaaaacactcttaactagtctcaagaaaaaaagaatcttaaagtgcaaaaactgagttgggacacaaggatttaacgagttcgagcctagtgcaatgctctacatctcggggaacaaaatctcttcatccttattaatcaccagctagaattacagagaaagtaatggagttcaacaagaactcaatcgagttacaagaatttctctcaagtcttttactcacaagtgtttaacagaaatgaattgactgactgcattacaagataagtgaaggtcttttatagataatagatagtagcttatctaaaaaacatagcattatcaacagactcaaactcaaaatcacagtttcagaagaaattttcagttcagaactcagaaagagtgtcatcatacctatactggcattgaggcgcatctcggcttaatagcgttcgccccgcttctaacatgtgatttactacaaggaaaagattaaaaatcagacaaagaagatactgtcaatactgaagactcaagagggtaatgtttcaatctgagtcaagtaactctattttacccaaagagtagtcttctgcagtcttctgaagatcatttacagttgaaatgtgtgctttaggaataaccaagtaatgcctacaaaacaaagcaactaagttttagctacgaaattctctacttaaaacaagtgatctcattaaagttgcaaaatttgagtaaaaacagggagatttgctgtgataatccaatccgatgcataatccaatgaaaagggtataatctgctattgtgttcactatggttgtgaacttgtgatgacatttcaatccgtaaaacaaatctttaaattaagctaacaataaaacaaatcatatgaatgaatgaagtaactaatctgatacaaatggaacctgaaagccgaaggtctgatatcctgaaaggcaacgattttatcatcctgcacccaaacacaaaaacataactttcacaacttcaacatcaccaaaaccaaaaacccatttttgtcttagttcagagagagagagtacagaatggagaatagtggtggtgctggagtcggaggcgatcttgcagaatatacaatttggctgtaaagctct

SEQ ID NO: 22103 - DNA, 5467 bp, Cannabis sativa
tatctattcataaaaattatttaaattataaactagttgtatacaatgtgttaatttaaaatttcgtcttgagataggaagaaacaaagaagccataaattcacaatatttcaattttggaaaaccaacaattgataaagaatgacttctgaagaccaaataatttttttttaattttacaattactgatttctaaaattcttgttatgaagactcttgtcctttttgtatttgtatgaatcttacatcgatggtttgtagatttctttgaggtatttaaattctatcttggtggcaatttaggttacaactcgtgggtttgacacaaacatgactcgaaattttacgaatttgatacaatccaaaaattatattcgggccatgtttgtgttttataaacttttcgtattacgagtcgtgtcaacaatctaaaatatatttgaagacaacactaaaaacagggacggagggacttaagccactgtgtaggcttaacccctcactcaaattaaaaaacttttatattacatatatgttagttagctttatttaaatttttgtttactataaatgtaaatactaaaccctcacttgctttgtatattaagccctcactatctcctatccaatttcattaataccactaaaatttaacaccgaattcaaaaaataattaacacttttttttttctaagtacatatataactctctatttaacatgctttttttatatcattttaattttttaattttcttaaaataaaaataaatcatttgattcaatttttattcaagctcttaaaaaaaatatatttaagccttcactgaattgaaattctaactccgtcactgactaaaaacaacaatttaacttacaacttaccaatatgacatgaacacaacacaacattttacaagttcgacatgacacaaaatttattctgagtcatgttttataaattttttcgtgccaaaagtcgtgttcgggttagtagtttttcaataaatttaaaacctcaacatgattcaaacacaacacaccaacacaaattgccactctaacaccgaatttcatttttaaaaaaaatggtgtcaatctatattacttattgttttcttgacaaagtctttattactattattagtaaattctttcctgtaagaaaattcaatcatccttttccttccatagaacttcattttgaaatggaaccattagcttcgttttgatcattagtatactagtatacacgaaatgcaggatatatggtttaaatcactcattctattttttaaaattattttaaaagacaaatcttctactcaaaacgaaatttgaggttaagcaaaaattaaaaaaaaaaaaaaaaaaaggaaatttgggataattgttgcaaatgcaacaatttttttttttattattatttttttctaactgcaaacaataaatttgaaacctctaggtcaacatatactaaaaattaataactgtagataaaatgcttttgtttgttggaacatggcacaaacaacacaatcactaattaagggtttacgagttacattttttgccgaaactgaacaagatatcttgctcattaaaagtttaagctgagacctcaatctcagtagatactcttacatgttaataataacatttcaaaaatgttctccaatttgattagatacaagatcatattatataaaatatatatataataaaatgaaacaatttcctcctgtaaaagaagcttatgtgtgtgcagaaaagattaaagagatttttagcctttgacacctcaatgtcaaagataagccatgaaaaaacatctttcagtataaggactaatcctattcatgtcgttatattgtaacctattatcaactttttttttttggtttttgccagtaacggctccccattttatgattgagctgtacattctcagatcaaagggaaatgcaactttaaaaacaacaagagaatgttatccacacacaacacaagggtggataagacctttttcttttcttcttctttttattctcttttttcatctatgttatggcatcatcagattcacaactagtactaccactcgaaagattataagtattattttgctccatcgtcagattcaagaacctggatttcgggggtcggtgatccagttcctgaagaaggaaggtaagaccatgctaatgcgaccgtgccaagtgtaagaacagaagcaatggagccccatacccacctttgccttctttcctttttcatcctctctcgtcgtgccgactctgaaaaccataacgacaaagataacacagaatgattagatggtcaaatgaaatttagttgtgaaagaaacactaagagaagacgcgcaccattggtgctcaaacatcctatattgttatgggtacaaatatcgagtcccacatttaaattaaattaaaattatataaggcccactactaaattgcacaaataacaatttgctaaaatgttaagtacttaagaacagaagcctcaccaagaacatctcgattcctgtgaaccatttcctgattcatagcctcatagtttcgaagtttgtcacacaatcgagcaatctcaaagttcttagcctcaatctgtgcttccatctccgcctccaactctgccctggctaagcctctcccaatagaatttgaaacaaatctagcaatgtatacttgtctacacagctcctctccagaatcggaatcaagctgttcttccccttcaacaggagtggccttggcaggtagcgttaatcccgcaagtgacaactgttgcctgatcctttcccattgtttttgcatgtcacttaacgtttcttctgcttgcttccgcttctctatttccatcagtaaactcattctcatttcacgaaattcagcttcaacatcacgatgaaccgactgttgcccactctcagaagaaagttctatcgttgaaaaaaaaaacatcacagtaagaacactgttatcattgaatggatgaaaaaaaaaattaaactaaagaagagaagaactccgttagcactgaactacctcacaacacaacttgttagcgagcaaaactaggagtttaaagcacacgagaattgaggttgtacaaaaattaaattttataccctacaacccaatagttttccattccactcattaagaatacttttttacaccaaaaaatctcacactagagtgtcatttttttcaaagtgagatcacaatttttatgggtggtaaaaactaaaaactagctcacattaataagtatactgtatactttatgcattttgggtgtaaaacaggtatctcaaatattactcaaaataataaatagagagaaaaggtcaacttatgtaccatcccaagcatcataaaattcgcccataggtgtagtgagttgtgccgaccgttctccttcagcattatcctctccatcagtattacttgtaaaactcatagaatcacgaggatcaaagaaatcttcccggtcgctctctcttccaggagtcaatggagcttgttttgctgaatcaagaaacataacctgaccattattccaactactgctttcatgttccaccttaccattcacaagttcctcattagttttaacaagttttccagtattgctttcaagttccacgctaccatttccatgttttccattactgctttcacagtcaggataatcagtaacctgaggttcgggaattggtttagcaacagggaaagtaaaagaatcctcctctcctaaactggtaaccttggtttctccattattcaaattcccatcaaccttttcatcatcttggccttttgggcgtgacaatacactagcctctgaggaactcttaagaaggcgtggtccacgccgcttgtgattgataatgtaaggagaaggggggaatgatgtaggcgaatcagggagtggggttgattcgggagtagcataaagtgcaggagttattggagggcgattccttcttctttctgcaactgaagtactattcctcctctccagctttgaattaggaccaggctgtggtttcggtacaggtcttggaacagatttgtcgactgattttgaagctccaggttccaacaaggtatctaaggctagagcagtaaacgtcggcatagctctgcataattttaacattcaattagccgtttcagagtaaaaatttaaagacggctatctaatttgatgcaaagagagctccaaacattttggcaagggaaaaaaaaaagagagaaaaacattacataacagtagaaacaacaattcatctgcattaatccacaacccacaagaacagaattaaaaaacgaatagtcagctcatttaatcctaaaccccatacaagatttgtgatctcattcaagtgaaaaaaaaatgtctaaaagtataatttttttttctatcttataatctaattagtttagtaatgcttccaaactcccgagctaattctcaaaataccaacgaaccctaaaacaaaatacttcttacgataaccaaaacaaaaatgaagaaatcaaaaaccgcacaattcaaaaacagccgattccaaatccaaaagagctaacgctcttccgattcattacaaagaatacatgagagagagcattacataatcgaccttcaaaccaaaatttccacacagcaatccaacccaagcttttaggtcataccctcgaaaaaaagcaaacaaatcacaagaaatccaacaaaaaaaaaaccacaatttaccaccctcacatgtctctttctcatcaaccaaacaagcaaacatacaaccaacaacacatatacacaatatatataataaaaaaaagcagccaaggaaaaaagaaacggaaaatatatatataaaaaaaaccttgcgataagagcgatgagctgcgaatggaggggagggaaaccctaggcgcgaaaacaacgaagtcgatcagataaaaaatgggagcgaagaataagaagaagataaagattgaggtgcataatttttgagggcttttcttgacgatgatgattctattctgccctgttcttcacaattttttggaaaaatagcttaaaacccatttcctcttattccaataacgaccgcctctttctctctctctctatttaattaaaattatttaaaataaataaataatttcttctctttttttttgacgtaaataaataaaaataaatttaatttaatttaaaattggtcttttgagatcggagtttgacacacacgcggggttagatcacttccgaaaatatttgaaaacctttttgcttaattttattttattacggctcgaaacttccacgtatcttatttattgaaatgtctaaattacccttacttgcaacagctgaaacggcgtttgagcgtgaataataatgtctttttcatttttctgaagacgacg

SEQ ID NO: 22104 - DNA, 4750 bp, Cannabis sativa
  modified_base (109)..(109): a, c, t, g, unknown or other
aagtattaaacgagacatcaaagtatcttgaaaaatacttaaacctaacacgtgggtagaagatctaactacccatgtgaaaaataaagatatatacaaagtgacaagntcattaaaaatatatttgagttttcttcaaataagatcatcgcaaggcaaaatcaatgactgctcgcagatcgagggtagggcagataagatgcttgcaagtaaaataggtcattagctacttagcgtcagaaagaaatacgagcaatggaaacctctagtaaactttatgcatgaaacgcaagaaaacatccacatgttgatgtttaaacttaaaagtatgaggcattaaaaaagcaaagttgaccattcaactttgcaaatttgtctttacaaaaaagtgcctcaaggggcaaaccattgtctcggccaaaaggccatttttaaaaaaaaagagataaataaaaaccaagtctacattgtgggtgacttggatggatcttcttcttcttcctgtacatcggcctcttcctcctttggcctggacttctcgcaaaaagcaagagtttcctcttccttctcctccaagaagcttttgtccatattaggattcagcatccaggctcgatacacagtacgaaggccaacttttttgcatcgtcctctcatcttgacctccttctctgcaagcttctcaaattcgtcagcttgggccttgatggtattcttagcttcttcttttgccttctcggcttcttgtctgaggtgggtgatttcttgctaggcattatccagttgcttagtcacaaccccgcactgggatagtaatttctggacctcgccctttaggtatttgagccgctccgagagtcttcgattagaagaaaacgagatgagagaagcttggagaattatgaacatatgaatatgagaaaggagggaaaaaaaataataataataaggccaacttaccatgatgttgtagtccaagtttttcaaaagcatatcttctcgactcccgagatggattaaatcccaaccaggagggagaagagctagaattttgcgccagcaagcaaccccgtatgcctgagcaaattcaaatctagcctcccccgtggcggccgatacgggctcaatgatccagctcgaggaggcagaagcacgagctgtcttaagagggggagcattggtgttagggacaaccagaggagggactttttcttgagtctcggtattagagacctcgagatcaataggttcagacaaggacttcattttatgggtagtggttttcctgtgccttttagggggtgccacctcggcagtcgtagggacccctgggttggataccctcttcttccctttttctctctatgatatcatcaaaacaacccatgcctgcaaaacaaagtaaagagttacaattattaaaaaggcagatgaaaaaggggaggaatataatttttcacctaaaggatttaccaaggtcactagagggtgagctatcactggaagaaggggtagaaggaccgtaataaccactaaatctctacagcctgtaatcttgaatatgtctcaaagggctcaatgggttctaaattatagctcgcatctatatgactttccctatctgccatagtaccatactgctcaactatacaataatacgactcatgacagttaatctgaatgtggaatattctgtaccagctgtcatacttaggagcaattctatcaacagaagggaatcccaaatataaaaattaaagtgagtatcttggaaggtgaataatgtgttacgttcagccctaagtactgtgggggaccaaccacattgattacctcgggatgctccttcaccgacttcctgaggggtagttttttgaagatattatgcccgagccacgtgattcaaagccttatccttgtcttggatggtaacctgctgctaagatgaatacttgggaaacttataatcacaagtacactccttgtccgaaagaaggcccaccgatcaagattggcctcgttcagaagaaagtcgcatgacctaaggccatagggaagagtcatcaggcgcctatgccgactgaccatcttgggggtagtggtaggcctcgtcaagagggctataaaaagaaaataaaacatttgtcagaaaactaaaagacaaggattaatgtaactgagcaagatgaaaacaatcacttacgaagcctgcgaaaggtggttgtgctgactggagaaagaccagatgtccagaagaagttgtctttgaaaaacactttgttgggcaagtcaacaatgattttaggcattctttctcgctggaacagccatgaccgaaaagagataaccaatttctattggtgtggggcatgcccagttcagaattttatacaagaccttcaaacaagcgagaatcctataagagataggattcaactggaatggggcaaccccaaggttgtttacgtagtccttgaagtattctcgaagtggaagtatggcccctgaactaatatgctcaaggctctaggcgcccataccagtcgagccactggtagtgctctcacaactggtccctggggtactgcttaaaaaatgcatagggggaaacaattgaactcaccctctcatactgacataacttggcatgattgccgaagttcaattccacaagtcttcagtatatcacctgtgtagcttgtgatagatcccaccttcgattctatcaactcagcttcaaaggtgactctggggtcctagggagtctttgatgtacgtggcttaggaggcattatttcaaagtccaagtcacctggttcaaaagcaatcgtgactttgggtaaaaacaaaggctttgctaaaggaataaaggacatgctaggaggttctggccaggctgcttcttgcaagaatcagcgttttccttagaagatttcttgcaagaaatgcctgaaacgactagcaatatcttcatggtgggttctcactacgtgttccctaaccctagcatcttcaactctaatttggaggtggtttttgaagggttgagtttatacgagatggttgattctgtaggaaactcaaattttaaatcttttggacgataaattcctgaaccagagtgggacattgctggaagaaaaaagcagtcccaatccctggagagaattttatcaaacccgaaggtgatgagttgaagatttagaaacaacctacatattgcctgaaccctagtatggacctaaatacagtttaaccctaaaaactaccaaaaccaaatgagatggcagcgatacaaaaaaattatgtagtagcaatttaacacaatgtagcaaccatgtaaaggaagaaagcaacttactctttgaagttagggctttggacaatgaatgattactcaatctgtaaatcttcgaatgtcgtaaggatcgcttcgagaagatgaagttggaagaaactcgtagaaaaaatgtcaaggacagggatggcatgcaaatcctcaggcaaactcaatcgttattcatagcaaaaaatcttaagagtttctcagactttctaaaatggaggaaataatgcaaaggtggttccttatttcttactttatactcatgatattggcttcatcaaatcgggaaaatatttgatcctacaggtagaattgaaagtggaagtggaacagatggtcatttaatactaatgtacctagaaaccgcacaaccgtcgaaattagaggacatgcgtcttttcaaaagggatcatgacaaaaataccctttgtaatcattaaaaagaactttttatcaaaaaaagaactttttaaggggaaattgttatacccgaaattcgacgagcacatcagagaaagacacgtgtcaagctgggaagaataaagaactcaaacacataatcataattacacttgcaacgaaataactggttaaaggagtaattaacatagtatggttacaactcggctgactaaacagtcttatgcgagataaaaatgtacaaattgttgccttgtgcttcgatgagaaaccatgtaactttaggtgtacaagacgatgcactaacctcgttacgtggaagagatatgacgataatggaaatacttagcgtatagagtttggtatacaaactaagtacaacaaatgggtgaacagaagtgagagataaacgagacttccacctcactgtaagagggcatgcacgcaaaaaagatcatctcgtcaccagaaactgtaattgtcagaattaaagtaaaagcaatatcaaccttgggaagacatatgacgagctctagctcgccatcaaggttaaatgtactccattcccagcgaggcattccactaagataaggcttaccctatatctttaatacgcgttcattttggcccagtaaaagggggatattcacagctgtgtgaaatttaaataaaacctgcctttacttatcatgatatgtaatcagatccaatgatttaaggggataatcattgtaaagattacaatcaactttgtaattaactgcctactatgtgactataaatagtggcaagtaagataaaaaggggacaaaaaatcataccagaaaggccctgagataactatcagaaatttgaataagattgactcgtggtctatcaagatttttaactgcaaaaccacgtaaaaaatcttgtgttgtcatactttttattttacaccttttattttttcagtgtgagattgtcactattaggctcaaattt

SEQ ID NO: 22105 - DNA, 2172 bp, Cannabis sativa
gctagttagggtgttacaacattgttttacccttctggcctcaagttactgacctactttcatacatgagctgtcaatggtggaaggttatctgatcatggatctgaagtacgttcctggaaggtcttgataaaatgggcctggcccactttatcttctctaggggacccgctagtgggccgtggatcctagattctatgtgtcctgtaccaaaaacgcggataacaatgaggattgaactttggagatgagttttaaattttttatcactacaccaaaatactaaaattattattttgataataattaaaatatttatatagggccctgctggataccatgacaagaatcatgagttctctcaaaatcaattggtaatgaataaaatagtctatgtttttatatatagctcaatttttttagtatttgctctatatttatagagatttttttctataatatgtattttagccaaaattttacatttttatcttgttaaggaaattaaaaaaaaaaaaagaaatccaaaagttttgttttttaaaataccagtagtttaggcctttagttacttatttacataaaattagtcctgctaattaacatatgtttatatatagcatttggttccattcacatataatttggataactcatttatgagtttacattagtcttctacaataatggttggaaccagattcactaacattatgtcctatgccataagttgctggacctgtttccaaaatcagggctaccggtgacacgatgaggagaaccccaacttgtttcccgctcggaatatacatttaaaactaaagtcacgagtgatggcatgtccaggaatatggcttgctaaagaatgttcttcacttgcattcctgtcaaatgagctttgaggaggaaagacgaaaaaactagcactatgatcgtgaggtagatctgttggcactatagctggcaaactacaaccatcaccatcaaatcttctaaaactttgagtcatgggtgatggcatgctgagcgaaacactgtgatatagatgatggtggaaggcctaaacttatgaggttgagcagcggtgtccgttgaatgaggaacaaatgagccttccactctaggatcagacctgaaaagaacaatatgcataaaagattaacatccagtccctggatcggccaatttttgtaaggtgattataactaaataaattaattaaaatagaataaaaaatattaatcataatacaatcatatatataatttaggaggattattttagaaatacccaaaaataacaaaaattttatatttttacaaaaattttattttttttaccttttatcgactttttttcctttacaaaccgctatttttaggttgttctcaaaaagactgttgtttacacgtgaaaatatatcataactttacggcaacatgaaaacaacgttgtttttcctctaaaaaattacaaatccgtaaaaatgtaaaaaaatcataaatttttttgtcgctttttgtagctattttgttgttgttttacaattgtttatatattgttgtctaggtgttgtataattgtttctagttgcattagttgtttttttttttttactaaacacagttttaatgccctgtccaacagggacgccacgtgtgtgctcttataaaagttcttttcaactgatttataagattatactgaaagtgtgactaattaaaatttgataactttataataaacataaaaaatatctttataaaagataagtagtattaatcttggggtccccctgttttcaaaatatttacaatctggtttaaaagtagttttacaacataaactttatattcccataaatacaatcaaaagaaacactttgaacactgggccgtaacaccgcgattgatatgtacattgctgctatctgctatgaccttcgaccttcaaactcatggttgctcaactttcgccttccctttacctgcaccatatagcacccgtgagtcacaaaatataacatatatctatttattctcacattattacaattacataatatcgtaattacataaatcccagtgcttcataaagtacccttaccactcgctaaccacgagctgaatatgtcattataatttcccagtaaagcaagtgataagtaagaaa

SEQ ID NO: 22106 - DNA, 4573 bp, Cannabis sativa
  modified_base (40)..(41): a, c, t, g, unknown or other
  modified_base (1181)..(1182): a, c, t, g, unknown or other
taggatgttaaacaatatacttgttagtaaatctaagatnntggtaaaatatttccaacaagaacctggagaagtttgattattttaagattgaagaaatcacaagagaacacaactcaaatgtcgatgcactggcaaaattggcctcataaaatgagcttgataatttaaatcttgtaccggtggaagttttgagcgacccaagtatatgtgaaaaggaagaagttgagaagatagatgcctcgcctacacggatgacacccatactgagatatgtacttagcggacaacttcttacaaacaaaaatgtggcacaaactcttatattcggtacctcgctatacaatagtccaaagaaaattatatagaaggggttattcaatgtctctcttactgtgtgtattgccaacagaagcaaacgagatagtcaaaaaaattcacaaaggcttttgtggagatcatgcacgttggcaaagtttatcaaaggagattattcgtcaaggatattattggccaatgataaataaagacacacataaatttgtcaagagatgcgataaatgccagagattttcacatataccttgcgtaccaccaacagaattaagaatgatgacctcgccatacccattttcaatatggggaattaacctgattggggcattacccacagggcaaggaggagcaaagtacgaagtagtagcagttgataacttgcaaaaaagtggacagaggccgaacctttagtttccataacttgcaaaaaagttcttgattttgttgtcaagaacataattttcagatttggaatacccattaaaatagtatctggcaatggaactcagtttgatggtgaattgttcactgagttctgtgaaaggagtaaaattattaagagcttctcgtcggttttaagaccccaagcaaatggacaagtagaagcttttaataaaaccttaaaggatactatcaagaagaagttagatgctgcaaaagggagatgggtagatgaactaccacaagtacttcgggctcagagaacgacagagaaaacagcaatagggcacaccccattctcgttggcatttggctcagaagcgatgctaccagtagaagttaatattgcgacccacagacgtgaattctataatcaagaagaaaaccaagaactccttaagttnnccttggatttacttgaagaaagacgtactaagtcgcaaattactaatgcaacttatcaacatcgaatcatgaggtactttaacaaaagagttaagaaaagactcttcaatgttagagatttggtgttaagacgagtatttgcaaacacacgagatgcgtcagagtacttaatccaaactgggaaggtccttatgttaacgaggcaatagtaggaactgagatttataaattggctcggcttaatggctcgctaataaaaaactactggaacagtgaacattttcggccgtattactagtaaattttaaatgtaaatgctgtatttatctttgtagcatgtaaatattgttattcataaacttaaagtttgttcaagtaattacaaagttttattcattaaaattacttgaggggcatatatacgtgtatatcaattggaattcatctagaaatacatattatattgcaaacccacccatgttaaaaaattttccataaaagagaggataattgattaaaattatctatggacaatacaaagtcaaaaaattaaaaacattttcttcagataagaatataaaagtagcagttgtaaatgagatcaactcataaaacaacacaaagccacatgcagagttgaatatttaacgactcgcattgttcaggtatgtattataaacgaggcatgaaaatgccttgaaaaaataatacttaacctaaaatatgaatagaatgcctaactattcatataagtattcaaaaaatatacaaaatagttgataaagtgatttattcaaagtatgtttaagttttcttttaagttatatatggatgatttaaactgctcacataatattttataaatagtaaactactcgcttataataaggtagactataacttctctcgaatcgaaaagcatatgcagaaaataactgatcacacacatacatagtagattaataactaccaaaatgtatcaaaggaaaagcgagaatagtggaaatgctttctcaaagtaccttatattggatcaaaatataaacgttgatttgtgaattaaaattcaatgaacaaatatatttaattcaagtataaggcgtgagccattaaaagattatgcatataaagcaaagttggccatccaacattgtaaaattgtctttacaaaaaataatgccacaagagacaaaccattgtctcggccaaaaggccattttcctaaatatataaaaaaaaaacaacaaacaaatttaaaaccaagtctacatagtaggagacttggttggatcttcctagtttgcctcaacctcctctgcatcaccgacctcctattttttggtcttctcgcagaaggcaagcatctcgtcagctccttcacccagaaaacaaaagtccatcttgggattggctgttcaggcttgatagatggtccttctggcaattctgttgaccttgtttttggtgtcaaccttggcatcttcaagtttttgccagcctcagcctggatggtcttgatggcctcttcgagctctttgatcttcttctggttagcttgacattgcttttcagcctcctcctttacctgagaaagctcaaactctgagtcatgccacttcttggccatgacatctcgatgctctctagtctgatgaagctcagtctcaagcatttcaactctctgaagtcctctatgttgagcggtaaaggatagaagagatgcttgcgaggaatgaaaatagacaataagaaagaggtacaaagacgaaaaggaaaaaggaacaagaagaaaagagactaacatgatgcatgagatcataacttctttgcaccagaccctcaaattgccttttgtgagtagatcccagtcatcagactcaaaggcttgataacactgccagctgttggtagcgtgtagcaagcagagttgtgaaccttcggtcccagcttcaaggggcaaggggtaggagggctcgagaagaaccatctctaggtgagaatcagagaacttcactcggtgaacagacccagtgggctattcactagcgctcaccatggtaggtgtagccttctctagagattttgctggcttgatagtgagttggctcgaggttttcttctttttggtagttgtttttgttcttttgggttctttgatagaacccgaggcttcatttgcctaggcaactcattttttggctcttttgtcaatgagcggggggctgttgaacatattttctaaatcaagatccatatctgcgagataaaagagatacatcaaacactggctcaaaaacaaataaaaagaaaatggggaataaactcccacttaaaaggaagttaccataatcatcagaagatgacgaggaagaactgtaatagttattaaactccttagaccctgtgatcatgaatatatcataggggtttattggatctagatctcaatttgaatctcggtggcacgccctatccaagtttgtcccgtactgctcgacaatcccatagtatgagctagtgcaactaagctagacatggaacctaagataccaactatcaaacctatgtgttatacggtttatgaggaaactgttccaagtttacaaattatatcgactatcctggaatgttactaacgaagtacgctttgccctaagcacagtaggtgaccatcctcattgattacctaaggatgcttcttcttcagcttccccaagggttactctctgcagatagtgtacgagagccacataatcctggctctcttcttcagctggaattgggaccttctcccatgaagagtattttggaaacttgtagtcacaagtgtactcgtctgagccaagaaggccaacagtcctcaaattggcttcattcaagagaaaatctgttgatcgcaatccgaatggaaggcccaaaatgattttacgtcgctcgaccatctcaggggtggagattattcttttggaaactgctgtcaacacaacaagcataaaaagtaagcgacctcaaagatataaatcagaaaacaactcaaaactaagtttttgagataaatagttacttatgtatgatgtgaaatgcagtcgtattaatcggagaaagaccagttatttagaagaaatcctccttaaactcggtcttgtttggtaacctcacaatgatcctacgatcatttgtgtgggtactgagatagtagaagccccctgaacattgcttcctcgcggggactactttaatggaataaaagtaaacaatttcgagaggagtgggacattcccatcctaaaatgtgatacaaaacattaagacttgcaagacatctgtaagaagttggaatcaactgaaaaggggcaattccaagatagttacagaactctttgtagtactct

SEQ ID NO: 22107 - DNA, 1999 bp, Cannabis sativa
aaatattattgagacgggtgtagtctcactccagaaacggtcttattacatactgctttagtgattcttaaattacttatagtatgcaacaagacttgtttggagcgaaacaccatccaaaatctatatgatatcttttagatgatttgtttttggataattttacaggctgacatggttgtagtgaatccttctctctggtccatggttcctattcatgactggtaagtgttacatattacttcttgtttaattctctaaatcactataggtaggcacaaaatcataatacattttcaagaaccccacacacatgttttaaacttaggatgtttgctaattacataaatttggtattcaatatataaaaatatgattttattgtagtattgtggtcatagttggaatatcactaagagaaaccactcttattaatcacataaaatggccataagtggaatttgacggctgaacttctacatattaaaatctatatttcagtaataaatggtatttctatgaactccataaaccatagcagatcactaagccacatgtcctattcttcttatctgttatcgtcttgggttcccatcttttctaattaaatttgtttatcgccctctttacttatctttcttttacttgtctttaactcccgtgagagttttgttaatagcttggccattgatatttgacaaaaattatatagttttttaattgttacttggcaaaataattttttttttcttttttaatggatattatgtataaaaaattattttttctaaaatgacataaaatatatatgtaccaacactcttaatgttcttgttttgctaattatgcagcatctctagccttgtgtattgcatgagaagtgaaaatgtagaatctgtaatgtgcaatgggcagtggataatgaaggataagaagattttgaatatgaatgaggtatttggtttcagatccatatttgagtcatcactattttatattagattataagatattactaattaaatgtaaaaacaaaatgataattgggcagggagagattatttcaatggcaaagcatgcttcttcagagcttttgaaaagggctggcattgaaattcctaacagaatgaatatgctctgactgcctaaacctttgttactcatgtttccaaacaaatgaagaaaattatgtaatttatgaaatgtattctgataaatatttataaactatcttatgttattttgcaaaaataaattgataaatgtgtcttatactattttgttaagtattctaaaattttattatagatttttctgacttttatttatgatattctacggtgcaccgataaactctcaaataattttaattttaatttttttatataatagcataaattgtagttatctaataagatattttgtaaatttttaaaaaattcaaaataatttaacacactaaaaataaagttgaaataatttgttgaatgtgtgcctctttgattttatgcgtgtaaaataaatagtttgaatcatactttttgtattgtaaattattttaaatttctaaacttttttggaaaatatcttaaataattacgatatatacttttatataaaattttaaaattaagatcatttggatgtcacaaatagaaatagggtgcatcggtaatctgaagaagcaccctataatattggagttttctaacaatataaaaaaaatagttcttttttttttttttagagaaaatcaaaattattattatgttatttattaaaattaagtaaaagtataatcataatggactgaatgatgaaacaaaaaagttgagtgaattatggagcagaggtaactagagagtcattattaagaagtcatgaaagcataatgcatttgttaaatgatatggctgattttgactatcattggcattgagatccttcactttagggttggagtcaccaatacccactatattttccaaactcatcccaa

SEQ ID NO: 22108 - DNA, 3106 bp, Cannabis sativa
tctcctatgagttctaatttttttactttttttttagtctttcttcttattagtaaatatataatagtgtaaaagattatacaaatatagatatgatattaatttatttttttgtgttgttatttttcttttttataaatttttattaattattattttatttttcttctaaagtttacttaaaagtaactcacatgcacttaatttagataggacaactaataattttaatttcaataagtgaacctatatcagaatgtccttctttaaacataattttttttttaaaaattgtttaaatataattgattgatgtaagatatataattataaccatatacaaagactcttcacatttttcagaaaaaaaaactcctctcatcaaggaagctcttagttggattaagagcaaaaattgacataatgtagaggtcgaaaccgatagcttattgactgtccaagccatctgcagtaatcaagaaatgttctccatctttggcttaataattcaggattgtcaatctttattatcttctctacatgatgtacatttacgttttattaaacgatcagcaaatcgagttgctcatgcagttgtaggcattctcgctttctttctggttatagtatttttgaacatgatgttagacctgatttaaaggctctcttgtattcagaatacctttaattcaatgaagttgatattttatcaaaaaaaaaatatacaaatacaagtcatatattatgtccaaaaaaaaggaaagaagaaaatattgaaaaatctccacacaaaaaatcacatctttttatcactactgttgacatgaaacagtaatcctacatctaacaagaatctttgttggagtagcattcatcggtcttgcggtcaaaacatttctttgaagaacaccatatatcataggtacgtaccatgttgaaattcaaacatggatgggtaaaagttataatacttcataagatctatcttcataaataagcattctctaggatttggttgaaccaaaagattgcaacatgacagtattaggcttttgttaaactaaaagactgtagtatgcaggatgagtatgcacaaatatttttaataataaacaagacacacaaagtaaaaattctggatctgtcactgccttcaatcaaggaaactcgccaataatccaattcaactactaggttttaggtacttatccgctgcaaaagcaagtgtcaagtaagcattaagacttgagttttgtcattctttagctataacttttagtggaagcatcctcaccaattgcagaagggtctatatgtacaaaaaaacttgcagcaacaataacatagcaaagaacaagcattagtcctttaaagtaatttgatgttccctcctgcaaaactcaaattactttatgttcaatccaaagaaaataatcaaacaataatgagtattgtgtctccacaatactaaccatactctttttagctttcaaacaataattttatgttccaaaactagagtttctcatgaaatataatgtcaataaatttttttgaattttaggtatatcagcaatcaataatttttttttttttttaaatgatgaatattagtaagttttggtcatcattagacaaacctgcaccatgaaggctacaacaagaacagtaataaaaagtgtggctgtctcaaaaagttgaaaatttaagtccattggacgtcccattatccaccctacaaccacacaaaatggaatctgaacccataacaatagtgaatagttagagaagaaacaaacattggaaaccaaaaataataaaaatacaataaataatattaagaaagtgaatgaaaaaaagaagctatatcttgttacaatatggatttagatggttgcataagcactttaactgtggaagtgcaccacaacgcaaattctatgcaaagccattaaattactacccctcagagagaacaaatgaagtttctatcttgtattgtggacctgaatatatcttagtgatgagctgataacacattcacttttccttagagacgtttgactaccgataaatgtgatgcaatattcaatagttctggtctataaagcatgaaacgttgaagtttctaatagtaaaacacctttactatcctaaaaaaatgcattaatatattttgagttgaatgaacatgagaatgagaggataaaaccaacattattactctattgccaatgcatatatcaagtcaatcatcatgttaaaaaggcaaatatgttttatattcattgaaaaaagtcacaatataagatacttaccccaaacattgctatctgggtagatgagcctatagcaactcccaaagatatatcctacataaaacataaaggtaaatttcattaaagccaaactaaatgtcatgcaaaatgctaacttaaatcacttcctagcaagagaaccatttaccagcttgtctttcatggcaaacataactgcgcctgcatgctcggctgcattcccaacaattggtagaagaatgacactaataaatgccactgggatgtgcattttaagagaggctccctaaaatgaaattatgtctagtttcagatgcaagaaaaaaaaatcccacaatgaagagaatgtggcacagaatgtagattagtaaaattggagcaaatgcctcattactctaaatatatataatttgttcacctcaatggcatccaccaaatattctgagatgatagaaatccaaatagtcaaaatagataaccaaattattgattcccacttagagatctcaggagcctcttcattatcatccaaaggcacatctatttctccatttccctgatttatgatgctcatcaccatcagtgaaacataaagatgcagagaatacaactctcaatgacttaatgttaaaaatatttggaaaattggaaccataaacaaaattaaaactgattgaaaaatcaattgtatttgtgtttcatatggtttggcattcattttcacaactaaaatcatttttcgcccaatagtatcacactttcccacttattggttattaaaccatacaagtatagaaagtaaaaacaag

SEQ ID NO: 22109 - DNA, 4172 bp, Cannabis sativa
catgttttggtacatgtcagtcaaagttcaggggacaaaaatcctaattagccaaaaataaatagacttccactaataataattttaattagtgaataattctagtttttttaggagaaagactcaactaccaaataagagcaacaaacactcaataaaagtggggtgagggtttattcaaaggtagcatccactatcaacatgttttgaatataattgggcttttctggccaccaaataatactactacttgccaacaaagcaataagtttggccaaggtgtgagcaacactattataaggtctatgacaatgaataaacctaacaacacggatcctattacaaaacttaatgatattatttaaaataagacccaaagaagtaatgatagaaatattatttttaattttaagcacaacattcggatagtcagactcaacaatgatattgtcatacccaaaggaaatgtattgagagagcctttaaaatagctaaagcttcaacaacttaatggatcaaaacaatctttcaagtgccaaataatctaagctttagccacacccagatcatcacgaatcaccatacccaatccactgcaatgatttgtcgaaaagtgcatcatatgtatttactttcaaaataccacgagggggaggaacccatttggaagttggaagaacagaacacaaccttacaactgaagcaacatcctgagaccaagtcactctcggttgtgaccgggggggtagccaccacctgctatttgttatggaaattcccaaagtaacttctacatcagataacagtgagctcgagagtcaactcaacattgttatggactttcctgttacgtcgaaaccaaattctcaacgagattaccataaccaactcaatcatctctttggggaggggatcaacaaatctatgaacaaaatcaagaaaatctatatgcaatggctccccgggtcacctaacacaaacttacaaatcttcctacaatgtatcaaagaaggaaaatcccaaagagcatgatgagtattttcctcttctaccccacataatgaacataaaccatcagataaaataccatgacaagccaaattgactttagtagtaatccaattatgggaaattcaccacgcaaaaagtcttaccttaggagggaggttgagggaccaaatcttcttccaccatccagaaaaaccattcgacggggaggcacgagtcaaagccaagttatgacaagtcaaccgattgccactcttgatggtaaaccatccagagttctcaaagtttaaataagttttttcagaaacatcgttattggaccagggaatagagagaatagtcatatcttcattatccagaaaactaaaccgaataagctctttattccaacctcctgaggtgtcacgaagcaaagaggccttagccaaaccatcaagtcggggaggagttgacacaagacccggcaaaattgaaggaatccaattgttagaatagaaattaatgtctaaaccactcccgacctgccaaactcccatatattcaaagagttccttaccctagagatatttttctaaacaaaaaaacctcggttggatctagagatttcagtatatgacctcgtcctgaagtataaaccttttagagcacgaccagctaaagagtttgggacattataaatgtgagatgcttgttttgccaacagagttttattaaacaaatgtaaatcatagaaactcatatcccctcttccttatgcaagcaaagattcttccaagtacaccagtgtatctttttagtcacatcattttctccgtacaaaagacaagcacacataatgaacattttttacaaaagcttttggaagcttaaaaaggttcatcgtataagttgggatagattggataactgctttgataaggatctcacaaccgaccatagagaactatttttatttccacaagctttttcctaattctatccatgatggcattaaacaaatcaaacttgctatgcccgcaaaacaaggaagccctagatagttctcatggcactcaaccctcttaaccccaaacaaatccaccaagtaatctttcttagagtttagaacattagggctaaagcaaactacagatttgtcaaagttaatcatttgtcctgatgtcgccccataccagttcaaagagacattgattggagatctctcatcagcactagcagcactagacttctccctgctagaatcttgagcaggaggagcggcattaacaagtctgctcctcttcctgatcttcttgttttaaacaatagaagcagcatggataccatgaaccacttccctgactggaggtttagattccttcgacattagaattttcctcttagagctccaacaagatgccatagtagccaagaagctcatattgtctacgaaaaaaaaaagacaagtggttagtacaatagaagagaaataaaacaacaaagttatcttcgtctacgagtgtcgtccataccgtgaaagcaacctcatctccgagcccaactaaaagcccaccaaattctgcctccatcttcgtcctcatcttcatgtttgattgtttttttgtttgttttttcgaatttgtgtttgtttgataccttatatggtggtgattatggtgtaatcttgccaaattgtgtttatcgataggttattgatgatttctgtttgtataacacagttttgtcaatttggcatttatcgatgggttatcgataatttatcaataattctatttgtgttttatcaatttggaatttatagataggttatcgataatttatcgacgatttctttttgtgcaaagatagtgaagcacatacaacattcatcgatagtatcaataagataacatttttgctagaaaaccatacccaccaccatctaaggtctaaaactaacacaaattcaaaaaaaaaaaaaaaacttataaaaatccaaaaaaaaatacagtatcacaatacatatagtgatcaaattaaactaaatccattaaacaaattcttaactcacaatttttttttttcaaaaaataacaaaaatctaacaattcactaagggagtgggtcgacagtggggggaatggcggtggtcgggggctctgggtcgttgaatggtcaaatggtcgttggtggctctagttttgtatgtttaataaatgttagttttaaattacacaggttaaaacaaccactataatgaaagaatcatggacaataatagtcttacctcccattgaaatagtgaaatttgaaaaagaaaaaaggatggcagttggctaagaaaaaaaaaacatcacaaatgcagaaaaatatggagagttggggcacaacaagagaacatacaagagaagtcatcaaaaatgaaaagaagtagaacaactaaaaattaacaatggaacaacacgagaaaaattgaacatatattagagcataggatactgaagaaaataacttacacacaattttcattatattcctattacataatatttgaaaaaatgtgataaaggaaatgaaaaaaaacaacaataaaataacattaaaataataataaaacaataataaaataaaccagtaacagacaagggtaagttggagaaagaggatggacttgaaagtacggtagagatgaagttaacgcttggagaccaaaaagacggaagatatgaacatagttggagtttctgaaagatttttacaagaagctcatcacagagcaaactctcctctatcacacacacagtcacactcttatattcaacaaattttctttttcttcttcttacttcacatacttttttttttgttacctactataaaagaaaaggtttagcttttatttagttgatgttgtagacatgaaaaaaaaagaagaagataatgaacaggaaaaataaagctcaaaaacaataaaaaattaaataaagagtgtttaattatatgcttaagagcaatatatatgtataaacacataaataatatataggaatgagagttcatgtgaatttgcacaaatttaaaaaaaaaaaaaagaaaaaaaagggttaagaataaaattattttaagtaaaaaaaaaaattgactgcaatcaattaaaaatttcaactttttatatatgtaaatat

SEQ ID NO: 22110 - DNA, 6949 bp, Cannabis sativa
  modified_base (6549)..(6550): a, c, t, g, unknown or other
taaatttttgaaagttattgagaagcttcagtaccagtggacaatagggacgaggaagtggctgcttctaaaaggcactctcaagatgatagtttgagatagaaggactcactcagtttctcctagtttcttgcgtagagacatttcgagtaagctaccttttgaaagagaatatgagattattaaaaaatactcttcctgcccttttcctacccctgaagatggtagggttttgactactataatactacgttgggccctatgatcaaatcgtaaaactcacatattaaactttgcgaattgaggcaacctcataatcaccttgaacccactttttattcttggcccaaaaatgttggtaagactgggttggctaaataatttatgggccctcctcccatagacaaattcagctcagacatgttctctttcatgaccctgttgatgtttcagaccaggttcaccattgtccacaactcaggaaaaggaaggtcagtttatctcttgttcttttcgtgtagaagttcccaaataatactcatgaatttagtaaaaaagacccttctttacctcagttctcccttaggacagtgactactccattcaaaatgggtagtggagcatcttcttcttattcgaaaataagagagaaaaggagaagttgtagagctcagacatgtagtttagttggggatttatcaaaaaactctgaggtaatggagactcgtgtggttagaaatttagtggaaatgcacattgaaagcattcataattttcaatttggcgaggagacgacccttataagcccccccaagtccaatgagagttcttttttacaattatcgggaacttgcttggaacccagcaattcaggccttaggggtctaggtgagaaaatacaaaccgcaatatatttttctcatggaaacaaaaattatgtactaaggattgaatggagaacattgctagttttttggattatcatggttgtgtttgtattcctgcaagggattagctggaggattttgctttgatggaatatggagttgaagattcaaatagttgatactggggtgtctgtgttcaacatccatttatgggatccctaagttaactttatgtggaggttactagcagtttatggtactccttatgaggttgagaaggtaattttttggagggaatcgtagaacaaaattaagtcttggaagatcccttaaattatgattggggatttagattgtttaagctctaaagaggagaactgggtggtagtagagtgacgaggcaggatacgatttttttaaaatgagtttcttgatcaaagtgggaaaaatgattgcaatatcccgaaaatttaaattatgaataattaagacttattatataaatatgggttaattagagagttatgagtgagattatgatcatactaatctaattcagtgtgaattaggaattatcgccatgagtagataaataagtgtaatttattaattacggagatttatttggaatatgtgggtataatgagagttatttgtagaataaaaatatttttaggtttagcgaccttggggatccgatcggaggtcaaaaatatcacagcaagtttagttagtaatcttaatgaaattattgtgataagttgattttaaaataacgggatctagcgaaataacgaaattagaccattttacccctaggtttatgaggtaacttagtggatagtcttttggccctttgattagtcaacctttatggagttgttgtgtggacgtggctcatccttttgaggatgagcagcaacttaggaagaaacaaaaaggaaacaaaaaaagaaaagaaagtcaaagaaagatgtaatgtaaaaaaatcatcaaattcatattttcttcttcatttctctccatttttgaatcctctaaaaccagaacgaatcagggttgttctcaatctttgaagcttcttatagctggaattaaagtcaaaacttcatcttctagctccttctttggatctcataaaagaacgggagctgttgagaggttccatattgccgagccgaagggagggcagcacttatgtacgtgattgtagtatgtcacgtcgtcttggccctgctgcattgaagagtacctatgcactatttccggttcactgataaggaagatagagttggggtgggggtctacgatgtgatacttaagtatgacccgtaaaccctaacacaaaacttgttggttttcataggttttgttggttctcagtagctatttgtagtaggtattattttgggaatctacgaagtctaggaaaacttaggattttttaggactgtttagaagtggtttaaagtgttttgggtagttgtagcaaaagttatgcaagtttaagtttaaagaactcaaacttggcttgggcttggtaacatcatatctattgagaatttagctgtgatttcttcataaaaacttttgtttttgatgtttttaggtgctctaaaaaatttggtaaggcttggctcaagattgagtgagatatgaattttttcagatcggacaggcaaattttaaaccgtcttatttctaaaataggtctaccatttttagaatggaccgtccgttttgagacttgtgtaggatctcaattttgtatgttatcaatatgtagggtatttctatactatctatcaataagggaacttatggtgacaaattaaagatctagaacaggttaggtcaagtgattaatcgttcattttgttgttgtgacatagagcccagaatcgttgatcattctccattcaggtcgactaatacacctgaatcaaaactcaaggtaagaaaagtatatccataaaacctagcatgttaagatacagttattatcgttgtgactcaattatgatcgaggtaaagaaatagtaattatcattaagtagattaaagttatggtgtcaattaaaacttttgttaggtttcttacttgttgagtgtcttattaaacaatgacaaagatatatggatgtcgagttaggtgtgtgcttatataatcccaattttctttgagtttttagaataacgatactttgagaaagtttatgctactagaattgtttagtgtaatccttaaggagaaatcttagctagctttacaacttagaaataatctaggtcatctttggacgattgagtctttcgagttatcctgttaaatagtcatttcacttagtcacccttgtttgagccgatttgcctattctttcttaacaaatatcaatgactgtatccccttatccatgattcatcttatcctttagtcatcgaacctaacctctaaaattcattcttagttttatttgtaataataatattaaaaaaaaaacaatatatattatgaaagagagagtttcaagtgtgtgtgtgtggttagttggaaagtaactatagcaagagaattaaagttgaatcgaatcattcattgtgggttaaatataaattttgggtgagagcttgggagagaaagaaaggtccttaatgaattgaggagattaggttacaagccatagcaatattaacttttatccgaccttaacctaagtcccatattacaagcctaataaaatctttttgatcttgggtgtaaagctagactatattagtggagagggttgcattgatgatcgaggttagatataatagaggttcaaaggatttagtgggaagtattcgcacactctattgattgaattactcgacgtaggcattaatgatctctataacattcgaaacttgattctaagattggggagcatttgagacgatattaccaataaagcagttgtcttcaaatgactcgatcgagattcactttacctcctacaagtgaatcgatcgtctcttgaaccaaaatggtgtaaagaattcatctataggttgagaggtccatcgcgaagttatggtctctacactgttagtcgaatagggcatcaatgtggcagggatcaactcagttatttctaataaaaatgcaaatttatgaatgctatttctttttcttttttttcaatttagctatgagtactatgtaattgtatttaattttttatgaataaaaatgttaaaatagtttttttttggtactttattgttattaatcaattacagctcacagacatacgatgctctcaagagctgagtaaagcttatagagttggtcttgaggtaacttcagttatttctttaatgagttaagcactgccaacccacaaatctcctgttcaggagatgagtgctcaacatgtaacagctcctcaagattcatgatcaagaaagtccaacgagatttagtatggaaactgaccaatgaaggaacttttttatcacttggagggcatatacgccctagtatgtttacatgggcattcaaaaagaaatgcacacctgagtagtactttaatgggttaaagaaatgttaagaaatgttgacgttactcccaataactgagtttcttaagacatgaaatattgtataagtgttaaaggtgacatggtaacggataaagtaaaaaaacaaaaaaaatattggaataaaatctaattgaattggattaatttaattaaattagaacaaattctgataaagtttttataaaggtatatctacattaaaaggtcatcaggacgacccactataatattaaagctaaatgctaataaaagaaaaggaggactaagataatgtcctgattagctatctaattcttcaatagctccttgatttgcgttgtattttcccttggtgcatttttgagtacagcaaagtttaggtgattagggttgtagcatcaccatttaagtaaaaaattaatgtcgtgaagagcttcatcatttgcacgtcgttcacattggcttgagaataactctatcttgtcctttgagaagttttcccagttaaagtcacttgcccctccattagccgaccaagagttgtaaacggtatcaaaatagtagccctcataaagaaaaatatctgcaactgcctttgtctctaaggctgccactttgcccttgaaacaacgaacttgaccttccaattcagcaacactcaaggtctttttgtcaagggacttgagaaaggacttctacttagaaagtttttcttctcacggtagcaacctcttttttcaagctctttcctagtcctttgcattatttgtggcacctcaaagatctgagacactagattcaagctcacttactacattctccaagtcggtaaccttggtctcgacatcagaggatctttgcttaatagatgaaaacttccctacaagttcaacaattttcttatgtttgttgtccatagcataagaaaaccccacacaagcctacaagtgaagaaacaatgttagaaaatgactttgacaaaaaagagagaagtgaatgcgacataagatattcacttcaaagatgtcacagaaacccttctggggaataacatgaggaggcttagtagaaaccaacttcccaaaggtttaatctccacgttgaaagtaattagagcctctccataccccaacaaaatttgccttgcacatgcaggttggccacaagcaccgtctcatgggagcttaactcagccacattaatttcatccaatgaaatagccatcgaggaagcagaaggctcgtcctcactttcaataaacttctctttccctttacatgtggatctattaatggagaagaagcttcagccacaataactttgtctctcttcctacacttcttcgaatggagcaagaggttcgtcagtcttggttgcatgtttcttttacttagagtaggttgccatggcagaaagaaaccccatattatctatgggacaacagaacaataagtggttagtacgtaagagaaatacaaaaagcaagacaaacaatcaagttaatgaggctttgattagtggcgcatcaacaacctgctgattccccaacttcctaaggcacacaagctttagtgcaacctgagggttctatttcggtttcatctctggtacaactctatcaccactttggtcgagagacacagatttctcctcaaataaattgggtcattataaggaggaccatcatcttctgacattacttcaaacctaatgacagtaccgctctgcccactttcttcatcttctagagacattgtccaagagttatcagcaaagcgagcatcaacatacatttgttggcaagttgatatcagccctacgcgaaaaaagttgtcattaatgaacagcatggcatcttctctctgcttcatgtcaatcagcaaagtaggtcttttgaaagagaaagccttttgaaaggtaacataccttgaaggaatgatgggagtataaaaatactcttcataataaaggtcgcagttactttcagtgatgttagcaatatacacactaaactggtagagatggtagaagcctttttctttatgagtggtactccttttcagatcacacagaaaaattgatctaagatcaactaagnnatattgacttagaaaagatataattgtaagtttatgatatattttcactgttgatatcggtctaatccaatgtataccaaatacatccgatactagtatactttgctcatgcctggaaaggacattccacatatcattgtgtaagtaaattttatcactgattatcacgtcagtataaattcaatgcactgataaattttaggactaaaaactttgaagcatataatcacaattatcttctactgtgatgacatcactttaattgtgaataattatatggtctagatttaataaaaaaatgtatattaaaactataatcatgaaaactacatgtaaatctaaataatttctaaccttccattgatagtaaataagattaaatgagttttatttagagca

SEQ ID NO: 22111 - DNA, 1540 bp, Cannabis sativa
tttttttttatgaatcaggaaaagtttgtattgctcaaaattgatttttagaatctaatagcacccaaaatgggccaatactgaagtatggaagtgaatctatggtatatacattacccacccaaacctcttacatacaaatcaaatgtctaattacaaactttgaaaccacctactgtcagctgccttaactttcttaggccaacatatgctaactctttgtgtaacattcttctttaattcactgattaatacttctaaatcgagttttgaattttcccaaatgctggcattttgagctctccataaagcatatacttgacatgagagagcagttgcatatacctactttttgaatttgctaagtttggacctaccaatccacttagtaagacttggcaatgtaatagctgctgcatactattgtaaccaggtcttgacatcctgaagacatgatgctgcaacaggacattaaaaaaatagatgagaagttgtctctttatgctgggaacagagcacacaatgatctgttatccccatttttaacagtctgtctctagtcttgagcttctattgtattgccaactaggtaagaaaaccgtattttagtgtattaaacctcccccatacctgctgacaccagaaaactttgttttgatttggacagagtagtgtgtaacccttggatacactgtatgcctgcaacaatagttgctgccctactactaaatctctgaactgatcttttaaagctgtaagacttctccagtaccaactgccttgtactggcgccttgtagctccaccagtcacctcccttgatgtatacacagtgtatccatctctgccacaagttatcttccttatttgatattgcccatatgtactttcccatagttgccttgtttcattcctggattttcctaaaactaattcccccagcagctttcaattaacacaatgtatcccaagcaacaagaccaagtccattagttacagcttaacccttccataaaaaaaagccttgcaaatcgattctaagttcctcactactttcttaggaaatatcatcacttggcaccaataagcatgtattgccataagaattgaattaacaagaactactctagctgcaactcagagattcctggaactccatgttctgatccttattgtcattttctcagtaagagcagaacattcattccctgaaattctcttagcggaaataggaactcccagtaggtaaaaggcatctctttcaatgaaaaactagatgttgcaaggatcctagttacctcatcacttggcatgttgcagcagtatatggctgatttttgaggattaggttgcatgccagatgaaagtgagaatagttttaatccttgcaatagaaaatatacacttctaaactcacccttgccaaacaacagaacatcatcaccaaaggccatatgattaatcttgagatcagagcacctatcatggaagtgaaaatcatccttgttgccaatttcccccaagatccttgatagatattc

SEQ ID NO: 22112 - DNA, 2090 bp, Cannabis sativa
ttttttaaaaatttataaatttaaatgttgtaactataaaagaaaattgaaaaaaaaaaatagtgttgcaggctgttgatgcatgtgttagaaagtaatgacaaaacatatccctatatggccatttttaaactctaagatcgatgatgtcatgcactatatataattaacaacatatatatatttaatgatgagccggctttatttgcaaaaagattcccaatatatataattaattagtgcttatatatacaccctttaaccatcataattataaagttaataattacataacaattgttggtgttatggaaaacaaaagtgttatagttaatagtagtaataatattagtatgcctgttatagggtttggaacagctacatttccatttgctaggtctgagacaaccaaagaagccattgttgaagcaatcaagcttggctacagacactttgacaccgccgccgtttaccagaccgaacagcctctcggagacgccatttcggaagctatttcccttggcctcatcaaatcaagagctcagctttttgtcacttctaaactttggtgcactcaatctcatcatcatcttgttttgccagccataacaaaaactcttaagtaagattaattaattaatttatttattattatatgtattaatctcttgcaaaaattattaatagactttaatcaaaatatatacacaagaaaatttaattcaggttggattattggactctttagcatttttttgttgaaacaaatagtttatcaacttcgtttttacaaatttaatgtccttaattcgtgtttgtctcctaaattagttagatattgatgctcttagagtagacaaaaaaaaaatgaaaaacaaaaaaacttaattagttaaaagatagagaaatgctaaaagaataatggtactcagtatttttttaatattatatcgctataactgtcgtgtgtcatataactattagcataataatttttagaaaatattgctatacaattctctttcttttggaaaattctacaatatttccaaggtatacaacatcaataccaatgattcctaaaaaaccaattaattattttattaagtttttttaataagggagtgtccttgattaattagctctctttagtatatcagtgatatcggtattatatcgctattggtattatatatctttaagtagtattaaggaccactgctatttaaatcaactttttttatttttttgggaaggtctacaaggtatacaacatcattaccaatgatgctcaaaaaaaagttattttattaaatttttttaataagaaagtgtccttgattaattaactcccttcactagtataccaaaaataaaaatcttttttatcacaataaaatttgtgagtaattaaaaatgaaaaaaaaaaattgtgactaaatatatcatatatatatatattaatattatataattatttgattttgtagtccatattatatattaatatttgaacaggaatttgaggttggagtaccttgatttgtacctaattcattggccaattgcaatgaaacctggagaatatttagatttcaagaaggaagatcttgttggtatggattttaagtgtgtatgggaaagcatggaggagtgtcaaaacttagggctcacaaaatccattggagtcagcaatttctcatctaaaaagctccaaaccctacttgccactgccaaaatccctcctgcactcaaccaagtatactttttcatctcatacatatatttgatattgttctaattttactatataaatatatgtgtggtcttaatttaatcttattttatatcacatgaaaattgtttattttacaaaatctatatatgaatttaataaatttagtttggcgagtctagtacactatcttagaattcttaataatatggcggctcacaccttgactaagtatgttttattggctactgttagcaaggtttggttgcccgactatcttccttgtatttaatgaatgaatacaagtttcgtgtccgctaggtaccctctcttagaggttttctctaagaagatg

SEQ ID NO: 22113 - DNA, 2141 bp, Cannabis sativa
ggtggctgcccggtacatgggctgtcaccttttgccggccagctagaggttcgtccaggatcttactagtgcttgtgtatctctatctttgttggagatgatctgatatcaggatgaacttgcttcaaaaccttaaagatgtgaatcttgtaggtctccatgctcttcttgtttgagtccatttgcaaaccttgagaacttgatgtatgaggagctccacatagggttgtacataaatttttgtaagccacccaacccgaataactcgtctaagctaaattgagataatctgaagacaaatacaaaccgaaaaaactgatgaaaatataacccaccaagaattttaaaaaaaaaatattagtggtcaatttggacgggttaacccgaccaaactgaccaatttcattgggcaggttactatttttttttcttaactggacaagtcacacttagatttttgtaacctaattcttacactgggttgaataaaatatagcataaactgactaaactggccaacgtacacccctaatgcacaacactaacctgaccgattggtgctgacctgtccctcacgcgtcttccacttttgcccacgtggagtgccacctcatgtgggcaaaaattgagataacatcacatttaatataaaaatatttaattttaatgaaattgtttgatataaaaaatggatgtttaatctttttaatattaaatttaaataataaatactttttattaaaaaaaaaatacattggagacgaattacgtcatctctaataacatggtcagttcggccaaaagaaaaggttatcagggacgtcccaaatgttacttatcaaggacaacttgcacctttttttcttgatttagtattttgcgaaagttatcaatcaaacccttattttattaaatgacaatttaaatcttatattttctaaaatattataaaataatacttagagcccgtcaaaatagaacacatagtgataaccagacctagatgctagaggtgtatacaacgttagttacttttttttttttttggtcatatattcgtgaaagaaattaacttcaagttggttatattaaaaaaaattaacaaaaatgaagttcatgtattgttgttttataccattttaaaaaatacaaaattcgatatatcatttaacaaaataaatgatccaattaataatttttgcaaaatataaaattcaaaataaatattatattatactgtacaatattatataatgagcattattaggtagcatcttgttagttaataatattctataaaaattacaataaattatataaaatgcgatacttaattaccctaataaataataaccatataacactttagctaaagtatgctaaacataacatttctcttatacaataggtcctaacaaacgtgtattaatatcttaacttggttatattgggtctcaaacaacacactacaaaaaggagcattccttctaacttcaaaatgaagcttatgtttaaactctctatgaacaacatttacgctcaaatgctcaatcattccctaaaacattcgataacatgtaccaacatctcccacaagagtactagaagttgactactaaaattatgtttgagctactaaaattacaactcccataacaaaaggtaacacagatatcaataatgttgtttttcgttaggagaaaacatgtgtatcagtgaaaaatctaacagttatatttttctgatactggtttttttttttctttcattcgaatcgtcttatcaaaatatatagttgtgacataaagccaaaaacacgcttaagaaaagacaagacagctaacttgatgttgaccataatgttgaccctttgaaataagatttgtattgacagagttgcggtgccccaacatgttatagataatattctatagcatatttaatctgttaagtgtatctctaataaaacactacagtattactaaatttagtgtcaaagagtatttttactctaattatcacactaaaaattatactaaataatattatttattattaaactaattttttaataaaataaaaaaaataatatcatattaattagcaaaaattatcacaattgttatatttaactaataatt

SEQ ID NO: 22114 - DNA, 2882 bp, Cannabis sativa
aaaattcattggaaatcctggaaggttctttgtcaatcaaaatttcgtggtggtttgggtttttcgttctcttatatatttcaatcaagccatgctagctaagcaggcttggcgtatccttaaaaaccctaattccctgcttagtttgatacttaaagctcgttattttccacaatcttctattcttgaggctgtccctggtcacaacccttcttacacttggagaagtattttatggggaagagacgtaatggcttcggggatcatttggaaggttggtaatggcactagtactagaactttggatgacccttggctccctaatcataaatataaatgttttattaataatgattatccttcttcctgtttattatcctactttattactaatttaggaacttgggatgtggttaaattgcgatcatttgatgaagcaatgattaatgatattcttgaggtccctatttttgggtgttatggccatgatgattctatttgggaacgggaaagttttggtattttcattgttaaatctgcttattatttagctttttcttgttaggatctcccctcctcctcctcttctttctctgcttctaaaaagtttggtctaaaatctggtcctctattaccccccctaaagttaagctttctgtatggagaatgatgtctaatgcccttcctgttgcatcctctctttttagacaatgtgtgattgattctcctttgtgtcctctctgtaaacttgctcctgagtctaccaagcatgctatgctagattgctccagattccaaaaagcttggcgatcttccaggtttgctatatattatgagaataataaacacttagatattaatgagttttttattggtcttgttcaagatttaaataaagattgtattggtcttttgtattgttttttgtgggctttttggaatcaaatgaataatctttttcataatcgatttgcccttcctcctaaggaagtgtatgattggagccttaacttcatttttaagtatttagatgtgtagcagaatcatgcaacagatcacaattcggctactcccaaggcatcaacacaaccaacagtatcgtgcaacttcagaattttcacagatgcagccactgattcccagcgtaaaaacacagtattggagtggcagttgtggatgcttgtaatcgggttaaagcaagattttctacccctttttcagggcttgttccacctactgttgctgaagccaagctatttatcaggccatctaatgggctcaactaattcatcttcctttggatgtgcttatgactgattgtaaatcaatagttgataaacttaactcttgtaattggaacaatagtgttttagatgatgttctgtgtaatgttaagaacttgttatccttcagtccaaggctagcaatttgtcatgttcatagagaatataatgtgattgctcataaagtaggtaagctaggtcttagactaaataatgagttagtttggaataattctctacctttcttgtaacttgttgctttgtactccttcctttcatcttaataaagcacaagtttctttcaaaaaaaaagtatgaattaatttttatattaactttttaagattaatgtattaatattatttaacaaaatattattattgttattattattattgaaaatagaccgtgagagtactaaacttttctaatacatattttataaaatcttaaacattaaatataatatttattttatgaaagcttctattaaaataattgagagaaaattaagacataaaaaatatgtttttttagtgaaatatatatggaacacaaacaatttaactataaatattggttataagaatattaaaccattagattttggttcgatagcgaataataaaagagaaatttaaattctatgcttaatttagctacttaattaaaaaaaatatcaaaaaatacctcttttcacactatatcaaaaatacgtttatatgaaaaatatttaaatcaaagtcaattttttgtcgattttttttaatattttttttttcagctgatagaacaatcataacccatataatgtcaaaatgagaaatttttctagttaaatagaaaaattaattataaaaactcaaaattttctaatattatccattcataagtaatacccattaaaagtgcatatatatatatatatattaattattacagtaaaactacacttgtaatcagaataatcaatatattaaatttgtttaattttattattcagccatggctcaatcaaaagaaaaattgtttgatcaattaaataatatatatatttatatatatttttgcaaaaacattagtcaacaagtcaataaccaaaaataataatacaatattattaatattaggtgaccttattattattaaagaagaaaaacactataaatttttttatttttaattatatataataaaatttgtgattaaaaatacaaaaattgttacttcttataaattatttttttatattatgattaaaatatctgtgactaaatgtattagtcataaaaatcggagtttattgtgattaaatgaatttttaatcataatatctattgtaaataaaattaaattagtgataacttatatttaaatattatattttaatcgcaagtattttttttgttgtgacaaaaagtcacattacatttattaattataatataaaaaaaaattatattgtgattaaaaaattatcatcaccaaaaatagctattttttgtaatgacagacacaaaaagaatgggaaacttacaaaaatactggaatttgagttaacttttacaaaaatactgtcacacggaaatcttttcaaaa

SEQ ID NO: 22115 - DNA, 2357 bp, Cannabis sativa
atttagtgtaattaagtttttatgccatatatatcaaaacttatctttattttcccatatttttgtaaatagccctttttttttttctcttaacttactttatattaattatatttttattaattaaaaataaaaaaagacaaatatgccccttaaaaatatataaataaaaaataattacatgttctaataataacaatttagtcaaattaagtcatttcgattacatttcttgatattgtaaacaaaataaaatgattttgattttctttccggccagtttagtaaataacaaaataaaatattgtttccgattattttatattttaacccgattcatttcttccattaattattttgattccaattacagtttagtaaatgtgccagtgtaattttttttgtaaccgagatgtataatgtctaccatttgctattttgttatagtgtcccactatatatatgttatactatacattaggacatttctattattttttcctataatattaaaattatataattattttacataataatgttaaaattaatattttattttactaatatcaatataataataagaaaaataaattttagtgtggcttttagtgttattgaaatttggaatgaaagaattttattttactaatatcaatataataataagaaaaataatattagtgtagctgttagtgttatgattggaatgaaacaatgagattatttcacaaacgcacaaaaataacaaaaataccgcggcacgaaattttaaatatttttacaatttttataattttatttactaaaaatatactcttttaatgtatttttatgttataatcttatttatttgttgttgattttttgttatttttatgttattttttgttattttgatattgttcgaatgctatttttatgtaatttttttttgttatttttataaatgggaaaatattcttttttattatgaacaacaatagtacatccgatcattgtaggtataatggtaaacactcgggactgagctactattattatttggaacaccttcatttcataatctattctaaaagtttagttaagtattgttacttcacttaattattattagctaaaatatgtgtttatagagaaattaagaaagaaccaacattgacattttcaattaactcttttttctttcttttcttgaattgatttccctttttgtaataatgtcacattgtattattctacaagtaatgtgtatgtagcttggggagctagcttcaccatgaatgtacaaaagaagaaacttaaccggtctgaccaactaatggatcgttcccgataacaccggctgctgatgatgacgacgatgatgaatccaaattcaatgcttgtgtctccaatgtgggcactatcggtggttttactcttctagtcaccgtcatgttcaatccgtcggttgtgtgaattgttgctccggttgtcatttttaccttaaaacaaaaaaagaaaaatataataaaatcattctttcgaaataataattctaaaagctaaaaaagaacttatagaagctaagtcaaacaggatcgttgaataatttgacttacttcgggggctccaactgccatttggaagttaaatcttcgaacaagcatagcgagcgccactacagtctgttaagcataagagtttcaatatgttcataagaaagaaagatttaagaattagcagaaaccaatcatgttaagttacctcataggtagcgaacatgtcaccgacacattttcggggtcctcctccgaagggcaaataactatgaacaaacgggacaaggtgagtttctcgaaaaaacattagtctaatttgtcaaatgagtaggaagaaaaaaatcaatattacctaaaaccttgattagtctcgtttggattaggtccatctaaaggccatctttcgggtatgaacttgtctgcattctcccaatgatttgggctgcgatgtagattccataccgaaataaatatgtcctctcctctgtaagtagaagaatttatgttagttgtaagtctcttgtaatttgattactcgaaaactatgttcttcgaaataaccttcttatagggtattgaccgagcgtgtcattttcaatagagcgacggattagcaccggtggttgagggtaaagccgaagggactgaaatcattccaataagaatcttaaattggatacaagattgaaaaaatgagcataaaaggaaaggaaaaactatctactaacttcattgatcactcgagtcgaatacttgagtttcttcatgtcatcaatggttggatatcgatcacctagaaccgaatcaacctaa

SEQ ID NO: 22116 - DNA, 3129 bp, Cannabis sativa
tcggatgtatgaagtatacattggaagggaccgatattgatcttaaataagatatcataaacttactgttatatctttctaagtcaatatcaataatacatatcaatataaaaatatttaaaattcatacaaaacttaataaataaataaataaaatactatatttaagattgatgattttatgtttttatgaaaataaaactttacagaccaatttgtcaaaaaattaaatttgtggaacagctcgctaacacttatataattttaatttacgattattttattaaaaaaataaaatttgagaaccaatttatcaaaatttgtatagtttaggaacgtataatataaataaacttattgattaactatcaaagttataattcgggaaccgtgaaatcaaaatccaaattttggcttagaaagtattttcattaaaataagtatctagaaataattcatttgttttcaaaaagaaataatttatttacttattcttcttattttatattttgctttttccttcttggtgtttttctttaaaataatattttaaaccagtcttcatttccttttcaaaaaaaaaaaaaaaaaacgagtcttcatttaatattaaaggaaagagcaagacctttaggtgcaatttattgggatgagaatgcatttaattaaaggatccttaattaaaagggtaacagctttatttatagagaagggggaagagaagtgcacaattcacttcactatactcatgccacgtgaatcttggtgattcacttacatgatataaatatattacacatttagcatcggtcataacagtatttgaaggcataaaaccgaaattgcgaagattatcatgagagcaaagttttatctgttcggcgattctatcactgaagagtccttcggtgatggtggctggggtgcctcgctggctaaccatttctctcgcacagtacgtatatacgtacactcatattcttacacgatcgacagtagactatatatatatagtatttaatcattttatcattctgggtttttgttttgttttgtcttggatggtctcaactctcaggtcgatgtggtactaagagggtacagtgggtacaacacgaggtgggctctgaaggttattgagaacgtttttccggctgctaatggctgtggagatagtactagtgaatcgccactagcagtgactgtgttcttcggcgcaaacgacgcatgccttccagaccgatcctctgcttttcaacatgtgcctcttgacgagtacaagcgaaaccttcactccattgtcttatttctcaaggtaattaaattgaccacgtataacttcttaactctattgaagttgtcatttggattagaagtgaaagtttaggcaaaagtaaatagaaaataaaaggggtttctcaaaggcccctattctgatttagttttaaaattttattttattttctttttctgcattggttaggttgaataatatgattaatctggtccatactttatttggtggagaaagagttaatgcgatgaaattgaattcaattaagtgaatattttggggatatggcttagtgggatgacgagagtggtaggtgacaatatgataggttgtgagggctgacctgaataaactaatgtcctaaccatatagagaggatggggagttatagtaagagcgaaagaagagagtaataatttcactaactactttggtagaaatcgattgccagaagaatggattgctatttacacagaaattattgaattatctttttgggaagatatatatatatatatatataaaattacaatggagagtataaattctttaactatttggtataataataagtagtaatccttcctcctctcctctcctctccatcttaccaaaacaagaattaggatttgatcttctaatctcttggctctttccatctcgtcgtcgtacatgtaccaaacttgttattgttatttattaattattaatttagccaactgactctttttaataattgtcataatataaatatttctaagaataaaaatgctaaaacgtatactttaataataggttttaagaagtatcggtagctaatcgcaatacgttattaagattaatagctttaaattatttaaaccgtaggggtggggttgctccaacttgtcgtgtcgttttctatatggtcttctccttttgaatttgatgcataggacgagggcattatattgattttcttttttgtatttttcttctcgcacgcctactacacatatgacgatatttatgttgtccaatattattaattttaagaatgaaaatggcatacgggtcccatgaagttgatgcataataatgggcagtcatttgtgatcacacaattaatcgtggctatttggatttctgttaggcacttcatgttcggtatctacattttttcttcgtgctgatgggatggcaattacttcatatatgcaatttatattttagaaatctatcatcaatttttttcgaacaaaaatctatcatcaatcttattcatacgtaattactgtatatccacctaaatatatgtacgtaaaagtctgtgccatacaaacgataccatcctattgattatataacatagaatgcttaaccatgatatgtatatgcctttaatttctcacagagtaccgattatatacaagtgttgaagatatatgagtttcatataatatacgttagaacgcaactaatggtgactatatagtggttatgaagtaagggtgtgtttgaaagtttgattttggtgaggaataggaaatgtaagggaaaaaaaggtaaaaaacaataaataataataaaaattatcaggtatggaaagaaaaattatagggaaagaaacttgattgattaaaattttccataccaaacaaaatttattttccataccaatttcaaactcacatagcctaaatctactattatttatggcttcatgtggcatagatgcaagtactgatgacaatatgtcactattgtatagggtaatataggcataattaataaaaattgtagattttagaacgtaatctagctagttccgctcattataaatatttatatatttt

SEQ ID NO: 22117 - DNA, 2753 bp, Cannabis sativa
  modified_base (1429)..(1429): a, c, t, g, unknown or other
caaagagccaaaagctaggattatcataaaataatgacatcgatcctgatacaatgtgaattccagtagcttttaaagtatatttagcaaaaaatattacattaactcaaaactgtcaatctagtagaaatttctttccacttggtgtatggatgcataaaagtaaagtaattatgtgataaaacttacttaatgtcttttaattctaaataaatactacaaataacaattgttcaaaaaataattataaattaaagggacaaaaaagtttcacattttttaatatatagaaagtagttttatctcggtggtagtaatagtgatttgatcttgggctataataaaataagattataacctttctttttagggaatccttaatctaaacatgtgattgtgatttgtgccaccaccaatacaatactcccactctcaactttaaagccataattgctgcttcccatgatccaatcaggattcctttaaacagtacataactactcaattacactcatgcacaaaggaaaatttacaaaaacatatatgtcgtatatataatggagccacaacatagcatataatataattaatcgtacccatacccaaatgaaaaaacattcagtaacagcattggtcttttttttgggataaaaagtaatagcattgtttaattggagaaatatggagaaaaaaggaaaaactttgattattttttttggtgcctaaaaaaagaaaaaagcttcattgaaagaggcttgtagtgactcttgtctaaaggacatagaagatatttcaaaatggaattgcgaaatgtgcctcctatgaaaatgtgccaacaaacaccactggcaacatttcctgaataaagttgttttcccaaataacatgcataaagtattaaagtaaccttttgatatgttggaaaaaaaaaaaaaaaactaatttggaaaggaaatctttttttattattattactatatatttgacaaggaagaggagaggacgttgggttagataagtttgcttctacaaacatgaacacttgtatttacacaacctttttttttttgaacaatgtgtttacacaaccttaaatgcaagaaaccaacttttctttgaaggaatttaatggctaagaaacacaatataaaattagtcaaaaataaagaaacacaatctgtcatttctttctttatttcttgaagccttgaggtcatattatataagttttctctactacataatcttaagtggcgtttgattagaggtaatgaaattgaatggaaaggaaaggaaacaatcttcattctatttttttttttgtttggttgcatattaaaatgtttttactattttggtagaataacaatttctttttgaaatgaaaggaaatatcatttcaatgcatgatgagaaaaaatttaataanttttttattatttttttttttaagaattttaaattttattccattccatttctattctcattcctattctgattctgatttctatattttcattcttcccaactaaacgctagttcaaacaactttaattgcaagaaaaccaataattttattagtgtaacgaaaattagtggcgactaagaaatcaatataaattttaataaaaactagataaaatgagacttaaggtatttgattctttttctactttgatattagttacgattttggctagatgccttaaagtttcattttgaatagaaagaaaggtatcaaaatcaataccaccaccaaatgcccaattcaaaatctcataggctaatgtcctatttgtacaatattagcttttttttgcttgaatataaaacaaacaaaagggagaagaggtccaaaggtagtagtagtagtaggtttggtggtgtcactgtccaatcattgtccaacaacttcaatattcatcaaacttatgactgaaattaaagcatatcacaatatatcacacactgtaatatatagtaaataatatatttttcaaaaaataaaaataaataaataatttaattaaatagttattgttgtgatgacaccacatatgttatggtggaataaattgaattgggagtatttatgacagaccaagtacatggttcctctcttctcaccacttatttactcaaaagcacaatattcaaatgaaatattcaaatttgtagatgaaatggacctaacaaaccatctcaaacataaaatttattaatttattgtctccacgcactaaatttcaagtttgaaatttcagccaaaaaaatttataacaagtttgagatcaaagtgtacaaactatttctgttaaaagaagtgaacgaatgatcaaaacttttcaaaattgaaatttttgtgagccacacattaactgctaaaataacatgttggtgattgtagacaactcaactatagatgtcattgtaaagtttgtagaaggactagtattggagttggtttagtgacatttttcaatcccttaatagggagggttaagtgtagtcaatatagatggcatgtggtaattgtagaaggagctagtatatattggagttggtttgataacatttttttagttccttaatgactaggattattaagttaagtcaatatatgtgtctaggggtgttcattggatcacatccaatattttgaggcctatccagatccgatccaatcatatattggatgttaaattttatcatccgatccgatccaattaatttcgtcatccaatcgatcc

SEQ ID NO: 22118 - DNA, 3623 bp, Cannabis sativa
  modified_base (3078)..(3082): a, c, t, g, unknown or other
catcgtctaaccgaaggacatgctgacaaaattattatatttgattattcttaaaagagtttttttagaaataaaagttgaaattcacttatatatagttatatacttcgattagtttccaccatttccttctttgggcctcattaaatgcattgtgggccttcaatttattatatgttgtccaaatgtgctgatttttttcttcttcattttgaataaattgttttcttagcattgatgccttgcaactagtttcccttaaattaagagatgttaatagcaacaatagtcttctttatagatgtacatatatttttgataaatatgtatttaatttttttagtacaaaatatattatttaaggaaatttgtatgatggttaattattctattaatttgatggtgatcgagagaaaaatcaaaataatcaataatatttttaaatgttacacttataacttcatttttattttatttttaatgatgaatgtacttgaataaaaaaaaaacaaagaaaggaaaaaagaagatactttttcattaagaacttgtttataaatgctaataggtagattttcaaatgcgtatgcctaacattacaagtgagtgatcttctagtaattttagaatttttgctctcacttttttttttttttgagtttttactatttttagtatttcgaagttgagacccaacattataagtgagtgcaatattattattagtataatttaatattagattttatatatttgtaatttaataataagtaatatagagaattattaattatactcgtgtcacctcttatgtatattttgaatttcttgaaaagaaaatcccaacaccacattataagcaacaaagtctagcaaaaggtaagagacaaagattcacattgatcaattaaatcactcaacatgagtttatgaatataatttgggtactgaggccaccaaactttgttaacaaaatttgacaagagtgtgagtaataacattaaaatctagaacaataagaaaaacaagcataatcaaaagaagaaaagctatgactaaaatcatttaaaactaaacccaatgaaaaagccaacaaaacataattattaaacttagaaactacactcaaacaattaaactcaaagtgaaccctagcaaaaccaacaatcgacactaaattgttggatttcgcaatgtcgaagctttaactagctcaagtaaaaccactcaaaaaatgttgaagtgttgacaccgcaacttctcttctatcattacgagccaccatcgtgaaaccacaaaggccaaactcaaaatcaaaccccatcaacatttatcttgactacctccatgcagtggtacccacctaccatcagtcccctaatcagacatcaaaccattttgagtcacaccattcgacttaggaactacctcatcactagtacaagattcatcctgttggaattctttaaaagaaaatcacgagcccatgtaacaacctgatgaggaggaattaaaatatcgaaatgcactaatttattctgcttgaactaaatacaccacaaaataattaaatacactaaatttaggttccgcttttacgtatgccccacctctcatggaagaaggggaaccccttcaataatagaacccgtgggggtgagaggggattgaatcattcattcatcatataatttttcttatgtgtgatccattttatgttaccttttaattagttataaaaagcctactttacaaagggaacatcgtttttcaagaactcaccttttataatattaaatatattaaaatatctaataacaattattcatatttatttactcaatggtcaaaatttaataaaatcttatgttatattttgttgagaatcttggggttctatattaaaactaattcgtgatgagtggagtagcccatgttcttatatatgactcaatactctaatatttattctatgtgggataatgtccataatattccctctcaagattgtgacaatttttttgctcaccaatcttgaaccgtattaaagtggacatgatcactatctgtataggtgcgaatcagatatgatcacatacccgcaagatatagctctaatactgtgttgagaatcatgggattccatttaaaaaccaattggtgatgagtggagtaatccatgctcttatatatggctcaataatctaccatttattccatgtaaaataatgtccataatagtatctaataagtatttttaaccattaaaaaagtcagaagacacgactactcatttttgtacctaatcatgaattaaaagcaggagaaacatgactactcatttttgtaagataatgaacttattatacaattctaaaaaagcaatgaaatataaacgcaacaactaataaataaaataatgtttctccataaatgtcattatttttattaattgttttttcagctacctcatcatttaattgtaaggggccaagacttcatcattttaactaggaaaataaagatttatatatctcacaaaataaagataaaataggtttgattttgtttatttcatactaatttaataaaccaaatagtttgttaaggtagtatttttttcttaaatttttttgtgtggaagaaatgggattgtttatttccatgttaaaattaatgagatatgtatagattaccttgatgttatgacttgaatgagatatgcacaagttactttgatgttatgacttaaggagaagagaagatctttgcaactaattatgtgatgagtaatttacatcataaatatttaagtttgattcttaattttaaataaatatataaatttaacatttaggtaataatacttaagttatattttttagaatttctataagtacctaaccgttaagtgtcaagtcaatgaccatatgacagcctctgattggtttaggtcattaaatttttatttttttatctaaaaaattatttaaatatacgaagaagaaaataacacgtagatcttgacttgacacttgatcaggtgcctacggtagttctagaaatataacttaagtnnnnntactgtcaaaaattaaacttaagtatttatctacaactgaaaattaaacttaaatatttatgttggtaaattacaattatatgatagaatttgtcaatggttatagactatgtatttaactctatttttcttctcacatattattgtatgtaatacaaataaattagatttagtatatgttctttttcttggatccaaattgatatatttaagtttggaaaatgcaagcactgacaattattagggaaatggttgtgggccgaagaatttaggcaacccatttcattaaaagttgttgggccacaggacaaagctcacttggcaacaagttgataaggctctctggaccatgggcttggtgcttagggcttaaccaaacttagtcattatctttatatgtatttattattattactacttggataattttcaaagggaaatttgagaatctatgcatttttatacccaaattaattatctaaactaatacttataactcttgaaaaaataggactatttttacctaaaccccaaaataccc

SEQ ID NO: 22119 - DNA, 1224 bp, Cannabis sativa
aacactttcttgctctgcagatttactctttgacccgacatggctctgataccatgaagaactctgtaaaactagctagagttgtgtttgaactttaaggaaatacaagagagagaagcgattagatggaaatgagttgctcaatcaaatcttgattgctttgttttatttatacttaaaaacaatacacaaagaaaacaagagtagaaacggtataactatattgataaaagaaaaaggaaaataacttaacaaactaattaactgttatagctcttaactaaccattttttgactagttgtctattctaataatattaaaaatcgataactaatcataagatgcattagtgtgaaataataagaatataagaacaataaggtgtcacatcggacaccttaaggtgccaaataataatgctatttgagaatatggaataataagaaaaacattgtttgtttcaattgtggagaaagatagtacgtagtagctcactgtcaaatcagttggaagaatcttgcaacctttatgagttagttcctagatgttagtctttgccatttgtacttttcaagattcaactttccattctaatttgctaattaagtactccaaactttcttaagaatttttaacacatctttcttcctcttaggacatgttaagttaaaaggtttaaaaaaagaagagagcaacttacttgtcatttttgcgctttttgttttttgttcagcattctttggtgtcagagcatcatactcagtatcacaaaagaatattcttcagcatcaccgaccacattgatctatcgtgatcataatacaatatcaggaagtagtgttcaagtcagtgccaaatttcaatagaaaaactcttaatttttattaataatccttttgtgaaaataaccttacatataatttttaagcaatttgtacaattaataaattaataataagctcctatattatttcaaagtgtaatagtagaacaagtggtataaaattatctaatttccactaatccatcttatttgatagataagacctcattgtttgttttattcgcaaagtgaactgatttttcattcttccttttcaagggtattattaataataacatacattaaatatatatagcactacaactaatatgtagaaaattcttaagcagggtcatcattttagcttaccatagaggcatttcttattttcggtatatag

SEQ ID NO: 22120 - DNA, 8571 bp, Cannabis sativa
  modified_base (934)..(938): a, c, t, g, unknown or other
ggcagaaaatctcctaataggaacgaaaacacgacgagaatcttctaataaaagaataaagtttataatgaaattttcaatataaaaatattaaactacataaaaattaaaatattatacattaattattattcaataaactaattatcattcaaaacacaacttaaaatttatataaaaacgatactaatatactaaaaaaatacaaacatattataaattataaaatattattagaaatataaaataaaatactaaatggcccccgttaggacaggaagtgtcatctccgtcctcgtctggtttaacattcagtgacaaaaataacttgcatccctctcttgttacccatttacaaggaaaattcttggcccattaggggggcgaatccccacgggtccatccccatggaataaaaatgtgcatcctttatggtcacccacactattgatgtcctattaaatttaggctaattaggatttttgctgacgtgtactaaattatgtccttgaacttttaaatctattaaaaaattcccctgaattattgaggttgttggatttaaaatttttttgtctaattttagtaaaaaaaagtctaaaatgaatgaaaggtcaagggtatgatttgatacatgttaaaattcgagggacataatttggtagatatcaaaatctagagagtatgatttaacacataaataatcatcgaattagtaaaattaaattaaatttaacaaaaatcctcaagtccaataatctcaatagttcaggaaaaaaattttaacagtcaaaaaaatttaagtataatttaatacatgttaagtttaatggacaaaaattataattaacattacacttgaggagtgctaattacaacttcttagtcaaccttcacgtccgaaatcacatgctgaaatattttttttcatagnnnnnttcgttatagttacagtatcatcgctgtaaatttttgaaaaattctgaatagtttatagtaccgaaaataaaattcctgatatttcagtttaccacgtgttcaaaaaacttcaaacgtattttcggcactgtaaactattcgaaatttttcaaaaatttatggatatgatgttgtaagaataacgaacaccccatgaaaaaaaatattctaacatatattttcgagcgtggaaattgactataagagattgtaacaccgtaagcactccaccattaaacttatattgaacacgtataaaattgaaatttctcatttattacgagtgtgctaatattaggcactaatctcaatagtataatttcataccaaaatgggcaacaacagtcctttagttgttaccatgtgtcgtggggaggtgtggcttggggtagagctccaacgacagtcgacagctaaacaacctctctctctctctacgaggccagcccactgtttccatatttactttgaggaaagcattattgttctttatttattactctctaacaatttatgttactttcctaatggcatttaagttaagagtaatgggtaaataatcgtattaacatcattacaattttttttagttaatacttagaggtgtactattgttaactttatatcataattttttaatcaatttttatgtctaaacacattccagaatatttttaaatttttttttatagtagtgttagttatagttacaacatcattcttgtaaatttttgaaaaatttcgaataatttatcgttcccaaaataggtttgaagttttttgaacacgcatactaaactgaaatgttagaatctttgtttttagtactgtaaattatttaaaaaatttcaaaaatttaccgggatgatactataacgggaacgaatattactatgaaaaaaattgaaaaaaaatattttgacatgtgatttcaagcgtgaaggttgactaagaggttgtaatagtagcttgtaattaacactcctctaatatttatatctgaaagcacatgtcaaaatattatttttttaaaatttattttcattacatattttagtctaccagttttttcaaacttatttttgtcattataaattatttaaaaaaatttaaaaatttacaaaaataatattgtaactataacaaacaacatcataaaaaaaatattttgacatatattttctagcaagagattaattaagacgtaataagaagttaacagtattgaaagattaatatcaagtcttttttttttcttttttatattctatttatgaaattgattattttttttaaataaatcatacaattttattaatagcaatcagctaaaataatattctaaattctaatcagacatctttaccattagaaacacgatcagagttaaataattaattgtttaatttttagattgtttgacaaataaattaaaaataaaattaaataaaaaaattgcatcataaaatctattttctacatttgtttccataaaaatttaattcgggtaacaagaaaagcgacttaccaagttttctccatttataattttttttatttcttttatcaatttttagatatatataactgcatcgtattaaaaatattaaaaaactagtacacaagctaagatactttaagctataatatcgtttcttcgtgattaaaaaaaatgatattaaatgaaacttatactaccaaatataactatattatatttttatttatttctcggtaaatttttgattttttttttttttatagaaatgtgttattatgaaaaacacaaactataggagataggataactgatttgaaattaaaaaaatctacatgttttttttttcataatgaaaaacaaaaacataaaaatcaatttaaaatggtttaagaatacacttaaaaacatattttttaaaaaataaaataaaatttattagatccttttacacgtgcctatataatatctatctgtggttatatttattttccttttaaggattttcttatctttcgatttttctttagaagattctctataaataagtgttcgtttcccttttcatgataactatttctctctactcataaaaccctctctctctcattcagtaatatttatttttattattattatttataattttgaaagttgacccagaaaataaataaataaaaaaaataaaataaaacaaagacgaagacgaagacccaaatgagcactgcgcaatcggagctttttttcaggttgagcctctaaactaacatatggagaagaaatagggaacccacaaaccaattttttttattttattttatcattattattattaaatatttgatacttgatttgggtttacaatgcaatctctttcgcaatagctcactgtttcgtttcaattccattcaattatacaatttatcgtgataataatcattgtttatctattgatttgtttccattacaattcatgactacaccaccccattgacgattcccaattctcaaagtctcagttttgatccatttttcttgtttaccaaattacgatttggtttgtccttattccttattaataaattaattatattcctattccccagctattcgaagttgaattaaatactcatatctaaacctaatgtattctcggttgttgtaatttattggataatcttccattctgcattggggttcttggtgatggagataaatatgatttgggtttttcttggttctttggcttgttgggttttcctaaatgcttttatgaagaagaattggttttcataataaattgactttgggcatgattatgttattgtttgatttacttgttgtaggtaatgaatacaattttgtatttagatggcttaaatttttgttgtagctttttcccctaaattcttatatgaagtagaagaagctgcattcatgtgttttacttttacttaagaccacagttgtgttattgtttgattttgattcttaatagtactgaacccttttactttcttgaaataggttgtaataattgtgtagaaaatggaagtgttggtttcagatgagaagcagttttctaataaagacgtagagagagtttcaatttccatgcttgcacggatgagacaatgcccagaaattattcaaggtcaatctaattcaagaggtggcaataggggcaatgaatgctcatccaataataatgaacaggtcaatctagatgttcaatggtcgagtagtaagaagaggcgtcgttcctcattgcgaagagatatagaggatgacttattgttgaatgaagatgaaacaaatttgaaaaagaggcgtagtgcctcaatgcgaagatatgcagaggatgatttattgttggatgaagatgaagaactggagatgctgtttatattcaagcataagaatcagagtagaagaagaataagaaactttggtttgactgaagcaagttcaaaggaagctgttgctgttaaaaataatgaactggttaatgctactttttgctctccttcaccttctcctacctcatctgcctcatctgctaataacaaaataaaggtaacatctttgtttatttaacatctttctattaagagaaaaaaaggtttcttatctgatttttttattgttctggtattataacaggttaatgaagagggttttttgaagtgtcatcagtgtatggagaaaaagaaatttgttgtctcttgcaacacatgtaaacaaaagtcatattgttaccaatgtgcagaacaatggtatctttttgagaaggatctcacttttcctgctaagaagttttcttttaatgttttgtaactagttttggtttttctgccttttgtttatttaggtacacaaacatggaaataaaggacattaaaattcgttgtccattctgccgtaaaatctgtaactgcaatacatgcttgcattcaactgggattttcgaggtttgttttcttttgtataattatgctgtgagtaccaggtatcctcagaagtacactttctaattagtattttcttgttgaacttcagacagtggagagaaagatggataactgtgaaaaggtttggcacctggattatttactgagcttactgctcccacatatggagcaaatatgtgcagaacaaactgaggagatagagattgaagctagaattcaaggtattttacaaacttttgttagatttttttacatctcaattgtaaatataaatgacaaataactgactttcttcttcagggatttcttcttctaaagttgtagtaccacagactctatgctctaatgatgaacgcgtgtattggtgagcatcccttctttattaaatttgatgaagttgtaacatgaatggtcttaattacttcttctttatgtctggatcagcaatcattgtgcaacatcaataatcgatcttcatcgaagctgccaggagtgctcttttgaactctgtctcagttgttgtcgtgatatccgcaatgggtgcctttcagaccgtactgaagtcaaatttcaatataagttcaagggttgtgagtacattcatggaggggatcctttacctgaatcacatcctttagaaacaacatcagagtatggtttggaacctttggatgaatggagtgcagatcctgacgggagtattaggtgtgctccaaagaatatgggagggtgctataaatgtagattggagctcaaacgtatccttccgattgggtggatctctaatttagtagtgaaagcaagagactttcttggggttgatccaaatgaagacataactatacatcacaatcacaccgatgaggagaatgattcaatgaaaaaagcagcttccagagaagattccaacgacaactacttgtattgtcctgactcaaaggaagttctaaagaaagggtttctccacttccggaagcaatgggctaatggcaaaccagttatagttcaaaatgttcttgaacaagctagtggcttgagctgggagccaatggttatgtggcgtgcgctaagtgaaaatccaggagcagagactggcacagattatttgaacgtaaaggccatcgactgtttgactggttgcgaggtttagttctgttatccctttgacattgattttagctaagaaataagaaattaaagttccaagttgtttgttgcaaagatctccattgtaaaattcgtattctaattaacccttgtatgtttttcctctgtaaaatttgcaggtggaaattaacacccgccaattttttgaaggttatactgaaggaagaacatatgacaacttatggccagaaatgcttaaattgaaagattggccaccgtcagatgagtttgacaatcttttgccacgtcatggggaagagtttatgagtgctctgccatttaaagagtacacagatcccaaagctggtatccttaaccttgctgtgaagttgcccacaggtgtcttgaaaccagacttgggtccaaaaacatacattgcttatggcattgaagaagagctcggaaggggtgactctgtcactaagctccattgcgatatgtcagatgcggtatgttgtaattatatctttactgacaattggaacttgggatttgtaaattatatcttactgacaattggaacttgggatttgtaattatagcttaactgaattggaacttctttgtctatagtaattgtctcatgcagtaaaagacataatttctcttgctactgtatttatattattatttgttattctctactcttgcattgcattccaattgcgctgtaatttgattgtaacttctttttatttatttatcaataatatgggatgcaattgtaacttgttcttttgatcattaattgatgtaggtaaacatcttgacacatacagccgaggtagatttaacaccagatcaacgcttgtcaatttcacagttgaaaagagtacacttgcagcaggatattagagaggggataaaatcttgcatgaatcatgttgaagaagaaacagaggacatgatgacaccaagtgaagataaacattcctctaaaagtgatggcggtggagcactatgggatatcttcaggagagaggatgtcccaaagttagagaaatttttaaggaagcactcgaagcatttcaggcatacctatggctgtcctgttaaacgggtaacttaaaatgtactacttttgttttgctaattcaaatgctggaaagaagatatactcacttttgcttgtcctcattaggtcgaccacccaattcatgatcaatccttttatctaacttcagaacacaagaggacactaaaagaggaatgtggtaagtagccttggttgacaattgttttcttttttcttctccaataccattagtttgtttaagaaaaatatatgcttctcatgatcataggcattgaaccttggacatttgagcaacaagttggagaggctgtgtttattcctgctggctgtccgcaccaagttaggaatcttaaggtcccaacctatcttattctctgtatttacaatccaattttcaggagcttgagcttgtctttagtatttacagtctaatttttacttgccttgcagtcatgtaccaaggtcgctgcagactttgtttctccagaaaatgttggtgaatgcttgcgattgactgaggagtttagacaacttcccaagaatcatcgagctagagaagacaaattagaggtacaattcttgttgatgattttgcttccttccaccatttgctatacaacttttgcttccttttcataactcatgttttttttttctgcattggaacagataaagaaaatggtaatgtatgctgttgatcaagctgtcaaagaattggaaaacttgggtgcagtgtataatgtcaataattgttagggcagttcttgatagagattttgtttgagactaacccttcttaggagaaatgcatacatagtttaccttagatgcatactgcataaaaaaagcatggaaagtgttgagtatcaatgaataatgaaataagtatttggtgttagcaacaaaatacttcattctttggtttgaatttattcaaataaaatatgagcttctaataagagtgagattagatatttactaatgaatagaaaaagtgaaaagtttattgtatttaaataattttctctttctagattaatgatatagagtatagacaccgtaattggcactataatgtaaaattttgtgaattaacatatacacattcctatattttgttttacctagggcctaaatcaatactcaatattctaaatttaccttattagtttttagagaagttggatggtgtaatgtaaagttgttgtaaaataaataaagtagaattttagtaaaattagagaaaagaagatgttgagagtgccctaacaaaattgtaaaacacactcacatcaatgttctaatatagaaaagttttaaaatagactaattagtaatttttccctcgaagacatgtactaaatcgtgcctcctgaacttttttgaccgttaaaaattctcctcgaactattgagattgtt

SEQ ID NO: 22121 - DNA, 2923 bp, Cannabis sativa
ttatattattttataacataacttaatatataaatatctatattatatataacgatatttgttatgatttaacagattatttttagaaagtctattatttttagaaactctattaacagacgtctgtgacttttaaaaaaggtccaacaaaaaaacaccactactctataataacacttcacataatatttatataataaatattgactcattattttttttaattgggtaatttgcggccaaactctctatatttttatatttgttacagtttaactcaaaaaaatatggctatactctgtggactcgataatagttttgttatgtagtcctttcgtccattttaatttgttattaaatgcaaaagttgactgccacacagtgtacatatggtaaattttcattaattcacctaatattaatatttatatatatattaaaaaataatttaatatatttaaaagttagaaaaaaatttaatagtttttttttcttcttcatctttcttcttcgttcgttcgttcttcctagaaatcaaaccccccaaccccatgaaccccaaccaaaaatcaaactccaacccgaaaatcgaacccagaaaatctaatcccaacccaaataatccacatataaattaccccaacccaaaaaactcttaccccaacccagaaattgaatcccaagccatctaaacccaacccatattcgatccgacatccaaacaacccatcctaaacacctaaatccctcccaaacacaaccagacaaactggagagatggcaatggcactggagaacgacgttgggatctcggggttcggatatcagtcctcaaagttcttggcgatggtgacgaaggttgatctcggggtcttgggttttcggtgatggtgacaacattagggtctcggggttctcgatcagcggtgtgggattggacgagaacacaaaggtctcgggttcagtttagaaggaggctgggagggagagagaaaaggagaagaagaagaagaagaagaatgaggaggaggaggaggaggaatctcgttttggaaaaaaaaaaaggaaatgaaaataaaagaaaaaaaattgtaatttatttttatttttaaaatttttaaatttataattattatatttaaataattatttttttttctaattttgaattttttaaaattattatattattaatattaagtagactaataaaattctaccaagtgtacacttatgtacactactgtggtagtccactttagtacttaacagactaaagtggacgaaaagactatatagcaaaacgattgttgggtacgagccataatttttcgagtaagggggtttaaccataacaaacataaaagtataagaaatttagccgcaaattcccctttttaataaccatgcgtttatcttttgccataaaaagtatatattttggcagaaacaccattttgaacaaagtttgcaatctctctttattatcttggggtcttttcataaatatggaatactttagtagagtttacttttatattgtataaataaataatgtaaaaagatatgtgattaaaaaatagagtaaattgcagcgaaatcttcaaaagtttcgctctagttgcaacccaaaatctattttttagtagtaaaacccataaactcgtattttgttagcatttagccatttctatcaaatttttgcttaaatgccatgtgagcatatatccatgtggacacagtatacacatgtcataatttttattatgagttcacataatttaattatttaaaaaaaaaattaaagatcatttttaatttttttaaaatgtatatatttactaaataaataaaataataaaattaagggttaattgcggcaaaaaccccaatagtttcattttacttgcaattaacctccaaaactcaaattttgccaagaaaaccccccaaaacaagcattctgttagcaaaaacacacttccgttccctcgactccgttatttgccaacttggctcagttcagttcagccaacgtggacacagtgtacacgtggcacaatataattggcccacataaataagtatttaaaaacattaattaattttttttaaacacaaaaaaaaaaacataaaaaaaaatcattaaattatttttttttcttttttttttccagcctttttttccctttcttcacgctcactctctctacactctccctccctgtttctttctccagaccacactaccaccacccattaccttcttcttcattttgaaaccctaatttcactaaccatatcttttcccatttctctctctgtcgcctacgcaccataaccatctttcctggtattcctctccctcccatctccggccatcgtgttctcaaagtagcaccacgatggagatccttactaacaaaaaccccacccacccctcactctattctctctcgcctgcgccattctcgaaccggtaccatctccctcccatcgcctgcgcctgcgccgtttgctcgccacgatgagaacttggcccaaaaaccccatcctcactcttttttatctctttctctcttgtctgcgcacacaccggcactggaaggagattcaaaatctcaaatcccgtttatccgaagccaccgaactacaaaaaccaaccccgatgcggatctcctagatctcgttttggtattttatttggctttggtaagatatttatcatttctttctttttctttttttgcttattgattttcttggggattttttttctggatctgagaattgaggagagagaatcatgttaaatcaaaattgttttctggatttgagattgcttatggatttaatttttcttttgtgtttttacgttgatttggatctaataaacacaatggtttggttgtggtgttggttg

SEQ ID NO: 22122 - DNA, 8748 bp, Cannabis sativa
  modified_base (7161)..(7169): a, c, t, g, unknown or other
  modified_base (7453)..(7454): a, c, t, g, unknown or other
  modified_base (7884)..(7884): a, c, t, g, unknown or other
  modified_base (8014)..(8014): a, c, t, g, unknown or other
  modified_base (8062)..(8062): a, c, t, g, unknown or other
cttggctgtctcggaaaatgcaatgagtgcaacattagtgcgagaagaaggaaagcaccaacaacctgtttactatatgttagtaacaagttaccagaggggcagaatcaagatattcccctcttgaaaaactttccctatgcctaatccatgcatcttgcaaactaaggccttactttcaagcacatcctataaaggtgttaattgattaaccattaaggcaagttttgtcaaaaccagatacttctgaaaggttgataaaatggtctatcgaactagggcagtttgatgtaacctatcacctaagaacatccatcaagggtcgggctttggccaatttcctaatagaaggaatagttctagatgaaaatccacttgtccagcgagacgcagaaacttggaaattatatgtggtttgagcatctaatgaacgtggctcgggtggaggggtgatattgatctggccaggaaactttaaatttcactacgcattaagattccaatttgacacttctaacatcgaggcttaatacgaagccttcttggctgatttaagaatggccgaaacattaaatgtcaaaaatcttatatgctttagtgactcacaatttattgtgaatcaagttctaggcgaataccaggcaaaaggtttaaagatggcaaaatatttggagaaagttctaaaaaacttggagaacttctttaattgaacaaattttgagagaacacaactcaaatgtcaatgcactggccaaaatggcctcacataatgaacttgataacttcaatttggtaccggtggaaatcttaagcgaaccaagtatatgtgaaaaggaagaagttgagatgattgatggctcgcctacatggatgacacccataattaactatctactcaacagacaacttactacaaacaaaaatgaagcacgcaaactcttgtgttcaatacctcgctacatgatagtagaaggaaaatatatagaaggggttattcaatgcctctcttacggtgtgtactccccacagaagcaagcgagataatcaaagaaattcacgaaggtttttgtgaggatcatgcgggtggccaaagcttgtcaaagaagataatctgccaaggatattattggccaacaataaataaagacacacatgaatttttcaagaggtgcgataaatgtcaaagattttcacatatacctcgcgtaccaccaatagaacttagaatgatgaccttgccatacccatttgcaatatggggaatcgacctgattggggcattactcacaggtcaaggaggagcaaagtatgcggtagtggcagtcgacttcttcataaaatggatagaggctgaacctctagtttccataacttgcaagaaggttctcgattttcttatcaagaacataatttacaaatttggaatacccattaaaatagtatccgacaatggagttcagtttgatggcgaattatttgctgagttctgtgaaaggaataaaatcattaagagcttcccttcagttttaagaccccaagcaaatggtccaatagaagctgttaataaaaccttaaaggatactatcaagaagaagttggatgttgtaaaaggaaaatgggcagatgaactaccacaagtactttgggctcacagaatgatagagaaaacaacaacagggcatattccattctcgttggcatttggctcggaagcaatactgccagtggggaagttaatattgcgactcataggcaagatttctataatcaagatgaaaaccaagaactccttaaattgtccttggatctacttgagcgaaagcgtactgaatcacaaattactaatgcagtgtatcatcattgaatcatgagatacttcaacaagagagtgaagaaaaagctctttaatgtcggagatttggtgttaagacgagtatttgcaaacacgagagatgcatttgctggagtgtttaacccaaactgggagggtccttatgatatcgaggcaatagttggaacctggtttataaattggctcaacttaacgacttgctaataaaaaaccactggaatgttgaacatttgggatcctattaccagtaaacttataatgtaaatgctgtattttctatttgtaatgaaaatccttataaattaataaatttagagtaatgttcaagtaatttcaaattattattctgtaaaattacttttttttttaaacattctgtaaaattaattgaggggcatatatatgtgtatatcaactagaatttatctagaaatacatgatatattgcaaacccactccattttaaaaatttttccaaataaggataattgattaaaattgtctatagacaatataaagtcaaaaacttaacctttctattcagaaaggaaaatcgaaatagcagttgtaaatgagattaactcataaaataacataaaactacaggtgaggctgaatatttaacgactcgcattattcaggcatgtattatgaacgaggcacggagatgccttgaaaaaataatacttaacctaaaaatatgaatagaaggcctaactattcattggcaatcaaaagatgtacaaagtaattcataaagttaattattaaaagtatgtttaagtttgcttattaaattataaatggcagattataactgctcgctcggagtagagccgataagaactgctcgcgaatagaaagcatggcagaatataactgctcgcatacatacatagtagattaataactacttaagcaatctcaaaggaaaaacgagatcaatggaaatggttacttaaagtatcttaagtttgatcaaaatataattgtttaagttgtaattaaacacgcaaatgaacaaacatatcaagttcaaaaataaagatccgaggcaataaataaaaagcaaagttggacatccaacaatggaaatttgtccttacaaaaatattgccacaaggggcaaaccattgtctcagccaaaaggccatttttctaaataaaaaaggtttgaaattaaaaaccaagcttacataggaggagacttggatgggtcttcatcttcttcagactcaactgcctcttcttcttttttagctttctcgcaataagctaagacttctttggcaccctctcccaagaaacttaaatccatttcaggatttgccatccaagctctgtaaattgatctcttagcaacaacattgcaccattctttagcattggcatcagcgccattgagcttcacactggctgcattaagttcctcttagagtgtttgacaagcctcagatttttccttggcttctttttgggctgcctcaagtttagttttataagtcctcttcatgtcctcaacctctttgctcagacgcgaaatctccttttgggaatcgttccattgtttggcaacagcctttcgttgctcaatggttttacaaagttcagtgtctaattgctttagtttatggagaactcgactctaggagacatgagataagaaggtggcctacaaaaaaaatgcacatgaattcttgtggattcttgaaagaaatgttgaaaaacaaagagaagaagaaggaaactaactgagagattgaaggtaagagtcctctcaagcatctctgttaggttgccattattgaccgaatcccaatcaccagactggaaagattggaaatggtgcaagcaggatgcagcaaattgcgagaaatactctaaaccagtgcctccagccttgatgggcaaagtctcaggtgccttacttgaagaagtggtggcttggtgagtttttggaactggctcctcgacatgtggaatggctagagtatgaacctgaatttgatcttcaggagtctcgagggctatagactgtgaggcacgcatcttatttgcagtggtttttttttggatctcttgaggggttccacattaacatctaaagaagtttttgaagtagcagttctctttttcccctttttgctcgaggagtggaggagattctctaaatccatatttgcgagacaaatagatgcatcaatacttatttaaaaacaaataaagaggaaaatgggaaataaattcccacttaagggaagataccataatcatcagacgacgaagaagggggactatagtattcactaaactcccgagatcctgtgatcatgaatatgtcataggggttaattggatctaaattccaatctgaatctggatggctcgctctatccaagttagtcccatactgctcggcaatcccatagtattaactagtgcaactaagttgaacaggaattgtggataccaactatcaaacctatgggtaacataatctataaggaatgagttccaaatgtaaaagttataccgaatatcattgaaagttactaacaaagtacctcttgccctaagaacaatgggagacaatccacattgattacctcaggatgaaacttcttcagcttcccgaggggctacattctggagatagtgcactcgagccacataatcttgactttcctcgtcagctggaactggaaccttctcccatgatgtatacataggaaatttgtaatcacaagtatactcgttcgaagcgagaaggccaacagtcttcagattggcctcatttaagagaaactcagttgatcgtagtccgaacggaagacccaacaaagttttatgtcgctcgagcatctcaggagtgagaactggtctttttaagaccgctgtcaacataataagtaagatatgtcagcgaggccaaggttacaaatatgaaataagtcaaaaccgagtttttgagataaagtttacttacgtataatgcaaaatgcagtcgtgttaattgggaaaagaccagttgtctaaaagaaaatcctccttaaaagcggtcttgtttgataatcctacgatcatttgcatgagtcccatgatagaaaaaacccctgcacaatgcttcctcgtaggaactgccttaaccgaataaagataaacaatttcttgaggagtgggacactctcatcctaaaatatgatacataatctttagacttgcaaggattctgtaggaaattggaactaattggaatggagcaattctaagatgattgaggaattctttataataatctctcagtggagaattgctctagccctgatatgcttgaggctccaagtgcctatcccaatcgagctactagctagtactggcctcatcactagcctccctacattcttcgtagataagtcgttccggtggataacaactgaatttaccaggtgcaacggatctaacacgtcaccctcacttttggttgatgccacaagtccttaaaacaccaccaacataatgccctatagctcttattcttgactcaatgagcttagcctcaaaagtgacattaggatattggggagtctttgacttacgaggcttggaagacataatttcaaaatccaagtcacctcatggaaaagcaattgtgactctgggtaaaaataagggtttagccaaaggaatagaagataatgacaaaagttcaggccaggctgcatctcgcaagtaacgacgtttaccctcagttatttcttataggaaacgcctataagactagcaactttgtcctggttggattttattaaatggtcgttaatttttgcatcgtttatctcaagtttttgattgaggtttgagaattcttggtttatatgggagggctaatttctaaggatattctatttctaaggattctaaagaataaacttcagaaccagattggggcatttttacaaagagagcaatcccaattcctggaagaaatttattaaaccagaaacttataaatatgataaacctaaatttgtttaatctgtctaagccctaaaaattacctacaagattaaatcaaaattactaaaataaaatggaacgacacagatgcaattgacattaaggatcataacccaggaaaatagaaaagatcagagaaaaggggatgaatcacttaccgttcgaaattgagtttttgcacgacgacaccgagaatgggataagtggcgtgacaacttctgttaattcttgaggtcaaacagtatattgaattgatgcgcaagaagtatgtcaatgacaaagagagcatgcaaagctttacgaaatcaaaatggttttttcgcagaaaagctcaaagtttttattttgaatgttaaaatggtggaaaaatggctccttttcaatttataccttgagtttgatcaccgtcattaaaagaatagagatccaacgggtaggaaaaagagagaattggaaaacatggctcattaatgctaatgatgtgcctcaaaattatgaaccgccaaaatttgaaagcatgcaatttttcaaaatgggttaagacaaatataccctttgtaattattaaaaaaatactttttttattaaaaaagaacttcttaaggggaaattgttataccggatattcaactgtactttagggagtgacacgtgtcaaccaagtggaatatgaaccaccagatataattctgattatatcatttaatgcaaaatagaataactcattatatatagaattaatagaatatattcataactcgctgactgtatagtcttaggcgagacaaggatactcaaactactaattcctagattaacaagagaccatcttgcctcggatggcataatcccgaggaaactacaggtaatgtatatcaagacatccacctcgctacatataaggaaatattgacgagacgaatcaactcttgaaatacttagcgtatattccacattataataactaagtgtaataacttggaaacatgtaggacgtgattgtccagtctgcgagaccttataatcaaagcgcagttcttaagtttgctctgtacactggagctcatgtcattgctggaaggcatatgattaaaccaagttattattggtcatctatatgcaaagcgagatacctctacacacgtcagtgttgatcgccttgaagatatgaatgataagaggttgtacggttatcatttcttatctacacatgtttaaatgaaatgtgatgagagcccacgttttatgaaacgattatgtaatttaaaattaaatgtaaataactgccaacnnnnnnnnntataaataggggcagattctacagaaaaagggacgaaaaatttttgagagaaaaaagattactaattttaatgttgtattaaatatttaaaaatatcttgaataagatagactcgtggagtatgcagatttaattgcaaaaccacgtaaaatacctggtgtcattattattattattatacttatcaattttcttatatatccgtgcttaatttattacgaaagaggctgattattcgttaacaaaaatttgcgttaacaataattttatttaataattaattnnaattattaaatagatagaatttgtttatagagttagaactatataagaaaagataagttgttaaataaaattgtaaaattgaaactagtagggtccacaatgaggccgaccacgtaaggtaatttaagccattattttatcttttttaattcaatttaaattctaaacttaaccctagaaagaatccaataaatagattatgatggctcttattttcataacctacatcaatttcttttgtcaaacaattagaaaatagaaaagagcctccttctattcgaattctcttcttcttcctcataaatttcaaatcccacagtgaattaagaatatgcccactcatgtctaagcaacacctagcatagtgaggatgactatgtctaaccaaagtgaaggagagaaaatccaagtttagatcttgataatgctntgctacagaaaggaatcaagggttggagatctaaatggaaagagtcattattattttgctgccatcaatgtacagattttttttaatctcttatgtgtttatttgattgttttaggaaattcatatttangatgttagattatagattataatcaaatatacttgttagtaaatctanatcctagtaaaataagttctaacatctggcctcagagccttggtaatgatttacattcatgaaatatgatttaaaacgatgattttgaagatttggatgtgttcatgttgatttacgtacttaattgatgattgttagttaattacaaattttcgataaaaaatatttttatcttcgtactagaagtattttttctagaaagtaaatgaaaaataaatcaatttaggtatagaactcaatttggatttaaattcaattagttatttgaagtttaaaaatatctagcctatggttgacaccacgtgcgcgcgctgatgacgggagtcacgcggctgtgacacgagttgggataggggatgttcgagatttctcggacacgaggctatctgaagcccttcgtgaccgagcttcctcggccaagaaccctgcatgcagccttgtctctcgcacatgacccatgatacgtgttacactattttggcaattttataacttttaaaaatggtttttcaatgaaataaaattaaaaatttggtaacattttgtgtagaatttaaattttcaaataaaaatctaattatcagataaaaattaatttctattaatttttaattaatttaaattagttttagatattagtaggctttaaatttgaaaaattaatttctcaacaaacttgccattat

SEQ ID NO: 22123 - DNA, 4705 bp, Cannabis sativa
  modified_base (1028)..(1032): a, c, t, g, unknown or other
aaaaaaaaaaaaaaaacaagggaagaaaattcttatacaattcaacatcaatccaagcctttgtgaatcaccgccaactattattctatttactgtcaatgtaactgtaataatttagtttttacatcgcatgttttcttttccccaaactgtgaaattaattaaatatttaaattaatatatattagattatttgttaatataataaataagataattaataattaaaatttatatctttttgatcggctaaataattgttagaatttacgcgtgcgacgatgtcactcatatatttatatacataaaaactacattttttatttttagcttgttttggacaattcactagtgaaattcctgagtacaccacaataaacgtatttgatccccataaattcttgtatgcactattttgaaaattatattaatattttcattaattaacatatataaataacttagttaattaaaatatttgttacataaagagtaattaaattattaccttttcaacatcgcatgaatttgttggaaaattttgtggccatctatagggtctaaatggataatttttcttgacccaatgacctctagcatccaattgcctcaactccggccatgtactttgaacaaaattctacaacctcttcagatatgtagcactcaaccatagatgcttttggctgatagtggttacgtacataacttttaagtaccttcatatttcttttaaatggatacatccatctcgcccatactggcccacacaaccttacttctctcactggatgaaccattagatgtatcatgatgtcgaaaaaagatggcaaaaaaactttttgaggttgcccaatgtttttactacgtgttcatgtaatgtatctaatttatccatttataattctttctcgcataaattataaaagaatatgcaaacatgtgtcaaacactttcgaacatttttttggcaagattgatctaatggcaattgaaagcagatgttgcattaacgcatgacaatcatnnnnnttcatacccattagtttcaattcattcttatttatcaagtttttgatgttagacgagtatccatcaagtactttcatacttgaaaataattcgcaaatcatttatttttttcttttggacaaagtgaaacaagtaaaaggtaaatataatcgttcacctttcttttaaggtgccagagattttcggatacccatttcaacgagatctaaacgactagataaaccatctttatttattgtcgagaatatcaagtagggtattgataatactctcacacacatttttttcaatatgcatgacatccaaacaatgtcgaaccagtaaaattttctaatatggaagacgaaagaagattgactttctttgaaaataaccatttgttttttttttttttgcctctttccatacttaaaatctactagttctacttcttggataatttgttcccctgatagtggcaaaggagccatatctctctctcttcactaccatcgaatgctttattcttccatctatcaggatgatctttcggcaagtaccgtctatgacccatataacacatcttgtgtccattgtctaagcaacgagctcatgtgttagtgcaataaatcgaacaacctttgtaacatcttgtgcttaagcttgataaattactataagttagaaaatcgttaacaatccataataacactgctttcaaattaaagaattatttttcaaaactatcataggcctgaacaccattctcataaaattttattaaatcgtcaatcaatggtttcaaatatacatcgatattatgtccaggttgttgcgggcctgatatcattaaagaaagcatattaaattttcttttcatcactaaccatggaggaagattgtacataacaagaaagacatgccatgaactatgacgattacttagagatctatgtggaattactccattcgtagatagactgagacgaatatgtcttggttcaaatttgaattcatcattcatgtagtttactttttttcgagcttgggaatctgtaggatgtctgagttttccatctttcactttcttagtctcgtgtcaaatcaaattttcagaatgtttttgtactacgatataatcgtttaagttgcggaatcaaaggcatgtaccacatcacttttggggagataagtttattattctccttacttttgtttattttatggcgagataaactacaagttggacaattatccatgtctgcatatttcttacgatataaaatataatcattaagacatgcattgattttttcatactttaatcctatgaaatttaagattttttcactttatatgtagattctgggaagtaattgtcaaatgaaaagatatctttaaaagcagctaaaaattgagtaaaatattttttgctcactctattttctactttgatgttgtaaaactttaccattattggtaatcttagttttttacaaccatcaaacaagggtttatttgcatcacttagaaaattatcgaatttttcaagattattaagaaattcctcccgtgctttgtcaagcaagtccattggatgatcatcaaaattattaccctcaatattatctaccctccgcttccttaatggatatgaatcattagttaaatgttcgacatgccaatatcaagtagtataacttctattaaatcttcttaaatacacatgatccttaatcgtcataatattttcttttgatctactaaaataatctacatgaataatgaatacgtttgggattttagaattctttaggaaaaactttataaatgcatcgaatcctacttaaaattatagtgtgtctctcacacatctatgatttatccataatgaaaatcctaacaaaaatacgcagtatttagtgactaattataactagttactagttacataatataactaactagaattttcacaactatttaatatttatatattactctaattgttgttttagtttaaatcatattattatattactcatttcaaatattgacatgataactagtaactcattgtaaatagttactagttatatatgttgtaattaactaactagtttcttacaattagtaactaattatttgtgttatgcgtaatacttttcctttaatagttatacatttttagtaaaatttatcctaattctatcgaaatttcggcagcataacgactgtaattggacattccaaaaaattttaaagatgtcaaaattaataagcaaaactaaaaaaaataatacaaaacaaataaaataatattaacaatacaaaaattattcacccatccggtcgtagtacatgtattcgcagaacctacttcactacggttgaatatttaagatattaaaactcaactaacatgcaaattattatacccatctgactgcagtacaatatatcgcagaacctacttcactacaaatgaataattaagatatttaaactccacaaaacattgataattaattaataacaaaagttagtgaatgtatatacctgtagctagctaaaatatgatcaacactaaattctttagaaccttgaaaattaactcacaacctacaatataataaaatacaacaaaattaaaattttaattatttaactacttacgagttatatcatttatgagtaactaactagttactaatgagtaactagttagtaataaaaataaatgaatatgtatgaataaaaaaaaaataactagttactagttagtaaaaaaatataaaaacacataaataaaaataaaattcaataagtaaattaaaaataaataaaagaactattatttctcatctattcttaaaaaattacatatacatttataataaattatatctcacactaaaaaatttaaaaacttaatttctaaactaattaaaactctcatatctcattcacaatacatatacaatacttagaatatatacaatatacttacaatatttttatagatacaatacacaatatatattcaataaaatacaaaatacatacatatatactatatattaaggtttaaatttttaccttataagcgcaatccgacaactaattctgacagaaattcagccaccatgcacatacacaacaaaataatcttaataatatagaaaaatcccaaaaaaaaaaaattacaaaaacgaaaaaataaagcaatgcacattattaaaataaatagaaattatatttataccttaatggatgttgagattcaacattttttccactagaatcggtggctgaagttataaccaacatattatttctgggcttcgatttacattgaaatagagaaaaaatcgaaactttttgggtatataggtttaggtatcgaaaataaaagatttaaaaaaaatagggtaaatagtgtaaaaatagtggagatatgggattttttagaggtagttggcgaggattttttgtcgtgagtgggttttgtgctgctgctagtgattttgtgctgaagaagaagaagatgaagaatgggaagacaaagctgaaaggtttctcatataaccctatgttagagattttataacaatggaagaaaatcaagatttattacaactctattgtaaaataatacaaggactaaaataagagattgattaaatatatgcta

SEQ ID NO: 22124 - DNA, 3237 bp, Cannabis sativa
ttgttttgcttagagttgtaatattatttaattgtttgtattagtatttttggtttgtaattctgttgaagcacatcttattccaactatcttttttctgtctggttaatctcaataccaagtgggcactgagatcgatctgtttgttatatttaagtgtcatttgttcaatgtaatataatataaatgtttcattcactaaacactaaaatcgagtttgatgtatggggtttagtgaattacgagtaacaagtgaatggtcgattggtaaaatttgatattttaattaatcaaactcaattggattggctttagcaccaattttggaatattgtctgtaccactccacgtgtagattgtgtttttactactcgagaaagtagaaattaacataggattctctttagctatgtaatatttattcattaacatcacgagaacaacgaatataatcactgagtggtcgatttagtatggattttaataagatttatccatattaaattacaactaacaaaaagtaatataaagtcatattctccacagataaaaaaatgaatatcatactaataaactccactaatttgtcttgtagataaaaaaaatgaatatcatactaactccacttcaaaaaagaaaaaaagaagcccagttttgaaaagcaagtctcctttcactttgtaacaatagccatacctttgttttcttttcctttcctttcctctacatatcctttcatcttgtaaactatcttattttctttgatctgccaagctacaactcccgcatgtccagttatttcttcaatattcactgaaaaagactatctcttcttattctacaggtaacttcttatcccaaaatatatttctttcatttatttattttcaatggttttgtactgaaataacttgttattaactaggggaattatattgtaataaagcagcggagacgaaaatggctgagacgttcttaacaccagtcattgagagcttgattcagctacttaaagacgaagttagatccttcaaaggtgtccataaagaagttgaaagcttaaagaaagaactcgagatcattcagtctcttttcaaagacacagatgagagggagttagccagtaatgctgtgaaaatctggatgaaacagctcagagaacaagctgatcacatagaggatgttgttgatgaataccgatggcatctcgcgcagggtgctactgacaagagtggattcattggctttttcagcaaaataggtggtcgaatcaaagctttaaagtctcgttatcctttatcttcgcatattaaagacattaatcaatctttacgaagaatcaaagagactggcctaggattcgccttgggtcattccctacagagagtacaagggtcaactagcaaaaattcgtgcatagaagagcaagacacacgacttggttctcattttcttgagcaagatgatgaatacttggatgttcctttggctcacaaaaaattgaaaagctctttggtagaaggaatgtctgcacgtatgattatatcattggtaggtgaaggaggaattggcaagactactcttgttaagaaagtctacgatgaggtgaaacacaaatttgattgtcatgcttggatcactgtatctaaatcgtatgatgtgatagcttcattgaagggcacaatgaaacagattggcctaacagctgaatgcacatcttttgattatgatacgatgatccaagaattaattacaccgctccgtcaacacttggagaccaaaaagtatgtaattattcttgatgatgtttgggatgcagggttttgggaaaagatgaaatatgctttgcctagtaaatataatggaagtagggttattatcacaacaagaaatgaaacagtagctccttgcgatgatgctatccaaaggttggaaatttggtctcatagtatggcttttgagctattctgtaaaaaggcatttaaacatgactttaagggttgctgccctgaggagttggtgaaattatctcatgagattctgaaaaaatgtcaaggcttgccacttgcaataggggctatagctggtttattatcgagaaagaagaaggtccaatctgaatggagaaaagttcttaatgatatcgatttcgagtttagaacaaatcctcaacttgtaagaatttctgaaatcctctctctgagctatcttgatttgccttaccacctcaaatcttgtttattatattttggtattttcccagaagattatttaattaagaaagaaagattatatcagttatggatttcagagggtcttgttcaagcaagggaaagaaagtcattagaggaagaagctaaaggatacttgaatgagcttgttgaaagaagtttagtttcaattgagctaatgtatggaagagggaaggggtgtaaagtgcatgatttgatgcatgagttcattctatcaagagtaaaagatttaggtttttgccaaattttggcaaaaaataaatttgaatttggagaatacaaacatcgccgcttgtcaatccacggaagcataccacaaactattataaaaacaattcaacaatgcacaactgttcgctctatctttctccaaaacttcaatgacgatgaccagtggaatggtaaacactttttgattgctttgttcaaaaatttaaagcttctgaaagtgttggacattgacgatgcaactcttgattatcttcccaaagaagttggaaaattgttccacttgaggttattggatttgagcttttcaaaaattaaagttcttccagagtccattggtcagctacataatctacaacacttgaatctcgaaggtaccagggtggataagcttcccaaatctattggcaagcttcacaatctacttattttggatctttggaatacctttgtacatgagctaccaaaggagataaataagcttcgcaatcttcacagcctttttgcttctcatatgaaatacttacctgggaaagtaggtgatttgtttggagtgaagatacaagaaggatttggtaatttggagaatttagaaatgctagaatttgttgaattgcatcaggacgtgggcggtttcacaaaggaattggagaatttaagcaagttgaagaatttgggtgtcactaatgtgactaaagaatcttccaaagctatttgtgctgttgcagcgaaaaagttgagtcaccttgaatatttg

SEQ ID NO: 22125 - DNA, 4406 bp, Cannabis sativa
agtgtaaagtctaggtgaagtagaagtgtgcgcttttctagttaactgaagcctttgatgagcagacccatttcaactatagctaagtcccagtcccttcccttccctaactctataaatacatattgtatgggcacgtatatgcagtgcatgattatctatgtgatatattaatgagagttgtgatcttggataaatataaattgttatatcatgagtagaattttttatatatatatgactatacactactactcactaattaaattttgctacgtaaaacactgtgtaataggattaaatttccaacatgggttaggacccgggttcggctccaggaccggggttcggggttcaaaatcttagtcggggttcagggctgaggacaagttagggttcagggttcgagttggggtctggttagggtcgaggtggtaatgtgggttcagatttggggccagagttgaggtttggagttggggctagggtccgggtttgacttcgaggccaagttggggttgggtcagggtatgggattgagatcggggtgtggggctatggtcaaggccccaatcagggtcgggtttatggtgaaaaaaagtattgttttgcatagcctattaattcaagccaataccaaatataatattgtattaagtaatactatacagtacattacatcccaatacaatacttatacaatacaacgtgatatagtgtacttaacgagccttaaaagaaatcaaaacaatcacgagagcaattatattgccaagttaattaatattacaagaatcttttacgtgatatgaccattacaaaccaaaatctacatcagtttcaactttcaataatagggaaaaataagcaacaataaaaaaaaaaattgtgtcaacgtcgtaataggattgggaacataagtaaattttataagtcaacatttttaatatgagcatgagttgaggtacatcggaggttattttatcccaaatatttaaatcaatgagttatattattattacttggtctatttattacacactggctcaagctttgggcagcttgggctattgcacaagaccccctatttttaaaggcccatttttttttatagcaaaagttttttttttttgttattataaatacattaaaaaatttatatttaaaaatttagaaacatatctttaaaaaaagaaaaaaaaaatagcgattgagattttaatgtacataatttttttttttttttacaaaaagtccaattttaatcttttgcacacgcctctaaaatttttgggccgacccatttacacaatttcagtaactcaaaagccaatgaggttagttgaggtggaagtttgaagttataaacttgatctcatatttctaatttattatgtgcaccaatcatggtaattctactaaaaattagtttaaaacaaaaattgtgaaaaggctgaaagtgaaaaagaaagaaaaaaaattagattaatatatcaaagatagatctgtggtagaaattcttaagtcttagagatagcaagtatagactcttttaagtctttcagcagctttcagcttagctgtctcttttcttttctgacatagtatggaaagcaaaatagaatatacaagtaataagattcatggttccaatctcattgttaagtggagtttataaataaatgagaaacagtgttctcaatttatgatgaatatactgtagaaagagagctgaaagaaaggataattaacttttatcaatcggttgagattgccaaaaaatctgagtctcatctttccttgctgcatttgctcgtatggttacccgagacttttgaacgaaccctgctccgtcacactcaggacatctgcacacacatacaacacaatatggatccttattaggcttgctatgttgagtcttaacgttgtgaatttgagcaaggaaaacaattgtatagtaaagagctatgaaataaaaagagcaaagggtaacttttcataggtatcttttcgggagaagaggatagggaaagcagttccaagtagagccacagcagctgctccagcaatcaaggaagctgtgccatcggctgatacatctccgaccacaattagaggtcttgtcttcagtcttgttctcgcttaggttccaagaaagagctgtggaccttgctggtggtgttgttgatggactgcagacaccatacagagaagaagagcttcttggttttgcttgaaagataatctgcgtagaagacattgaaaatgaaaatgaaaatgcaaaaagtgatcaatttctcttgaaagaaaaaagcttcaattcaatgaataatagagaataatgatctctttttgaataaaaatcttcccagttagatttttgcatcagctctgcatccagatatttataattataattagcaagtgaatgcaccattttcaatgtttgagttcctctcatcacgagtgacacttgtttattgaaaattagcatgtcataaacagcaactaacactcaacattaagtttaagaacagaaaacataccagtttatggggtccaaaaatcgcaaatctgcatgttttgtcaatgtaagctgaatagtatcccattctgcaagctcaaaatattcgtaaattgatcatattctagaaaagtatgccttagtgctgctaaaagagaagatcagaccatccacaaccgcataatgtttgaggaactagcttattggaaaccaaagatacaataacaagggtacatttcgacaatattcttacactatttatgcatgacaagttgtaaaaagcactctaataattagaaaactacacattgataatttctcatcgaaatcccgagagaaagcaggtgatggaactttttaatagaaaaacgtaatacaagtactaagataatggttacatccctctagtatatctttctaatttgctgccagtgcagaatgtcctatccttcaacagaattacagtgtatgctatgcacagcaaataaaataaacaatacaattacaatatacaaaaaaaaaatgataaatttaagaaatacactacaaatacaacaatcttagtaagaaagtgagcctacaaattgagaagtaaaaatgcactcttcccccctatctcaacttggtttcaaagaaggaaaagaggaactaaaacactcctcattagctatccaatgtccagcgtcggctgcgacttgttctactgaaaatggtactagaaagactccttcgagtcggattcggttcagcaccagaccgagaggatgaccttctgagcctcccaaaaaatgagaaaaaattgtgaaatgctcgtcccactcggcccctctccctcgacatacttccactagactgaaatgcaatcctcattggagcaccagaggtattgaaaccaccatccatttcagtgtaaacgacaggaagctcgcgctccgcggctcgcctaccacctgtaaacctcccaacagcaaatccaccacccggaagcctccatattgttaaaccaatagtttcttcatcctcgaccccatcagcagactctggggagtttctgcgacacccatgcacatcagtgggcagttgatagcgacacacagggcaagaattacgaagcgaaagccacggaaggatacagtccgtgtggtagatgtgcttgcagggcatctctcgagcttctgaattgagttcaaattcctccttgcaaacagcacagtgtagttctgtggaaacgtggttagccacaatctttataatgggcatggactcaatggccgctttggacgctggaggatgatccattctcccaaccccattgatctctaattgtgacaattgatccaagaggcggtcaaatcctgaacccataaaaaattcagaaatgctaggaggtaggggctgaagactcgttccaataccatcatcgtaatacagctcaaagttacttcgatcagtaccgttgctttgatctctgtcatcaccgccacccccaccaccatcggcggtgccacgaaggacaataacagggttaaaaggcgagcggtcacggctacttctttggctacggcggagcctttggccataactacgaatctctggattaggggcatggtcgaggtacatagcagccgccggaaactgattacggataggagatctagttggggtcgggttctgcatttgttcaacgaatccgccaccacaatgggggcaaagtacgttatcttggaccggaacccgagttcctacgctaatgaatcgactgcatctatagcaccaatatgatgttccagcaaaatccatataccagaaattccaacccaattggaaatattaaacctacattaaataaaaaaaagaaatataagtttgttaaattcat

SEQ ID NO: 22126 - DNA, 1806 bp, Cannabis sativa
taaaagctcaaaaactctaaaattattcatttttacagaaaacccagatgcgaaactacctcagctaaccagaaatcattcaaaagaatcaaaacaactgatttaataaatgcccagaaagctgaattcctagtacctacagatgtcagtgagaaccgatatcatatacataatgagaaaacagaaactccaagtccaatgattaggacataatccctgaagaagagaaaaagaaagaaagtaaacagtttcttaaaaggagcagagggaaagtcatcatgatgatataacaccatgtgcatgtttccgtatttaacactaagaagatcatctcgtgaaagctaagaataggttttgggtagagtaaaatatcgacaaacatcaattaattctccacataattaacttctactctaacatattttccttttcaactttacctagttttacccaactcagaactcgacatcaggtctttaaagattgcatctttcatgatgagagagcgtaatattgatataatcgataaatggagtcattaactaactaactcagtcgttttgatttgttatagtctttgggagaattttctcccatttcattctttagtccaattttttcttaattctgtatgtcctacttattcacaactgaaaacattaattctattctgatggcatttaattaagaattattttttttaatttatatttcaataaatataggaccacgtcttgagagcaattaaaaatagaaacacacattgagtttagggataatgaggctcgaactgatgacttccaccacatcaaagtgacactctacggttgagttatatcccttcctctttcctccatggagaaatagaactggtaaaattttttgaatagtttacaatgctaaaaataaaattaaaataattacttgtcacacgtataagaaaaaacagtcatgtgtgcagcaaaatatgtaaatcatattcagcattgcaaactactcaaaaaattttagaaaattataagggacacttaataactacatcacgatcataaaaaaaaatgactaaaatactaataaatattgaatgtaatattgagaaaatctaattatgattaattaaggcatattttataaaatatagattaataagggtataatgggtaagattatgatcttactaatcttattctgtggataatagggaattttactataaatagataaataggtgtaatttattaattacgaaaattttattagaatatgtgtgtaacatgcatgttatttataaaataaaaataattttaggttagacaatctcggagacccgattggaggtaagaaatgtcacaacggtatttatttactgtttaccgaatttttcggcaaccgaataattttacagcttaagaaagtcatgaaggtataaataacgtaataacaaacaagagatttttatgtggttcaggcgttaaatatccttagtccatgaatcgattaggctctatggccgatgattgtttatacaaatataagaagatggaccttttctcctatttttcaagctcctcttgaagaaaagaatacttagtaggaatattctggagttggtaattgggttacaagaatgtattttctaaggagtcagtcttcggcttcaaggtgaagggccaaagaagggaaaaagaaaaaaagcatcccccctttgtgcttcttttggggtatttataggccgactccatcacatgggccaccttggatggatcttcatggggatgaaccccctgttgggattttatgccctaa

SEQ ID NO: 22127 - DNA, 5801 bp, Cannabis sativa
  modified_base (5487)..(5488): a, c, t, g, unknown or other
agttgtgataaatctctgttttagctcttgaaaacttgcttcacacttgtgtgtccatataaattgctattttttttagttaattatattatgggcatttagattctggaaactccttcaacaaaccgaaggtaataaccagttaaacctagaatacttctgacttcagtgactgtctttggccttggtcaatacttgacgaattcaatctttcccagatcaaccttgatcccattcttactgacaatgtgtcctaagaatgacacttgagacagccaaaattcatatttcttaaacatggcacagatcttgtgttctcatagtcgctgcaaaaccatccgtagatgctgcacatgctctgcttctggttgagagtacacaagaatatcatcgataaatactataacacatatatcgagaaaatccttaaatattctattcatcagatccgtgatagctgatggagcattggttagtccaaaagacataacccaaaatttatagtgaccatacctagtatgaaagatagtctttggaatgttctcttcttaaattctcaactgatgatagcccgagcggagatcaatcttagaaaaaattgtcttcccatgaaggtgatcaaataaatcattaatcctaggtagaggatacttgttcttgataagtcaattacaaagtctatctctcgctatggtggtaataccagaagttcctcagggaacacatccaagaattcttgaaccactttgatgtcctcaagccgaactgactgaggccgagtggtgtctaacatcattgccagaatccctaagaaagcttcttgtaacagatctttggccttcaatactgatataattagaattcaagatccctaaaccgatcccacaaaaagaaacaattcttcaccctcaggttgaaaaatcactatcttcctcttacaatcgatgctataggcatacttggacaagaaatctattataatatcaaaatcggctaaacccaattcaactaggtcagcactcaactccctatcttcaattctaattggataaacctaactcaccttttgaagataaaaattctccaccaggtagtagggttccaaaccctattacataacaatcatatggtccacctaacttatcaattactctggctgccgtatacgagtgagcgaccctagagttaaacaaaatagaatagtaagagttgttgatcaaaagctgacatgtaacaactaaaggactagcctcagcatcagcctaagaaagagcaaatacccctgttggagcagattttgctttagtgttctgttcttctttctttagctatgggcagtctcttttgtaatgtctagttactttgcactagaaacatcctcggcatctacactcatctaaatgatacttcttgtatttagagcattctcgctaagtgtactgattctcagatacaccctatcagttgccgcggccatggttcctccaaaacctcttattgtggttcgagccaccaaatgaaaaatgagcctttcctttctgatccaaggttcagtcactaccacccctaccataaccagcggtaggaagatatgtggccccaccaacactagaaattccttgaggctcattactacactttactatgcccacagctcgtagtgctttccctaccatattagcataggtagtcgcgtcatttgttgtgatcatcaattcatgtttaattttgggattcaacacatctagatatttttctttcttgctaaaatcagttggcacaattcctgaggccaacctagccaatctatcaaactgcattgtgtagtctatagctgacatattctctttctgggtcaactgagtgaactcctttctctttgcgctacgaactgttttgttggagtactttgcgttaaacgactcttgaatttcttcccatgtaattgtggtgacatctcgggtgagagatatcatgtgccaccaaaccagggcatctttttggaactgaaagtagcacaggttgctctattattaccaaagactcccataaagttcaaaattcaactaataacagttagccattactcaactttcataacgtctggacctcctgcaaagacttaaggtgcctgcttgcagaacttttcatataatggttccatttagttaacaacagaaattggccccgcctgcatagtaggggcagcagccacctgcaccgagcaggcattgcaggagcaccctactatctcaaacgcctgcttttttcatttagttcattaatccatgcatccatctcaacaaacctattttcctaatgctgggcagcctgtggtgggttagcatctccctgaccacgtgcgctacctcttaggcctctgcctaagccataaatattcaagggaaactgaactccctcaccgccactaaatctgaccaaattaacctagcttctcgtgttttgcctaatgtccattctattagaacaacctgcaaaatagtgagctagcctatttagatcgtgatcaagattaaattataattattgcttagttgagaaaataaaatatgcacctattcagctattaggctactaagatgcttcctattaggcattttcttataatgaactaataaacaaactactagagcaatagaggcttatttaactgtgaggtgagcatatttctaatgatgattgtacgtatcgtgacgatcttcataagacaacctggcggctctgataccaaattctaacaccctactagattaggcgtgttatcgtaatttaatactaattgtgcaattcgttgctaaccaacaggtttatcaaaaattatgtttaactaaaacttttcatgtttaacttcaaactttaaataaataaactttacaccatctaggatcccgtctttaaaaaggtataaaatattttacaaaacatataactacaaaagttgtcgcctagcgactgtcaaaataaagcatgttgtctcgaagatcgaacgctccaggtctaaccgtcccgatatgtacaatcttcattttctcgcactcacagctacttagccttagctttgcccttaactacacatgcaaacaatatatgtgagtcaacatactcaataagaaaagtataatcataacacaacataattcggattataataaggcgcccatacacccaattataaccctatcccgcatcccacgcgtaccgagtctagaacatttgtacgatagtactattgaccataatattaacctatactcagtactgtagtcgtactaatgtgatagtatcaatcaacacttgtgccaaacttatatccattagtattcagtgtaactctatgtacactaataccgacattactgatatgttaagtaataagaatttccaaacatgcacgctaaacatgtaatcacatatgatactattatactaatcttacctcaattctgaattcaagttttttggtaaacctgagtggaaccgttgctcgatggtttataggcccctaagtcacaacatattcaaaattgataagtgatacgctaaataactttttggagacttaaactcataaataaaagtttttctatcgatatatagcgtgactaaagcctaaacatcgagaaaacattgaaaaatgaggttctccaaaaacaccaatagaaatggcaagtcgtttcctaaaaacggcaagccatttttttaggtctctaactgccaaaaatggtaagccatttttggaaaaacggcttgtcgatttttactaaagaatcacaagaaacttcataattcaaagaattcaatcctaaatcttaccaaaagctctagatcacgtaattagaccataactagcataaacaatatgaaaaatccatcatcaagctaaaaatttaacaaccacaactaaaggatcaaccttgagcttgagaactcaattcaagttaaaacatagctacagccatcaaaacctactcaaaactactcaaataataacataaaaactgtagaaacaaaataacaaattcatgcatgaaatctcacttcttactaaagaaactaaagggtaaaggcttaccttggttaacacttggaatccctaccaaaatccttgctagatcataagatcgatgaatcaaaaaccttggttccttgctggttttaagagaggcccagagagagagacttagagacagtgagtaatttaggtttttctaatttttgttattttggttaagtgtcaaacaaagagataaagttaacctcttaattaataattaacaataaaagactaatcaacaaatcaagaactaactcaagacaaagctaggggaaaaagataattctacctttgcttaaacataaaataaccaacatgcttagggctaattagcaattctacaaagctactactcagagcagctggtactggaggaaaattatggaagtaaaaaataaaatcattaatctcatgaacccaacacaatttacagctcagaagtatcaaattgccactggttataagttacttcaacccaatgtagaaaagataagatggtgtaaaaaagtgtggtcactactaagaaaatcttaaatatttaaccataatgaagtagattctgcgaatacaagtactccagtcggatgggtggataaattttgtattgttgatgtttttcatttgttctgtattgttttatttgttttgtttgttattttaggtatttttattactattggaaacgtttaattacaattgttatgctgcagaaattttgataagattaagataaattttattgaaagaaagtcaatatttttttgttttctatattagaaaagttcactggttcgatattgtttggatgtaatgcatattgaaaaaatatgtatgagagtattattggtaccttacttgatattcccagcaaaactaaggatggtttaaatagtcgtttagatattgttgaaatgggtatacgacaatctctagcacctgaaaagaaaaaaggtgaacgattatatttgtctcctacttatcactttgtccaaaaaggaaaaccagatggtttgcagatcattttcaaatatgaaagtacctgatggttactcgtctaacatcaaaaatttggtaaatgaggcataattaaaactaatggttatgaaatcacatggttgtcatgcgttaatgcaacatctacttccaatcgccactagatcagtcttgtcgaaaaatatttgagagtgtttgacacgtgtttgtattttctttaataatttatgcaggaaggaattagaaatggataaattagatgcataacatgaacatgtagtcaaaacattgtgcaatctcaaaaaaaaaattctgctatttttttttttttgacatcatgatacatttaatggctcatctagtgagagaagcaaggctatgtgggccggtttgggtgagatggatgtatccatttgaannaaatatgaaggtacttaaaagttatgtgcgtaaccactatcggccaaacatgttccttccttggcctaaatacttaattggaacactcgaggtaacttttgttataaattaattatcaatgattagtggagtttgaatatcttaaatattcaagcatagtgaagtaggttctgcaaatacatgtgttatggtcggatggatgaatgaacaattttttttatctattttgtttgttattaggtatgttttaaattttttggggcattcaattacagtcgttatgctgccgaaattcgatagaattaggatcaaa

SEQ ID NO: 22128 - DNA, 1405 bp, Cannabis sativa
aataaatatattacttttttatttatagatatttatattattttattagtatatttaattattattttgcaaaatatttaatttttttatttacaccataatattattgttttttgtaagacttaattaataaatatatatacatatatatagttttggaaagtacatttaaagagtgtaattgacaggtcaaggttgttacttgtcacatcaaattaattatcttattattaattatgggataagacactgatgaccaacaaattaagtacatatataactaaaaaatttattattattttgaacaatatagaaatgttatttttatttacttacatgtacaaaccctaataaatttgttagttgggtttggtgggtgtcaatttttgacataaatatacttatttttttttatgatatataattttatggtaggcttttattatcatttgccaggtttcatttaattatttagtctaaaaaaagaaagaaataaagaaaaaattgatagaagaattatcaatcaccttcaatctcatgatatgcatactaatcattattattaataataattaataaaacaagagtatataaatatatatatataaacatacacacttcgacttcgacagttgattaattattaatagattaggttatcaaacatggaaccccatcaagactacataattatatatgggtttttttccttatgaaaaaatatataaaaaattatgcagctccattaagataaaaatttcggtatctagaagaattttttagtttaattttttatagttatctatagttatttagaatattttgtaaaattttaaaaaatttagaaaaatttaacacgccaaaaataaaattcaaacagttataaattttacatgtatataaaataaaagaatttcacgtacaataaagtatttgaatggactattttttcacatattattcctataatttacaattatatgtaaatatataaatcaaaacaatgtatcaaatcaaataaacatatatagtagctataatgttttattaaaaaaatatgtttttcaatcaaatttgttgacaattgagaatattaaccacataatatatatacttatacatattaattatatattatagtatataagtacctttggagaccaaaatctttcatagcaagagtaatttgggagtttgtaagatcagaattattaggttgaagttgtttgagtttttgttggagaagatttagctcattattgatatctaaaccaattgcaccattaagactctcacccatctcacatggactttcaactattactccttccttttctcctgcaacataagctgaaaaaaaaaccctaccccattcaacaacacatatttacatatattaatttca

SEQ ID NO: 22129 - DNA, 7296 bp, Cannabis sativa
  modified_base (3209)..(3209): a, c, t, g, unknown or other
  modified_base (6643)..(6649): a, c, t, g, unknown or other
gtggtggtccgacgtatgcaacggagaggagagggagaccgacgggaggagggtgggtgaagatcgatggaagagagagacgagaagagagggagatcaatagagggaggaagacggcgagagaggagggtgatggtgcgaatgcgtgggtggggtcttggagagttaagattttctttttagggtgtgggaaatggagaagaaataggtgagaagaaataggtgggcaagtgggaaatagaaaagaagtaggtgggcacgtgaaaaatttggcgagaagtaggtaatgattttttattgggcttttatacccgacggtttaaaattgtcccctatactataggcgacggttacaaaccatcgtctttaaaggcccaataaattttatgaattcctgttaaaatcgtcgcctattctcgtaattactgttataaaccgtcaggaatactaatttttcacgacagttttaaacagttacttaattttttagcgatgatccccccaaaaaaaagcatttttaagaccgtcccaaattttgacttttgtaatagtctgggaagaacatgatcatagggatctaccatcatgagatcttgaggaggattcgaggtagcagtttttctagttagaaccatggtgattgatcagaatgagatgaagaaactcaaaaaaggctcttattgaagcaccaaaatattgactcgaaattcggtcaactgatagcagagccttattagttgttgattatcaccatgtgtaaataaaaataataaatagtaaaaataacacacgaatttataggggtttgactcccttgatgaacgggtaatgacctactcttgttttagtagtattcacacttgagatactaccatacaaattacaggcctagaccttgtaatttctagctacagctctcttcagtattataaaataatgtgttacagataaagaactggtgagatcttgtgaaaaacttatgaatagacttgacttagtgtctaagaggcatatatggaatatgaagattgagagaaaaagaggctttgggcgtgtggcctagcttgagtccctttttcatgtgatcttatgccctttatatagtgtagggcttacaaaagatcctaattcaaataggtaaagatatccctttaaaatagggaaaataacaacttttttatcttatatttgaattataaaaaggataattaaatcccttaaatatagaactaatatcttgacagaatatccctatcttcatgggctgttggacctgtcctgtaattgtaggtcagcttgtttggatttgtcttcatgttctggctggccagccttgctaagggctatccagcctagccgactagccttgctggggctatctagcttagtcggccaagactttactggtaggtatgtggatttgtgtttgctagtgtccaatgtgtaaccatgggatcttgtaggttgaaaattgaacacactaacttggcaggttgaaggatgtaggcagtaacttggcaagttgaaaggctataagtactaacctggcaggtggaaggctatccacactaacctagctggttgaaggctgcacgcactaacttggcaggttgaagggctgcaggcactaacctggcaggttgaagggatggaggcactaacatgacaagttaaaggctatatgtgctaatttggtaggttgaagggctgtaggcactaacccggcacgttgaaaggctgtaggcaatgacctggcaggttgaacgctatacacactaacctgacaagttagtgatgagctattctccacgtctcttaccttttgagtatgtggacatgccacatcagctagacaaaatttgagataacactttgagtaaaataaataattaaatgaagttaaatacatatatgtagacaatgtccgatgttatggaaataacattaattgactaacagagttttatcgagttgtttagaaatcaatattatagaaaaattatagagctaaaaatataaatataaggaatttttaatgtggctcaagtgttaacaaatcttagtccatgagtcaatagtattaataattatatttttgtacactttttggtagagtttcgctctataaaatctaaatcgtaaaactcttaaatggtaaagatgaagccttatttataggctgtcatgcatcatggaccaggttgacccagactcgagaggttaatgtataataaaatcccactgatgggcaatttacaagagatgtattgaaatgagttttttccttgaggtaaaggcccaatgccaaaagtgggtggtgagacacactgttcgatcatactattgatggtgactgaccacacttgggctaccacttggcgcttggggaactgaagatgtcagagtagtgcttgttgtaatccctatattgatcccatctttttgccaagcccttccttaagaaaagacatgggagacattattggggttttatgccctaaataaaatctattgacatataatcttatttactagttaataaaagatcaaaaatcattttattttgcttggttcacatgttacttttatgattgtatatttaatatataaattctattaaatcccgcacatatagttactcatgaatatagtgttgtctacatagtagaaaataatcatgattatatgcttcaaactattaagtcctataatttattagtgcactaaattaatattgaagtaataatacatatattggtttgcttacacttacataagtagaatttttttagagcattagaaaagtaaacttgtatcaaatgtatcgactatacatcagactagaccgatattaacaattaaaaagatatcataaacttaccattatatcttttctaagccaatatcacttagttgatcttagatcaattgatctcaatcctaagataattaaaatttagcttaattgtactatacatgttcttacacttgttcgctactagcttacgcataggactaacccatacttacataggaattcggtagtccaattgagtgagaacgttaatcatagatatgaaatctatagcttctataactgtttagaattgaaataatgtttcacaagggattggctaaatgatataaccggaagaactcttattttggtaattcctgaaatataatttataagaagctaagtgttttanggataaaatacattgaagggtaaattgtaaattttctccctactccatgtaaaccgtctataaaggattcttgattattgagaatgaaattatggacaattcatagtgtatttatatttggtatatatagtattctatgtaattaagagtgtgattctgaatcatctatagtggagtcatgagaaatcaataagttagaaaatttacttaaaaatttcagatctacttattgagagtttgattttataggcccatagttcccacattatttaggataatactactttatagactcaattaattgatttaataaatcaattggaatgctaaaataagactatgtcttatttgaaaatttcactaagatttgagaaatttgagaagaaaagagaaataaatgtttatttgttaattaagacacttggtgggtctaattaataaatatatttatattataattttgtttattaattatttataattattaaataaataaaattgatatatgaataaatagattagataaatagtatatttagaaaaagataaattgtttcatttaatgaaataaaattgacattagatataaatggtagattatgtatgtgataatcaaacatacttgttagtaaattaagatcctagaaaaacaagttccaacagacattatattatgaatttatagggataatatcaaaatggtgacgcataggaaacatgtctgaaccgtttagggatttccatgaagctacttgttcctggggaggtaaattctacttgagcgaagaaagagcatttgaagaattgatcgagatgaaaatccagagctctcaagaagggcatgggaagcagaggaaaagtgagaaaaatttgagtgaaagctttcctatttatattgagctaaatcccttaatcctaagacaattaagaaatttttaatttttaagtttaaaagaaaaagataaataatacgaaaaaagagaataatcttttatcttttcctttaacttagtgaattttgaactccctatgagaataggagtaggaatccaaaatttaaaagataaaaccattcctaatgcattaaagattaagacaaagattaagacaaatttaaagtttaaaaagaagtttaaaaagaaaaagataaatgataagcaaaagattaacaatcttttctcttcttcctttttctttaaatttcgaatgagatgttctaaaaggagtaggatttaaattcaatcaatcctaatgccatgagaaatacatgagaattttaagttttcaaagaaaaagataaaacctaagtgaaaaatgataagtttttcctctttttctttacttaattttttttgaaaattcccaaacacaagagtaagagaattcaaagttctaattcgattaggaacgctcaaaagaatacaaataattgtcaaatatttccaaaattgatgcccacctggtagtttcaagagaaacgggctcggctcacgtcatcaagtcaatcttacacaagtaaagttgacttgggggcaaatattaaccctaactttccctggtgacatggacatacatgtttgacacatggcaagaaagataaaatctcagagatgagtagtcctaagtcatagcaatcaacctagtcgggtccctagccttacaaacaagttgactctacgaactttagaatgggtgttcggattccattaagttgttttcaacttaccatcttccagtattttgtaccattaagacatggagatggagcatccaagtcgaggccccaggagcttaaaacacacgaaacaacacctcaaaagtcaactcgggcgcctagggtttcacccattggcaaggttgacaacccaactagggttttagtttttgggaccatcctagtgcaaatgggacaaaattttcattgaatcatcaaaatcagattcagagaactttgattttgagcactcgttgcctgggcacccagcctaggttgacaatttgccaacctgggccacttccaaggcatcagatcaacaatgactcttgcatcttcttcatcttcataaaaaataaggaaacaagtgctttcaaggaagaaacaagccaatctaggggccaaaataagggaccgacacctaggttcaggggacatttttaacgaccttaaaagttcagggggcataatttgatacatgtcaatgttcagggggcaaaaatcctaattagccttaaaaaaatgcaaacacttattctataactttttatctcttttacatttttttactattcacactcaaactacttcatactattttctttaattactcacattttataaaagaatcttaattaatttattttaacctttactaaaataagattcttttactttcatacttttttttttcatattttttaacactttttctctctgttacaaaaattaggagcattcctcctatatctttctccatcgtacatgattaaaaaagtagtattttctttggatggtttgtagtttatttagagttaatttatgaataatatgcatatttcaacgaaattgatttcttgttatttttctgttaatttatagttgcctttttgttatatagtcgtttttatattgttgtttaagtattttatagttgtttttctattatttttacgtatttttttattgtacagttgttgtttagttttttttttatgttatatatttttagtttattctagacagtttttttgttacatatatgtgcatttttttttgttatatttatgttatttttttagctgtttttaagtagtatttagattttttttattgaaaaattatattttggttatttttttttattcatgtgtattttttatggtatatatatttagtttatttttaatatattttttttttcattgtaggtgtgttgctttgtatatgacagttttgtaagatcataaaacatggtatttttgtaagaacaaaaagtaaaaacaaacttgggatttgcaaagcctgtagggcatattgccgggccataataatggatctccatttaatttatatattgggcctaagtttttgttaacatttgatgtaacctctttgggatcgtccaactaatttcatggattaaactaaagtccatgtctaactctaactccaccccgataatttgaaaaatggataattacattagatactattttttttttttttgttaaaaaaatcacattttaatatttaaagaatattttttttagatttttacggtgtttcataaaaataatacgaatacaataataaaacaacataaaagtaacattaaaataacaacaaaaaataaaatacagataacaaaaaatcaacaaaaaattaacaagagtacaacataaaaagattatatattctataaataaaatcaaaaaannnnnnnaaatatttaaaattccgtaaaattgtatttttgtaattcttttattgttttgtgtatttgtaaaataatccataagaaaaaactaccgaacattttacatgtaaacggccttttgataatgctactaaaatattatgtattgtcaaaagaaaaaagaatatgtagaaaatgaaaagttctgaattgacataaacattcgacttacagtttatatgtcatttatcaaatatattgtgatctgtgaaggtcccagaacaatgctaattattgaagctgtaggatgacttagtaagtttgtgttattgcttgccagtcacaatattgaaatgcaatttattatatattaactttagtatacaatcaaaagctaaccctaatcacaactcaaggggtcgattcagacactttatgtcttcctttctttttcttcttttattatggaaaatttgagcaaatttccaatgacggtaatttcatattatattttgatagtatcagtattagataacaacattcacttctcaattactaaaaaaaaataaaaataataataataaaaaagaaaaactatacatttaatattatgcaatttttatgtgttagaatttaagataagatgaatgagattccatttcaaaattaattgg

SEQ ID NO: 22130 - DNA, 1392 bp, Cannabis sativa
ctttcaagtaatttaaggagagaggctaattaaagtttttgctacttgaattttaatatacgcactaaattaagtcatctcaaaattgtcaggttattgaaaattcttttaaaatattgagattgttagatttaaagattttcgttcaatttcgtttaattttatattaaggtgacgattgtctatgtactaattaaattatgcctctaaattttgaaatctactaaattacgttccgaactttaacatatgtatttttgaactttcatctatgtcagggttccgtcagtaaaattagacaagaatttttaaatctaataattttgataattcagtaaaaaattttagcggtttgaaaagtttagaagaaatgatttgatatacatgtaaatgaagttatatatagttgtatatagttaggtgatatgactatgtacgttttttcttacatatgtatagtttgacatgcaatttatattgatttttttttttaaactaatttatatatatattgatttcttattgtaaatactttagcaatacaaattatacaatcagcactattaaattcaatcatatcaaatgagagtcgtcatagaatatataaatataaatatacatttgaaatggcgtcatagaataatttaataaaacaaaattatatatttactttgtttaatgtatttttattatatagcgtaattaatatattttttaatttatttaaaaatttatatatactttatacattaaataaaaatatatattaattattatggcgtaattattgggctactaaaaaataaaacaatattttatgtgctatatcatatgtaaacatgtacagtaatcagtacataaaaatatatgggtatacatgcatttgaaaggttctttctcattggttgggttggggatttaatttatgtataaagtataacatctaacaaactcattttttggactatatatatggtctattttaaatttcaatgaagattgtggcggcgagtaattacaaacgtgacatgttcactggcttaattcatatgaccgcattctcttccaaatagtttctcttacgattattttgagctgtgcctcattcattttttatcaacttattaaaattaattaagttcttatttttctttagtatttttttaaaactggccttattaaaatctcacgagtaaaaccagtaagacaaatctcatgatagaaaaagtgtccaagaaaaatcattaatcaataaatatcagctgcaaagaggtgctaatataactaaggtagcgaagctaccaaccaaaataatcatctgaaaaaagtgctaattttgtccttgagtgggcaacaataatcctaagacaataagcaaaagagaaatcacag

SEQ ID NO: 22131 - DNA, 4264 bp, Cannabis sativa
gttaacccccttttgtttttttttggtggcaataccccttttagttttattccgtttgcaatattactgttcacttggtttaatcccgttatgtgctaagtgttatatccaactcagcaaaaaaaatgccacatgttaaattaaattatttgtatcaattaatattaaataaataaaacattaatcattcaaaaggaaaaaaaaaaacccttaatcagatccacaaaaaaaaacctatcgtgcaaatctaataagaattggagagggaagctccattccattagtaagaagaagggaatgcaacagatggttgaaatttcacccagcaactttcgttggagagagatttgagaaactcgatagggaagctccttccatcggttttaatggagaatttagggcatttcgaatgtcgatgtaagcccccaaaatcagtggtggtgaagacctcttggacaacttcaaatccaagaaggagatttataactttctggaagtatcctgtgaatttttatttttttatatacatttatatatctactactataattttttttagctctactgctaatataaatggagatgatgggttttgtcagggtccaaggtcatgtaatttctggcgttggttggatcctaagatgtgtgatcgatcaagacaagtgatacctggtgttcttaggaagattaagcagttagagagtgaaatatcatccattacagagaatgaagaagaatcaagtggtaagagctcaatgaaaaaccatacctgggcttcatcaaagaatgagtcaattcataagagcattccaagctacaaaaagcctgttgtcatcatttgtgtagtattagttatgatagtattgtatttcaaatagtaagtaatttagaactattttggtaagagaatcgagagttgtattttggatagagaattgattaatattttgttagatattgtaattttctgattttgaacgtgagattggatattatattaggtccctctatggaatcagtagtattttgaaatggaatttggcatggctttctattgatgactgttcttcattttttttttggttatataagcatcatggagctagtgtttcattgcttttatttatctgtcaatttatgcaactctataatcaccattacacttgcttttcagctcaatataattttcttgtaatctaattttggatgttgaagatcttaggagacttgtattgagttgtatctttaattatgtgcctaaaatttaaagttttcagctcacaatctagccaaacataggctagtttcacaagcaacttttgggattttgtaatgcagaggcacttggaataattatatagtcttcaatgtctattgaaaaagctttagctccttgacttaaaccatgtctaaaacttattagggaaggaatcacaaattcatagtaaagtgaaaaaagaaaagatacaaaaagagtaaatcattaatacttatggtgctaattgtatgaatggtcatgcaacaggaagattattgtggagcctagataattagttaaaaatttgagtgcttagaagaaagaaaatatattctttattttattcaatggagaatgtaaataaagataagctatatacacagtagaataatatattgattgtttggatctatatacagataagctttgcaaaagtcaagtacatgtatgtgagaaaaacaaaaagtctaacaataacaacagaatgctcataaataatagttctcactcacacaattttcctactatgtcattattttttaaacactcacaaactacaatgataaaccttattcttagagtaatcataagcacttggaattaacataaaaaagtcaaagagaactaaataagaacatgaacaatctaaaggaatgtgagtactgcaaccataaatcataccaggttgcaagttgcagaggactggttttgacaatcagtcccattacaacagctaagaaaaaacatacaatcagtcccatatttttctcaaatatttgcaactaaagataataaatctgaaaaaaaaataagaaaacaaagataatatatctgcaactgagaaaccaaatgagtttactacagtaagtaacatgttgtcaaagcttacagactacaaacagttactgtaacatgctgtcaaattatctaactgttttcaaaaaaaaaaagcccaacagaccacaatagcaaaatattgtttaagggctgtacatcaaaaggtaaaacactgtactaaattcctattccttaagtattttgcgcagtagagtctcgtacaatatttgaggtccctgcatcatgtgtatttgagctgccaaccccatctgcatgttctcttgcttgttgtctttcttttcttttctttcgctttattgtttgtagagtagggttcttcaatggtgggcgacctccctttttcttttccacctaaacgataataatgacaattttaattcacactaaggaaattaatcaaatcaattcacagtaaagaaattaatcaaatcaattattaaagttcaattaaatacctgtggtgcagcctcatttttacatgttctcctgctatgtccaacttgcccacaattaccacaccgattgatttgtcctttcttactgtgcctagatgcattagcagggggtggctcatcggcatccctctttcttttcttctttggcctacctggtaggatgttatcactaggaggaaatgtgggattaagtcctttgtttggccaattatctgggctaggcattggctccacagaaccttcataagctgctttatatgcctgtatatggtaccattgatgaatataaccccactcttggtgcctcgcaaaccaaatggtagccaacgcatgtccacatgggatccccgtcagctgaaatctcctacatgtgcatgtatgtttttccaaatcaacagataaacgctttccatcgttcatggatacttgaaatgttgaagcattggcacgttccacacagcaatatttagcaatctccttttgcttctttaatatttttaatatattgttatgcactggataattccaattctgaacagacaccttatttttggtaaacctacgcatcaaccattgcctcaatgactccaacattgtcacaattggcttgtccctagcttccatgattgcatgattgaatgattcacaacaattgttaagcaacatgtcacactttactccttctttgaagtgtgatttactccactctgatggggtctttgcagcaagccagttataggccctctcatttacttctttcaaatctttcattctcctctcaaactcagctggtgttgtggctcttgctgtagcccataataactgcttcaaaagaaggccagggtaatccttcttgaaattactatgcatgtgtcttacacaaaaacgagtatcagcaccaatgaaaatcttttcaacagcattctgcaaccccttttgcctatcactaatcacagtgtaaatgcaaacctctgttggatgtaaatcttccttcagcaactccaaaaaccaagtccaactctctgtattttctttcccaaccactgcatatgcaatgggaaagattgaattagatccatcaaccccaatggcagctagtagtattcctttacagtatccttttaagtgacatccatctaacccaatcagcctcctgcatcctctgataaatccatccttacatgccttgaaacaaatgtaaaccttctcaaacacccttttctcatcaattagttgagtttgtagctttacagtactaccagggttggttgctaatagttgtttgcaataatcttctaagattgcatattgatcaagaacagacccctctaaaatttcccttgcagttgctcgagcccggtaaaattgccagtttgtcacttctgaaaactttgaattttgtgtcatagtcttgattgaatgctgagtactccatgttggttggggtgcatcctaaactggtcgagaaaatgctttgctaaccattgtgcatcaatgtgcttattattcaagactaaaccacatgtatgagtgtccttaagacgattgattcgaaaggtttttccatctgcaagaaccaaaacaatcaagacaatattaacattagtaaactataattacaacatgatgccaactattgaaatagaagatatccaagttacaacttttttattgaaataagagatatgttgta

SEQ ID NO: 22132 - DNA, 3945 bp, Cannabis sativa
tggtaaaacaatttcaatatatttaagcttttaggaaagaatacctgggtttatggtaatgggaatatcataccgataatctccaacaaaaccagggacccatgcataaagattatagtcacccgtacaaacattttttatggtaaaataaccatcttcatctgctcttgtccagaattgataatcctaattaatgaagtaagctatcagtaaggctgtctaggcatgaatttattgaaaatcaatcctcatgggtatgtactctaatttattctcataaaattacaaaattaatctgattataggacaataaaaatgattctgtgacaatcaaatcaaatcattcattacttatcctatttcctaatctctccaccaactactgtttcctacatcaaatgtaggtggaacgtagttgagatttatcatagagtttgttttaactttaagagtttatattttaatccaatactctcaacatgaagaggattaaccctgctgtcacacttcaagtaaaatgttcaatcaatgtgtgcattagcagagtaatttgacttgctaagtcgaagatttttgcagtagattttgtttctcttcattagtgtgtgttctctcaaattgtgtactaacagaaatctatatttgtaccatactaacacccaaggacgttaaaccctgagggaccgctttaaaaatcaccttgcactctctttgccacgatcctgcttctcctggtggtgccaaaccaacaaaggcacctcttcctgatatacaatcttcattgatgtacctaaataaaaagtgatcaaattcagaaatcggggatttctaaaatcgtaccacaagtatgtaagctgcatgcatacccaccttaaacacagaaaggttggtaacatggaaaccaatggggaaagaaggcattatacaactagaagtagttgtatcttaattggatacctgtccaaaacaagtagtctaccactgacattgcctcgttgatctgatttctgaaaatcctcagaagctgggaaattatatggccaattttgaacttctgtcatcatctgtatatttatttaatacaagtttcattgtcaatgatggtgctatgttgtttatctctatttgtaataataatatattattaaaaagaaaaaaagaaaaaaggtactgtctctcatgtcacctgtattttagcatcctcccacagccaaaaggggtcatctcctataggtgcagaattgagatatatgaagacagggccaaagaccttcttccatggttcaccacctctaaatttgggcaccagatcttgtccagcataatgagcactaagaaacatctaatgatccagtagaaaacacaaaactaactagaatgaatcatatggccaacaataatttttatgatgacatcaatgaagcaaaattcagccacattgcaaactaagcataactcttatcctattgccaacattctaaatcagtaacttacagcaagagtcgtgggaccgacatgtgaagttaagttctgtttatggggtccaccagaacggaactcatcactaggggtaatctgccagaatcctatgggtgggttggtgcatatccacccatgaacttgattgtctttgttctcacatgagtactggtacttgtcatccacctgcaagtcaagggatacgtgagacaagaattaaatgtcatgtgaactgctaatatgggaaggcaagcaaccattccaacaggaatgaacaagatccatcagatcactttttcttacttgatatcacaccatattgagtactcactacacacattgttaatcaaaaaatggtagtccaaaacaatgtaagtaaagtttaaaatcagtccacaaaagcctgcttcatccccaccaccagttagtgagaaaaattccaaagatgtacctctcctgcgagctcacgtaaattaggattgaccagtagggcagcttctgggtatgctaggctttgacatcttcccggtaaccgatcatcaggaaggggcatgtatctttgtctgttgtcagctattgccatgtattgaaacctatccaattaaaccacacaaaactcaatacaaattcatgctgaagtactgtgacatgaaaaccatacttgtcttttctcagcttgaacgttatcctggtttcaccaatgtcaaagtcaggccaatccttcaggtgctcatatattccgtaggagtagaagcctgaggaaccacggagcaatataaacctgaagcgatcaaagatgtatttatatacatattaatatcaatcaaacaacattgaatctttatccaaaatataggggtttcccattaattacctcttgtctatatttaatggcacgaacttcccctcaagggagggatcccacattcttgtaaatgagagctcaacctgttcctcagtatccactataaccctaaagcacgtaccttttatcctgcataagtaaacaattcattgttccaactagcttaaaaataaggaaaataataaagtcatttatctaaaacaatgaaagcaaaatctgactagtaattgaaacagaaatctcatcacaatgagaactattcttgggacaacttttgaacatatattaggttgtcaatactcaatagaaaatgagaactattcttgggactacttttgaacctatactggagatgagtgaggcatacacatcaaaaattcccttgcttcccggcgcactccaaacgagatcccagtacctacataatcatccaaaacacaatcatttctgaatttaagtaactggaaacaacacacattacaaatatccttacaaaacaaaatttaagctccaaaaccattgtcctcatttagcaactagatcttacccaaggctatcaatgaattctagttttttattactctgcattactaaacaaacagaggtgaagcaaaagttttgcttgtttaaactttttatataacagtatgcctaaaaaggctctacatttggaaccttttatttacccaagtaatgcatcataatatgaaagaggaaggtaacagattaagtaggatacaaaaacaagtaccctctattggactccttattaagaacttcaagaagattgtcaaggccattatatcgaatgccagtaacaatcccatcaggaacagacaatgtaacctgaattatgccattgtccatcactacctgtacatcgcattataagaatgtaaatgaaaacatattaagtaatatgaaaaagaattttcccttgaacttgaaaatgaaaacccctcttgggtttttatttttttcaaatccaacacaacaaaatttagcattatgatgataatcatgataaaaacaacctcaattttaacttacatgagtgccttgaaagtgtaaccgcaccccaggtgtcgacatagtgaagcctttttgtcaaatttgtatgtaaagcccaataatttcccaacccagtatcagaattcttgtgaaaatcaaatagaaaaagaaaacttcttacaccctgaaaaatttaaaagaaaaaaggattgttgacactgaacagaactcgccgtcgactgagtgaaaaatatttaactgtacagcataaagatacatcaccaaaatgtatgtcagcttttaaattcgcgggtttctttaataatttaatcgatcaacgaaatttctgagtaattaattacaattattctgtcactgatcataataataattgaaaataaataaaaagtatcagagttggttacctgagagagtgttattgggagtatgaattgaaagcatagaaaagcttcgcttattgaattactggaaaatgtagaaagagttagaatgttaggaaatattatttggatccgatttgatagagcatagtaagtaggttatgtattgtttctaacatttgttttttt

SEQ ID NO: 22133 - DNA, 1594 bp, Cannabis sativa
  modified_base (270)..(270): a, c, t, g, unknown or other
tttatgtttttctatattaatgaccatggttttctgtttttctatattaatgacacatgagttttttagatgatttaaattaaaatatgatttattgaacatatgtgttgaaaaataaaggacagacgcacatattgtttgaataatatgaaaaaatcaatcaattttaatcttttattattttacaaaatcaatttaacttttaaattcatatagtgtaacaaaataattttttttggcccttaatataaagataaatgatatttttanaaattattaaaaaatatatgtataatttttaaaagatatttttttatttagacccctaaaatgagtgggtcctaggcccaggccctagtctacctatgcctagagccgaccttatatgttgttgtaacgcgtgtaattgctaaatattacaataaaattattattattacaattttaaataaaaaaatatttagtgaatgttatatacattattaaatttgtcaattttctttgttaaggagaataaggactgattaagatctaaatttatttgactcaagaaaaaataggttaccactcaacaaatttgtaggtgttttgaccactttcaagaaatcaactaactgttttaacagttcaacaagttggttaagtgtatctcttaattgtcataacatcctatatatacacacacttataactcgactcgcacatggcttggagaacaaccattcaaacaaaattaagttagatatcagaattactaagtcagctgttttttactaatcctaactgcttctcctatttatcctcaatcggttatttcagtttagatatgtcaaataggttagttattttgttgagtcggttggttcttgtcctggtgttttgcacatgttaaattgggttgatgtgtcacccctgatctgccctgtatatatagcctgtaaaatagttcttttccattcattcaataatacaattttcattctgcctttttctcttttcgcattatggtatccaagcgggaaaggaatgctttcccttgattgagcctatccttccgcaacctccggcgacgccattgttgctgtctctactctgctcttcttccccgagttgtcccctcggcgcaactaatcttgctatcctgaaattcttccctgttgatgtttcactatgtcgaatgaagaccagacctcaaccagatctgaaatcggagattccactccctctgcaacacaaaatcccagcttacagaccaatccagttctacaaattggatgcgtgaagaacccccttgaggatccaacaaacccatattatcttcaccatgaagataatccaggtaacattcttgtatctcaattactaactggccaagataattacgtttcttggagtagagctatgcaactctctatttatgtcaagaataaattgggttttcttgatgatagtattcccaaacctcctccttccgattatgtcctttataatgcctgggttagaaacaataacatagtgatttcatggattctaaattcggtttctaaagacagttcttctgcattctttccgatgaatctgctgctgctatttg

SEQ ID NO: 22134 - DNA, 5484 bp, Cannabis sativa
taattaaaaaaattatatttggtgatatgttaaataccactactgcctttaccattgctcttatattattatggtttttatttttatatttatttcaagggtgtggaaagagtgcaaaaaagctaccatatatatcttgtagaaaacaacataattatctgctaatctttctgatccaaagcctatcttacttggactttacttccaaaaacagtcagataaaataatatggaatcaaacaacattgtattatttttaatgtaatattggttcttagccttgtcttctcgttgcttccaaccaaaacaaaaaaaaaacaattaacataaaccaaaagtcatgatcacatataagttcgaagcagctgatacaaagagagagagagtgtagccataacaatattaggtcaaaatggtgatgtaaatcatgaggccagggtatctttgggcaccccaacatagaatgatctctttttccagtaaatatataaactttatatataataaattaaatataataaggtgtgatgatttttagatgtcacaaagtgaagaaaggcaaaatggttaaagaaagactaataataacaagagagtgatttggaagaaaaaaaggtatggaaataggaataggaaaagggaataagagcatgagcatggtgggcgagcaattatgcgtggattgtggaatgagtggtgttggacatatcataataattatggcatgtatgtagtgcatatacaccatgtgccctctaccctttgtctaatacaaatttacaattctttgtacaattaataaaaataataataattagtaataatggaaaactaaaacatacaccgtccaaataacattagttatatcaacaatacttaatgggagtgggtcccatataatggccaagaggcctctaattctaaccctaagcgcgttcccttaattaccctatttctaattcataaatttaaccaaacaattctacatttgcgattattacaaacattattgttgtgaaaaacgtattaattaattaaagtaacgaccatctcttctctggttctataattttgattattttctgtgaattattaacttattaatttattattattattttgaacaaaatttgagattccaattaagtttatagaagataagaccatcgttaacacattgatcaaattgtggctaatttaaaataaatttctttgacttggtgacacacataagatgtttgttccatttaaaatcttatatattatatatgtgttctaattaattgtgttattaaacttaattgtatatttttgtgtgaattctatgatctcatgaaaggaatgaaaataagtatgtacacacatattcattaaaaaaaataatctacctttagttttgtcacaatataaattttgtacaactaaattcacaacaaaaaattacttgtgattaaaacataatatttaaatataaattatgattaatttaattttaatcataattgttgaatcgacctctgagaaggaagaagaataagttgtggttgaacagccgtggttgcacttgtcaagttacacgatctttctgtttgcaccttattgtgattaaaaatacatttagtcacaatgtttcttgtagctaatatatttaaccacggatcttttagtgataacataagaaaaataatttattattagtcacaacttttttaatttttagttataagtttctttgtggctaaaaataaaaacttttatagtgattatatgtaattttatgatgaggatgcttcttctttaatttatataaaatctaaatattatttattacaatttgtttatacgaatacttttataattataatgtatagagtcataatttgatgcttcacatatataacattatgatgatcaataatcatgatctcagaggtgctcaaaatatatccatccaatttaatttcctacaatctaaaatcaatcaaatctaatcttaaagtatggatatcctatttgtgtagattggattaaatcaaaaattttgaaatctacacttaaatgataatttacctaaaaaaatataactaattttaatccaatccacacatatattaatatattttttaataaattataaataaatatatatgattaatattataatatataattaatattataatatataataaatattaggaataactagaaaaacataatacttgtaaataaagaaaatagtttataatataaagttattatagctatatatatttatacataaagtttggttacctaaccattttgtcagtttaacgaaatattttaagaatattttgttaaatttaacagtattcgtgtagggttaattttataaatgtataaatattattatagattaatttaatatatataaatatttatattttttattttaaattaattgaatttatatcaaatttaaattatttgtaatattattataggttaatttaatatatataaatattgatattatttatcttatattaatttaatttatatcaattttagattatttataatattattatattttattgctatttttaatattgagagtatatttaattttaatattctttaactttatatttagttttttaaaaattttaaaactttaaatatttttttttaaaaaaacatataactaagtatacgtgcaatgtacgtaacaataacatagtattatattaaatatgactatacaacagaaagtgttattcatttttttaaaaaaaaaaaattgcaattcaaatttaaattcactgcacatatttcttttatattttatatttaaaatattacaatttaaatttaaactcactacacatattttttttattttttaccttatattaaaggggttcttataaaaatactgaattttgaacaaaagtttacaatgttactgtcacacgaaattttttataaaaatattagattttaagtaaaagtttacaattttactgtcacatgaattttttttacaaaaatgttgtctttttttataaaaacaactgtaaaacaataaaattaaaaaattaaaacaacagtggaacaactaaaaataaccttagaacaaactgtgaaaacttaacacaatacacaatataaaacttacacaatatttttgaaaaaaattccaccacaaagtaagaaaattagaaatttcagtatgtcatgtaaaattcctatgttaaatgtgactatttatatttatttaatattgcaattcaaatttaaactcattggacatatctaaaagatatctttttattattattgttttttttttttgcttaatccacatatttaaaaatatatatttctattattttttttaaaataataaaatagaaaaaatatttatatttattaaagaatcactattgtgatgttgttacctattctagttactaaaataatatctttttattattatttaaaaaaaatataaaaattgtatgatatttcttaaaaataaaggtattttaaaattaaaaatattattattaaactaaaattataattaacaaaaaaaattaaatattattatgtttttttataagtagcacttaaattaaatatttttatataaacaaattatattatttattgaataacataaaaaaaaaattaattatgcaactaaaaattgaataaccaaaataaaaataaaaaaaataactaactatacgtacattgcatgtaatattaacttaattattatatgttgttctatcttagagctgcaatagttggcatataatttaagatctttatgatctgaaaagtgtttaggttatattataatctatcataactaaaaatagagattagttaaataatattaacaattgagtaattaaagcatatgaattcatatccttaatttagagtgtttatgattcttaaagaatcattattgtgattctgttacctattgcagttactaaactaacatctttttattatttttaaaatttaaaaaaaaaaaagtgtatgatatttttaaaaaatgagcattataaaattaaaagtattactattaacaacaaattttaaatagcatcatatttttttttataaatagcactaaaattaaatatttattaatataaaaattatattatttattgaataatatataaaaaaaaaactaattatacaactaaaaatatatataactaaaataaaattaagaatataactaagtatacctacattgcgtgtaatattaacataattatattataatatgggataaattaattgttattttggtgttgttggacataaaacctttctatttttatttggaacttattattttttttttattagtttatgttgttggttgtttgaaattgaataaaaattatgtgggaaaattataactaatgtgcataattaaatcaactaaaacttaatcaacaaacaattagtaatgacaagaataataattcacacacaataatcagagattaaaacaggatgaacagagtattaaaaccagaaatgataaagaaataaaaataaatcaacactaagatatatactggttcaaatcctatagatcgatgtgatctatggctctactccagttctagaacaccaccaaatcttttttattgattgagcaggagcagggtacaatacagtacagatcgattctatgttggattctctcaaagtgtttatctctcacactcttacccaagaatcttctttatacaaaatccaaacccaatctctcccttttctcagtacttctctctctacatatcaatttttttctctcaatatcacctatagaaactcgtctgatcttatctgtcttaaaatgataagtgtaagtggtatttacataatagggatatggatatggctacaactactaagttgttaagttagttacaacttaacaaactccttgtaataatatctccatatcaacataagataaagagctttcagaagaaacatacacttcatggaagaaagaccaaagaaaaccctaaagggacttcccggataggaaaggtgccagctggaagcgactatccaggactcccttccaggagagaacagttaggcatccgaaactcctttccagaggaagactatttttttttaagaccccttctgagtggacattatagaattttgggaacgctcttttggatgacatccatcattccatgagacttctttcggatagacaaatttgacttctgagaacacccttccagatgttctaacttttcataactagaacaattattggagatctttttatttggaggaactataccacaaattccacctagtttcttcaaattaaaatattgatattgatgaagaaagaatgcaaccatcatggttggtgttctagatatcttagtatcataacttttgatattgatcaagtttaagaaatgtt

SEQ ID NO: 22135 - DNA, 1549 bp, Cannabis sativa
  modified_base (487)..(487): a, c, t, g, unknown or other
cttatgtgtttatttcattgctttagagaattcatatttaggatgttaattcagcatgcttgttagtaaatctagatcatggtaaaatattcccaacagtttttacctaaaaaacttaaattatgatagagttatttctacaaattttttagatcttttatcttctaacagactaacaccactggaatcaccacaatcgtagttatacaactccaaaaattgtcattttactaaaactgcttctaaacctataaatttcttaccattaactccataatattaattttaatttcacttatataattaattaaaagaaatttacataaaatactacttttggcaaactttttacacatttatgtttaattctttttaacatttttacagtgttcataaaaataacaccaaaacaacaaaaaaatcacataaaaatagtaggaaaaaaacataaaaaaataatgtaaaaataacaaaaaaatcaacaacnaaataacaagagtacaacataaaaaatcatcaaaagaatgtattttatgtaaataaaatcttaataaccgtaaagatatttaaaactctatatagtcatatttttataattttttcgttatttttgtatttttttgtaataatcccattaattaaactcactaaataaattataaaaccctaatggacttttatattgggttttaattaaatgattacctatcttgtgaaaatatcataatattttaccttcgcatttaataaaacttaactatctttagaaaattgctacaactactctaagtaataatctcaactcactaacaacataaataaataaaataattatcctcatgtaattgaaatctcaaaaaaaaaaaaaaattaaatattattttagtttagatattacaggattactctctaatgacggcacactatttgagcatttagcttcttgtccactcggaactgaacgaaaggaaatatttaattccacactgtaaggttttttttaaaatttttatgtgtttaatttgaattgtattaaggttcaatgtttaggatgttagattaataataatcaatatatttgaatattaaaagtaatatcttggttaaatatgatttccatcaactgatatcagaacaatagtaatcttttactgttcatgctaaattggataaaaataattttaattttgtttttttttttacatatttatgagatttggatgttacatgttaagtggagtatgcattatatgaaatattgataaattacgagttttaaaaaataattggaattttcttctagaattatatttatctaaaaatttaggaaaaattatgcaactttactttttatggatctcaatttcgatgaaaattgagtgagttatgaattttttaaatttagaaactatggcagccacacacttggatgacatccgagtgcatgcacgcggatgcaagcacaaatgcctagttttctgggtgcatcagctcgtgcacgcgcacagaaccaatgaggccatgcactctcatgttttccttttttttt

SEQ ID NO: 22136 - DNA, 1319 bp, Cannabis sativa
tcttctctttacccaaggttgactggagtggagcccagaaggtgtggatatgagaatacgtgccatacagctaagtaatgttgttaccttgtctggccacttgtgccttctcctctgtcctccataccaatatgtatctcatttcttattccttcttcctttttcagtttcacatttttttcctatcacacgtgccaattatacctcctcctactaacctctactctctactttaccttcttttcccctaataatcaatatcattacatgtgacacaaattataagtacattaaacccaaatcgtattagtgattctgattcttaaatttatttacaaattatttgaaatgtcaaattattatagattaatttaaatatgaatctcatataatttaataattattataaaatattttactaactatttataaaaccttattttataatgactaatacttactaataatactcaatattcataatagagatgtaaacaaataaaacaacagtaccaccactttaaaaggtcaatatatgtatatttacaattgaggttagataaatactaaaaaatacttatcaagcatcacaaaaagtatcagctatatattttaatattaaatcttacacattgtaatataataaataatatttaaaaccactaatcaattatatactattaagtgccttattaaattgtcaaataacaatacttgtactaactaaacaactcttttacaaagatgagatgtacataccaccactccaaccaatggtagtgtcccacccccaatctctactctacttacaacgaaatggttagcggtcaataattttgttacatttaacttagagggagacggcttcaaaattttagcactttttcaactaattaaataagtaaaatttgatactcatcacattaataacgagatgataccaatatattgtcggcatcctttaacatataatagtaaaataattatataaataatcattttaacaaattgaaaaaatgaacgatagaaagagaggcaaaagaaaactttatatttgatggcattattactttacttgttcatgtatagaaagttagaatattttgttgtatgtgttctctttttcttttggtttctcaacatggtgacatacatagttgattattaagagatatttgtgatatatattaattgaacaccacaccatattcatatattactaatatatagatagattttacatatttcttttaacaattacacacttcatcatataaattgttattacagtgttattaatcagtcataaagagtcacat

SEQ ID NO: 22137 - DNA, 4388 bp, Cannabis sativa
cgagggatcataatgtaatgtctcacaatctggttaaagctgctataaggcttgagagggaggttctttggaatggcaaagttccagagattatctaattatattgtaaccgatacttttatttgtatctctttctttgtggttgcaatatatatatatatatatctttcaaaaaaaaaaacaaagtgatctacgtacaactatatataaaataggggtttttataaaaatattgaattttaaacaaatgttaataattttactgtcacacagaattttttataaaaatataaaacaattgtaaataataaaacaaaataattaaaaaaatagtgaaacaactaaaaaataaatataaaataactgtgaaaatttaatatagtacacagtataaaatatatataataaaaaaatgataaaaataaataaattaaaattttagtatatctagtgtaaacattctaataaaataacatatatatttgtaataaagtaacataatttcaataaagttttttctttttttaataaatttgggtaaagttaatttaacttgtgtatgaacaaataaaatacaccttgccagtggatatgtgagtgaagctttttctagccatagatagtgtatacacgtggtgaatatttaattaggtaatatatctatatatgatatgatgagaattgagaaccaaattaaactggaaattgcaattatggccaacttattattattattattattatttatgctgaaaataatatttaatttggtgtcgttttgcacttattaggtagtaccgtgtctggtttcaactttgagtcctagattcgagtccaatcaaattatatatattataatttgcatatataactaattgcaaatcaatagaatttaattatattattatattaatataaatatatatgtacaatacaaatgatatcgttacatatatgacatatttttgaaacatatgttatacatgtatatgtacacacgacacaacaattttttattttttcttgcgaaaaaacaatgcacacaaacaattgatttgatatatgagaagcttcaaggctattaattagtctcttatctctaatcatttctttctttattatttttttaaggaaatttctttctttatttctttattcattattttttttttttgttctttttcttgtaacgtctcagaagaaagaaactacaaaatatgacaaaagaaaaaagatataggctctcatgatgataatctctttacgggatagatcatataataaagggacaacaaaactatcaaaccccacttgtcacacgaagcaaacaatacatattgataaacataaaacaaataaacttggatctgtctgtctttttttttttaataaaatatataaattttctgggaaaattgaaaaggaaactttccgagcttccaaacagagacacaccactagccatagctggaagagtcatcacggtggtcccacacgcatttacagctaaaaatggcgtgacaatagggcatcaaacacatgcaaattctttttctccttttcctatttatcctttaatatttcgcttaattgactttaattttcaaccaaatcaaacaaaaaaatatataacgcgcattccatttattataataaataaaaaaaaaaatatttaaatatcttttgaaaatattattataataataaatattataccaaattaattaacgaaaacataccccacaaaatataactaccactttattttttttaactcgttacacacacacccacatgatttttattattattttaaccacatctcaaatattccggctctatttgactatctctctttctctctcttcctatatataattgttttctcatacgtaaatttcctcaaacttaaaaaccaaaccactttttgtattctctcttatctatttcttagtttttctgtcaaaacattttactggaagaagaggagaaagaagaagaagaaagattattattaattatcattatggggaactatgtttcgtgcagtttggcgacgcctttgatgaaaaattccaaagcagtgagagtggttttcccaggcggagaagtgcgacagctccgggatcagatcgtcaaggcggcggagctcatgttggaatgtcccaatttcttcttagccaattcaaagtctcttcacatcggcagacgattctccgccctagccgcagacgaggaattggaattcggtaatgtctacgtcatgttcccgatgagaagagtcaactccatcgtaaccgccgccgacttggctgtgtttttcatggctgccaactccgccgccaaaaggatatcgggcggaaaagttagaattttacctgagtccggcgccggcaatggaaaagtaggtaattgtgttgagcagagcggcggcgatgaagatcaggagaaggggcaaacgacgtcgtcattgagttttgacggacttgaagcgttcgatcaaattgtgccggaatttaagtacagattagctgcatgcagatccaggaaacctatgctggagaccataagggaagagccaattcgtttaagataaaaattattttcgtctctattaattggtaggaattaaaatttaatttcatcattttgttacttctttttctttaccttcatattatatatatatatatatatatcaattggtttatcctttttaattagaaaacatatattatataaatagaattagtcgacaattctgtatcatgtaaattagtcagattttgttatctgtgacttgattggttttaattatcagtaattaagccagaatttgtatatctgggatttatttttgaaaaaatgagcaaatatttctcattgaaaagtatatatatactttattgatcatcaaagtgattaatgtataaatggaatgagttttaagttttattcttggatggttgatttgtattttattaggaatctagcttgttacaatgtgtcaaagtttgaatacaacttcttatttaattggtccaattataattaaagagaagaaagtaaacctaccgccaaaggaaaagtatacaaaaagaaaacgatatttgataggaaactaattaaagaaacgggaggtctctttacgtggatccatttgtaataatattcccaagtaaaacacgcggcatgaaattcattctaaacacatacagacacatgcatctttatcagtcaagaaacatcaactgtgggacttcatcatattttgcatatttattatattatattatattatattatgtatatacagaatggtaaggtataagtttgtaatattggctttttaaaatcaattcaaatttgtttttcttttaactccttaattctatctttttatatatataagtcatcatttctatttatctgtttgtttttttttttaatatttttaccaaaaaaatattatttaaattatatttttattaaaaaaaaaaaaccatcaccacaacaaaaataatttttgtcatcacccggcgaattttagttttgccggctaaaataagggaatttccctttaatcacctttgttagcgagttgtttaaacaagaataatttgccaacataagttaggaaactaagcgccaaaaggtacgattttttggcgagtaaaaagacttgttggcgtagaggtgtatcgacaaaagtccaaagaaaaagacggttaatttttcgcacagtaaaaatgtgagaataaaaattaagtgaaacagttttgccggagcaattaagctcgttgagaaaactttttacgttaattaaacacttattttaatattttatttgttttaaaacatgcgagcctaacttttctagtgaaaattgaagctaaataaaactcaaaccaaatcctttcttcccattttcttttcttcttcctcttttccacttcgtcgtcaccaccataactacccaaatccgccataaccacccacctccaccacctccaccattcccaatcatcttcaccaccatcctctctatctccaccactaccattttctctctttcttttaaatttttttcttaaaaaaaaaataaaataaatcccgaatcatctccaccactactgtagccgccgaaatcggagtcaccatcctcatctctaatttaaggtaactttaaattgaattttaatgttatatatatttatttttaattatttttatttatacgggtatgaatatatctacattggtatgtatgtatgtatgtatgtatgtacgtgtatgtatgtatagtagtagggaaatttgattttctatacttagaaaatcaaaaaatttgatttctaaaccaataatttaaaccctaaaaaaactat

SEQ ID NO: 22138 - DNA, 2084 bp, Cannabis sativa
ttagccaatagccaagcaagtttaaccaagaagcacaagttcgtgtccctagcttttctgaaactgagacccccacacactttgggtttacaaaaattcccccaagcaatcaatgagagatatctacctgttcaatatcacctttccaccaaaaccttctagtcaatctatccaattctgaatgaatggctgatgggagcttaaaaacggtcatagagtacatcagggcagcctgaataagactttggatcagcaccgtgcgagttgattgagacaggagtctcactttccacccttcaaggcgattagaaaccttgtccatcacgaacttgaaatttttatcactgttgcctcggataaacaagggatttcccaaaaaattctcgtcgccactcataacctgaaatcccaattaatctgtgatttccttatgcaaaactaaacaatagttagccaagaaagtaaccttagatttgttaatgtttaggcgctaacaggaccacgagcaatatttgtccagacattccctcaaagtttccaacgatttaaaatatgccttagcaaaaagaagcgtatcatcaacatacatcaaatgcgagattgaggggccttgtctcgagaccttaactccttccaataaaccaacaacctccttagtaaatagcagtctagaaaggaccttagagcacaggataaaaatgtatcggatacctcttcttggatagaaggtctttatgggacctccatttaaaagaatctgaaatttgaccgatttaatgcaggccataacaagagtgataaaagaataatcgaaaccattagccttcaaaaccgctttaataaaattccactccaagcgatcataaacttttgacatatcacacttaacaccaaaataggctttccttccctttttgttatgaagatagtttatcacttcttgagcgataatagcattttctgcagtccatcttcccttgacaaaggctgactgattaagagagatcaatctgtaaagtaccttccgaagtctataagccaaaagcttcgaaatgatcttataactgtgttgcacaagcttatgggccaatagtcataaaaaaatggtagcaacattatttttttgggatgagaactaaaaaaatgtgattaatattcaaaataaatcttcccatacaaaagaattcttccacaaaattaaccacatccatactgataatctccttatataatttataaaacttatccgaaaacccatctggttcaggtgacttgagaggaggaagctcccacaccactttcctaatttcttctgttggaggaataacagtaagaaactaattttcctcatcagtaatcgaagttggaaagagatcaaaaattcatctggaattttcagctgcgaggattcaaaaacctttccaaatttctcacaaaagtttccatctataattggtttgttctccagccaaattccattatcatttttgatagcccatattaaattacgtttcctacgaatcaccatagaggcatgaaaaaacttagagttcctatcacctttggatagccacaattctctcgattgtcgtctccaaatagagttttgtctggattcaatttcctcaatctcaagcataatagaagcttccattttagtattctcttgggaaggaggattcttttggattttttccagcactttttctaacatgttcaacttgattttgcataatccaaagtacttaacattccacttttttagagcttcagcaatatagttgagctttttggaaaggatataactatgataaccaaacaccgctttggcccaagcctcattaatcactttgtaacaagtatcatctcgagaccaggcattcaaaaaatggaaagaaattcggattctctctctgtccctcatcgcatccaacacaattgtagagtgatgaaagtgacgagttgcaagcgtcttaatccctaccttcttgaattgaatcactcagtcagcagagcccaaagccctgtcaagcttttctctaataagagattgccatttatgaccattcatccaagtgaaaaaa

SEQ ID NO: 22139 - DNA, 2724 bp, Cannabis sativa
tttttatttcttaatatttggttaaataaacaaacacatgccatacttattgttatcaagtctcacatcatttattattaatctattataaagtaacacatcgtagttgtaatactagacaccacttatagcaatgtttctatatacataaatttaaattttctttttttcgttaatggaagggattttttttactgataaaagaacctaaattttttaacttttcagaatttactttctaatatagttatttttaatttaatatatatatatacattgactaatatagtaaatttattagtataaaattttgttattcccatttattacattgaataaacaggatttatctccctgaattcgaattatgaattttttagaattttgttctttaaacttttctctattgcaaattttttttctaaactataaaaattactgcgaatatcctatcctcctatagttacattatacttaattctttaaataatatgtaaatataacacaaatataatattaatctaacatagttcaagtctcaagagtcaaaaaaaatatatataactgacaatctaataataattataagaatatatgtgtattcttaaaattactgtttgtatatttcatgctaataaaatatatttcaagtaaatgtaaaaaaaaaaaaattaacttttagtgattaaatagacccttagacaacaattatacatgtatttaaaaaaatgaacagaatgtattttaaaagagatatttgcaacaatttgcttagttcaaaaagtttttttttttttttttgaaagcagttcaaaaagattttttacaacataaaattcaagaaacaaaactctacaaatacaataatcatagttcatggagcaaaaattctatttattcaattttattttatgtttccttgtctctctacatttattttggttcttttatagaacatttaaattctctggttactttttacataacaacacaataacatgaagccataaatgataaaataaacgaagattataaataaaacaatggaattagtagaaattgacacaaaattcaaacacattattttgtaatgtagttaaaaccaactgtccttcattgtaatgcaatgcaaggaaaagaatatgtaataaaacaactaagtagattgcttaagcttttcttcaacaagctcgatacaacggtacaaaaccatttcaatggggtttagagaacaaagaatgtcaaccgttgtttgaacacgatcgcccttattattctctgcctctatgccactcaccagagttcttagaggaagaagccactcgttgtacgccttttctaaattgtttttagacactattccagtatagtttgtttttcctgttttgttcataacccaaaatcaaaatcaaacaattttcaattaagagtattttgtttggtggggtttgttcaaacattttaccttctgactctgttaacaacacaaatcggtaaaagttgagcgcggatagaacctgtaccatacaacagaatatgtaaacatagtttataacggcgaaaaagagtaaattatatcttttatatgaaggaggttgagaaataccgcatcaccatgctcgggaaggggaggaggtccacccctgggaggccttaaaacaaactccaccagttccagaacactggcactccaaaagggggaaagttggtgtgctttattctctctgttcgtatcgttatcatttggtcttagacagtttttcttctgcatttcccctctgacaacgtctaaaagaatcgcaatctatagaatggtgaaagaaccacattaagaaatgaagcttcaaacccaacttgaacaatcaattaccaaagtggaaaattcatattacaatgaataaattcaaagactggtttgaaaggtgtaccatcgacgaagagtcactgtttttgatcaaagcttttaaaatgtcaaacctctgagaagtgggaacatcagccagtatctggttatgaatggcaaaacagtaagcattaagaaaaagaagaattgtgatatcggtcattcgcaacatcacaacattaaaaatatgaaattcttaacttaccctcttgaatgcatcaaaggcattcctccgtaactctgattcactcgcaaacattataacctgttgaacagcctgaaacatatttttggagaagaatttgagattttgtcttgctccgaaaaaacataagaaacaacttacagggacattcctgacggatatagtcaagatggggagatacaaacctgcagagcagaataaagattgggcatataagacgtgcagtcagtctgttcttcatcacacctctgagaattatttgcatctgtaatgcaaatcaagatgttgatggcacatttctttaattcccacggcaccagaagataactaagtatatgtcttaacatcccaatagcttcccaccttttcatgtggtcatcttgaagttccacatgaagagcgcccaagtcttccttggcagccgtcacaaccacttcagaaatatggccccaaatcacttcaataagcaacaagagaaaggagaagacattaagcaataggcaatagagtacaatgaaaactgatgattttgcataaatgaacctgaaaaggatgcgccatgtttgacataagacaagcaactcacatattcatctacatcatctgaaaggtacac

SEQ ID NO: 22140 - DNA, 2058 bp, Cannabis sativa
acaaccaccattgattaatattttatagggcatgtgatgataaaaactatataataataatgttcaataagcaatgttgaaataagatatgatatatctgtcctattgtctatctactacttaatgcaattgcacacatgttataatttagttgaatatataatagcaataatataagacactatttctgtatatggatacaatataagacactgcaatattacacctaataaaaaattgagctggcaatattattaaaaaggaaacaaaataaatgtaagtcatatgaggtactataatatttagaatatataaaattccatttctacattatttgaattataaatttattgtttagttgcattttgttactaaggttaattaaaatttttattctctaagacaagacatgtatcaaattatatttctgaattatttaaattgttaaaaatttctttcgaattattgaaattgttagaattaaaattttatgtctaattttattcaattttactagtatgacgatggtctttgtattgagaattatggagttttatctcaaaaccaattcatgataagcggagtagcacatgttcttatatgtggctcaattaatacttactatttattctatgtgtgaagatgtccataatattttcccacaagatatggcggctattctttttgctaaccaattttgaactgtattagagtagacatgatcattatatatataagtgcggatcggataggatcacttgctcgcaaaggatatggctctgatacaatgttgagaattataaggttccatctcaaaattaattggtgataagtagagtagcccatgttcttatatatggctcaatactctaccatttattctatgcaagaagatgtccacaatgttatgtactaaattctgttccccaaactttgaaatctactaaattatgcaccccatctttcaaaagtacaaattgtgtcccttaagttttcatccacatcacactttgttcagtataattggacaaaaatccttaaatccaataatcttaatagttcggaaaaaatttataaaggcttgaaaaactcagagaacataatttggtagacgtcaaaattcaaagaacaaaaatataaattaacatttttcaaaatagttatatgatataagactctaaaaattattatataaataatagtttaatagtaaatctaaaatttcttatcaatctatgaatttgaagttaatctttaaactttatgttataaaaaaaattcaaaaagcaaaattctacaaatatcacaatttaaaaatagtgataagacccatgaaaagatacagaaactaactcaaatcattagtactatcactaccccaaataatttagtatatatattcatgtgtatagcagcaattcaaatactgaggttcataggaatttaaggatattttaattaaaagaaagaaaaaaaaaagaatttaaggatcatattaaaatattcactataaagttatctatttttgaaaaatgtttaggtagagtcacgaaaaagagaatgtctctgcatgtagacatattttttttttattacgtgtcaatctattatttaatactaataattaattaattccttttatattatttttatttccttttcttaataatttagtgatccctaataaggaaagttagctaatattattatggatccttaagcctcatttgctaaaaaatcttcaaataaggtgtcttacatgcaattttttctgcaatatttttgttttgatatatagtgaaatttagagattaaatattatgaacatatatattggacatataaaactaaagttttaaatatatttgattgtacaattaattaattaaataatactaatttttttaccacagttcgtatgactctattactatggttttcaataaatataagcaacttttcttattaggggtcacgaaattattcaaaaaaaaaaaaagaaataaaaataatataaaataaattaattaattattagtataaaataatagtttgaca

SEQ ID NO: 22141 - DNA, 3793 bp, Cannabis sativa
  modified_base (3067)..(3070): a, c, t, g, unknown or other
acttcaagccaaaatcaagcaaattctcttcaagaatcaaatttggaaaaagaagagggtttgagggagagagggttcgggttagaggaagagaaatccaaaaattctatatgtgatcttcaaaataatattcctttaatcaattaccaaataaaggtcaaaagaccaaattgcccttagggccaaataaagcttatgcataaaccaagggcaaaaatgtcctttcacacaaaaataaatccaattaaatttcagattattcatcaacaattaaaatgccaataattcaactcaaattatatttagggcccgcaaccggttcgacccgaaatatccgattgtgactataccacgctaacctatcagaacacacctgaaaaagacatcacatgcatactatataataatatagttccataagcacataaataaattaattttactgttttacccttctcgggccaaaattactaaaatgcccctggctcaccaacggggtcttaacatagcataaataaattctcatatattaaattatataataatataattcctcaataatacacatttaactagttaggatttgctaatccatttatttaaatcttagggtattacaatactagttcggcagccgatcaaagcactcacagcattggaatcccatccacaaccaatgcttagacaatggtaggtgatgatactaagattcataacctccgcaatccccttggactcatgcaaggtcacactaataccttgcatcatgatcaggtagagctccgtgctgcaatgggccttgcgttcgaagagcagaggcgtcagttcattgactggagggatagggagatggaaacattgaaagctcaatacgcagccattgatgaccgaacaagataggccatcgtattgatacggaaagcatatcaagttactaatcagcaaccagctactacgtccagtatcccactgggaggcacagaagagattcctgctgggcataccgcccagaatcataatggtcagccgtccaatccccgatcccaggttccacctgtgggccaagtggtaggcggccagaccctatctgacaattctttaggtggagttgtacctaataactccatccagactgacagttctggccaacaaactggccaaactagccaatcattgaggcaacttggtgctttagtattcaatagattggatacagcccatgatctcaggaatgatttgaacagaagaataggtctggatgagcaatacattcaactagccgttcaaccaggtatctgaatccaagatccagctctaagagatcttgacgtgacacaggtcgaccaagaggctgaaccagttcacccatctgtgcaagcacatttagattaactaaaaaatatgttccaaggcctggctggccaaaaactcactgatctcgagctagttcgggcacgcgaatccccttttactccaaagatcaacgtcttagaactacccctcaagttcaaaatgtcgacttagaagatgtacacagggaaggaggatccttagtcggatcttaaatattttgaaatgcaaatggatttgcaaggggtaagaggtgatgtgcggtgtagagttttccctgccacactttcagaggtcgcacaacaatagcattttaagttaccaccaggaaggtttaattcatggaaagctttctcttgagagttccatgtgcagttttcttcttcttgtcaactcccattacattttatagacctggtcaaagtgaaacaaagaccaggagagccttttagagcctacataagcagttcatgatagaagctacaaaagtagcaaggttaactgaagaggatgctagccgccatactggggggcattgaagtactgggagaactgtggaaagacatcaagaaaagtggccatgtaggatttatggcagagtttttagaccaagcaaatgggtttatcaagctcgaagaggccattcagcgagcagatgttgaacctaggtcgggccaactgtaggtcccttccgcaggagcatctgctcagaacccacagtatcctagcagttcaactccaagcagcaaaagattcaataacaatggcaggcaaggcaacgggaagaagggaaagttcgtaggcaaagctgaacaaacccctagagaaaatgcctctaaagtcactgccttctctgtcctaactgatgacccagagacaatctacatgccaacccaatctgttttcctgtacagaaaacatgctcccatgaaaaaggacataagcatgagggacatgtccaaattctgtcgttttcatggagattatggccacgacataaatgagtgcaacaacttaaagcgagaaattgaatttcggataaggaaaaataacccgcacgtgcaaaaatacgtcaaggccgattagaatcaatgggccgcccaagcaggcaataatcaagatctattaaagcctccactagtggatgcgcatttacaagtcattattgggggcccacacattgctggagactcacgcaaagctcgggagaggtatgcccgaactctacagcacgaacaaaaagaagtagttttggccgtagaagaaagaaaaccaaaaatgccacgggtatgggaacccactataaccttcactgaagaggatgttatccatgttcgcttcccacacaatgatcccttggttgtggaggtacaaatagcaaaaaaatagtggctcgaactatgataaacaatggagcttcaacaaatattctgttcaaaaaaccatatgaaagatgggactccatttcaaatatcaaatcccctgtacccaaccgatgtatggtttctccggccaaagtgttgcacctttatggaaaattcgcctacccctcactgttggacaggctccgaggagcataactgtgatggcacaattttttataattgatgttccatcaacttttaatgttgtgttaggtcaaccagccttatatgacctaaaggctgtcacatcaattttctattcgtgcatcaagttcccaacaaagaatggggtnnnntgcctaaaaggaaatcaacaagttgcacgggaatgttataaccttgccctaaccaaggccaaaaaggaagattcctctggccagagttcaaacaaggagaaaagcatttccaaatagggagtcgcctaaggcgggaacgaggatgtggatccacgacttggggaaccaaatacaaatgttaagctagtggaagaatttgaagagatagaaatcgacccaaatgtcccgatcaggaaacttaaaattggccaaggtttgctgcttgaagtaaaatcaactttcataaaatttctaagagcaaacctagatattttttcctggttgcatgaagatatggtcggtatcgatccttttataatatcacatgctttaaacattgatccgaacttttgtcccgctcagcaaaaaagaagattgttggacaaagaacgggcacaagtgttaaaagaagaggtagaaaagctacacaataacaacttcatcattgaagctttctatctgacctgggtagcttaccctgtactagtacccaagcccaacaaaaaatggcgagtatgtattgattcaccgacctcaacaaggcgtgcccctaagactgttttccactcccaagaatagatcagctcgtggatgcaacagccggggacaagatcctaagctttatggatgcctattcagggtacaatcatgttgggaattagttttaccaggatcttagatcta

SEQ ID NO: 22142 - DNA, 2167 bp, Cannabis sativa
cacttttaaattttcttccagttgctggtacagcgggtcactatttgcttgattatagaatgggattgatggaggtcccctttgatttttgtcatgtttcataaattcacttcattaatgtttatgtatctggattgttgatggtagtttgcagagttggagagacatcatatgcattcaatacaacagcttcaacttgagctggctgatgcaagagaaaggagtggtgctttcactcaagagtcacgagtttcacaagaaaattcaaatgatgcatctggatatggtcagaataatggaaaccaactagacatgaatggaggtggcacatcaagtggaagcaatgcggccctttcaaatggaaatgctgacaatgctacatcatttacttcaactggcaatgcatcaagtcaggtaattttatttgctttttttcaccccctctgccgttgtagaacttactgattggtgaaatgctgattaccctgcttgagggtttgtgattgttcaaaggatggagtattgcaaaatcatagatcagaaaccatgttcaatgcaatagcgataggaaagttcatagtcttgttgtctagtatgaagcacacaagataattccaaatattaattattgtttatctttaattgttaggttgatcacattgctggtgttcccattactccatcatctttacttgggatgccttctttccttcctcctggacagttggctgctatgcatccatatgttatgcatcaacaaggggttgcccactctgtccaaccacatgttcctcaatctcatgttgggcaattccattctgttcctgcaatgtcatccctgcaacaacagtggtcgaatcaacaggtgctgactgctgacagatgaacacattttttttaggtgcttttatacacgttaatggatcagacagactgacattctttgttatattatttaggccgtatcagaaggtgcacaaatatcaccacaaagtgaaatatcaccatcccaagctgatcaaaaccttgtgagatcagatgaaaattacaactacgagatgtctgttaatggacaagctctttctgcagattatttgaatgctcacattggtcatcaggctgatcccaactctgtgatctcgtcgtctactggggaacaacaggttatattaataaagatgctgctgatgcttttgctcatctttagtatctctatgtactaatgatgtaacattaaaataataatatatcaggttctcgagtcaattgataggggttaccgcaatgcccaatctgagcaggaactgagacaaatttcatcacagtttcaagatgtgttacgcctggagtcacttcagcagagcactgaaactaaggtttgtgtcttgttgctttattttggttaacctattttatggaagctgtggctagtgagagtaaattgatgcttagcttatcgaaatatttgaacagacaaatgagcaatctgttatgaatggtattggtggcttagaggaacaagtttcaaccacagcacaatccagttcttctgccaatacattagggactccggagaattttgaggaaactgcattaaataattctaatgatgtagtattgcccgaagcttttgtttctggtggacagacaaagtcaccaactgtggcaaggactgcagaagttgttcttctagatgaaagatcattgttggcttgcatagttcgtaccattccagctggtggtagaattcggataagttcaacggtgagcatttatgagttgctaggtgtttgtgggcgggggcattggtcttttatgagtattcttatatctattattgtttttttttgtgtgtactttgaattgtacagttgccaaatagacttggaaagatgcttgcacctttacactggcacgattacaagaaaaagcatggaaagcttgatgaatttgtggccagccaccctgatgtgagtttcttgaaactgtcaggtttgcgtggttccattaatgaaaatatgaatagtaatgaaaatgtttctgtatctgcagttatttgtgatcgagggagattatattcatcttcgtgaaggtgcacaaaagatggtagcagccaatgctgccgctgccaaagttgctgctgctgccgccgctgcattggctccct

SEQ ID NO: 22143 - DNA, 7126 bp, Cannabis sativa
taatattagtttttggtttgatattcaaacatttataatggttagctctctctaagcattcttttacgtcaccaagcattttgtgatgcttttcactaaaagaaaaatgctaaggaacatcttagtgccaaaacgtgacataatatattttaatttaattaatgatatgtgaaacagctaacatagtatattttaatatcgtatggaagtggtgttggacacttataagaattgacgttgaaaaaaaatgtaacaaagaaaaaggacccacagacaacaaatgcttggaagagaaacccagctgactagtgtttgtctcttctttagattcttttcattttctccaatgtctgaacaaaacccaaatcacaaaattctctcaccttcttctcctgtctttctctcatggcctcaggaactgggacttgtttcgacttcgacgtgtatcatgactacagtgaaatgacgtcgtttaataagagtcgggcacttcagacgcaagagagctatcagttgcaactcgctttggctcttcgcctttcttctcaggctgctttagctgatcatcccaatttcttggacttcaagtcccaatcccatgatcaggatgttgagtccctcgctcatcgtttctgggtacgtaagtttaaattctgggcacccaagaatatggattctattttgtgggttttgctcaattctgcgttttaggcgcagagacacaatcaaaagcaatattcggttcgaatcagtatcatcataggttgtcttttgttactttttttgccaggtgaatggttgtttatcttactctgacaaaataccagatgggttttacctcattgatggactggacccatatgcatggaatttaagcactgatccaaacgactctggtcgaataccatcgttggagaccctgaaagccatacgtcctcgtaatgaatcgtctgttaaagttgtcgcggtagataaactcagggattctggtttgatggagctacaaaattgggtccttcgtctttccagtacgtggttcacaactgttgatgtgatttatcagcttgcaaatcttgtttgcaatcgcatggggtgagtttttctgcttcattttcatgtaaactgatcttaattcgcatctctaatgagcttttactattaccatcataaggggtgctgttgtttcttctgaagaagagttggctaaccgctggaaggagtgcagtgtaaatttgagtgactgctttggctccattgtagttccaattggttacttgtttgctggactttgtgttcatcgtgctgtactgtttaaagtaattcactttataactcatgttgttagtttagaatgctagttcattatatttagatcatctcttttcttccccttggaattagcacacccattgaatatctctgctatttgcattttccttatgctgcaagatcttatgggattgcactgagcctctaaattgattttttttcagattttggctgacttggttaacttaccttgtcgaattgttaaggggtgcaaatactgtagtaaggatattgctgcctcctgccttgtgcaacttgattctgaaaagtatgttgattgactggacatttcatattaaatagtggaattaattcttacaaccagaaacataataccaatgattattgttcacaattactcaatgttttttttttaatgatagaacacaatcactcatacttgtggtaacagtttgtttcttttaattaagattttcttgattgtgttagttaagatatgagttagaagaaatatataaatgatgagagccttagctcattttacagaagtaacttagatcccaaggtgtctttcaatcaccatcctcactccttagtaatttgggtcaaagctcactgggtcctagttatgggctgggtgttgttttatttcttattatcaatagtagcataaaacttgacattattttgttactcaagaccttctatgtatgtgtgtatgccttttctatttgaagcaaaacattaagcataaggttagatatgggattggaagctggtgaatgagctgcgaggatagtttagcatgttctgaggatggtcctaatattacggccagtaaaaaggctatttcatgtttaggcatgcaaagtcaagaaaaagtatactatgaaaggccgactatcttttggctacatagaaaacagtttggttttcttttttaatgattttataagaaactttagaaatgttatacgctgcttaatgatgataaatagcattgtattcttccagggaatatgtggttgatttgcttgagatgccaggagttcttagccagccagactcttctctgaatagtgcattatccattttggtttcttcaccactatgccatccaaaatttaaatctgtcaagacttctcagaacattcagatgttagcaaaactttatttcattgaatatggatctctggctcttgcttttgatgacacttcttctggtaagtcccttatttcgtcatacatgttctaatcattcggtatactactggcagttgaatgcaatagaatattattcagttctaaattgcaattgtattactacctatttctattgtcataattgttgctctggatgtatctgcacattcctccatttgttgaagccaacatagcttcataatcaggatggttcaagaaataattaggagttctctattaaacaaaataaaccgagatgttttttattttactgctgctgaaactgtagtcatcactgttatttcaaaatatctgagttgaatgattaagttaaaaccaaaaagacatgaatgggtggctgatgtctaacaagaactttcataatatatattaaatgaaacagaatattctactaagggtttgatgacaaacatgctcatacaacatcatgactaacttgaaatttttctgatcatagtaggtactcgtaaaaatcaagacgagagaaaagtttcaagaagacctgaagcttttgatttaaactacattgacaggaataacattgcatccacatctctggaaaatcatgaaataattgcaccactttttcgaaaaagagctccactgaatatcacaaattctagagatcatcgaaggctggcattttctgatccaatttctaatctcatggactctacacacttgatcaaggactccattcaaccacgtcatatcctaacacttcactgtagagatgctctcccagagttttctaatcatcggtcagctaatattatttcgttaatagagaaaaatgaaccagtaaagagtagactaaaccgtcaattttgttttgatgaggagggttcacacatcttgtggcgtgaacttgctttagaggagaaaattggatcaggtaattgttgttgtttggaacagggtcgtatagaaattgtgcacttcatttcctataatgttgtacatttgattctgaaaaaaaaatattaatgaaataatataaaaatgaatctgtcacaaattctttcaggctcttttggaactgtctatcgtgctaaatggcgtggctcagtatgtgttctttgtttcatttcgttccattcatgatatacatatacccttgtatttttgttatgtctagttggttataaagttcttattctttcttaactgtgaaaggttatcattgtattcagttgtaaatttgtgattttaacattagtaaattgatgtccggttggctataaagtgcttattcttatttgttctgaaccataaaatataagtcattgaaagcatgcctctgtatgcctttgtggccattttactttccagaattgactcacaagtttgtaaaggttgtacctttaagttaccaaaggacccatcttcttaccgaccttcatattcttattcaatttctcagttaatatgtccaacccaagatgcaggtggcacaaataggtttctttatcgtgagtgtgtgtgtgtgtgatagtttttttatttattttttatcataagctcagtgtcataaacattatcgatggagtggtatacattgaaggagacatggggtttagaacaaaatgactgtattgtatttgtattcgacatttgatgtctgcaacctagatttcgttttgaagatatcaatcttctctctctcattttcaaaaacatgcaattaatcctattgaggccacggagcaagcaagtcagccattggctaagcttttacttgtagtatataattactataactatgtgaaatggtttcttctgttcaattctaaagctgaaaatgtttaatgtgcttaccattttgcattgtattgtttgcttatcattctagtagaatgtctttgcctgcttctgaaactagatattttaataacctttaggatgtggctgttaaagttctcaaggaacaagattttcatgcaaagcacttcaaagaatttctcgaggaggtttgctagtatttatattttaatgcaaatcattaaaagtatgaataatggtgtattcttgcttcttccttttccaaataccattatagtaagattttttgtcatttattgttagttgataatttctgaattatacttcggttgtaggttgctatcatgaaacgtttgcaacattcaaatattgttaggtttattggtgccattactcagccaccaaacttctccatagttacagagtacttaaaaaagtaacaagatcatctggtgttgtctttcatgatgtctatatttatttgtttcctctctcacctcaaatatataaatgcactgaacattattatttatttcaattgcagtggttgtttgtataaacttttaagaaggcctgatgctggagttatactaaatgaaaggcttcggttgaatatggcttacgatgtggtaatttctcaagatgtgattagttgctttttgtttctatgttaaaagaactcagaagctggctatctgcatattactattttaccagacatgaatctattcattgtttacatggaattcagatttgtctattggttaattcaggcaaagggaatgaattatcttcatcaacttcaacctcccatagtccaccgagatctgaagtccccaaatcttttggttgacagaaattatacagtaaaagtaagtactgtaaacagaaaacatgttatgagaattctatataacagtttcaattcaatctttgaaagaattccttctcgttaatttatttcactagctgcatagttcaaatccaaatcaacttaagtgatccgtgtttcctcttcaatccgtggttgggtatttggtttcctcccacaacatctgaggctccctttcctttggccaccctcatatcaactgtgatagtttcttggcctccaaatattaaaagtataataatcctcatgaagagagtttttctgtcaaaataatcctagatacattgattttttactttctttccttaactttttgtgcacttagtattggttattcatggtatataattgaaccccaacaggtaaacactagctatacagtgagatcattcttttgtaatagtaacctcaagtatcgattgctttcagacaaagtggttgcatataacctagaatttgatcgcttctaatagtatttggccaatattattaataattctaaaattgcattccaaatttgcagtttcattttattcttccatatgctcttgattttttagattcttatactggaaactttaaggaattttaggaaaatgtttgagaattttataataaataacgtaaatagggtaaccatattatagggattataccaaggatctgattataacagcagcttaaatttccaagacaacttaagcatgtattctaatacgactgtcttagtaaaattttgggtacaatcatttgattggttaggtaagtacttctgtatttgtatttaatatcctcggtgtgaagtttttttttctcgattaacttcagtgtgaagttaatgccatttgatttagctctaattattaactagtcaatagacaataatcatgctttgagatgttgatttataagcttccctttctttcgcttactcgtttagaggaaatgataacaatatatatatatgtatatataatttttcaggtgtgtgattttggcctatcccgttcaaaggaaaacacatttttatcatccaaaacagctgcaggaacagtgagtttgtgttttttttcaacccaaatgagtttaaatcatatatttgtcaagaatgtatgtgtatattttatagttaatcttactttcttatttcaatagcctgagtggatggctcctgaagttctccgcgctgatccatcgaatgagaaatctgatgtttatagctttggtgtaatcctgtgggaactaatgaccctgcagcagccatggagcaacttaaaacaacttgaggttgtctatctacttttaattgctgattttcatatgccctgcttgaaattagtgtgacgacataaactgctgaagtaataacgaacacagccttagtaataactacaaatggacccaagagacctatcactgagaaaagtaaaagttttaacaataataaataatataaatatgaatgaggttcaaataaattaaattcattgtgttttcagtacacattgaaagcaaaacggagttcaactttatatttgttgtattgacattttgttactttattaggtcagtgaatattatagtttatgcatgtattgtaaaaaaaatatccttgctatgatttcgtgatctttaggacgtagattctttgactggtttttttactataaatggaaaacagatgctagtcaggcactcaattttttcttttgacgagccacatgcacaaagttatatatctttgcttctctttcttcgcacttgcgtatacataaccttatgaatccttcccgtatcattgaagcctgaaggtgtttctgtttattgtttcaaagaaaagaaaaggtgtgatgttttatttgtattttatggtgactggtgaaatgtttgcatggcgctaccaactagcaagtgcgacaatacaattatttttccacg

SEQ ID NO: 22144 - DNA, 5447 bp, Cannabis sativa
  modified_base (4361)..(4377): a, c, t, g, unknown or other
ataataatataattcctcaattgttcataattatctaattagggttttgctaatccatttcttaattttagggtattacaattacatatataaaataattaaaatctataattattaataaaaaaatctatcttttttttaattttaattttatactattaattttaattaaatatataatattattacctatattaaataattaaaattataataatttattttattatttttaaaatataattatttttcataataattattttttaataacaaaatcttatagaaattataggttgcattatttttacttcagtccaaatctcagacactaatgtaaaatctatcagtctatgtatttttgtaaatcaatatctaatttctatatatttatacaaaaaaaagtactaaagaaaatgaggtgacatcctacaatattttaatctattttaaaagaattttagtaaatttagttcattttatttatttgtagatgttgagatatatgacttagtaagtttttttaattatttgtaaaaatctcacatggattaagaactccattattagtatacttttatactataaacaaagtattcttacattcattttgatttaaaaatatatgattgattgataacttgatcttgctcaattaattataagccaaaaaatttgagttagcaatctattatttttttttctccatattttttattcatttttcttgtaagtgatatttgatatccttacccaaaaaaattatataaaataataaattataaataatgatagaatacaatttaattatatatttaaattaataaatctataattaatcaatttttttttagtaattaataataatacagacaaaaatattatattttagattatatcacttattataagtacaatatatatttatatataaaaattacaaaaatatgagaacgcggcttagttctctagttacaaaatatattgtataaaataaaataaaaaataatcttaaataaaaaagtaagttaataaacttttctaaaaaaaataaattaagaatgtcatacatttaattttttatttatattaatatatttcttattttgagggattaatatatatattttttttcatttacaattaattaataaatgactagactcaaaaggttctaccattatttaagttatatatatatatatatatatatatattaaattaataggaaactacctacaaatagagttattacaatttgagagttaagacttaagaaaagagttattttaacaagatcatgaattatggtattgacgttcctattacaatgagtgaaactaaaaacagtattgtgattacaaatggctaacacatcagcaaaaatattaccaaattcaattttaagaagatttctatcagttaaagcaaaacacaccttactttgatgttattatacttcaggcgagaacaaaagaccatgaagtactgtcaaaacttcagttaccagaggcatcattgaagcttgcatagaaacagatacagaagccaaacaaagattggtatggtcacgaatgaccgtaccacaactaatttttcggtccatcctcgacaagcttgcatccacattaagttttatcctcccctcaatcggactagaccatctcagaatcatctcatctactcgccgatgaacaacaggaactgccaaagggcttgcttgccattttccttcattttccgttattactatatgaatatcgactctattatatttacattcaattaatttgacttacgtgaaacccacaacaggaaatttgactttttatacatttataggtttgaaattggttccctacacctaagtatatcccaattggtagaataggtcaacattttataaaacctaatattacccttcccatttcaacacccgatcctctctcttcctcccttctctctctttttctttgaattcacccacacggccacaacccaccacccaagaccccttggtctcttctctccacgaccaccatgaccatagactcggcaaccaccgcgaatatgacttctccatcaataatgtcgtcaaaggtaagaattcttttcctaccgtcccaacatattttaaatgtattattttttttttgcatgattcagggttaaaatttatgaaattattgatacgtttatttacatttagggctaaacgtctgtgatttttgagtttgggttagatttagtattggaatggtcggatatgtgttatggggaagaattttggattttggcctagcttgatgtatttttttattggaaagggataaaggttgaagacgatatcctgatgcaggcccaatgtagggctcgatatagggcccgataatgtgcctaagttatatgctttttgaagggcccgataggaacaatgtttggttcgatgtgggctcaatagtgtgtctatgcttttgtgctatttgttaggcccgatgtatggtccgatatagggctcgatagtgtgtctaatttatgtgttatttgtaaggaccgatatatggtttgattagggcctgattgtgtgtttaattttgtgtttttggtaggcacgatttagggtacgatattgtccaaatttatattttttgttaggcccgataagattgatatagggactgatgtagggtttgatataggttcattttattttattttatttttgttaggtccaataggcccaatagactttccgattgtggtccgatgcctttgcacaaaatttctaacttctatttttgtgtgtgtgtgtgtttttttttacagtcttcaaaaactcaatgccttatacttccaatgtcgactattataccaggcgtgtcacttggtggggcgatagttggtaatgcctgaagataaaatcaatatttgaggaatttggattgttaaaaagagtgaaggaattcccttccaagtaattcattaagagagcgccattataatttttggctacacttatccatcagttgttcatgcacatgatcaagtcagataaggcaaatgaagtgaaattttacactacaaagaagagatgtagattcaaccgagctgagttcgctctagtgactgggctaaacttgttagcttgacctgtgagtttcaaattgaagagaaggcaagttcaaactgattgatagtcgagtacttcaatggggatccatccatcaacttgggtcaactgcgtaaagtctttgtgagttgcacaaaaaaggacgacgtgtacaagttgggaatggccttatttgtgatgggtgttctcactgggaaagaggagaagacctttattttgccatttattattagaatggctgacgaccttgggctcttctacgagtacccgtaggggaagatttcttacaacatactgatagaaacttggagaagagacatcgtagaaaagaagaagcatatggatgaaaacaaatcaaaagggaatgacttagaaggagtcaaagtattcgacctatggatatactatagcgttgcagtattgggctaacgagtccatcttggatcctggtaataaatttgcgatcagaaaatcacatcgctttcccagaatggtcaattgggagagtaaggacgtggccctcgactaggaggaagttattcagttattttccaaaaatgtaagttttttaattctttgtacttggtcacaattaatttttttatttcattttaatcttagtttaataatatttttgttcttatatgctgttgaaagtgtactccattttatgtccacgacctaatgaagaagagttttttaggaacttcactagaggtgaggtgcctctatttttggaattggaagaactggtgttgggtagtgatggacaacctacctaggacagtttgcgtagccaggttgagaagcttgcacaaaccttagaagagtgggcgtacacaactcagtcttcagagaggatacaccaccaccatctccaccagatgaggcccattctgttcccatattgaaatctattcccccgtcagcatctatgctcccgtcagtatccatgccgctgtcaacatcccagcatctcagatgtaatgatcgctttagtaatttggattagtaaatgcaattagcactactttctgatattttttataattatttatgaattcaattatttgtgggccccatttttagaaatgggcattagaattataatttctcaattccgaagattttattaaactctacgtgtattatttgaattatatgtgaaatatgttatttttataatttttgctcggcgacaatgggaaatgcaatggatggctagtttgannnnnnnnnnnnnnnnngaaccttatttcttagtggaatgtatgttggaggaaataaaatactaaggttgagcggggttatggtttttgacaattttatccctagtcttaaaaatgcctaagttataggttatgggggcattttagtaatttgtcaacgggacttaggtgtctgcttttggtgatggcaactaaccttttattatttttccagccaagttaagcatttgatttattggttaattggaaaataagagaaaaatcaagaaaaaacaaaggaaattccatttctctctctctctctctctccctccttattcggccaacccaaaactgaaggaaaccaagcttctcatcatcatttttctagaattcagctaggaattcaagagttcttggagctaaggtaaccctagattctatagtcttgtatttttgaagcttttactttggttgagtttgtgattttgtgaaatgacagctgtttgggtttagtggtgttgaaaatggttttctaagttaattttaggttgaatctaagttctggatattggttttgttgagttgtaatggaattgcacaagtttgggttttgaaacccaaactttgatctttaatggcatatttgaattcagtgagtttttctgagaattactggttggattatgttgtgtataccctatttaggtactctagaaggtttggttgcatttggtggagttttaagcaaattggggagtttttagggaggactggtataaactggtttaccggtttacaagtactcgtaaaaccggtaaactggttttggcagggttccccgaatgtcctattttctcaactctcgtgcatttcagtatcgtagttgggtgtttttttgtttcctgagatagtgtattccctaatgaatatagcaaagcctagagttataggttcgagtttcgcagattagggtttctaacatgtgatttacccagtttcattgtgtgatttgggcatcaatctagcacgagactttccattcaggtcagccaacacacttgaatctgaaaaggaggtaagaactgtatataatgtgtgatatcaat

SEQ ID NO: 22145 - DNA, 5399 bp, Cannabis sativa
  modified_base (2728)..(2734): a, c, t, g, unknown or other
attatctgctaatttctaaatttaaactaaacggtctttacagggagcttggtcactggacagtctaaactgttgactgattggggtgtttactagctttgagtcagtaacattgaacttggacagaatctttgaggtgtattcttgttgagtcaatttgattgttctcttagttctgcttctagttatttcaattccaaggattttccttattgcacccaaatctttcatagcaaattctttgcttaacagtttcttgattttgtcaatttttgttttgctcttacttgctattagcatatcatcaacatataacaataggaacactattccttttgtgtttctcgcatgaacaaaacagtcataggcacttcttttgaaaccaattttcgtgataaattcatcaaattgtttataccattgtctaggtgactgttttaaaccatataaggacttctttagcagacaaacatggttctcctttccgaattcctcaaagccttctggttgcttcatcaatatctcttcctctagatctccatgtaagaatgttgtctttacatcgagttgttcaagttccaagtcatcacatgccaccaagcttagcagtagcctaatggatgtatgtctcactataggggagaatatttcactataatctataccttccctttgagtgtatccgtttgcaacaagcctggctttgaaccttgcttgtgcaaccccttgaattccttccttgtatctaagtacccatctgcatcctacaaccttcattctagcaagctttttgactaaaatccaggtttgattctttttgagtgaggtcatctcatttaccatggcttgattacactcatgcttgtatgctgattacactcatccttgtatgttgatttcatatcctgagtaatcatgaactcattagtttctttgacttactcattacactttctcagagaagatgattcttacaacttcagttttggaagaagatgattcgaaccaacatgtgcggtactacccaagtttgagaataatgaaaggggcaatgaataatgggacagagaagccaattccaaggagagcatggatctaaagcttattttttaacacgaggtttagaaacgactagatcggagtcgaatatcttggaactccatggattctgacaaatatcaacaaccatttccgaagatcttcatatccaacattttgagggtttttttctcttagagcttttgagcttcattgtaatgctcctgtccaaaatggtgctgaaatcaagcccaaaaatttattgaaaggtcaccggtgtgagaatacatcgatgagagagaggtcagcggcatcaagcatggagcagaggccattgccgacattgggcatatgaagcagggaatcggtggttcaaaatataagagagagagagattagatgtcaactaaatattaaacagagatagagattacaatagatatgattttagaattgggctgttttaaacctaacgagagagttgtggagtgagatggcgttgagcatcgagagaggaagttatgttaaacccaaaacaatagtgtttattcatactaaatattctagacttgaacatatataaaaagcttcttgatcaatgatttcaacaaaagcaaaacgaaagaaaaaatatatttttatttcatttattttgttaatttaatttaaatttatttttatttttaaatattcttttacattggccaattaaattaagccatgtataaactgtgttcatgtggacagtacagaattgtagttaacactcaaatagatgaaaataaaaaactgctaatagaacacgggttttggcagtttgtcgcaaaaaaataggttcagggaattaattgctagcaaagtaaaaattttgggagttttttccatagtttactcgtaaaattattataagatggcaccatccactatataataacagtgataggcgcctatcataatgataggtctcgctatatttgtttttgaattaaataattaattcaaaagataaacatttatttaaatttaaatttgaaatgtggttatagatatttatttaaaaaatttacataatagaccaaaaattttaaaaaaattacaaaaatacgtgtatacctttatttttactctttaaatttttttatttacaaaaatatcttttcagtaaaaataataaactattttttggttattttatagtttatttatagttgtatatagttgtcatatgattgtttttctagttatttttaattgttttatagttgatttatagttgttgatttatcattattttttagttgtattttcatttttattgaacaaagtatatttttataattaaaaattttaggccataaaattgtaaataaaacatacactcttctttgattggaattattagactccattatcgaaattaacaaaataatagtatgacatgtagtattcttaagttgagaacattatattattagtgatatacgatagtaactattttattaatttttagaataaataataaacaattaagtgaaaaaatcttaaaatatgggagaaattagagttagtctcatattgctaatgtgtaaaaataaattgccatatataagatgaatagactacttcttccattgccaattagttttgagatagaacttcattcatcttattctaaattctaacatggtannnnnnncacttgtgatccgttgtgagcctaaagtgccatcggtctaaaaaaagctgtttgtgatccgttgtgagccaaagtgttgccggtccaaaaagatacttccgctttctcctttttaacctccatttgagacctttcggccaatgtgtgccagtagtttccagtgttgggtctttgacctgtttcaaaatgcacaaactttccaacgtgtacacccacaaatttctcaatatttggccttgtgggattcttttaaatatcacgtttgaccttgtggtctcttaaagttcgttggttatacccacattctaggcccaaacgttaggaggatgtattagagttagtcacgttgctaatatgtgaaaataaattgcgatatataagatgaatggacaactcctcccgttgccaattagttttaagatggactctcattcattttatctcaaattgtaaaattgtaattataaaaaatcatattttggctgaattaatataattttttcctacatatgttaaaactaagttcaagtttccactatttgttttgtaaattaatctcccttaattatatttcaaataaaagccaaatctaattatataaagttcaagcacaaagtgcatgacataaaaacatgcttaaaagcatgatagtacaacaagggccgaagcaatcccaggaatacaccagtaaattggggcttattcaaaatataaaatattaaataacattcctactacaaaagtcgaatagaacaacgtacgatctcgaatccgtatacaaccaaatatagcagtacgcttcatagaacccatcaacttcaacattcacccaatcctgcagtcgaatgtatatattgtcagaatattatgcaattgaactctaaattacaaatggaaaatgtagatgcaggaattggagataattattaatataaaatagtcatttcgctagaaattaatttgcttatatttcagtattacaaacttctctatgggaaaaagagagatcaacattttcatcattaaatatatatacatttatataacactacttattgtcatccatatttccacatgttgcaacaaataacgtgttgtacacttatatattaagtattagtttgccgctaatagtataatatcgctagtatagaacattttcataaaatatttttattttaaagatatgcatttgataaataaaaaaatatatatgactaattttatcgtattatattttaataattactacacataattttgagcaaattaactacactatttgcatgcatgttttataatagaaatataaaaaacattattacttggtacagtcagtgttgggagaaacagcgaagggcaagctgatgccgcagtccttgggaagagactgagctaagtctgttttcagtttgatgttcttagctgcatttttaatgcattcgcaagcagccttcttatcagccgagctcgaagccgccgacgccagagttgagacgccggaacagcatggagcgggtggcttcccggacccgttcattagatagctcacgcaaggtctcaggtccttaattacgtcgctgcatgaaatcgcagcctctgatgaagctgccgtagccaagaaaaaaagcacaaaaaatgcagccaatttcgccatagttttcaaatctatattctatttaggtttgaatgtttgattaattactatcttgatattacttgtatatataacaagttaggggtggaagatcgtttgtgtatgtcggtagagatatgatttttaaattactcatttaattaatttgtttgtttgttggagaattaggtatagagtgtaagaaatggttcacaattaatttgctgttctgatttcttggggtttttatttttcatagtttgattcataaattattaatctacgattaggtggcgaaaatttgtgatatggcgttgaaataagtggtgtagaattgtattacaggttcaattttattcagggattaattcttttgttgagtcttgtactcaaatataattcaactactatgtacgcttagttcaagcaaatactttttttttgtattataatatgtatagatgattatcaccatcaatcatgcacgtaccgaattggaaaaccatgccaagtaaaacccaccgtcaacccactatcaatctgcatattttttttagttattaaccctattttctttatttttagtggtaaaattttttaagtttagttatgtttgcaaatttaatgttttgttcatctctccgttatgggcatatgtggcactcttcaagtcttttagttgcctatgtgggttttggttcaggtgtaattttattagaaataaaaattaatttgtcaaataaataaataaataaataaaatttgagtataattaaaatgaatatttgtaaagactccatttttgacggagtcaaagttatatatataaaataataaataaataataataataaaatatatctattctataaagtgtggctatgtaatagaattttcagtttaacgataatttttggatttctaaccgaatatcttattaattattaaaatatttttttattaattttataatattattatatatatttaaaattttagtttgaatagatattttaagatcggaagagc

SEQ ID NO: 22146 - DNA, 3448 bp, Cannabis sativa
cttaactacaatccctgtgggatcaacctcactcctggtgagtttactacttgtaacgatacgtgcgtgtgcaaaatatcgcaacaaaaactcatatcctttcttaatattataacccttgactcattaagagatgaaaagtagaaattaacttgtatttttctttaatcttaacaatctgctttcgataccagctccttgaagtaacagagttatagtcccaccaattatcatcctttaagtagacactatgaaaccaaagaacccataagttgtcttgctttgaggcaatggcccaagcatatttccctaaggttgtcgcattccttaaaatagtgtttctgaaaccaaggtcgccttctgatttcttcttacacagtaaatcccatgccacataaccaagagaagaactttcagcaactctttttcaaagaaaatctcgacatattgagttcatcttcttcaaaattgcttttgggagagcgataatttgtgcccaatatgcatggatagtgattaagacagagtttattaatgtggctcaacctgcaaaggagatattccttctgcctcaaacccttattttttgaatcattttctcaacaatcccatcacattcaactgttgtacgtttccttgcacagattaggatacctagataattgaatgctagctcactctttgtaaaaccaaacacatctataactctttagacttctaactcctccatcccgcaacaatagaatgcagactcttgatcactaggctgtaagccatacaaaatggagaatagtttcaagccttgcaaaagttagtaaatggacttaaagtctccatataaatgattaagcttcaactccgaacacctatcatgaaacttaaagtcttctttgagccccactttgcaagaatcctagaaaggtactccatgcataatacaaaaatcaagggtgacataggatcaccctatcatagtccctttataggtgcaaagaaaccatgtattaaaccattaaataaaatacagtatagtagatttaaaatgaaaatcattaatagctgaataaatcttctcgggaagttaagagccagtaacattttttcgataaaatcccattttagtgtatcatacgcttttcttaactcaattttaatcgtattattttccctcattgatttccgaccatagtgtttgacaagatcttcacaaaccattatgttataagcaatgaatctaccttgaacaaagcaactttggttttgagctaccaggtctggtaataccattcttaatctaaaacaaatcatcttcgttgcaattttataaagtacattgcaacaaactataagtttgaaatcacttacactatcagggcattttactttcaggattaatgttagtgttgtcgagttcaattccttaagaagcttcgccgaatgcaagaatgagagaacaacttcacaaacctcatctttgatcaactcccaattattttgaaaaaaaatagctactataaccatccaatcccgttgatttacctgccggaatgctaaacaaggcatttttaacatcagctaaagtaaaaattcctatttttgagttgaaagaattggccccagcctcaccaaattgagaatcaccgctttcctattagtcatattagaactcagtaaatcattgtagaattgaagaaaagcctcactaaccttgcttggatcataaaccctctttccaatcatagttttaattgagataatttgattactaacccttctagctattaaaattgcatgaaaaagatttgtgttatcatctccttctttcaactagtggagtttagctttttctaaaaagaaaggataaataggaacggtggatctccaagtacttccccctcatctcaatttccttctgacaaagttcaacattcaaaggtgattcctcttgacatttgatcaataagtattgagcttgaatatttgtttcctttatatccccaatttgttcttttttaagagtttagaacaccccttttgattttttcagttttcctaccacttcttacattggtgtccctttgatatcttccttacaacagtgttctactgtttctttatgccttctgccacattcaaaaatatttaatgggcctattttccctctttattttagggcacactattagcaacgcctgagagttatcaaattgccactccactaaaaacaccacttctgtattttcatatttcctaagtcattctttattttccataactctatcaatctttgaatgaattctcattgcaactccttgtgtatttgtcccaagtaaagaagaagccaaagaattttacatcttccagtttacaacagtcaacacattctttaaatccatacgacttgcttggcttcactatctttcccactctctcctccaactaaagaatatcattaaactcgtccaataccagccacgaatctttcatattagttgttattcctttaagctcataccattaaactttccttcccactttgtcattgaaggcataaacataagtaacaaaaaagtaatctatttgtctttccggccacacttgtaaatgcatcatttgacttgagcattgcaagatattaactaaaaatataaccaaattgtagctaaatattattcttccatctatatgccacgccccatttgttgaaaaacaccatcccatgaacatgttattataaaccatgcccatattttttttctttattcttatcattagcagccccaccagccccacttgaaaatttgagatcaatttcttaacctcaaattgtgttattttggttgttgagacccctcacattccaactgaggatcctatctatgagggataggaggaactccccctccctcactaattttcatgagccctatgtcttctttatcaacctccttcaaacatttccctggccctccaagaacttgaaaagtgtttcctgttgttgttataggaggcattgttgtgacaacctttccaccttttatcaccttttggaagctttattcatcaactactacattcttcccttttttctcaggcacattcatgttaactgtgttttttgctacccatatcttattagtctatacttttttatagtcttaatttttcctataaactgcataggtaagccccattcctgaacagtgaccacacaccactggaagccattcatacttcactgtaagttcaatatcctatgatatctcattagtgaattagatagtttcaagaaaatcttagaacatttgaacatgtacgaaaaccctcaggtagttaagacgctccttattcttagtgacttcatccaatatcagagggcaacctaactgtccaataattttaagcaacaacctctcccccaatacctcagttctaatccatgtagcta

SEQ ID NO: 22147 - DNA, 2086 bp, Cannabis sativa
tagcatgcctaattatttagggcgttacatatagcctccggttcccatgtatctggtctacttatacaaatggaagcaaggagaagatatcaaggctagaaatgtttaagccagggatcgcagacaagatggtgactacacaatgaatattggtatagaagacaaggttcatttcatctgaggtacaagtaaaagaggcagttttagtgtaacttaggatgtctaatacatctgagatactatgttaccaggtgtgaaagtgacttgacatcctaaaatttagggattttgtaaggttttaaagtgtgaagagctcactataaatagagcccttgaactaattgtaaaagggactctttggtagaaaaaatattaatgaaactgtagtttttcttaatagtgaagaaagtaatatttactttgagtattcttctattaggatcttgaaacatcatcttaagttcttgttattttgttgacgagttcttaccatcaatagggggttgtgagagtttagaataggttttataggaaaaatttcgagtttgaaatgaccaataaccccacaatcacaaaatcttgtagaaaatggtagaccgttttcttaggtactgggaaaacggtctgccgtcttctcaatacaatggctgaagacaaaaattgtcacaacttaggttttaaaaatccttttgaccccaaaccttttctaacaacttaaatatgacaaaatgaagattcttaaacaagaaaattagaaaaatgacgatttacgataagcttttggaaaaatgcttagaaaactagaaccttaccaaaaataaaatttatacaataaatttgaaaaattctttttccaatatggatgtagaatgtgaggtttacaaacttacggaatcaaaaaatattggaaaatgagaaagtttggcgaacaatgctcttttaggcctaaaaacctataaaacaacaagtagcgtacaaaaaatttgttcaatgcatatttcagttaaaaaaaatctataggcacactaattacacttaatttgacatgttcaagcatataaacacacgtactagtcaaatatgcaaaaattcacatgttcacttatttaaaaacaagtccaaagttcaccaaaaattcacacaatggcctataatttatatttttcaacaagtatagctcatgtaggtcaagcatcaagagatttcctcatttatgcatataagtcatgtaaatatcatttatggaacgaatatgcataaataagtgagtaaagagatatatagtttcaatagctagcaaaccttatatttcatttaagttggtcatgcctaactttcttctaatggtactaaatctctcatcactaagagacttggtgaatatgtttgctaattggaattcggtactcacaaagtctagcataatatcacttctttaaatacggtctctaaggaaatggtgccttatatcaatatgcttggctctagaatgcaatattggattcttagagagattaatggtactagtattgtcacactttatgggtgtaaattcaaaattaacatcaaaatccttaagagtttgtttcatccaaagtatttgtgcacaacaactatctgcggctatatattcgacttcggttgttgatagggctattgagttttgtttcttgctaaaccatgattctagggaatttcttagaaagtgacatgttccactagtactcttcctatatgtctacaactggcaaagtcggcttccgagtagcttactatttcaaagtttgagttcttgggataccaaagtcctagattaattatgcctatcaagtatctaaagattctcttaacgacacttaagggggattccttgggacaagattggtacctaacacaaatatcaacactaaataaaatatctagtttactagcagttaaatatagtaaaaactaagacaaatcaaaggcgaaagtgtctcctgctcttctcccatggcgaagaagaagagggttggccggaagcctaccagtgctgctacagagatcgtcgaccaggatcaagaactcccttcaatccaggaggaag

SEQ ID NO: 22148 - DNA, 3554 bp, Cannabis sativa
ttttttttatatatgtttgcatttttctcaaaagaattatatataatttgcatttatatctcaatttctgtgcttatatatttgtatttagtttcatgtttgtacttttatgcttgtaatgtggtactatgttaattaagtagcgagatatataagttaaaaaaatatattttttttatctattaatcaaaaatatttttatattatattttattaaatatattcacttttatgagtaggttgcccaatataccctcaatctatacttaagtctagcttataatttacattaacctaagtaatagagacatcatcagtaaaaattaatgggcgtaacttaaagaatttaaaaatggaggtaaaaattaaaacaagtaaaataaagtaagtatacaatgtaatttcctcttaagtagctctattatttttcatatatatgtgaccaaatttcatataattgtttttaaaaactattttctgtttttaaaaacatctgcctctacaatcttaaggctactgagataaattgcaagactgatacacaactgcagccaacgacgctactagaacctattttaaaatttggtcatcagctttgcaatttatctcagtctcaagattgtagaggctgatgttttccatttgaaccacctttgaatattttacaaacattgcttactcaaatgacaatcgaaagagcatttatataaattattaattataagtactttaaaatgtgtagaaaattatgggttatttgacttcataacttaaaaactcaatttttaaaaataaaaaataacttctaaaaagtaataggattgctcagtcaaattttttaaaatagttttttgaaaattgggttttaaaaaactagaaaacagattacatcaaagtgttgttttttattttcaaaaacaatttttttctaacatgttatattttacatttttgctcacatacgtacccaaacactggatccgaactcagacttggacctggtgcctagaatcggacctcgacctagacccaaaccctgttcctagacctgaattaaggcccgaaccttggacctcgaacaacgggcccaaactcaaaccctgaacctgtaccaaggcatgaagtcaagacgtggaccctagaccctagacccaaacccgaacctcagaccctgatcctaacccaaaccagggccttggtcaacagacctagaccccggacccgaaccttgaacaacacactcggaccccgaataacgaacctagatccagactcagaccccaaacctgaaccttaaaccttaaacaatggacgcgaactcaaacctctaacccatatcaaggctcaaagtctagacctagacccggaacctggactctagacatagacctgaacctaggtctctcaccctgacccgaaccaaggccttggtcaatagacctagaccccagacctgaaaccccaaacaacagaatcggaccccgaataatggacccagactcagacctcaaactcgaaccccaaatccggaccaagatcctaaaccccatgacccgaacccagatttcaaacctagactcgaccctagacccgacctagaacctctgacctagccccaagtttggggtccagatctgggtttgggtctagctagggtttggggtccaaggtccgggttcgagtttgggttttggattagggtccaagtccaggtttaggtacgggccagaattcagggtcggggtctaggtctgagtccggagttcagttcaaggtatgatgtgttcatgtcatggtatggtgtagaatattgaatattttttagtaaaaaaataggtaaataccattttggaccttgtgttttgtaaaagttaccaattggaccctctgttttgttaaatgacaaaatggaccttatattttcaaaaaatggtcaaaataggaccctaaactcaatttttaacaattttattttttaatatgaccaactttaagacaatttgttacacgaacagatataaaaaatgtaaccagttttgtcatagcatctttatattagataattattaagttttattttgacaaaacaacagttcatggtcctatatatttgtacaattttagaaaatacagggtctattttgttattcaacaaaacagagggtccaattagtaacttttgctaaacacgtggtctgatatgatatttacccaaaaaaatctaaaaatagttttaaaaagtctgatcagctaaacaccatttaatttttataatgacaaaaaataattttctattctcatttttaaaaatacaatagtaaatattggaaactgaaaatacagccaaaaaacgtctatattcttggacttattgctattttaaaatgaaaacaaaaactttgggattattttgagtttttgagtagagcttaagatgtaatgatttttttgtaatagatggttgtaaattttgaaaagtgagcaatacaatgaatcttattcataaaaaaataaaaaaaatcaaattattattttctattttcaaaaactattttatatttttgtctaacatattcttttttacatttcctctcatatacccggacccaaatttaggacttgaacctaaacctaggactcggacatatacatggacccgaatccaaatccagcattggacttagactcgaacttgtacccaaccttaggaccaggacctaaactcagacatagaactcagacccaaacccagacctggatctaaatctcaacgcgaacttggaccccagtccaggtttgggtcctagggtcagttcaaggtcctgagtcccagtctgagtttgggctcgagtctgatgtcgggcgagtctagggaaggtccgtgtggggctaggttaatgtcgtggtatatagaatattaattttttatgtaaaaaaatctaaaaataatttttcaaaaatgctagccaaacattatatatcagaaaaagaaaatgttagccaaacaacattaagttttttttttttttttttgagtcaaagtgaaaattttatttaaagactttcagccattacagtagacttaaaatcagcagaaacattatgctgattaaaaacacaatctgacgaaaaataagactcctagcaagacaatgagcagtcctatttgcagatcatttaacaaattttaaagaaacattatttaaagacgagattaaggcccgacagtcaccaacaagtaaaccaaactgagaaggcattaaaattgagctgttaatagcttgaaccaccaccaaagcatcagtttctattactacactggaccattgttttctctctatccaacttaaggcctccttaatcccaatagtctcggcaatttcgggcttaacaaccccaaatcgagatgcagaaatagcttcaaggagaattctattcgtgtcacgggccacacatccaaagccaaacttgttttgttcttgaaaaatagccccgtcgacattaatcttgaccatatgtgaatttggtttcttccaccgctcatctacattatt

SEQ ID NO: 22149 - DNA, 1546 bp, Cannabis sativa
gatactgaaaatatagcctatttgcgcccccgcgtatagataagtagtgatcctacattgcacacgtgacacgtgtatggggtcgttcggtggcgatgggtcccataaaatccgtgtgaaaaattatattagtaatggggtgggtcctgcgtgtctcttctcacgcgcttaatcacctctcttcttttatacggcttcaaagtgcacaccacccaacaccacttcacattttcatgcttattcgcctatgcaaacaactctcctttttctttttgttctctactattaatttcacttaacaaaccattttttatttatttttaaatggtttgcttcaacaaggttaatacatatttatataataatatttttcaccactataattctgtggacttaaaatttcctagaataagcttgttttgttatcatattttacaatgaatttattatacattgaattaagttataaataatttattagcataataaaattaagtgaccaaatatagaaaagcaagtttttttttattaagtttagaagagcaacttgaataataacataccaactcacactatttagcaagatctcatccccatcacataattaagagaattgtcaaaaaatactattagtgtctagtacttttactattatactgctaattaataccatttatatctaataacaatggtaccgattatttgcccaaaaagccatcccaaaaaagtcctaaatgggcccaccgaaaaactcatctctattatcttaaccaatccgattggataccattaacaaattggagtcatgatgatgttaccgtgcacctaaacatactagatctttcccataattcgtttcttaacgaattatttatttatttatgaaaagcaatatcattaataactgtcttcaccgacgtaggtgtttcgtttcattaaatctgagtgtttttttgggtcaataaaaaatatatcactccggtttcagttccactaaattggtatccgaacccattagctcggagatccgacccataactaatttatttaaagatttttaattttattttccggaaaagggctttgtttggagcttagaaaaagtataaacatatgtaaaatgtacttgagacatggtagtttcgtccaatcagtgagagaaaggaaagaagaaaaatctcaatggtccaacaatgaaataagggaaaagtataaaaggactaagaaaaagtggaagtatcaactatcaatcaagtatggtataaaaagttgaataataaagaaaaatagtttatcgaaaataaaaataataataataattagaaaaataagtaggtagaaaatggtttacttaatgaagtcatataagtctaagaaagaacgaaacagtagaaaacagagaagctgagctgagcgctctctgctttgcctttttcatccctttcagtcagccattcattccttcactcgttcacacccgccctttttcccctttttttaataatttcatctttacttaccccaccatgtgactctctctctctct

SEQ ID NO: 22150 - DNA, 3712 bp, Cannabis sativa
tttttcaaattttgaaattgtactttatattctaaaaagatccctaataatgactcgtggagtacgtagattttaactacaaaaacacgtaaaaatatctggagttataatttcttttattgtttattaatttatgtagaatatttattacgagaagactatttaattttggttaacaaaaatctgcgttagcaaaccataaagagagatgttgagaactttttcttaaggttccgtaaatttaaaataaattacataattgtattttaaaatttgtgtaagtctatagaacatcccctaaagtaacgtttcggtagacccccaaccggtttttactttcagaagagttttcagtcatttttttttttttttttttatgattgtatacgtttttatttaggatcacatgtaaattttcaaaaaattattaatattttataatgccaaaagtaaagtttaaatattttattgaacgcacagatattttttcttatatgcgtttcaagtaactgtttgaactttatttttaggtattgtactacaatttttttaaaaaaaatttataagtgatcctatatagctacaatgttcacgatcatatgaaaaaagatagtaataaaaagctctcctagatactgaaacgatggggagcctaccaaaatataattttaaaaagtagtacatatatattttttttaactttctgtccccactgaaaaaattttatgggtccattattggctatatcatcattcctataattttttttaaataattcaaatagctagcttacaataacaacaatatgattctcatatttatgttttgagcgaatgttcaataaaacattaaacttgctttcgatattataaattatttataattttttaaaattttacaacatgttatataactataaataagtatcattatgtagattttttaattaaaaaaaagtactctacatatattttaattttagggtagaagttaaaatagaagattgcccattctatattataaatatacaattacttaaattaatgacccacatcaatcatcaggttgataatcaatcataaagaaatgcaccaaaatactatacttaccttaatatgatgtgattaagtacaaaatattgacaattgtattttgatacatattttataagcatattattatattaaatgaactataggcagtttttattaaattctctcccacaactaattcggagaatatttgacaattaattaggacatatagtttggcaattgaatcaaattaattggttactaaaatttttaaaaaatattatatcaattaaattaactatagattttaaatcaaatcaattataatcaatattattataaaattaaaaaaaaagatcataatattcgtcactcataattactcaaataataattaaaaaaagtacaaaatgatattgctaataacatgttttactttaaaaaaaatatatgtcactgtaatttaggtgagagtaacttaataaaaatacaatttacttttgccaatttaatagatttttattaatagataatagtacaatagtagttatattgagcccgttaccatttttaattaaatttcttgcctttcttctagattgagatataacaaccatatgatactaaaaaaacacatttcttatcaatctaatggctccaaaattattgaagtgtgacattcctcaaatataacttgagatttcacataattggccttagaagaaatcagaaacaccatacttatgtcttttttttatgataaaatttttatgttacattaatactagttttttgtttactttttcattcttttcctttcatgagattgttttttttttttccataaaaaaaaggaaagagatcattattattgataaattatactcctaaccatataaagtcttacaatacgtagtcaaattaaaagtcttacaatatattatgtttggactttagagtacttggcataatatatatttgaaaagccaaataaagctaatttaattaaggaacaaagtacatgggattgggcagcttaaaggtgcgattgcccaaacattctccttgaagatcactccattgatctcccacattgccccaaattctgtagccttctttcattatttgattccgaatactagacttgtatgccactgcactctgtcccttgtatgcaacactcctttctcatttataaaacatacaattcagaaaattaataatatgcaatatcttgctataaaagttaaataaaaacttactattgctctactcatcaactatattcactttatgatatacactaccctgatatgtttatagatataaatattatgtatatattcaattgaaaacgtctagggtacgttttgggtggaagattgaatgataatgataatgaaaatagaaatgaaacaaaattaactttaatatgtatatagataatttataaaaaaggttatttttttttcatggtttttctacctattttaaatggaataatcattctattaaaatcataaaaaatcattttcttcaaatattttaatactttaaaatacaaacaagaaatataataaaatttgattaatattttcgattctataatattactccctgccaatattattactttaatttaaggggaactttcatttttatagcttttaaagtatatgtttgtaaaaatatgatttttattttttttttcaaaaaaagttattttattagaaattttagaaaaaagataaaaaaatgaaaaaacaaatatcataaggtacctagttatctcttatggtaactttttacccttttctggttacccttaaaataactttttttgtaaaaataaaaaaattcatttatttgcacaaagtaaaataaacccataaaatttgtagttccctgataattttatctctatctattccccacattataaggcctctagtaaaggtcatatcatagccaatttgccattggcatacactaaatcatgaattaagatgtgagtcgttggttcagtccataaatcaaaaattcaaataacatatatgtattacctataaatagatattattttgaaaatttgagtctctacttttagttttactatcaaattaaaaacaaattctcatttttacactactattttatgatatgaggttattataggttaagagaaataaaaaagattgagtttgagttatatatttttgatatagtatttaaaaaatagattgtttttaattatgtacctaaattaggtatagaaattcaattttttttattattgattactagatcaaaatagtttaatttttttaaaaaattgatatttatatatagtttattttttatatagtaactatcagagcacatattcagaagtgttttatatatagtaccacagatccttaaactatatatattttgacaagttggtctctaaactttattttttagcaaattagtccacaaactatataaattttggccagttggtcatcaaattttattttttagtaattggtctccaaatttttattttcttagaaacataaagtccccactcttaattgatagtatcttatttatttatttatttttgtatttattttaaataattttatattattaatatattaacaaattgaataaagatatatttttttatt

SEQ ID NO: 22151 - DNA, 3175 bp, Cannabis sativa
ctctaacaaatatagaaaatgtactatgactaatctatttattccaaagtccatgcagttgattttttttgaactaggatctccgcctaaccctacaataattggaaaccaagaaactatagcaattgctatgtaggtaccaagaaggaatcgtatctgagatttgtgggagcataccacatgcctcgccattttcactactcctcttgggtgtttgttgggaatgattctaattaagtgtttattaaaattttcgaactgggaaaagtatgatgggcaatgcacatagaggaagttgtattacccttgctcatttgcttacctttatttattgttaaaatccaaataatttattttacgcctaaaaatctagttgatcatacacaatgcttatttgcaactgggcaatttagtgttctagaactattattccctttccaatctcaactcaacagcataatacaaataacaaccccttattaattctcctcttctatttattgagattacgttaatggttgaagatgtctcataccacgtgatataaaccaattcttatttttaattttttttatttgctagaacaattcttattcttttcactgtcaagcatttcaccatataagataactagttagcttactttgggaaagataaaagagaacactattttcggtggatgtttgagacaaaacatctaaaagatgagaatttacagataaaaaaagatcagtaatttggtctgcatctttcatatggaattagaacaataaggaaatgtaataatgactaaccttggcaagtccctcgccttcattttctgccagggcctttgtgttagccttgaaacttgttttggcaatacctatctcaaatccctctttttcagctttctctcttgcttgaggctgtaaagttttagaaatattagccaaaccttacaggatcaaaggtaaatggtatttcattactaacatatcacaaagagaaagaagtttgtagaacctctgttaatccaaccatactgatttcaggatgggtgaaacaagctgcagggatgctcaaatgattgagcacatggtctcttccagttacttgttcaaccactgaatacacaattaaccagttaaagccaaaaaaaaaaaagtctaatatagattgtttgtttaacatgatgatccagtatcaagaaaaggagagagccctgtgtgaagcaatcagtaaccaccaacctgatatgccttgggcactagctgcatgagcaagcatcatctttccatttgcatcaccaatgcaatatatgtgaggaacctgattttccaaatcgtcagtagttcggtacagcttgacttgattgcacaaagaaatgtgctataaataaaaataaactacataccaacttgccatttgcatcaataactcgcatgcgttcatcaacaggaataaaaccacgttgtgttgttacgttgacctgcaaaaaacaatacggagtaaaaagctagtcttttttcgtgaatgattaacataggcccactatcaaagtataccgatgacatacattctccaagccaaggccttttgtgaatggagctcgtcctgttgcaatcagtgctgcatctacctgtaagaatgcaaattgagaggccgtgataaaaacttaattcacaggaaacgtcatgtattttgaatcatggctaagtcaactagcaattattagtcaacactccttacttccaaagtgtcttttggctccttggtctttgcatcaataagttcaatggtgactggctttccatcctttgctggagtaatctagaaacaaacaacaaaagcaaaaataaatttatgagccaggggtttaatttttcaaaaaaaaaaaaaattgacttagtaagatgtaaataagttaccttggatgcaaacactccagtgtgatagtcaatttttcgtggatttatgagaactctttgggccaacttcccaatctcaggatcaaatccaggcataagctgatctaaagcttcaacaaaagtaacctgaaaagtattttgataacaaggtaacttagaatagggagaaagaaaaaacgaaatgatatgcttggattaatgtgatttccagtcttaaatgttccaattgaactcagaaatacacacattatctgcattgaaaaaaaggttgctcatttctttcaaatacaaatatttctaaatagcacaagattaaaaggaacactacctcacttccaagagcagtatatacatcactgaactcaagaccaatgtaaccactgcccacaatggcaatccagtcagggacagattccaatttgagtgcgtgatcactggtaattacagttttccctgcaggaaattttaagagcttagatatgtatccacatacaaattaatttttttgcgtaagtaagacagaaaatatctctaatagtatgaagaacactgaacatataaaccactccatgaaaatacaaggaaaccacaatggctatctgtgtattcttcataacttgcatgaacttaaataacttaaataccttaggacattaatgctctaattcaacacttaatgtaaaaaggaaatagctttcaatttttactgtggttcgcatcaaaatgaaattataattcttagggataagaatgttaataacttgcatcaaaccaagaacaataagcaacctaatgaaagtactcattcagctcttttatgcatcataaacccatacttccattcttactatttttctgaatgacttaccatcaacttcaatacccttaggaacaaaaggaactgaaccagttgcaatgattatgtcttttgcggttactgtgttagatccaaccttgactttgtgtgggccctgaaaggtttcatagtagcaaacatgaatgtagcatcataagcaactagtgagattatcatgcaactgaactgatttcaaatttataactaaacgccaaaactttagtttgtgtgccatgaaatttatatgacaaaaagtatggcttaccagaattgtaccaaaacctgttagtatgtccacaccaagagccttcattgaattagtcaaattactacgaattttggttgcaaggttatttgcatggtctgccactccctgtctgtcataactagctgccgcaacctatattca

SEQ ID NO: 22152 - DNA, 3400 bp, Cannabis sativa
cctcttttaggattaaacttcttcaaaggatagccatttaagaggacagaataagagacactggtaacacaagccatcaggagacgtctactactttcattgaacccatttgcattgagaactctgtctaggaaactccactccatcttgtcataggccttatgcatatctaatttgatagccataagccctccccttcctcttttttgacgaattttatggactaattcttgggtgagaatggaggattccgcaatccatctaccaggaataaaagctgattgaaaaggagataccaagtcctccataagcggacgcaatctgtttgaaagaatttttgcaataaccttgtaagcaaaattgcataagcttatggggcgaaattgatctaccttcaaaggaaattccactttagggatgaggcaaatgaaagtagagttgagttttggatcaatgtatcctgtatggaaggcttccttgatagtagaacagaggcaagaacccactatatcccaatattttctaaagaaacagcctgagaacccgtctggtcccggggctttcaagggatgtaaattaaacacgactccctttatctccttgtctgacggaattctcactaattcctcatttgattgtgcagaaatacgatactcaaagagatccaaaaagtcctcatcaattgtcggttgtgaagaagagaataactccaggaagtgggaattaatgatccttgcaatgttgctcttatccttccaaaccttgtcttccttgtccttgatagcccaaatactgttacgccttcttctaataaccgtggacgagtgaaagaatctagtgttgcgatctcctaaggcaagccaagtctctctagatttttgcctccacatgctctctaatttcgaccaagagactagcagatcagcttgaatttttgactcttcctccttaagagctgtcgaaatgggttgcatttgaatccactctaatcttctctccagggacttgatatcattaccattgtccttgtgcaacgatcttttccaagcttgaagggcctttctagtgctgctaatattgcgcaatagagaggctgaagcattattgcttgaaaacctccaggcctttgaaacttccacacggcacgaagactcccaagaccaagcttcgaaaaaccggaatgggacataaccccttgctgcgaacaggtgtgtgtccaaaatgattggagcatgatcagagattgaaatgggaagattgaggacacccgaactagcatattcagtaagccaattcacagagcaaagagctctgtcaagtctttctctaatcaagccactattgtatcgttgattttgccatgtaaatttacttccgataaaccgaagatccacgcaacccgtattgtttgtaaaatttctcagccatctcgtgtcagctaaagtaactttggaacctcctatcttttcctcttgattaccaatacagttgagatcaccaatcaagacccaaggcacttgactgagattcacctccttctccaaactactccagaagtactcctttaatttagcatagggagtgccatagattgcatataatttccattgcatctgagattgaaaatcccacactaaggcttcaaaaaaaccatctgtcgcataattgagaacaagatttaaattgttgttccagaaaaagcaagagcctccagatagccctttggaactaatacataccgcattaacaaaccccaaattcctggccaaaactttcatcttaacttcttgaacttttgtttccattaaaaaaatacaatccggattgtatttcttcacccaaaccttcaaggcttgggatgtcgggtctcttgcgaggccccgacaattccatgaaaggcacttcatggggcggtggggggcttgataagggccgcctcctcgcccgagaaaaaattttgagaactttccacttagaagcagataatcctcctgagcaatccctttcttcgaagcagataatctagaccgagatccttttctccttcttttgtcattcttcagagaagaggaagatgcacccgaacccattttaaaaggagtgtctaaagaggaagagaattcagggagcttaggtacttctaacgagaagtccatggtgttatcaggcagacgttgaacataaggaactaatgtaaggctagctttcctttttctgggttgtgggcaaggatggaccaaagtagacacatcttcagggtcatgaaatagagtaggtgcgggctcatatttgtctacttgaggagggcccattagttcttcagtcaaacctatttcttcagcataaatgggccaaggaaaatgagtgggctcagggtgtttatggggctgcctagaggagcataattcaacatgaggtttctctatcatttgctcataagtgggcccagtttgggccattatggttgtgagaatgccattatcagcaggattaggagggggccttgaagagaatttttttaaaatgtcactatcagatagagtacttgaattaccttgaatgtgtaattgacgcaccctaggagaagctgaccttgcttttctttctctgtaggaacttgatgaaggatgggttaccacagaagagagagcacttttaaccaacgggcatagaggagttttctccacaactttcaaatttttccccaaaatagctcctggggaattatcaatgaccctaatgactttcttttcaggtttcaatttggtggctggctgtaagaacggctctctgcaatgatccctgctaacatcgatcggtcgttttcccttatccttgttccctgtgccatctgccggagttctatttgccggcaacctagtcgagtttgcagcttccctgaagaattcaagttgatttctagtgttaaaacagctgaaaaccgccgactccgccttcatccatggcccataagctgggaccgctgctccttcaggtggatatgcgtaggccgtcgatcgaaagcatgattttttgtcatgtcctaggtaaccacagttgtagcacaactttggaagcttgaaatatctgaattggacccattccttcctccctcttttaacgtctaggaagaaacccgaggaaagttgatgagaagtatctatctcaacctgaaatttaagaaatcctcttcttatgttcgtctttgcactggcatggtcatttctaatgaatctcccagccttagacgccaccgtacgagaatttactccattgagatatggagttggtaacccgaaagctagaacccagaacatagcctttttcatatctgcattgagccggtcaccatcttcaagccactcccgtatgtttagtaacttaccattgatgatccatg

SEQ ID NO: 22153 - DNA, 2115 bp, Cannabis sativa
  modified_base (232)..(232): a, c, t, g, unknown or other
ttccttcaagaaatgatgagtgcacatatatatatatacatagtgaggataaatgctaaaagcaaatagtggtgtctagcaccctcttatatgtcaatatggatattgtttcaattaactatcgggtcctattatagagcattgctataaggcaccagtggtgcctagtactttctcgacatgtcacgttgcgattagttagcgatactctataaaaactattatattaaantatatgagacctgatacttaattgtaccaatagcgatattgacacataggagagtgctagacactactgggccctttagcatttctctataatttaatataatagagtatcgctagccaatcgtaacgcgacatgtcgcaaaaatattaggtaccactaatacttaatagcaatgcaatgtcaatcccactcgccaacacatttaaaaatggtgtactcgctacactacaaagccacgtttcctatgactattttatatggacaaagtactaggttttttaccgtctaaatttttttaggctgttaatcttttttacaaaattattaatagcatgaaaaattacagttacaactgtattttttagttatgtaattgaaaaaaaataaaaatacatttgcagttgcagttgctactgtcaaatttcattttttaatttttaggcaatgttataatttttttctttaagaacacataagaaaaatttaagagtaaaggattaaatgttttttaaaaaataaaaaacaaactattattaaagacttaaagtactttctctaaaatatatagaaaactcttaaaagtttaatagctagtgtactataagtctataagtaaagtagaaatataattttgccaattgtgaactaatttttttatctttactgcaacttagtttcttaattttttatcttttatatataaatatatgtaatacatttttatatgagttgaacatcattcttaatataaattgtttgtataagaatttaataatttataataattttgtttaaataatattatctttaaaataaagaaatgcttggaacattaagataaagaaaaaaaaatagaaatgcaaaagaaacattagaattaagtaattattattaaatttaatattttttaatatattattttaataaaatatatataaaagtatatagtaataacttaaaatagttaaaaaaaacttaaaactaataaaagttctcacggaccaaccactgtgacaagtgctattaaaacctgatgcattaggaaattaataaaatggtcgattgagttgggacagtttgaaattacctaccattctagggtcaccatcaagggtcaggctttagccgacttcttggtggaaggaataaacttaggagaagactaggaaatgatcacgatgtatggaaactattcgtggatggggcttcaaatgagaacggttcggggcaggggtaataatggtgtcgcttgaaaattttcaagtttcattatgcactaagattctaatttgatgtgtcaaaaatgagacagaatatgaaactttgttggcaggattacggatcgcagaaaccttaaaagccaagtcagtccaatgttttaatgattcatagttggtcgtaaatcaagtattgggtgaatactaggcaaaatgcacaaagatggccaaaagaagtttggaagaacttggaaaagtttgattactttaaaattgaacaagtttcaagagaacgaaactctaatgttgatgccttagcaaaattggcattacagtttgacttagacaatttaaatttggttccagtagaagtgttaagcgagccaagtatatgcaaaattgaaaagcaagatgtagaaataatagatgtgagtcccacgtggatgacccctattgtcaaatacttactgaatagatagcttatagtagacaaaactaaagcacacaaactcttatacacaatcccaagatacacactagttgatggtaaacattacagaaaaagatattctatacttttactgcgatttgtacctctctcagaagccaatgatactatcagagaaattcacgaggacttctgcaaagatcatgcaagatggcaaa

SEQ ID NO: 22154 - DNA, 4964 bp, Cannabis sativa
  modified_base (4507)..(4532): a, c, t, g, unknown or other
  modified_base (4583)..(4595): a, c, t, g, unknown or other
tttgggttaaatagggttggattgctgtaaaagaattaagagtttttaaacattacttttaaatgtttttatggatgtatatatattcattcgtatcaacttctgaagtgataatttttatattatatcaggtacaaaactgaaaagggtcaaaagctggagccaattgaagaagttactattgaggtaagaattgcagatgcaaaactatactaatgcttcatgtataattttgtggacctgtatgtaaatgtattttaatttgctattgcagataaatgaggaacatgttggattaattatggaagccttatctcatagacgagctgaggttactgacatgggccctgttcctggcaatgatggcaggactagattgactttgacatgtccatcaaggttactttcttagcaaattgagtttatgtttcacttagagtcacagttatgataaatggatggcatatgatttttatcgcacaaagtaaaatgtgtatattttttgttatttgttctcttatctttttgtatttttgttttaacataaacttatttgatggcctttcctaaaatctcatcttataattttcttttggtgagtgatatgggtgtattgtttcaataccaaataacgcaacctacttgtattcttttggtaagctatattgtagttgttgaaatcttctgtaaatatgtcagtttagttatggtacagcagctaaacgttgtaattgatgcttggtactagcttaaagtaaaaggtgaagagttgtagtgctaatgcaagataacattgtcgagcattctttggaatccttatttttgcgtatttcttccaaatttgtgaagtgcagttttttattttgatatttttattttctgaaactttttatttgctgtttgcatcaggggcctagtgggttataggagtgtgtttagcagtgacacccgtggaactggatttatgcatcgtgcattcttaagtatgatttgtttttttcaccatttttcttccttttttctagcatcattagccgacataatttctgctcaccaagcttattttcactttctatatctagccatgtgctgacatgtcttgttatctatttctcagattatgaaaaatatagaggtccccttggaaatgtcaggaaaggagttctggtacgtcatttcgtttccttctgatttaccactgtttgacttgtaaaatttcattcaagtagtttttcatcataaatacttcaatttgctgaaactctgaaaattatagcataaattcttgtaccttaaaagcctacattattgtgtatatatacaattacagtgttgctctgatttgtatcttgaaagggttataatatcactctacaagattccagccttatattcacttttttgacattaatgcacaggtatcaatgggctttggcacaaccacagctcatgcactgatgaatttagaagctcgtggaacactttttgtgacccatggattggaggttttaaacatataaccttttctacttgtttatagttattacagattggacccttttgagtttcccacctttcagtatagcagcgaactattgaatatttctctattgatctgtacatttttgtgcgtgtttgacacaaattaggttatcaatgaaaaattggtaactagaaaaggaaaagaataataaaaggaattcagataagaaaatctggatatttttgatccactactcttctgtagtttgtaaaatggctaatttatttgggtaatgttgactcacacccatgatatgatgcacaatctttaatgttttctcctttgtcaacgttgcatttttgcttgtttgtgcagacatacgatggcatgattatcggtgaacattctagggatacagatctagatgtaaggagcaaagatttgttgcctttgatgttgtgtattatgtttattcatttgactgaccttggaattaatgctttggtaggtcaacccagtaagggccaaggaacttaataatatacgtgcagcttccaaggatgagaatgtgaaactgtcgccgcctcgcctagtatgttatttgttattcattgtactttgctggtttttctgttgcaattatggcatagttgaatgaatcattagcccgcttttaggtttggaattcttttatagacttgaatgcaaaactacacatgcaatgcaatcataactcataagtaagcattttttgactaatagagaataatgggactagttgtcctgctcacaaacctctgccactttcttttttaggttggcaacaatcaaataagtactgtacttcgtaaacaacacaaacaggaatttagattttttttttttttatatttatattttcatttcggtgcagataactcttgaagaagccataggatatgttgcttctgatgaacttattgaggtaaattcattaaactttaccattttgatttttttatctttttgatgaagtaaatgcatccttggctttaacatggacatgtaaatattagatttaaataaatttcaatatctttaaccttgcatatactcacttgtgtgtgtgtgttaggtagactgttatttaacataaccttgtattatgtgtgtgtaggttacacctaaggccatccgtttgaggaagaagtaccttgatgttaacaagcgtaaaaccatgagtaaaaggccaaaggaatgaaaagcttttccatgaagtgctctatttttttcgctagattacacctatgtaccaatatagggcttctatacttagttcattatttagttacacctcaattttggagatacttagaagagttgacattctttcacacatctatatgatgagaaacaataaaagcagtaaactatgtattttcttattgtattaaacatgagatgtgctcatacatgtcttttgtattttatagtaataaaaatgtataaaaattatcaaccatattatttgtaataggctattttggtagaattgctatgcttttgaggttgacaattgtgataggagagggcaagtggcgagagggtaagaaggcaaccatttctttcctcgtttctgtttattattttgtatggaacttttacttttcttattcttatcgttttctaaggatcgacctccgacctcacaaatcatatatcaccattttattgacatttcaatttattcatttcctcatttttgttatatttgtcctatttatagcatttgattttaaatttaaggatgaacaggactaatgattgtataagccaacgataacttacaggtgtctattgaataaagtatataactcaatgattgtataagctaacaatactaattggtacttttttgttgcatcagaatatctgatttgaaagaaatgattagatatttaagcaattaaagggggaaaaaaaaagaattattggaacaaacacgttgaatgctagtagtctagtctagtagattggatatgtggaagtgataatatacatttataaatgatgttaagaagaggagggaaagtgatcttaattctctctagaaggacgaagatattaaattaggaggaaactcgctatttacatttttaacttccatacaatattaagttatttttctattataataagaaaagtatatatattttgaaattaatgtaggtttctttttcagctcctctctttgcatttatatttttctttttttgaaaaaaaaaatgaccaaatttaattgatttgaattataaagtacattggtcctaatatgtgcatagcacgttataaataaaataaataaaggacttaatttaaataaaccacattcccaagtcccaactaagacaattgtaggacttggtaatcagaacatggaatggaaaaaatttgcgctttgcttaacttgagaatttctttttatattgtattttccagaaactttacttgagtttctttttaagccttctaccgcgaaagtgcaaatatattataatattccgccaaattcttagtttaacacaacttttataccttgacttattaaaggttgaaattgtattagttttactagattttattaaaagacaaataataataataacaactagtgggtcgtttaaatcaatgtgtaaagcatctctaatgatgtatttttataaaatttgacaattttttcacaaaaatactccaaagataaataactcctaaagttgccaaaatacacataactatttttttttatgaaatattttaaattagttttttgcataattttttttatatttattttcatatttgctcaatcaatatatagttttttttttttttttgcaatcatatatttatatttctatcattgtaaatttgtgattttcatttttatttcatatattttctgtttattctgtaaaaaaaattatttttatttttattctcacatatttaggtggcaattagtaatacttttatttttaaattttnnnnnnnnnnnnnnnnnnnnnnnnnntttgtttttaaaaaataaaaaataaaaatatattctgtaaattttattttnnnnnnnnnnnnntgattttatttaagttgggttcgaggtcaacaccgggggcaagtccaagtttgggaccggatctaagttagagtcggaatttaaaatattgattaaaaaaacgtttaatttttttttgaaaataatttgtttttatttttaaaatttaaattcttaaggaaaaaattaaaaagtaaaaaaatattttctaaaattattttaattttaaaaaataaaaaactaattaagataatattaccaaaaacttgtattgaataattatttttacaatttttttttggcggtcctaacatttaccgcccaggcagtgccaatgaccatatcagggatcttttattttaaagaaggaaaataaaatagtaattgaaa

SEQ ID NO: 22155 - DNA, 1688 bp, Cannabis sativa
cttctctaggtcggtggtgagactggaaaaccgagaaaattaagggtgaaaaaggtaattaattgactagttcaaacgataagttttcttgtgctaatttgctttgaagccaaaacccaatttctttttctcagtatccaaacagaaaatgaagtattggaaagtaacgaacctcgtgcatgttccataaggaagcgtgccaaagagccttgtgagcccatcttgcccaaaactccatacccacctggaattaaagaacacccaatttccaatttaacataaaaaagctgtagaaattttctcaataattgaatgaataagattttcgtaataaatacttaccgcagcaccaacggatagagcaaatgtaccgaacatttcagtcaaaggaatctctctaccctgcccagaaaaatacaaccaattatcagaacactccaatcgaagataatcccacaacttagattaaagagaaagaaagagaaaagtattattattattatacatacctccatttgccagtaaaatctatagtaaacagccaaaacagccatggaagtaattccaaaggtagacataacagccgcaacaagatacgtaaacctctccgattccttccgtgcacgcttctccaccaggcgtggcgagatctgtactgagtcggcattactatcggggatttcctcatccgaaatctccatatgcgtactctgtttcttgtcccccataatcacgcaaactgtgacacataatctggggcgggctcggagaatcgttctctgggggcatagattgaggggggagaaggctaaggaagtgtgctgggggaggagataggaagattggatgagacggaaaggtttaggggttaaggcggttgagagtcccgccgccatggaaggaaggaggttgggattaaggtagcgcgagatggagatggagattgagagaggtgtgttgtgtgtgggggtggacttatatgaaggtgtgaaagtgtttttgggttgaactgagaccacaacttcttcgattgcttcttggaatttatatgtagtccactcattttttgtttggaggtgttaaaataatgagaaaagagttttaccaaatgccacaaattttgaacttaattactagaatgacatctaactttacctacattttaggaaataatctaattaattttcctaataaagaattagaaattctcctaccaactttaaattataaagggaacaaagatgagaagacaatgagcatacatgattttaggtgagcctctaatgctaaatataggattaaatccctttataagtgatgtagaagttttagttctatttgcaggtattcataaatttttacaaatggtaaaaattaaattgaataaatcgactaaaaaataattaaaaaaaacaaataaatagtcaaattattatattagatgtggtcatagtaatagtctagtggtttcattcttctcatcacaataaagatattctaagttcaaattcctctctcctaatataaaaaaaatcaatatattagatgagttgaaaatattccaaccctcttaatataacctaaataaaccaaacaaattgatttttttttaaaaaaaaattatataacatattacataaatgatgtcaaatgaataaattattttgtatttaaaatttaaattttat

SEQ ID NO: 22156 - DNA, 2629 bp, Cannabis sativa
tgaggttcttcagcatatagtcagcaaagctaaaatccatggaagaatgggtttttgcaattccgtccactttaactaagctctcttagctaaataagcacgaaggctccttgaaagtcctaatttcatactaagcaaaaggcttagaaacaaatattatttgaatgggaattttcttgatgctggtattagaaattctccatctttgacttggagttctattgtttgggggaaataattataaaaggggttgcgatgaagattaggatcaagtttgaatgtcatgtgcaagaacgatacttggatcccaagtcatactttctttaagcatctgggctttaatggaaatcatccaaatttgggggttgctaatctcatagatgagtcaagacaacgaaatttgagtgcacttcaaacatatttttgtcatcctgatattgactgaatactttcattcaatcccacttaagctttttccacctaatgatgttcttgtatggcattacacctcaactggatgttatactgttaagtctagttataaacttattgcagatgccctagaccacattgtacctagcagctctagtttatctgaaagctggtggcaaacttttttggagtctaatatcgccatttaaaattcgaatctttttttttattttaaaatagaatagtcatttcactaaaattgtaaaaaagtcattccattagataaacaactaaacaaaaaataaaatgaaaattgtttcctttttattttatcttatttcattatctctaaccaaatgtctctataaagtccaataaccttgaaagaaatggttgtgaagaggtggttaattttttttctttttttttttttttcaaagggggtgtttaattgtctttaatacaattatatctttatatataataatatgtataaaaaaaaataataaaaaaaaaactaataccggaaaatctgtggtcttcctgagtttaatggctctcccattttactggagacattctgagaaaaacagttctattgttctcaacaatcttacaacatgtttttgttttataattacttactaattcattgcacaaaataaactaaacacaattttttttaaaaaaaaatgttgcacattacaatttacaatctacatatcacacctgccaatttcaacaaacacaaaaaaacccatcaaaaagccaataattctactctaacaataaaaaaaaccaaaatggttactacaaacaaatttacataataatagagacatgtgtaacaacaacactctcttcaattgaactactaacattcgagtcacggttgttattgttgttgttgttgttgtggtcaaaaggcatagcctttttcttaatgaactcaatgcaatcagcaacagcctcactttgcatatgatcatccccggggcgacggtaacatcgagtggcctcgggggtggatccatcgtggttgagtacagttgaagaagcggttttagaagaaggggagaaggcagagaacatgattaatcgaaaaaccgcctctcgaaaccgatccaacaatgtcattgctggtgttaaacctttcttctttgttgtacatgagttgttgtggttgttgttgttgttgtttctcagccttggaatgcataggtagtttgtttttacctttgtgttgttgttggttgagcttactcctcttgctttctccatcttcatattgttgttttttgttttgggttctttggactatgatcaagtgttgttattagtatatcatattaatttttatgagaatcttattgggtgagacaaatgtaatcatgaagaaaaagaaagggagaaagaaaagaagaagaggttggctcaaaatgaagcatgtgcggctagtagctaatgagcttgctagctaagctatatatatataatttaattgaaaaatagatataggtatagtttgattaacaattaaataatacctttataaatgtctaatgacaactcggttttgtcaacattataaccttaacttgtttgacttattttaggagtcttctattttagtttttaactaaatcaattttattttattttttctttgtaaactattatacatgttacaatcaatagtgagtaattttatggtgcatttggttaggagtaatagaatgaaataaaatgaaaaagtaattcaattttattttattctttgtttagttagcattttaaaaatattagaataattattttattttaaaaggataaatactattttggattttgtattttataaaagttatcgatttaacttaatgacaaattagatcatgtattttttaaaattatacaaaatagtagtctgaactgatttttttgtcaaaataaatttaataataactcgatctagaagtattataacaatactggttatattttttgcatttgtttgtgctaaaaattatcttcatgttggttataataaaaaaattgtagaaaattgagctcgatgtactattttttattattataaaaaatacataatttaatttgtcatttaacaaaatagagagtctagtcagtaacttttacaaaacgcatgattcataatatagtataacacatttcaaaa

SEQ ID NO: 22157 - DNA, 2207 bp, Cannabis sativa
tacttatgccgctatttacccaacgtaaaacgattacaaggtgagtttacttaatatttttaaaaactgtttttaattttttttactaaaaaaatttaaatatttcatgcttcgacatgaactcaacgtaaccctggctcggacttcggacgtcggccccggaccgtagatcctggacctagacttggacttgaaccacaacccccaaacctcagaccccggatcccaaacctcgatcctagaccccggacctcaacctagacttgacctcggaccccaaactccaatcctagacccagccccaaacttgaactcaaacccagacccaaacctgaaccccagaccctgaacccgagatatggactctagtaaatgagagaaatgtaaataaaaaattgtttttgaaatagttgcaatattttgatgttttttaattttttatggccaagcacccctattgagttttaaaacaattttctatttttaaaaagtgaaaataatttttttaagttatgaagtcaaacactcccttattcttcagagttaaaaatattagtgaaaatccgtgttatcatttcgagttcctatcgatacgtttatagtgaaatacacaatttcttaaaaagtcacacgacacaagatgataacatgtttaataaatatagtgttgtgtgatataaacgcgaaggtccaaacacaccgaccataatcatcacctattgaaagaaagtatttcttaacggagtgagtaggcaccatgtatggctcccaaagattagcatgcacatactcaagtatctttttagttgtgtgccttgttggagtgaatttcaacttatgttgtttccctaaaatacaagcttcacaaaaatggtaaggcacaagaatttaaattttcaatcatacattgtttgtgtagttctttgaggccttgttcactaatatgtccaagcatgtgatgccataacttcatatccgattctagccctttcaccatacttgtctctccagctgggacagtttctccttggagaacatataaaccattgctcttttcacctttccttactatcaaagaacctttggtgatccttaagcttctgtgcatggacttgtatccaaattcctcatcctcaaaagcaccctgggatataaggtttcgtctaaggttgggaatgtgtcttacgttcgtcaccaccttgattctactatcatattgtttgatggccacctttctggttcaaatgaccgtgcatgaatgatcattacccattaaaactttacctccatcaattgacttataataaaaaaaaaatgactcttgacttggacacatgtgataagtgcattcggaatcaagaattcactccctgttcatagatgacttcgagatagaaaaaatttcttcgtctatggagtagtcatcactattttctgcaattgcagtagaatctttcccgtggtgatggtgtcaaatgtccttcctatctctattgtgagatttgttgaagccttattgctccttgtacttcttgtaagatctttgcaagtgtccagaccttctacagaagtaacacttccttgtgtccttctctctagacttagaccttgattgagaatgatggtgtttattcttcgaactcactttcttggatgatcttcctctttctaagtacacttcatctttcgtggattccttctccaactgtaattggaaatcttctgatttaagtgtggcaagaacatcttccaatgtgataacatccctgccatatttgatggtagccttgacttcttgatatgtgattggaagtgatctcaataagatgatgatctggctttcttcattaatcttgtgatttttgttagccaaacctacaataatctcattgaatctatcaatattctaatttaaagaaagggaagaaatcatcctaaaactgtataatctttctagcaaattaatcttgctagcaattgatggatttaagtacaattttccaatttatcccaaactccttctgtcgtcttccctgcatgaattttcttcgaacactgtttgatagatacacgatgatcgtgcagtacgccatctcttgtatttcttcttttttctctagtttctaaactaccaataacttcttgtctccaagagccttggagactttctggtgcactatgattccttttagaatttctctccatag

SEQ ID NO: 22158 - DNA, 5108 bp, Cannabis sativa
  modified_base (4716)..(4728): a, c, t, g, unknown or other
aaggagaaggctgatacaagatgaagcaagttctagtttaggacactcaaggtcttaaggacacagtcgatcaggtaggcaaatgcgagagggaagtaggccttgatgttatgctgacaaagaaagcatgagcagtacacgaagctatcaattcgagagttatttagagacaaggtctgtgagtaattatgagcgaagacagtcagatcatcgcgagcacttgaataaaagacagtccgatctttgcgagcgattaaactgaaatgtacttaatttgtgccatcaacttaatgctaatcagcagcaaatagatcctatccaattgagaataattgaactagaggataagttcagaaagtatcaggatggagactatggaaaatgcctagttacgatttggatgaagagaccgagccatttcatcctgatattttgaattctaaatttccctagggattagaaaacccacatgttttgcaatacgatggaactaaggattcagtcgctcacttgaacaactttaatactataatgcgagccagtaatgtctcacataatttgtgttgcatcttattcccgacattcttgactggagctgcgagtagcttgtctaacaaatttactcatcattctatagcgtcttgggaacaactgtccaaggactttaaaaaataattttaagctgctagagacaagtgacctgaagcatcatccttaaccaacataaaatagcaaccaggcgagtgacttaaggcttacctgagtcgctttagcacagctgctgcaaaggttagaaatctgtatgacagtattcagcttactgctcttcaggcagggattacaactgatctatccacggctagagacaaattgtgggatgacctacagggtcgcccagtgaggaacagtaatgaatttattgaaagagcgcacatatttgtgtgcaaagaagaagctagaaacgagatgaagctggtgaaggctagctcgagaaataaacgcagcacgagtactgcaacaccaagtacaatctcaactaatgaggataatcctagtggttcaaacacaaaaagaaaagatgatccaaaagaatcatctaaaaataaaaataaacagaaaaagcacgacaagtatatcttgatttattcaatatacaccgagttgaatgaaattcgtgaaaatgtatttctcgcagatgaaacaggattgcatttcgcaagcctgagcccatgaggcatgcgagacataagcgagactcaacaaaagagagaaaaggaaagaaggaaaaaatagagtacttttattattcattctcagtagtaagcaatacaataataatgagcatatatatactgctcagtaaaagaatacaaaaaaccagcgaagaatgtaacaacctacaacttggtgcaaccaactactgatagctcaaacaactaataactaactaacaaatcttaacaagtgtgcctaaataaaatatttaaaggatttcctttgcgagttatacaacttgagttatgagagttcaaattacaaatacggataattttttttgttggggaaagaataataagtaagtatttaactataaagaaagacagttcttggtctaattgatttgattttttttgtgaatatagttgacattagaattctctacataaacataacttgaattttcttgagccgtatgaggagaaaacttcatatacgtttctcgggggagggtattttttatctacatctatcctaatgacccatttatcgattcgttgcaattgatgttcgatcacgaagagaaggaagagcgtacaagtacggggtacgtcaacttttctgtatgtgcattcaaaacaacatgctttctaattgatccttatagaaaagaagaggattctaggtaagcgtcttgtagtaagaggagtagttatgaatcctataaaccattctcatgaattcaggcaccagtcctacattaggacatgtatatctattactatgaaatgcataaaagaagtagttaatggtgggattaccattatcttttctgtagtgacaaatcttgtatgtgttcctaagaaaagaaaaggaatttgtccattttttaaggtctcaaaggagcgtggaaacacataagaactcttaaatgaagataaaatagagatgttactccagtttctttagaatggtaagatctttggcttagaaatagcctaatgatacctattatttgtagtgcaagcttcttctatctttgagacggaaatgaggagatacgacgggggaaggttcaaacctttttctttctctatctcaaatccactcttcggattcgaatagcctacacctccctttcttctgtctcaaacctattttacaatttacgttaatcattatgcaaaactaataaaataaaaattgaagtcttaatttaaaatggtaaaaaataaaaagaaaaaaaaaataggatcaggtttgacccacttaagtctgacccaacatgcttctaaattataaatgaggtgacatgcaccaattaggaggcctacctaccccatttacagttttactaattaaagattaatatttcatatttgcacacaaaatatatgtatcactatgagtaattaaataatatagaagacatagttgattgtcccatacagataatggagatgtaatacaggttggtaaatcaatactaatctactaaatagtcttcctagcttctgagatttttaaaatcaatataaacaaaatataattgtaatgagataatgtacaccaatacaattaagaaagaaagaatcctaattaaattgacacgctcatcaaaagttttagtgtactataatagagttcaactagactacatataagccgattaattataaatcactcactataccaagtaaaacgataaaagaaatattaatccaagatcatattttaattaatcatttgaaactttaatataaactacaaataaaagtcttaacaattatttcataaatatatataaatgtatgtatataatatgtgtgagagtaacagagatgtgtcgaatgactgatgtcagagatacatttatgggtttgaaaattgggtgaaaagatcacatgggtttccagtctcaagtcagacaaactttgaaacaagttgcagcaatggcatagacccgatttgatcctaataatctgattctgattctcaatgtgaacaagtagaggagtaagtacttccttcctgccctccttccttctttcccagccatacgtgtcattttccatgcatcgtcatcaaatgaatccctaataagttctcttccctctttgttcgttttttaatatctcattatttttcttaaatattatatacatattaacattttcagattcttttattattaatttatatttgggtaattttaacattaattaatagttgcattatcacttgtatttttttaagctaataaaattattacatgaaaatatgaatcatacagtttcataattgctttcacgtgatattattaaacgcttgcttaatttaattgttcatgtaaatatagtttgttaaataaataataataataataataataacgagtaatacataaagtacacattactttatcatcaataatagctatttatggaaagaataagaagaaattttttctatccacacctaaaattttttcttcttttttttgaaagggatatctacctagtatttattattcaagtatattggtactttgaacattcttctaattcattattcttatgggaaatttggtgaatatcaaacaaatagatcgaagagtactatcttgtagaggccagcatacattttcatttttactttttaatgttttaaaatcaaaaatatgtttgataattataattacttttagttttgaaaagtaaaatgaccaatgatataagcagtttacattcaaaaagaccaatgattataagcagaaagattttcagatcgtgatctttaaaattatggcaaatttcaccaatgtaatatttatagttggggaaaactttatcccataaatttgatgataaaataagcacacattaaagtcataatatatcgacaagaaaagaagaaaggcctcatgtgaaagctatcatatatagctctgaatcttttttcttcctcttctttgaaattgatatcatttaactttggacacatctacttgtcgcattgtcgaaatcgcacagctacaggtgcctatatatataaatatataaatatatataaatatttaatacgtgtttgtgaccactatatagctatatttttatggccaatatacaagtagttttcattttcacgtgttggctgtagtggagtacgtatgagaaagttacttcgttaggagacaataatcttaataatttagttaattagcatataattaaacaaggccagcttttaaaatgtatatttttagctaattattttgttgttgtactacgttgaggtagagtaggttgatattattattagttacgcataatgttagtggtatgtatattatagttttttttttttttgaaagaagggtttgtatagtttttggatttatatgattatatatatattaggtttttttttttttttgaaacttatatgttttaggtatttggatttgtataaactactctataataataataataatannnnnnnnnnnnntaataataataatataatatataactaatttattttatttaaacttaaatggtataataaagagaaatgttaaaatgcaccaatcatatttaatattgttctcgatgttatattgttatttgtaaaattaaggatcagatcttatataacttaagataatattttttggcaatgtcactaacgaattatcgaatgccacacaattaggtgatatcaaacactatcggtgtctaatatgctcaataataaatatagggtattattattgggtattagtggtgcccaataccttctaggtggcgtcttacgattagttagcgatattctttaaaagttatttatttgttagaattttatttgggcttacattaaattttatt

SEQ ID NO: 22159 - DNA, 4968 bp, Cannabis sativa
agaggaaaaataacctgtttgttggtctgagagtagtcgaccatgtactcgtaagcatcggcttgagcattaaccctagtttcagtaccttcgacaggtaaagcaaaagcatccatgacaatgatagcgtcaccgtcggtctttccctgcatgaggcccatgacctcgatagtgccaccggaacgggcatggactaccatcttgaggagggcaagggcggagatcttaacacgcttgaaatagtgagggtcagtggaccagggtttgtcttgttggaatttgttctgagcagactcatcgtagtagaatatggagtcggaagcagggtcgggcttcgaagccggagtctccatggggatgatgttgttctcgagctcccatgtctgttgggctatctgggaggaggatgggaagggctccattgttcgtgttcttgtgatgtttttagttttatttttactgagttactcgatttctgagtactaccacatttatatatagtctcagtttgagtgagctttcaccttcgtttttaaggtagaatgaagaatagaggaggtgagctaatcccctattgggaaatttgataatgaattcttaaattaggattaccaatcctcaaaataagttataattaaatttctcatccaattttaccccttaaaaaaataaaaaaccaacaaacgcccaaactttccatctctctcgtatctctctctctctaggaaaatcacaccacacccacactctaccagacgaaccacctatcgatggagctattatcgttcaaccactttacgtaacggtggagttgtttggacaaccttaaaaccaaaacttttagaaagaaattcctttaaaaaaaaatgggtggataatttctttaataatcattgttggatttagttgtattaggttgatatgaatagatctacacatatccttgtttgtatgtaccatctttgtcactgaaacacaaactgcagcgattttgcattttctgaatttttttacgagtttagcgatcttaagtgatgttgttagcgacatttagtgatacgagagtgtgttgaaggtaagggataaagtttaacgatttgtagcgatgtatgtcacgacatactgtaattttgtgttctattgatgattttttacaatttttatcgttgttgtttgtgatatgtatcgatatatttagacgtagtatttggggaagtccaaaatgacctttagcgacaagtagcgatgtgttgcgatataattgtcgatatgttccacgatattttgcgatactgttggcgatatttcttgacatctgtttgatctgaattaattttttctcatttttgtttgcagattcaactgtgcttgtggttgtattgtatgatggggtttgggcagttgaaggtctcaactggatattcaataacccaaaaagtaagatgttaatgtttgaggttgacactactttacagaagatgcatgaaattttgtatgaagagatggatataaaccctctttgtatatgaactgaaagtagaggtgtgttacatgtacgtgaaaggcaatatatatcgtcagaggttttagtgaaagatagtcaagtaagattgctcttaagaatgaaagcaaaaataagtgcggagaacttgttgtcactgtttgtgactaaggttaagagacatgcgattttggggcctactctgccaactgttcccccaataagtgttgttgggaatttttcccataaacagatccagcgtatgtttgaatgagcatgcccctactaatatagatgaggacaaggttgacaatgcatttcaccattttaatgagtttgatgctcccttttacaacaatgatcttgtggtaaatttgaacgagaataatgatgtggagttgcaagttgatgaagttgtagaggtacctgctttgaggttagaactacctccactgcctccaaggaaccataggacagagcaagaaagaagaacccttcgtaatgaaaatcaccaaatggcagacactagtagcagtcggtcaggtccttctcgtaatattgtaccatcaaattttgaagtttgtacaaaattcaaacctattgtgtggacaagggaagacatagaggaaaataatatttatacagcttctcttagtgatacacattcatgaaaaatacacgttggcaagctgtacacaaattagactaaattgaaaaatgtagtaggaaggtttacattgaaaatgaattctgagttcatggtgaggtagtctggcactgatgtattttatgcaacttgtaaggattcaaattgctaatggagagtgaaggggaggaagaaggcatgttgtgacatgtttgaggtcactgtgttccacaacaaatacacatgtaacctggattctagacatgctgataatcattaagcagcaccgtgggttgttggccaccttattaagaacaagtacacatcatatggaactaagtacggggcaaaagatatacaaatggatatgtttgatgattatggaatcaaaattagttatgaaaaggcatggaggtacagggagaaggtatttatgtatgttaggggtacaccagcacaatcttatacgaagttacatggttacttgtacatgctggaacagaagaatccaagtactattacggacattgtcatagaggacaacaggttcaagttctgtttttggtcacttgatgcttatagaagaggatttaagttttgtcatcctgtgattagtatcgatgacacgttcttgaagacaaggtatggtggcacaatgttagtcgatgtagcgtacgatgcaaacaaccagtttgtttctaattgcctttgcaattgttgacagtgagaatcatgactcttggaagtatttcttgcaaaaataagggaagcgattggggaggttgaaagctggaacaaaacttctcccatttggatgttgaggctattctcgatgttcctttagcagttgggtcttcagtggattcgtggtgttggcattatgatttgcatggctgttatttggttaaaagtgggtacaatttgcctcttaatttaatgaatgatggacatgctgctccttcgccagatttgagtaagtgctggaatggtttacgatgtttgaaagtgcctgaaaaggttaaaatattcatttggcgcatgttttatcgtgctatactagcgacaacacaacttattaaacagaaaatactcgttcatcctttatgctagagatgtggagaggctgaggaaacaccaaagcatgccttacttttgtggctccttaatcccgttgtgtggggtgttataatatactatcacagctttgatttgggcttttggctgagctgttagtggcactttttcacaagatatctcgtgacgaattctctttattggcaatagtgtggtggtggatttagtttgatagaaattcgattttatttgggaagaaacaatcgaggttggatgtgttagaatagttggctgctgctgtggtggatgagtttcaggcggctggttctttttctagtttggccgggatgggaggttctgctggggttgggttgttaatggttttgggttttttggtggagctactggtggagatgagggagtggctggtttgatggttggtgtaggggtgggcatagctggtttgggtttgatggtgtggcgactggtgtgaggttggatgttactggtgttggtgttttggcagatggtgtggggcgggagatggggttgctgctattttgtaaggagggggggttctggtgtgagatgctggctccccaggcgtggggttattttactctatctattgatgcaacggttaccccagggcgtggttttgctgggtttggtggtgtggttcgagatcgcacaggtactgtttaggcatcttgggctattagagctgtgggtgacttcagagttgaggtggcagaactcttggctcttcgtgtggggctacattgggtagccaatctggggtataaggtgtacgcgtctgaaacagatttgatgattgtttgtaaattgggtgaattcctcgaactctaatttagctttcaaaccgattatttttgagattgtttctcttttagctgctgttggcggtggtttgtatcatgccattttgcgagatgcaaattgtgtagcctacacactggtaaagtgtgttaatagttcgataggaattaatgtttggattgatacttgttctaaatttattagtactactgtgatttggtttgctaataaaaacatgcttttcttaaaaaaaattatattagttaagttaaattttctgactttttttgtgcacccatttaagtttcctttgaacaataacaaatattgctttttgttgttattgtatttatttattttatatataataggttaacattatatgtaatgcacgtatagttagttatatttttagtttttattttagtcatatgtttttagttttacaattagtttttcttatgatgttatctaataaacaaaattacttttattaaaaaaagtttaatttaattgttatttataaaaaattataataatatttaaaatttgttattaattataattttagtttaattactgtaatactattaattttataatattttttattgtttttgaatatcacatactttttctattttattggtaaaaaaataataatcaaaaaataattttttaaaaaatgtgcaatgaatttaaatttgaattgtaatattaaaaaaaactttaggttatataaatacacttatatactataaaaaataagagagatatatgtaatgagtttaaatttaaattgtaatgtttttttgaaaaaatacttttgttatataactacatttaatataagagtaaattgcgacataaatacttaatgtttaagattttatacacttaaatacct

SEQ ID NO: 22160 - DNA, 4319 bp, Cannabis sativa
  modified_base (1377)..(1380): a, c, t, g, unknown or other
  modified_base (3761)..(3764): a, c, t, g, unknown or other
  modified_base (4270)..(4281): a, c, t, g, unknown or other
catgtcaaagttcggggaaaaaatactaattaacctaaccttattgattattattttttagaaaaaagattgattattagttttattagttttgaaatttagaaattatgatatttaattaaaatacgaaaactaaaatatatttttcttattatttaaaaatattaattttagaatataataatcaatattgataatgaagtgatgggattggtgaaagtggcgttaacgctagttaaattcgcgtagtatgataaattatgagagaagaaaagtaagtgtgaaaggctctagtagtaggaagtagcagctagtatttttcaagatgacattgccaagtcactagaagtgaaaataaggtatgcgtggtgggtgttccaaatacaacccaggaaactaaacttgcttcgtaagcacccacgtagacttggtgtgttaatttcactctaaattaattaatgatgaatttattattattattattatttttatttttggaagtgactcaaacttaatttcaaacaaacaatattctatattttacgcggcacacaaagtgcatgccactccaaccaacgtaactcacctatgtgaactatatcttcttacctaatcactaatactatatactattagataatttatatatacaaatcaatagtttctggaacaaataatacatttcttctcttatatatcttagtcagctgttgtgttctgtttaattacaattcgatcaacttcttcttaaacaagatgctaaagtcttaacgtgttaagcaaggtatgttgcataagtaatgtgtgtatctcgacatatggtgtttttctacatccgcggaaatcccaactactcagaaatgagaatttaggttgactttttcctcagtttacactgatttttgtttgaactatataacgatgatgtcgatcgggaagtttccttggagttgtcgagtgaccaaaggtacggaaacttgtaccaaaaggacaatttatattacatgaaatgcaatatattctttttctgaattaaaaaatatataaagagttaatatgttaaatgtataatattatatacacgtaacttgtgttgcgtgtgcttgtatttttatgtaaaatatccacacacaactaagtggatggatgattaataatttttttttgtcttgtagcaaaatttggtgtggacagagaaataacaatttggttctttctctttctatttggcccatatatataaatattgggaatacgattttgtctgatgtacgacagccgttagatggagaagttatttaatctgagggctggagttgatctaggggtaattaaggttaaaaaatggtaacgtaccctaagacccatctaatgtannnngaagtacattccgtgaaagtacatcacgggacaaaatcgtgtccctataaatattttatccaatatatagatatatagaatttgtttataaaattttattatgtaactagctagcgaaaaatgaacttataaatgcaagacttaactggacacacactacaaaaagcaattcttttaatgataaatttttaattacaacgtaaatttgttatgtaatttttagtcaaaacagaaaattacttataattaaaatataatttttaaatataagttgtcactaatttacttttagtcacaacaagcattgtgactaaaagcatatttagtcacaacaaattataatctttgagactaataactttagtcatgaatcttttagtcacaatataaaaataatcatttataattagttacaactattttattgttagtcacaagttttgttgtgtctaaaaataagttttttgtaatgacaccttgaatcatgaatcttaaagacttgtaaaagttaatcaagtctttagtatttactactacaaatttgggctttagaggcagtttttaaggcattttagcgttaattttggcaaaagtcgctactgacaatgatccatgcgacgctgtaggattgtaaataactgatggtaaatgttaccctatggcgtcggttattattaaagaaccgacgctatagtgtacatatggcgtcggttatatacaaataactgacgctatatacaaatataactgacgttgtaggcctaaaaactgatgtcaaattattaataattattcttttaagttcataacctattataaatcaagaaatttaatttatttaaattataaatttactaatgtatattaaatattatttaatttaaatttaaattaaaaatttattttttaaaagctaaattaaatattatttaaattaattttagaatcaatcaatatacttaatttcatttcatagaagcaattaaataaattaaaattatagattacacaaatattataaaattagtccaagtattaataagttaataaatctaattacaagttaacctaaaaaataagctatggaagaaaaattcttaggcctttcagcatcattcatccaagccttcgtgaatcaccgccatcaaccgttctatccactgtcgttgtaatggtaataattcaatttttggattgtatgtctacttttctccaaattgtaaaaagaagtaaaaatttatattagtttatatgtgtattattatttgttaatataataaatactataattaataattaaaacttgcagctttttgatcttgtatataacagttggagtttgcacgtgcgacgatgtccgccatatatgtatttcaaaacataaaaactacattcttggttttttggttgtcttggacaattgctagtgcaattcctggccacgacccaagatacacatttgatcccctataatctgatatgctctgctttaaaaattatattaacatttcaattcattagttaattaaaaaatttgttacaaaaagagtaattaaattattgccttatcaacatttcaataatttattagggaactttgtggccacatatagggtttaaatggataatttccctgacgcaacgatctctagtatccaatgcacactaaaaaattatattgggatatatgtaagatagtataaaaataatttcaagttataatatagaaaacaattagtactaaaaaaaattaaatagtgtttacccgatattctagggaataaagaatatttggtggttgttattcatcgatgataaccaaaggaccaatcgttgtgacgcattctcaaaagactcactcttctcttcatcgttgataccattcactgcgagaaattctaggttgtaaaacttgaaaattcttctcaaatcgtttatgctctctcatatatgcctgtattaaattgttaaatattagtgtttttgaataatttcactagaatttgatacataagattaattagattgaagaagagtatacatcattccaaatagcattccgtggttgccgatgaagtcgcacaatgccacctactacaaatcctctctaaataacgtgatttgggtacgaggtgctatgaatcctcggggtacccgaattgtgattgtatcatgtttatctttgactcttagaaattcatcaactatcaattttagtgagttagggattaaagtcatgatctctggtgtgataatttatcttcttgatcagcaccgtcttttcaagaaggcatgggacctttccttttcgacataccatgtcttgatggtggttgagctagtggaccattgttggtaatcttagttttttacaaccatcnnnnaggggtttatctgcatcacttagaaaattatcgaatttttcaagatcattaagaaattcctcatgtgcttcattaagcaagtccaatggatgatcattgaaatcattaccctcaatatcatctaccccccgcgtccttaatggatatggatcatcaactaaatatttttcatgccaataccaagtagtataacttctattgaaacctcgtaaatacacatggtccttaatcattttaagaaaagagaaagaaaatatcttgaggccttacccaaaccgcctactgcttggcagagtgggccaatgtaaagacatccatgctgctgcatgatgcccaaatctccattggtaactctgaagcgttcccggccacctgatctaggagttcagcgacaaagggatcggcctccctacctaccttgaaagccagacgcttatctaaggcctctacttctatggtaggcctagtagagagtatggtgtgcattgttggaatttattttaccnnnnnnnnnnnnctactcacaagtatgttgttaaacaccctaaatatgaa

SEQ ID NO: 22161 - DNA, 2917 bp, Cannabis sativa
ttaaagaaaacgccatatttatcaaaaagaaaactaataaaacgacaatgaacatgaaaacgacaataaaactcgtcaaaacgacaataataaagagctgatcaatgaattaagaaaacgacatatttctcaaaaaagaaaactaagaaaacgacatcgattgcataaaacgacataaaacttgtaaaaacgataataatgaagaactcatcaatgaattacgaaaatgaaactctcttctctttcttcgtttcttggctgaatttcaatggcggcaaaatcatcaacgccaaccttccgtcatcctcttccactcctctccgcttctcaccactctccattctccggcaaactcaactttccatatcgtatttctcaaggtactcttatctattagtttactctttacagtctagtagtgttttccatcattttctcgcttaccaaacaggtctagtttttcttttatccgttcagaaattgagcttgtagactgagataatcaattgttttcttgctataagtaccttttgttcaagtattttggttttagtgtttgagctaaaatggatattatagttattttgtctcatgaattttggtagaaaaattgttattgatgttaaatatttcatttttcagctttgaatgttagtgaaatactagatttttgttaaatatatttagttgagggagaatatttaacatcgctaataattcaggggcatgattctattagtaaaatacctattaatttgataaagaattaatcatttgagttgattttggtcatttgtttgggttttgcaggctttgagttgtataaacgatgtaagataagtagtagtagcagtagtagtactactcgtggttcagtttgctccattaatggtggagtgagtgcttatgggtctccttgggatgagaaaccatatgaaattcttccaaatgggaaaagggttttcttagatgagcaagacattgtgacttttcttgatcctccaaaggagttaattcctttggaccctgcttcatataacccagctgtctatatatggtcagtgttctcttctctgccattaataattctaattgtttatttcattgttctttggaaagggcttgctcttagtgtttggatacacatcacataattgattcaacattttggtgatttttcatgttagtttagaattgttagttctttgcttatgttgcattgttcatcttaagtattcaattgtgtttgtttctctttagcttttgaaaatttaaaggtgatggtcagctgcagataaaaaacatagattagaagattttgatattagcaaaaattatgtttaatcttgatgttttacagtttcagttgttgctttatttttagtgtggccaccagctcagacctatttctagttttttttttcttttctcatattaacattgtttcgaagtgaaatgtgaaatgacaatgtttataatgaagatgctcttcttcacacattcactctgttgtttattattttgaatctcaggaaaaagattgaagatattcctgaagaaaggcgtcatcgattgctgcacttgctaacccctctgttagtcttataatatgttaaagtcttaaaaagttgggttactttgatttcattttacatttctactagggcaaatgtattcatttatttcttcatttactaggaaaagaaactttatatttgcatatgatcttgtaattctgtatagttaatttgaaaacgatcgggtaaatacgatgcagtcacatttcaagagcatggcagatagctggcacgcgatatgaggatcccaagttagctaagagaagtgagttcaacttgttctctggtgaagatggtggaatgtcacttgaatgttatcattgtcgaacaaccggaggtgagtccaatcgttgttgtcagggaaaaattacagatgctcaagcagacacatattgtggtctgcagattgtgtacttgaatatgcatattcatagcaacatggtttttcatttctgagaatatatgcatttgcttgcaagtagtggcatatgttatgacacttttatgtggtgatttttctcttctgtggtgtgagtgggtgtgccttgcatgagaaatgggcacttgttatgtttttcgggttttcttttgtattcagccactatgaagttacaggaaatggaaactgatgctttttatattgaactttgttgaataggaccaatgcccattgcttggataaattcctttaagaaggtaaatactatgtttatggggttcatgttttatttttgttgtctaataattacatttttaatgccttgctgaagcaacttaattttctaatgaattcaggcattattttcttgtaaagatgggaatatctatggaagatttattggtaagtttgtttaatctttacccgccagaaacttgagaaattaacaacatgaggcacttaatttaggaaatatgctttaattaatgtttctctaactcacttgggcttccctgtgttgtaaaatttgctgttgacctataatgtcagttcaaccctccaatcatattagaggcctcatgctaaatgttaataaatccatattatgcattaaacttttaagttaatatagatagcttgtgtatttgctgttattggtatgaataggagctcttttaaaatgcatttacaaaatttcaaaattttacaatatggcttagtaggtctttagttcggtctttcaagggttttatgaactagcatagcagaattgtttttcttcggtatcaagtcttctcgtgttgctattgaataactcaggtggatcagttttggaacaacttgcaagtaactggagtccactgtatttcgtattgaggaattataaggaagtaatgtccac

SEQ ID NO: 22162 - DNA, 2944 bp, Cannabis sativa
tggcagaggctgattttgatttttcggaaatttggttggtgagagagaaaaagaaggtagagagactcatgggttaaaactatagagaagatatttctggaaaaaagttaataatattgttaggtggtaatttcattccgattaagataattttgttatgaaatatcatttagtatagaaactcaattccttttccatttgtgattcttttagtaattcctaacttaatgtaggcacagactttgatgagattagctaataagattcgagaccagtataacatagctaggaccacagcagtgcaagcttcatcttcattttcaataggcaccatttattcattattgtggaggagataaaagatattattgtgtttgtatttaaaattttacaaacatggataagagaaaaggaatgagagaccctgagaaagcaacaatggttagagacaaagaggggagtgaataaatatattctttcattgatatattaaattattatttatatttaaaatattattaaagactaaataaaaaataatctagtgtactctaaatattaactattatatgcacttatctatttattaccgttagatttattatcaatggttgtaaaaacgtttctaccatagggacaaaacaataattcttaccatggacatatcctatatatatataaaaaaaataaaatgctaaaaggtacatttgtagcctagtattttcttataattaagtgttatattattattggtgcaattagtatcgagttttttataatttaatataataacttttaagaagtattgttaaccaattgtagatcatcgtctttaaaaagagttgaataccactaatagcaatgctcatttatatatttatatatatataagttgattctaagaagtaaaatccaaacagagaaagttgagagaagagaaagagaaagagagtaaaacaaagtgtgtattattattacggaactcacaaaattgcatgctatgtataataggtgaagagtatacgaggaagcataacaacctaacagaaaacagatttaactaactaaccaatattgacagttggtttttaattacaattgttactaacttcctcaacatgccctctcaaggtgttcgggaagtattccatggaaagcttcctacacaaaaaattgaatttaggaaaggttagagccttggtaaatatgtctgcaggttgttcttcaaagggagtataagatacttcaatttgcttgttcagaatcaaatctcgaacataatgaacatccatctccatgtgctttgttcttgagtgaaagacagggttggaggctaacatttgagctccctgattatcacaccagagcttaggtttttgaggtaagctaatttcaagttcatgtaggagggaagtgatccatactaatttttttgcagtggtggataaagccctttattaagattcagtgctggatttggacactgcttttgcttccttgatgcccatgtaataaggttccctcttagcaaaacacaaaagccagtgatagattttctatcaataatgtcacaggcccaatcagcatctgagaaccccttaagggagagccatttagctggtttaaaaaccaaacccctagacattgtaccatgaatgtatctgagaaccctcttgcaggcacaccaatgatttgttatgggagattgcatgtactgactgagtttattgataacaaaagatagatcaggtctagtaagtgtcaaatattgaagagcccttatagtgctactataaagagtagggtctgagaatggctcactagttgcaatagataatttgtaactagggctcataggagtggtgcaagtcttggagtcaagcatatttgtttttcttaggatgtcatgagcatatttggcttgacatagatgaagagtagaccctgtcttgacacttcaaaacttaagaaataattgactggtccaagaaccttaagtgcaaactgttgatgaagattgaggataagctgttgaatgctattagagtttgcaccagtgacaagaatatcgtcaacataaacaagcactatgatcaactgactgtcttgattttgataaaataaggagttgtcaaagatagagttggtgaaatccccaagtttccaaagcatgtttgagcttgtcatatcaagctcttggtgcttgcttgagcccatagatggctttgtgaagtttatagacatgattgggaaattggtcatcaacatatccttgtggttgagacatgtaaagtttgtttgagatcaccattcaagaaggcattgttaacatccatttgttgaattcgccagctaaaggtgacagcaatagtgaatataattcttatggtgctggccttgaccacaggactgaaagtgtcaaaataatcaactccagggatctgttggaacccttttgcaactaatcgagctttaaacttatccaaggagccatcgtccttgagcttctttttatagacccacttgttttcaactatgtgcatatcatttgtatacgcgacaagagtccatgtgccatttcttttcagagcataatattcattgtccatagcttagctccatcttagagtttgtaaggcctgtttcacacttttaggttcacaaaaatcaacattagtagtagttagttcagctcccaatactttgggtttggtgatgccacttttggatctagtttgcataggatacaagttagggagagattgagggattgtggatgtggaagtggcaggaggatgagttgcagtagggggcaggattaatacttgtgaatgttgaactggaggtggtgctgggaatattgtggcctaaaaatagtgggtagatgggatgtgggaaaccaggtgggggagtgtgagagtgaagtgttgtacctggactggtg

SEQ ID NO: 22163 - DNA, 2039 bp, Cannabis sativa
caggtgcaaatagagatcatgttgcaaggtcctcttgtatctaaacaacaagctgacttgctaattgctccccacactagagaagaggtcaaacaaattatgtttgacataccaggcatcaaggccccgggactgaacgtatttgaaagttttttcttccaagataattgggaaatagttggagaagatacaactgcagccatcatgtcattcttgaattttgggcaaatgctttaggagattaactctacggtattaactcttgtacctaaagttaaatgtcctaatgttgtggccaaatataggccaattgcttgttgcaatgtagtatacaaagcatcaaccaaattaataagcaacaaccaaattaatatgttctcgtctcaagcatatcttacctgaaatcattgctcagaatcaagaagggtttattaaagggaggtcaatagctcataacattatggtgtaccaggatttagtgaggcattatggaaggaaatcgacaaaagctaactgtatgatcaagcttgatcttcagaaagcttatgatacgatcgaatgggactttatagaagaaatgcttcatgtcttccaattaccaggcaaatttatccaactaataatgacttgcattagtacacctcggttctctttgcttttcaatggttcacttcatggtttttttgaagcaagaagaggacttaggcagggagatccgatgtctccccttctttttgtgttaggcctagagtacttgtctaggataatgaaaaaagtaagggagaaagagggatttggatatcatgaacgatactccggattgaagttgaatcatttatcctttacagatgatgtcttattattctgcaaaggagactttaaaaacatctattttatgcttcaaggcttgaagttgttctcgaagacctcaggcctaaatcctaatccaagcaagtcggtagtttattgtagtggaatggatcccaaagaagttcaaagagtgattgatgcatcgattgggtattcccatatgtgcaaagaagatctcagccaaggaatgcagcatcctagttgaaaaaatggcagccaagattataacttggagttcgagaaatctttcttttgcaggaagggcaatgttgatcaactcagtacttctcacaatacattcttactagagtcaaattatggtgctccctaaaaagattctaaaggaaattatagcagtatgtagagcattcttatggaaaagtcaagcctcatctattggagctggatctgtaacatgggacaacatgtgtaatgcaaaaagtgaaggtggaatgggattcaaaaacataatggagtggaacaaagcagcaatggtcaagtatgtatgggcaataacaacaaagaaggataacatatgggtgcatgatgtttacataaaaggagaatcctagtgggattacaaaccccatccacaaagcagctggtactagaaaaagatagttggtatcaaagaataggtaaaaacactttttgatacttctcaatttctgaatgaaaaatatattattgccaaagggtatcagttgtttcataactctagagatagagttacatggcataatcaagtttgggggagattcaatcttcccaaacacagttttatctactagttagccattcaatacagtttgaaaactaaagaaagattacacagattcaatgtaattgatgatgctgattgtgtgttttgtcaagcaaatgaggaaacaatggatttgttctttcaatgtccatttagcctacaatgctttcagcggctgaaagtttggctcgactggagttcttcttcaagctcgttggagaaagcaacaagatggattgaaagagcaaaggtctctcggttcaaaaagaaggtatatgttgtgctgctgctctagcttctttattgtacaatatttggagagctagaaatggaaaaatatggcaagaggaaaatgtaaatatagaatattttataacacaaagattcaaataacttatttcacaca

SEQ ID NO: 22164 - DNA, 7365 bp, Cannabis sativa
agagtgaaggagtgagtgattacttctttactttctttgtttgtgatgtttgtccacatgtaaccaaattagatcccaagtcattaaagtgtgtattctttggttattctcgtcttcagaaatggtataggtattattgttccaatcttaacaaatatcttatttctattgatgttacttttgtagaaaatacaccttattatttatcttcacccactctttctcgtcagggggaggatgatgatttgttagtatattttgtcacatcctttgtgcctgatatatgttttgacaaagtctcttgtgttgggattttatgccctaagtaaaatttatttcaatataattttatttactaattaataaaagattaaaaaccattttatgtttcatagttcacataattactttcatgattttatgtttaatatgtaaattttgttaaatctcgaacatatagttactcgtgattatattgttgtctacatgtggaaagtaatcataattatatgcttcaaattatttagtcccacaatttatcagtgtactgtatttatactgacatgataattagcgatatattttacttacagttatataagtggaatgttacatcggactagtccgacattgatagtgaaaaagatatcacaaacttacaattatgtcttttctaagtaaatgtcacttagttgatcttagatcaatttatctcaattctgagatgattaagttctaacttaattgtactatacgggttctttgacttgttcaataccaacttacccgtaggactaggccatacttacatcttgggaattcgtagtggaattgaatgggagcgttaatcatagatgtagaatctatagcttctataactattcagaagtgaagcgataatttcttttgagcttggctaaatgcgataaatgatagagcgctcatttcaataattatattagtttgctgatatatcatttacaagtagctaagtattttaagaataaaatacattagaaggtaaaataataaatttatccctactcgttgtaaaccgtctatagatgatcattgattctttagattgtaataatagataatttatagggtatctatatttgatatatagagtgttctatttaatcaagagtgcaatttcaaatctataatagaatctagaggaattaataagctaagaaatttacttagtaaattttagatctacttattaggtgcttggttacatgggcttatggtccccacattgtctggaataatgtcatcttatagactcaattaattgtttaataagtcaataagaatttgaaactagactatgtcttatttgagaatttttaccaagtttgggccatttgagaagaaaagaaaaatatggtttattttttgattaagacactttttgggtctaattaataaatataaatatatttaaattatattttattttataattattaaactaaaattcgtttttaaataattataagagattagtggtaaaataggaaaaaaaacacacattgttccattgcatgaaataaagtggcaaaaatataaatctatggtcaatgaggaattcaaccctagagtgtatttcaatccaagtctactattctaagtccatctcatctaaagctaaccctaagtgaaggctatataaagtaggtgatgaaagagagcttcctaatgctaaaaaaatcctaattctatgttagaaaatctctcttcttcttctttctctaatttgaaaattactatagcctatttctctctcaaatgtgttacaaaggtgaattgagtatcaactcacactattcacagtgatactcaaacctttgggaaagattgtgaagaactatcactttttgggttaaggaatgagatccacgttcaatacttgttagtactctgcaacagaaaggaacaagggatagagtaatgaatggaaagagacatttaagtttgctacaactaatttaagatttcttgatcttttacatgtttatttatcgttttagcatttttatattttaggatgttagattatagatttataatcaaacatacatgattagtgaattgagatcctactaaaataagtttcaacatctcattccttcgccgccaccaccagcactcctaagcctcctatagtgtactccaggtttccaactcttccacctcccgtttcatgtcctgcacctacatttttcgtcatcagattcaaaactcaatgatgatcttccttttgcactacgtaaaggtaaacataaaatgtacatatctcatttcttcttttgtttcttataatcatctttcctcttcgtcttgctcttttattgcttctcttggttctatcactattcctaaactattcacgaagccatgtctcattgtggttggtttatttcaatgatagaagagatgaatgctttagttgcaaatggtacttgggactttgttaatttaccttcaggaaaattggccatatgatgcaaatgggtttttacggttaaagtcaatcctgatggaatagttgctcgcttaaaggcatgtcttcttgccaaaggttatgctcaaacttatggagtggactattgtgatactttttctcccattgccaaactgacacatgttcgattgtttatttctatggcaactaatcatcattggcctttgtatcagcttgatattaaaaatacttttcttcatggagatctggaggaagaaatgtatatggagtaatctcttaggtttgtttgctcaggcatatttagtcaggctgttgagaaatttagtttgttgaaaaaataagtcagatcattctgtgtgttataaaagatcatttgctggtatcattttgttagttaagtatgtggatgatattgttattataggagacgatactagaggcatctcatcccttaaatcattccttcatacccagttttacatgaaagatttgagggtgctaaagtatattttgggagttgaagtcattcagagtaaacaaggtattttttctatcttaaaggaagcatgcacttgatttgttaactgagacaggaaaaatgggagcaaaaccttgtagaactctaatgaatcctgttgtgcaccttacaaaagatggtgaaccatttgaagaccataaaaaagtattgcagggtagttggaactttgaattatcttattgtgactcgttcagttattgcattctctgttagtgtagtcagtcagtttatgtcatctccaacaattcatcattaggcagtgttagagcaaattttgtgttatttgaaaggagcacctgaaagaggcatcgtgtacactaatcatgggaacactcatattgagtgtttctcatatgcaaattgggcaggttccaaggtatgtagatagaagatccaattcaggttactatatttttgttggagggaatttggttttggaagagtaaaaattagaatgttgtgtcaagatttagtgcagagtcagaatatagagctatggcacaatctgtgtgtgaggtgatatggatatatcaactattagctgaagtggaactcaataattcattaccaacaagattgtggcgtgataatcaagttactcttcatattgcatctaatcctgtgttccatgacgagataaagaacatcaaaattgattgtcattttgtttgtaaaaagatttaacaaggtttaatttctacaagatatgtgaagactagagagcaaccaggggacatcttcaaaaaatctcttaatggggtgtgggttaattattttttaacaagcttggcatgatcaacatatatgctccagcttgaggagaagtgttagatatgtatatattagctagaaattaggctaatcagtttctttaattctcttaggtttctaatagattgcctaagttgtgtataaatataagttattttctcaatggaataaacaagtaaattagtcttttcactattatttacacgacccttcaaaaccgatagaaattccttgcgagtgtttataattgacaaaaattctaaactatagtcgccagtttaaaacagttacttaatttttttcctactggtgctaaaaaaattgattttgtgatcgacaaaaattccctattttgtaatagtgttttcatgctcgaaacactttcgattgaatttcaagctccattttcgtagaaaacattccaagaaacacgtacaaaaataaataatccttagcaaaataaatttcccttaagaaccatttctccccaaatccaagcctttcatactcgaaaaaattaaaataaaactttgagtatctccacacatacaattcatacaccatctataataatcaaaataaaaattatggattttaagaaaattgagggtatgaaaaaaaaaaaaactttgggaaaagatactaattaaataaaactgattattttgaaccttaaaatcaaatgatcaagctcatgataccaattattaaaaattatgttgagcatgaactaatatttttgaaaacaacatcaaccaatatttaatcaaagattaatcaataaatcattctgctcaattgtttcatatttaatcgtattaaattagatataagttaaatgtttttaccttgtaataatttctactaacccttatgctcagctttataatctttcgatttcaacgatctacacaacaaaaggacaaagagaatttgggtattatgaacactattctaacattctcttcacgcacacatggatgtacactttttctcaccacatctaataagggcataatccttatttaagaagtaaaaattggcttattagacctagatgtccaatataattcagaattaattgtcttagcctaatgtactcaaagatattttagagcgtgtctatgggctccaagcatgttagtacgttatgtccatattatagtctgatgataatatatgcaataccggttatacagttatccttatacgctaatgttgatacttagagagaaatatattaattcactacaaataaaatgtattttaggagtgaaattaaggatttttatgggtaaagattacgttattacatataaaatattttaacaactttgacatgctatcatatcaagtcgacctaatgattttcaatgagtggtacttactcataaagacatataaatcccatcttcatcctcaaactatacttgtaaaaaatattatgagatataaatatatgtggcacatatatataaatatatataattgtagtgatgggttaaaatattatttgtgaacacatatgcataatatatatgttattataaagtattatacaaaagtaaataattaattatattattagtattaaagaatattaaattattatgaaaataatatgtaatttgatgagggttaaaattataaatacccaaaactgattctataagccgtttataaataagaagtggttcctttgtattctctcattccccataaaaaaaatatataaaaaatagtatttttttagaatatcaaaaccttcaatgaaatcgccatcaacaatttcagtttagtattttcgttcatatttcatattcatctttttctttcattaagtaaaggatgtatagaaatatgatttatgatttttatattaacacactcttagtaaaataattaagttttgggatcatggttaaatagcacaactgaagatgcatgcatgatgacacaacagtgtagaaattaggaatcttcatgcacatccacctagcatgtaatttgccacgagactaaattaacattattttctcttccagttcaattgtcaatgctctcattaataaaaaattagtacattatcagttgaatctcatttcaacaattgagatttattgaccactttaactaaacaattttcttgtcctacaaatataatatttaacatgtatattgttatgttctgtgcatattcactataatcccatgaaatttctagattactaaaaaagtaaatgctagtgtttgcccactctctgtagatatattcatttaatataagcacacaaagtatttagacttaccttttgaatgttccttataattgtaggcccattgttttgcactactttcacacatctgagttgaaaaaaaaaaaaaaataaacaaacaaatctttgttagaatacttatatgtaaagaggcctatgttgaatagcaattaaacccacttaatatatagtgaaagcggtaagccttgttcagcattggctttcatatctttgactgagaaatagacacgaaaagagtttattgtagctttaattttctttgcaaagtagcacagggttactttctcataaatacagtataaacctttgggtgcttgtactcttgtattataaatatcagaatatatagttgtaatctttttttttttttcgaaatcagtagtgtattccttactccaataagcttttacatacttaacaacacctttactataaaggtctgaataagcttttaatctaatacaatatatgtgtatatatgtatttataattcaatgtaccattttaagtctcctattgaaacttttttgggctatacactatggattctatttttacatgcaattttcactttctgtacaatatttttttggattatcatgggagtgaagccagaattttttgtttccagtcctccataattgatacaccagcgtcgccgggactgctgaaaacaccttcttttgaaaacctgttactttcttccttcctatctgtcgaaccagatcaactagtcgattggcagggatcttccacaccaaacactgtttaacctattgaagacagtcattggagaatggacactcaaagaataaatgatcaattgtttcatctcccaagttacacaacaaacaacaagtgttgggtacaatgttaaatcaaatcagtctttctttggtgttcaatttgttttgaattgcaagccacattacaaaactatgcttcagagtgtttaatcttccccacacttctttactccaatttactcgacctggcagcaggtaaatctgtaattttgtaattgctttgggtgaagaaagtaggattcataagtgttaggactataccttttattactactatcttcttccaataccaactgccttgttggggggccgagtaactccaccaatctgcctctttgatgtatacactgtgtacccacttgacccatagattatcctctttagttgcaacagtccaaacatactcgaacatcgttgctttgttccactcagctacattcttgaagtcaatgtctccag

SEQ ID NO: 22165 - DNA, 2234 bp, Cannabis sativa
ttttttttttttgaaataatcgaaagctaaatatatctatgttttaaaaaatcccatcaattagaaaagcattattacaaaaattattaactccaactgtaatttccttttaagaaagaatcttaaatatgaatttaagtaaagaataaataagcgggtgaaggacaaatataaatatatttataaatttcatcaaaataaaaattatatatttataaattaaatatgatacttacgcgcaacgcatggtcgtacgtataccaaaaacgacaatttggcgaacgtgcaggccatgcacttttacacaaagaaatcttcacttcatttattattttccaattatccatataaattaataataataataataataattaaaataaagaatattcatattcttctctgcgtgtatataaactcatggattcaatgaacgaatttttgctacaattataaaacctctggctctttctcccaaaataaaagaaaatatagtatgagatgaggtctaaaaactcttatattaatattaataacaataataatactaagtcctactttggcaagcatattagacccttcattctcttttttctctctctagctctcttcctcctattagccttctcctgtccccagaaaacccccaccactaataactatattttctccactacaacaaggcttgatcttaatcaacaacaacaccatcatcacgaggacaatatcgtaatttcgaataaatatccggagtggttcgaaataatcgccgagaaactaaatacgactcgtaagattaagctcggtttggtcaatttagatcatgaagaacttgacgacggcttacgtggcctgcatggattggccgacgtggtcaccgtacggttcgacactctatccggttcggaccggccgaactgggacgatttttacccggagtggatcgacgagaaccagacgtggggtacacccaagtgcccggaaattccactcccgtcgttgttggagtcagcgtacgacgatatagatgttgtcgtttcggcggtcccgtgtgggaccccaccgcgtgacgtgttcgagcttcaggtgaatttggtggtggctaatctagcggtcaggagtagtagtagtagaagtggttctgatcggacggtgtacgttgtgtttgtggggtcctgtgggcccatgttggagatttttcggtgtgatgatttgatgagtcagcagagaggggagttttgggtgtataagcctgagatgagtaggcttaagcagaaagtgtctatgccttttgggtcttgccaacttgttcctcctcctaattatcaccaaactggtaaggtcttgtttgttacaattaataatctctctactatactctaattctaacaatctcattttcctattatatgttatatttcataaatttgggtgagatactagtaaaagaaatttgctggaactatggaattaggattcttttttcaccaaacgtttaacctacttaagattttgcaaaaagaagctgttttaatttatgtttaatttaaaaaaaaaaattatttaattattactatattatatgcaatttgagcaaataatattcaacttgtcagctctcttttaaagaccaaatcaatgtactttctcattctaaattgattttcatttcttggctagttttatattgaatttatatgaatgaattaatggttatgaaaaagcctaaccataatttgaatttggtataatagctttgacctgctttattttgaacctatatctatctatatgacaataattttggtgtaactaccaagattattgtgaattatttgttctctggcaattttaaatatttcatgtacaatattcttacgtaatattagttattgattatttcaaacaaataatacaaaattgtacctataaattataattagctcgaacaagtcttaattaagcagtagtagcactaatgtggcatcgcgaacgctctcatcgtataaattaatgtataaattaatacgtacacgttagttgaaaagtccatatgtcaccctgcacatatgctaacatttgttaattttataaacttcttattattgtttttgtcaatagctacattattggtttacaataatttaatttccaactaacgtgaatgatactaatagatggtaaagttttcaactatcttactttctcatcatcacattaggcttttttttttt

SEQ ID NO: 22166 - DNA, 3255 bp, Cannabis sativa
aataaaaataaaaataaacctatcacctgtacatttctgggaaacaaatatcaccagaggaacactgctaatgattagaactagacaataaaaccctgccaaaatctaaggatcttagggttgaacaaaactaacaaggttactggtgtgaaccaaaaattttcaaaatcccatcactgaggaagagaggttgagcaaaggctccaaagcacttggagcaaactttctagcaaacaaataacaaatagatgttgtccccaaattgtattggcagggggttcccttactccttatcgattgtataaattctttggttatattagcctctccatatgttaccgggtgagggcctccaattgaccagtcaacccaggtcacagtacgattagaattcagtgagccatgaaacatgttgataaaagttggtaagtaatgctcatcaggataacaagcaggcaaacaatatttcttgaaaagggtatagtacttggtatctgagacgatatatacagctagagcacgattaagttcaaaccattgagacccttttcgccattgataaagtttaatatcaggaagcattctgcggctataacgaccacgtccataacgggtaggctcatcataggactcaacaaagctatgagctgaccgaattagatatttgtagacagttgagaagttatagacagggatgcaactttcagaaacaagaacaaaccgctcatttgagaaatcaagcaaggcattggctaaaagacgcttctctgcatcagccagtgttactgttccccaatgaactttctgcaaaatattggaagaaaaattcatgatataatatagtggatatgaagaaagaagaaaagaaaaaataaatgaacgagttgctcatttgcaaacaataaattgcgagggaaaaaagcagttacaaagttaatataaatacaaatgaagagaaagaatagcaagggtaaaattatctgtcttcaatgagagaattatttgacttgggacgagaaaaactttccaacatactttctaattacttagtttgaataggaacgatcattttgtagaaactcttctcttcccttataggtaataattagagaagaaaaacagggttgaaaagaagcttaactaaactaagtaaattgcacgaaatcctatgaactcagtcatggctaataagccaggatcaaggagacaaatcattttgttgaaagttaaaaagcaaaactgaagaaagcatttatggacatatactttatcttgacattctctgagaacaatgaagccaataatgttcagacataaaacaatcagataaaaacttgcatgtcatactattaaactcaaaagaatcaggtaaaggactaaaggcagatttcaatacatacgttccagattgagaataaatcttttctgataaattgtatctaattcgggatatttttcgaattttattcatttttccaaattagcatcatggtatttaaacttgatattttttatttttaataaaaacttaaaatgttttgtttagcccaaatagcactctcttcgaatttcaaatatatttaattgaatttcccaaaggttttgtgtgtttaattctaggaaaatatactacaagaaagatttacagttatttttaaaaaaaaaactttctgcaagagcaagtagaattaattcacaagctagtttctatcttatgtacggctaccttttctcatatcatcatctcaataaaagaaactagattagaactcttcaatttgttgcaggtattaaaagaaaaatttatgttgactattcaaaataccatttatgcaacagcaaaacatatcagtaaacataagaaactagaagctaagaaaataagtcatatatggttcatacctgacttggaatttctcgtccataaaagggagatgtactagaaacattgagcttaaaaccaggaacagcatgaacataaattgagaaaagtttctcatgcccctgaaaaaatttctcccacaatggcagcaatggcaatggccctcttgtcaaaaacataaatgccactttaggaactctattgtagggaaactcttctttggttggcaccattgaagctctccaaaatagctcatcatcggacatataatgtgttatgttcttcggtctaacaaacgaattcatgctcaaacaatcctcaaccttgttacaatccttcacaacagtacagttaccattcttaacagcctcaggagcatcagcagagaaatgattgataaaagaataaatctctgcctttgaaacaacatgctgactgaaatgcgaggtagttactaatccgaaaaccacaccagctacgaaaacaaccaaaaatgagagaatttgcacgagtttaagtaaacccatgtgcttctcactgtcatccttgtctctacttctcggcattcctttcatcctaatgtttctaataccttctttcactatttttctataccaaatatcacaatacttcagtcccttaatcataaaatttaaactcgttcaactgagacaaaagcaaatacatgaatatttattatctaatcaaaagcttcacaatttcaggaaaatattaaataaatgaatgaaatttaaacaaacccaaataataaatcctgaaactcaagatatcatccattaaagcaacccaaaataacaataataaatatattatatggaatttttacctcaaatgacgcggctgaacattcaaatggtcccttttcggctttttaaatattatttccgaattcaatgggcagaaagataaatgaattggctatcggggatgaaattaaatacaaaatttgaaagcaaaaaacgaatggatcacgatgtattctctccctgggtgtaggttggaggtaggtgtaggaaagagatggagagagaaaaaaacgtgcccagaaaaaataatatataaataaataaataagttgtttcgtgcgaatgaaataattaatcagattgaggggtgcgaaggtcggatcaggaggtggggttctccattccaaaccaaaactctgtttagagagaaagagaagatgaatgaaagaaacatagagttgacatagaaaattggaaggaatgtaatgtgagtttaattaaaaagggtcaaatagaattgaggattggccgttttgaagtggaaacggaaacggttatggtttagaataagtagtttcccaatcaaaccccccaaaacactcgtac

SEQ ID NO: 22167 - DNA, 7695 bp, Cannabis sativa
  modified_base (1129)..(1133): a, c, t, g, unknown or other
tgcttttcttactgagtctgtcgactcacagttattgtatgtatgtatgtgtaggtaagggaaaggctaaggctgagtagctgtgagttcgaggagatgaagattgtacatgtcaaggcggttagacctagagcgtacgatctttgggacaactagttgtattttgtatagtcactagacaaatacttttgtatcgaatactttgtaactcaattataaatattttactcacaggatcccgattatatatatgttatttattttgatatttataagaatttaaacaaagttttaattacttacgatttttagtaaactcgtagattagcaacgagttgcatagttaatataaaatcatgataacatacctaaactagtagggtgtaacatctagactttattctttgtctcataagtcaatacaacctaaaggggagcaggctattacaatcatcatggggccaaacctctagaaattctagtgttctctttatttacttttgtttctttctattatttattttatctaatcactttattttgactcattgtcgttggctagaagcgaggtcaacattttggtgctttcattgagagcagaaacacaagtttttgtcttaaagtcttgacaggttataggatggttgtgactcatgggagaattcaaactgatctagtcgactgacggtgggccatggagtgatttcccctctagccaagtttactccaagcacgtaggaaactgggaataccaggttagcagccaaacagacatatcctagcgctgaaatcccatccaccacaaacacttaaagatcgattggagatgatattgagcttcaaaacctgtaagttgtgctaggattaatgcaaggccacaataacatgttgcaccatgattagcaaaatcttcgaacaactatcagttcatagagttgagggatcgagagatggaggtcatgagagctcagagctcaataggcagccattgacaaccgttccaggtaggaacggagggacttaagccattgtgtaggcttaagccctcactcaatttaataatatataaaaaaaaatttatattacatatatgtatctaaatttttgtttattataaatgtgtattaannnnncactcaatttgttcctacccaattttaaaggtaataccactaaaatttaacaccaaattaattcaaaaaaaaaaaaacaatcaacacttttttttttctaagcacatatgtaacactctatttaacatgtttttttttttttttatttcatttcaatttttattcaagcccttgaaaaagaaaatattcaagccctcactgaaccgaatttctggctccgtcactggttccaggcaggctactatactaatgagaagggcctaccaagttaccggtcagcaaccagtgccttattctagcatccccttgggatctcaaaatgggttagaagagtatgtagcttatcataccacaaagacttaaaccggtcaaccatccaatccaaggccacaagttaaaattgtgggccaaacggtaaacaatcagatcttacgaaaccaccccttacgaggaggtactcagctaaacaaccatactcagatagaggtatcaggccaacctctcaaccaagttggtcagacccaaagacctcttaatgcatcgatctttgatcaactagataccgtacatgactttagaaatgatctgcataacaaaaggggactggacgggctaaacattctaccaaccgtccagccaaataactatgtcccaaatctagttctaagagatcctaatgtgacacaagttggtaaacaggctggccaagttcatccacttctgcaagcacaaatagatcaatttaaaaggctcgtacaaaacctgacggacccaaaactcacagacttgaccaggtaagaggatcacccttctcaccaaaaatcaatgcttttgacctacgttccaaatgccagtatggaagatgtatacaggaaaagaggatcctttatctcacttaaaatactttgagatgcaaatgaatttgcaaggagtacgaggtaatgtacgatgcaaaatgtttccagccacactagcagaggccgcccaacaatggtatttcaagctgcctccaagaaagctcaattcatggaattctttctcatctgaattccatgcacaatttttctcctcttgtcagcttcccttgcatctagaagacctggtagaagtgaaataaatgccaagagaacctctaagggcttatattattagatttatgactgaagcaacgaaaattaaggggttgacttagaaaggaaggttggccgaaatactgggatgtattgaacctctaggagaactatagaataatattaagagattaaccatgggatcaatggtagaatttatagattgagcagatgggttaattaaacttgaagaggtagcatgacttgttaatactgagatgtattgaacctctaggagaaatatgaaatgatattaagatattaaccatgggatcaacggtagaatttctagattgagcaggtgggttcattaaacttgaagaggtagtatgacttgtaaatacggttggacagaagaaaaatcagcaacacaccactacaatccactcaaaattcatagcatcccaacagttggaatgaaagtggaaacagatcaaacaatggcaatagacaaggcaatgcgaagaaaagcaagttcaacggcaactccgaacaatatcctaggtagaatgcctcgaagttcatttccttttcagtcctaacggaagacatagaaacgatctatgcgactacctagtctatggtaccatataaacaaccctctcccatgaaaaaggacatgagcaaatgagacccaaccaagttctattgttttcatgcagactacaaccatgacacaaatgaatacaataatatgaagtagaaaatcaaattcctaatcagaaaaaacaacctgcacttacaaaaatatgtcaaggcaaccaagaacaaagggccacccaagcagacactaactgaaactagttattgcctccaccagtggacatgcctttttaggttatcatttggggccctcaccttgctggagactctgacaaagctagagaaaagtatgtcggagacttgcaatatgaacaaaaggatgcaatcctggccatgaaagaaagaaaacctaaattaccacgtgttggagaaccaatcatcacattcatcaaagccaactctagccatgtcatttttccacccaacgaccctttggttgttgaagtgcagatttcaaacaaactggtggcacagagtatggtaaacaatggagcttccttaaatattctattcaaaacaacatatgaaaaaatggggctccagcttaaagatttggttccttgcactcaactagtctaaaaattctccgatcaaagcgtagcaccacttggacagatttgtctaccgcttacagtaggaaaagctctaatgagcactacagtaatgatacaattcttagtgaggaaggcttgaaggcttgatgaagatgaaatcgtgagatttttctctaaattctatagcgtgtgggataagaaggaaagtgtaaagatttggttctcagctcacttatttatagttgatttcaatttcctaatgagagtcttttaaatttgacacattcaaaggaagaggtaaataataagtaaaatatataattatatctttttccttctcctttttaaagaaatattttgatattcctatacaactaggaataggaatacaaaataaaaaggtaacaacaattcctaatgctattaaaattaaggaaaaattagagaatattaaaggaaagagataaatgataagtaaaaggccaaaagtcttttctcttcttcctttttctctctaattttgaatggcataatcaaagaggattaggattccaatctaattaatccttatgccataagaaaaaataagaaattttcaaattgtaaaagaaatagataaaagataagtgaaaaaaataagatattttctctttttctttgttaattaatttttgtaatttccaaggactaagaaaaagtttttaaagtcctaattcaattgggaatgcttgaagaatagatagaagtgcctaagaatgtaaaaattaatgcccatctggtagtttcaaacgaaacggaaacgggctcggttcacgtcatcaagtcaactctacacaagtgtaaagttgacttggagggaatatgttaacccggaaactttccctgatgatgtgaacatcaatgtttgacacctggcatgaaggattgcctcacagagttgactagactcgagtcatagcagttgacctaggaggggaccctagccgtgcacctaggttgacttcaggatctctaggacgaaagttcagactttaataacttgaatccaacccactatcttttagtgttttgtattttgaagacatagagcaacctaatccaaccatcaaaatctaaaatgacatgaacttgcaacctagaagcgaacctgagcacttagggtttcacccggcgcccatgttgacatcctcaactagggatttagattttgggaccttctaagtgcaaaagggtcaaaaattgaattgggacatcaactagacataccatggacatatttgaggcatcagaattagaatcaaaggaagttgatttttgagcacccggggcctcgagcacccaatgccaaggtttacattctatcaatccgggcaccttccaagtatcatatcaaagattcaacttttgaatcatctttgtcttcatcaaaaatggagaaataggtccttttagaagaaaaataaaaattcctaggtacaaataatagggcctagtgcccatttcacaactggagcaagccatgtgcccaagttgatattttgtcaatctaggccattgaaaatggagttttttagaaattctttcgagcatcttttatgtttttagaatatattgagattcaactatttttgggggcaaaatagaatttttggaggggcaaaagggggacccaatgcaaaggttgacacctggggtttggcctagcgtccaaggtgatatattttcaaccctatcaagttcagaaaaaagcattctgggcatttttttcgtcatcataaataacaaaaattcaagaaaactcaaggagaaaaccacaatcttaagtccctagaaacaaggcccagtgctcaggttgacctagggttggacccagcacccatgttgacaatcaacctggggagttgcctttaattactcaaatgccaaatctaatgcaaccattgagtccggaatggtcaaaaatggggtaggagacctcatcctcaagttcaaaagccttggatgtatcaaaacaaaatcataggagctcgggagtaccaaccgcttaagttgacaaaaggcctggtgcgctgggttctgcttatccgaatctgatgtcgttttttctgtccatctagtttttcacagttacaatgatatatgaagtcaaagaaatcaaatacataactttgcatttcacatttccagctcacccagaaatgaagagttttgagtcttccattttcccataatagcaacatctccaagaactgatgactagcttcgctagaacacataaatgggctaagtgatgtcaaaatattacttattaggcatattaaagtacttcctttggatgtttttacacttaccagtgtcttggttgacgtcatatgtcaacctggtcgctgggatgtcaatttggtcactggatatcaacctgggcactaggtcatgaacttccttcaataaaacagtcataattcactcaatttttgatccaattgatgcgattcaacttacattttgaagataattcttacactacagacgtagttctaaaattatcatcatcaaaattcacccgaagggagctacgacaataagctctaggttactcacaataggactcgcggatctctaaaagatggccatcatcaccaagagctaatttttaccgttagatcatcttcaactgtcaaaaacatcttatttgtatttattttcctatttttgtgggcatcttcactcacctataaaagaaaggagagcttcataagctcatttttcacatttagaaaactactaaacagatttgagcttctctctctagattttctctctctagaatttggaggttcttacacttagtctattactgtaattaccatctcatgagaaataaaaactcgaagtagacgtagctccattactatcgcgatatagggagtgaactagcataaatatgctgtgtctctcttaattacttaagttcttttttattctcgccaatctagcaagcgggtgtggcttagaaatttagtctagatttttgagtcaatattttatgccggtaatggaagatctaaacttgtcaaaaataaccatttttatttcaaaatatcaagtattatatgtcaaattaataggaacacctgttaaagatcctactaaaaaacaaaattaaagtattgaacaaagttcattttttgaaccaaaacaatacaaaagtaatgacaatacagatgacattatttctacaaaaggcacttctacgattttcatggcagcttgaacacttagaaactcaaacactaggagtggtatcatagaagctctcacttttgggcaactttgtaaggtaaggctgctcatttacttctcatatttctaacctagaaattattaatatttcttgttccaattgatgaatttttctcaacatgtcaggaatcataacattggcacaatcacacataggaggatcgatcctttcctaaaactcacacccaccgctgtcagccaagaaacattcgcaaagtacaatgaagaaaaaaccaggaaagaaaaaggaaaaaagaaagagaagaagaggactcacgtgacctaaagggcactttgcaaatctttttcctgggttcaaacttgtccatgaggtgaaattttttagaattttaggctcctcacaatcgtaactcctccttcgaaccatcaccattttcttcttcttcgcacaataatggcacctgatttctttttctctcttcgaccctattttctctttgtttttgtttatttatttcaatttttttatttttatttatttatttttcttaattttcatcttaatcataatgagtaatgaaaattaattagtcccagatcggacatggagggtggcatatgacatgacaatgttaacttggtgtcatggaggagccatctggcaaataacagagccagaccaatgaaaggtgtacagagcaaaataattttgtaaattgcagagttcaaccctaatcatttcagtctagggggttgattgtcccaaactccaaagttcaaggaggttgagcgttaataactctaaaataaatagatactcgaataattgagatttaaattttatataatttatatttgctctataagccacataattaaaataaaactgtaatgaatatgttaaaaaaaaggatagtagcggctaaaccacatgaactttacggtttgtaacagttaaccacaaaaatcgaaattttggcggcaaaactacctaaactcccattctatttt

SEQ ID NO: 22168 - DNA, 3114 bp, Cannabis sativa
  modified_base (76)..(77): a, c, t, g, unknown or other
ttttatgactaatacctttagctaaggactttttagtcacaacataagacaactaatttataattagtcacaactnntttacttttagtcacaagttttacataaaaacaaaatgaacattattataagagctattatatattatcctaaaaaaatttacataagagaatgttgtatatgataccgacggagtcagctacttattcttctagtaggggtaattttattttttcaggtgaaagagtatttgtgaaaaatataaattttataagaataaaaattaaaaataaagataaaactaaaagattttatgggtacaaaaattgaaatgtataaaaacataaataaaacatattaatttgatggggcataaatatttataaattaatttgtaaaaagctgaagtactgatgataattaataatcaataattagctagagatattatttattaaattaaaattaaaaactaaataataaaatttatagataacaataacctacccttggcattacataatagtacaactttctgcctcatcagaaatgctaaatgcaaatgggcacaagtacacctttttttcgtttttcaaaaggacacaagtatacctgcaattttatgatacagaaaattgatccatattcaaaatacaccatttttgtggtgttggtgttggacaattgtacactgtaaattctagtccatatataattaatgttgatgatcagtaaattttaccaggtgataaccagcggtataaattagacacgagtgcacattaacaaactgtaataactaactaacaaatagtcaaatcaacgaacacaattacacattaattatatataatttccaaatgtaggttcattatatatgaattaattaagattaaaaaggaaaacaaatgaacagccagccactacactacatgtatagaaaaatgatagaatgacattaatttgcggtacacaatgcctatatttgccaacttaattaaccaactttatataagtagtcctcaattcgaaggtctcaaccatagtttttcctctaaaaatctcaccctgctcgatagcagggggagggaaccctaaatatatatatatatatatagattttatatacaataactcaaatttctgtctcactctctttcccatggacgatcaacaaataccgtcaatgctatcagaaaacaacaacgaaaacaatcaaaataatgacggcctattattatcgaataataatgataaggtgaaggactctccgtctaattctacggccgtcaagaaacggaggggagcggtgcaactgatcaaggtggcgctgtacatgatccgacgtcgttctggaaaatccaagtcgacggttgacgtggcatcatcaggaggaagcctttggaattgcctagttggctccatgcgccctttgcatctccagagccacggcactccacgtcatcatcacgctgcaacccatgatcataaaaacaacgccgttataacgtcaccgatgtcccctggtgcctccagctcctactccaccgacgatgacacgagccgctacgcctctgcggccaatcttcaagccctcgacaccgagagccgctatgcctcagcggagaatcttcgggcgcttgatgatagtgaatgtgaagatgatcatggtcatgatgaaaatggtggagatgagatgattgatgccaaggctgaggagtttattgctcagttttaccaacagataaggcttcagcgcttgaactccatggatcgccgttacaatgagatgattcagaggtcaattggttgagattaattaatggtgatcctaattaatcaagagggacatcattttgaacgttacgtcggtttgtttttttctttcctatgcatgcatgcaaaaacatgcgtgcacgtcgagtttattactttattttattatttatatcatatttttggtcatttccttttgtttgtttcaaagatatatatggtaatttattaattgttcattgtgggtcaagagattcttgtcgattgcgtggagaaaaaccgaattcttgtctggggtcatggactgatcatgggctggtgtttgttgtttttgagaggaaaaattgtctttaattattttgtcatctttaatcatttgtaatatttatttttctatagtcaattttagtatcagttgggctttgcaatcaatagttgaacattttttgtactgttaaattaataaattcactgtttctagcctcactaatttttattaatttatttgcaatttaagtcattttaatgggggaaataaaatataaaaatgtctacttttatttgttttggttgaaatctcaagatttatttattttttttttccgaaaaggttaaattttaaaagagttggaagtacctaggccttcatatatagcagaattattagtataggttttttcattatttgggtaatggctatatcttaaaaagtacaataattaataatagaataataggatttgtcttctcaaactataaatcttatgtagttttgtctcttaaaaccattttttgttgcaaaagatttcctaactataaaatcagcctggagtttgcattctacttatttctataataatttgttttttttttaatcaagaataatctttctattaatcgaaacaagccattttacaactaaatagggattaatgcacccacaaacatcaaaacttaaacttttagcatttataagaaaaatccttcaaaaaactagaaagcttcctatcttgaacaagagacaatttaattttgaagttctctttaatatgcttctatctatatacattggaactatacatttttcttcaaaaacacacaagttccgattaaaccatatatcatagatggcactagctagtgtagcatagtagatttctattaataaacctctcaacctttgttcttagagccaatcaagaagcaactgatgaaaagaatttggccaaagccactcccccaaagattttcaatgaataagtgttcatgagactctagatcccattcacaaaccggacagtaggcactatcaatgggaacatgtttcttaacaagattgtc

SEQ ID NO: 22169 - DNA, 3360 bp, Cannabis sativa
  modified_base (3298)..(3310): a, c, t, g, unknown or other
atatatatactcaccaaagttctcaaggatagcgtctcataaacggggtcaacattgagaaaagctccataagtagtcttatcattatcttcattgagtgaggacctatcaaaataacaaaataataatataaaaagaaatgttaaaatttggtaataataagataatgatggcttgaaatcgaaagagagagaggtaattaattgacctgctttgatcactgcacataagcaccacatatttttcattacttttgaaaattctgaagaacactgctgtgtattcttctaatccttttgaagccaaaacatagagaccaaatggtcctaaaccacctttcactgatgcaccctttcggctacataacatttgtgggtctgtccaactggggtctaatttttctgccttctcaaatccactaactttaaatgaaacctctacatctgcctggaaaagtggccaaaaaatttaaaaaaaaaaggttattttttttttttaataataatttggtggagggaatcatggttagtactttaattttttttcccaataatttaaatttgaaataaaaaatatatatataataattaaacaacctgtagtggttggacatttgaaatttggagctttgatccacccttgagtaatttattagataaattgaccatgttaagtcttagtttttcgatttcgggaataggccattggatcaattgtttcccatatttgtctagccaaatagtccttggaattgcctgcaaaaccattttaatattattcacatgaaaagaagttaaaaagaaaaggtaaagttaagttacacctttaaattataacgagtcaactctattctttatcattctaacattgtaaccaaacaattatattatgaaataaatgtggaaattatagtatagtagctagtcatacctgaactccagaccatcccttcttgatatcatcattaacacttgaagattcattaacccaaccccacaaaatcctcctattcttgatatcatcaaaaaaggtttttgaagcataaaatttgccatagtcatatctcaaaccagaatagctatccacaaaacccttatccgggatatacttatccaaagcaaaattatacgtaccaatggtgtaataatcgtgcttagtgtcatctaaactgtacttaagaacatgcttaaccttgttgtcaatcacagacgtggcaaccccagcttggccatccacagacacaggaaagaaatcaggacattcccacattccagttcctttacctgaatgaagtgggtgtttggccttaacccagtaaacgaaatccttactcctgtaaaggatagctaatcctctgcggttcttcttacttccaataatgactctccacctcttatctgggcccaaccaagcagtggtggggtccctaaatgagctggcattgatttggttggcttgtgtgggagccataactgggttatgaggcaacttgacccattccctgaggaatgggtcggaaagattcttgggctcggcgtaattctgtacttgttggttttgggggttgattccggtatacaaaattaccggtttgccattggggagaattgtagctgagccagaccaacaaccgttaatatcggattcctgggatgggaatatggctgggtcatgtggggtccagtttacgaggtcttttgaggttgagtgggcccatacgatgtttccccaaacagctcctttcgggttgtattggtagaatagatggtatagtcccttgtataccattggtcctgtattaaacaaactctattataatcacaaacaggggtataactgtcaatacactttagctaagtcgtagtcgactagtcgtaatgttattcattcaaattttgaccatatatttattttccaaactctaaaattttcttatcaaaataattaacaggaagatggaaaaaaagatagaatactaaccattaggatctgagagtccaataaaagcaccaaagttgaaaaagaagccaaagaaaaacaattaattaaacccttattagtataataataaaaactaataaatatagatataaacaaagaagatgtaatggaaagaaattaatattaaaaataccgttgatccaattttgggggggttggaagtggtaagaggttctataaggttgatttggtggagtattctctgatgtttgaagatttctgtaaacatggtgtgaagcttggagctgaacaaggccatggctgaaaaccaaagccagaaagcatagaagccagggagaggagatggttgtaataattattgtatccatagtgatgtgtatatagtgggattttttagagaataatgatatgaattatgagagctccaactagctatttatagaggacttggacttggtacggtaattggtcaaacttattaaaaatcaatacacagataatatattattattaaagtatgaaaatgagacaattgtaatattgtgtggatcaaataccctttggccgtaaaagtgtcaaagaataataataaggtaattagaaagagtgaaagatccaggaaagtggtaaagacatgtgagtgagagtgagtgagagaaagagaatttaattataagtgaaaagaaaggctttaattaataaataattaattagtatatatatttatataaattaatagtatatatatattaacctgtaatttagagggaaaggaaagtccacatttcaatctaacttgtacatgggttttcatgattgcctcctcttgtttacttttcatgagattaaattaatacaaaaatttattttttaatttagggagagaaaataaaataataaaaatactactaataataatagtggctaatagaggctaaataataagaaagaaaattttaattgatacgactaatatttatgtacaattataaacaaccaacccaagtagtcttatttttatttctttgatgattgtttttgttttctccttcactgatcattcaatccagattttcttcagcaaacaagcattattgctccggcactgtcatggaagcagaaatcagatgttcatggtgggaaaaggtcaacttacttaaaaggaaagaccattgctgtgagttttaaaattgtggctttttaaggtaaaatttgcactttctttatcttggatctaattaatagaccgatccattagggtaatatattatatatatttggtatatctgatattaatttggttgatgttgacatgttgttgtgacagtcagtagtnnnnnnnnnnnnnaggggaaataccgggtaagttgtgcaatcccacatcgcctggggaaggtc

SEQ ID NO: 22170 - DNA, 4335 bp, Cannabis sativa
tggcaaaaagactattttgcccttacttaagccaaaaagcatccttaccatctaggggtattttggtcaaacctaatacctcgaataatcttgacatttccgatatctatttatattgacccactattactaaaatactaaaccataagaaaatgtgactctatcggctaaacgtcgcgttccaatgttgatgggcaaaaaatatgaaaaacatgaaatttcatatacaacatgaatatcacacctagaatttaaatatatctccataaatttataaatcataattcaaaatctaatttcagaattaagtcgtaattatctgctaattctcatactaaaattaagcgatttttacaattaacatgtcttgataaaaaaaacatgtcttgatacataagaactaacaaacaaataataaacttttgattttgtctatatagatgaggagattcataataataaaaggattcattacaattctaaatgggaatcaaatcattcttaattatatatatatttaaaattaattatacattattattattattaatttcttcttttttaaataaaatgaagaattttatttaaaagccaccaccaaacacactgacaaacataacactacactaggtcaattaaatttagtttagtttttagagtttatactataaaagtaagtacttagtggataatatattaaagaatatatgtaatgatcacttaattttagtatgagaattagctaataattagggtttaattaaaaagtagacatttaattataatttatgtaattatggagatatatttgaattctaggtgtgctatttatgttatatgtgaaatttcatatttttcatattttatgcccaataacagtagaacacgacgtttgatcgataaagtcactttttcttatggtttagtattttagtaatagtgaggcaatttagatagacgttgagaatgttgggaatatttgtggttttagatttgaccaaaatgcgtttaggtggcaaagttacttcttggtgaagtaaggacaaagtagtcttttgtcttttagtgatttagaggattaatattaaattattgaatttgatttcctatattgaattatattagataaaccaaaaattatttcttttacaaaattagaaaatttgaaaagattactctctctctaagtccctctctctcttgacctttaaggaaacccagtagaaactagggtttttaactctaattttcgggtgcttaagcgagatttctctaggaattttaaggattcaactcaaggtaagctcctacactcttttctctttgttttcttaagttttaagttaggtttgtagcttaatttctgggttaggattgttgtatgatctgattaggtttattggagttttttaatgtttgtgtttgatgattttagtaattctaaggagaatggggttcttgttgtggtgattgaataaagtttgagctttagaggtcaaacttttctctctcattgtggtttatgattttgaggttattgtttagttttgttgcttggattatgttccttatcctctttttaggtactttggaagatttggtatgatttgggattgaattgaggtgtttgtgaagtttttaggggttcttgtactgaaccggtcaaacgttttagtatggtcctgtagaactagtctacttgttccgcaccaggcagaccccatacaacccattttttggttggaaccggtctaccggttggggcaatttagggtatcctagatttttacgtttttacgatatttagggtattatcatgttatccatcgatagggaaacttttagtttttattttaagtccttgaaaagtgatttgtcatgtcactcaccatttgtacgaatattgtgacttagggctctctaaattgtcgagtagcagttcaactgaggttgattggcacacctgaatttgaaatcaaggtaagattagtataatgatatgcatatatgattacatgttaagcgtgcatgtttatgattgcctgttaggttacatgaaatagcgatatcaatatacatagagttgtattagatatcgatgaatgtatgtttggcataagtattaattgtctctatcacattcgtacgactagagtaccgagtataggctgaaattgtggtcaatagtataatcctataaacgttctacactcagtatcgcatgggacacggggatagggttatgattgggtgtataggtacctaattgtaatccaatttatatttatgttttgattatgcttttcttactgattttgtcaactcacagatattgtttacatgtgtaggtaagggcaaagctaaggctgaacaatagtgagtgcgagcggatgaatattgtacatgtcgaggctattagacttggagcgtatgatctttaggacagtaggttgtattttgtatagtcactaggcgacaacttttgtaacaaatatttttttatcacaattgtaaataatttaaatatgagatcccaactatataacatacatttaatttcgattaaagagtaattaagtaaggttttaattaatcaatattttaaacaaacccgctaattggcaacagattgtataattaatataaaatcacgataacacacctaaactagtagggtgttacaattcggtatcagagttgccaagttgtcttccgaagatcgtcacaacatgtacaatcatcatcagagataagctcgactcacggttcagtaagcctttattactttagtagtatgtttcattagtatgttataagaaaagtctgatacaaagcatgttagaagcctcatagctgaataggcacacgttttaatttcttcagtaagctgttgtaaagaccgcttaactttagttttgaaattagcagataatttaggtttaattatgaaacctacatattagttatgaattttcagtttacggagttatatttgaattcagaatgcattttatatgtcacatatggaatttcatatttttgcatgctttgtgccccgcaacattgaaacgcggtgtttggctattagaatcacatcctagtatttttagtatagcggggcaaaataattagacattggaaatgtcgggaatagccgagattttagaattgacaaaaatacccctaagtgattttcatgatttttagtgtgggcaagggcattttggtctttttgcctattttagttttgtcttttagtggacttagattaggttttataatctgaaattgttttgtattaggttgatattatgtaataaaccttttattcctctcattatttttacaaaaaaaataacaaattgaagaaagactttttgtctccaaaattctctctcttttcgaacaccatagaaccagctagggttctggttttcttcttcttcaaattctgtattttctagcaagattttggcagtttcaagttcaaggtgagtttctagtacctcccttgttggattctttagtttaaaattaagactttatgcatgatttgttaattttactactgtagttgctgttgtggcttgtgattgtttgctgaagttaaattatggttagatatgttgttttgagttgtttttgaaggctgttattaagtttgagcaagctttaagttttagaactcaagcatggctatttaatggtaattttttattctgagcttggttagctgttttgttgcttggaatatgtctattggggtataatattggtctggaaggtttggtaaggattggaattgatttgtttaggttttggaatttttggggttttctggtgtaaactggttagccagttttacaggacctgtgaaaccgattaagcgaatttgttgatgggttccccaaaaatttcatgttgtcgattcgttttagtgtaagagctttggttggttaattccctgttagtttagggtattgccatgttaacttacaatatgtaggtttttagtttaaaacctaagtccccagttgtgatttaacgtgtcacttatccatgttatgatcgatgtggtttaggggcctgtaattcgcctagcagttgttccactcaggttggccggcacacctgaattcaggaacaaggtaagattagtataatgttatgcatatgtaattacatgtttagcatacatgtttttattgtgttagagtacattgatagcagtattaatgtacgtagagttgtattgattacttataaatgcatgttggttgaaatactaatcgatgttgtcacatcaatatggctagagtatgagtggcatattga

SEQ ID NO: 22171 - DNA, 2166 bp, Cannabis sativa
tattaatttataattattaatcaaaataaaatatttgacacaatcattttactttactgcatcatcacatttcttattatattcataattatatatataattgcaaattacatgtacaatgtagctggttaaaaatttaggtttataaatttgtagttgatatcttatcaatgtgtgcagatgttgaattcggatgcaataatattaatggtgctactgggaattataatctaattcaagatcaaagtacaagatcacagatggtgagtaatacaactctgcaatatgatgtagatgatagtgatcatgttcaagatcagacaggacaatcatggacgacaacaacaaccaattttatcgaagaaccgaaacaacatgatcatgacattgaaaccgatattcaattctataacaaccattttggatctacagaatatgcatgactacttctacaaaagatatatatatatatatatatatattgctgctctctcctcattgttgtcttccatcgtttcaaaattttaatttgtgtttaatatttatttttccttgatttaatttatcaattactttattatttataatttgtttgtgttgttagctgtttgtctcacaactgaattattatttattttataaattattattacctctgtttgtttattttttagttattttagttactctttattaatttttatatatataaatactactatgttttttctattatatgttataaatgatattatggatgatataattaataatattatagtaagagtatgtttggaagtaactgtgtaattactagtagttacgcagtatagtaattattacttacactgtatattaagcaatatatgtttggattatacggtatagtaattacttataaattcttaatttcttatttgacaaaatagttaataattactacacaaaaaaatattaatttttagtacataatatttaaaatggaaagtttttaataatgatatagtataattacacccaactctcatgggggcatgagatcttggaaatagtgtaattgaagtctctcaattactccaaattatacattacagtgtaattacatgatcaaacaaaaacataaaaatgtgtaattactttccattacactcaattctaatttcctcctagatgtccaaacgcatcctaagaatgtttaatatcgaatttgaaattataaatatgtaaaagtaaatttttcattaaaaaattattgtctccagttttacatataaaattgttaattttaatttctattggcaatgaaaccacaaaataaaaggaaagatattttttaaattatttttaatatgttctaaagggttgtcaacaagatatgttgtatttccaaagaaagtattagcactaaagtgaaaatataactacttcaatatataaatcttgtttgcaattagttgaaaccaaaaaagttcaactctgaccttcttggtccaagaagtgattcttcaatgaaagaaatctttaaaggatcattttcataaaggatgaaacattagctcgaattatatcttctaatttgatgttaatgatgtctcttcgaactaaaatagtagattcctttcatactctattcaccatctctaagaacctataccaccataacacatataatgaatattagtggttatgttgtaaacacactcaaaacaaaactttggtagattctacctcaaatagcaataaacaactaaaataaactaaaaataattaagataaaataaataaataaatcacaactaggtttatattggttcgacttaattaatagcagactccaagtcttccaagaggttccactatgagaaaataaatttgttataaatttatctcaaatcgattggagaacatgatatgcatgcataagacatagatgagaaaccaaaaactcatttacatcgaagaacttgaacaatcactcaaccctcacaactagtctcttctcacatcccatacaaatccctcaaaagtatttcccaaaaccctactctcatttccctctctagaatctctactgctatctctctccttcccttttcgtttgacttaatgaaaatgaggttagacttcaaaatatatataggcattgatctgcaacacaaaatacca

SEQ ID NO: 22172 - DNA, 1811 bp, Cannabis sativa
tacatatcgtttatcgcttataaattagactcattatcgttggctaaaagcgaagtcaacaaagattatattgaaatggattttatttagggcataacatcccaacacaaggtacagacaaaattttggccaatcgtacccaagtgtacttgccaaataaagtacatcgtacaaggatgggtatcagcaaagtactgtcttaagtataccaacttagacaaatggtgaatcttaagttgtacattcgcctataatagactcaccactgagtcttatacaaagattccaagggaaccacgtatgagactatagcagtatatgcctacagggccttgacaaagcccttgcgcaagtcaaaagagaacaaaatcttagccacccgcttggaacctatgccttggccagccaggcttcctaagcttagagagggtcggctagggttccgtgacccagccaagggtcagccagggaccctaagcccaggcataggctgcctagactttagggtaccccctatggccgaccagctcccatgagaaggccctgtggtcggccagggtgtgctacggatctaagtgtgtgtttctcatgaactcaaacaagttctttgtgttctttgtgactcaaagagtcaagaatcacaacgaatgtcaaaattagatttttttcgtcaaaaaatcacacattatacatcctaaagctatcatgtgaatcaaaataccaaaaagattacaatctaatgtggaaatcgtaaaatattcaaagtggagaaatgcttcaaacaaccatgggaaaattaactaaataagtgcatcacaggatttaaaagcttacccactcctagaaattgttcatgaagaagatgggaagcttgaatcgtcaaaatggcgcgaaaattttgagagttgaagcactatggatgtcaacctctagagagaaggaagagctttcaagagttactttttctatagagagattaaaatgtggaaagtgaaaaatgatttccctcccataagcttatacaacttttatgggacccctttcttacttgccatgcagtgtgtaactaaaaaacatgcagaagaataatgcagttaacatactgctgaggaatgtgatcacacattcaagagaaaatatttcaaaggctaaatttgctgcaagattttcccgggtaaggctacatcagtccgaactaagctaagaagtccttatccgcacagatgtctgcacaacgacttgtaggacaaatattatcttactttttgctcacctgacgtggcatgtccacgtggccaacatcaatcccacgttggtgtacaactcgccaataagaaggctaagccatctacttagcacttcaaccaatgagaagcttaagtacataggagggatgacaagatgacaaaccagccacctatggctggccctatggctagcctaggccggctagcttctggacatcacatgggcggcgagcatgcactctataggtgcatggccgaccaacgtttatcttcgcaggattttggtgtgcaactttcatccatggatagtaagtcaaaccacaaattgggccttaacaacccatgaaaatagaggaaaatattagcaacttccctattttcgaggggcaacttagttatttgtattttattaatttattatgtaaataatagcttactttacctatttttaagggagtttagggatgtaacctctcctatataaagagcattagtcaaaccactactacaaaataggctattcccaatggtttaaaagagggtcaattattggaaccgttggaa

SEQ ID NO: 22173 - DNA, 8312 bp, Cannabis sativa
acctaaataaggcttgcctaaaatattgctttctacatatgcagatagatcaaatggttgatgccacatccaggtacaagttgctgagcttcatggatgcctactcttgatataatcaaattaagatgcatgtcgcgaatgaggaacacactagctttcaaattgacaaaggcatctattattataaggttatgccgtttggacttaagaatgctgaagccacttatcaatggatggtccgctgaatgttcaagaaccaacttgggagaaacatgtaggtatatgctgatgatatgttggttaagtccaaaacctctgagaagcaaagccttaatcttgaagaagccttcatggttatcaaaaagtacgggatgaagctaaaccccaaaaaaatgtaccttcggggtttcctctgggaagttcctgggttttgttgttagctctctcagaattaaggtgaacctagaaaagatgtttaaagtgttattggtcgaattaacgcactcagtaggttcattttagaatcaacaatcaagggtatcccgttctttaacgtgttactaggcaacaaaaagtttgaatggaccaaagaatgcaaagaagattttcagaagctaaaggaccatttgactaaagctctaattttgtcaaagcccgtggagggggaagatttatacttgtacttggtagtgttcgatcatgctataagtgctacacttgtgtgagaggaagagaaggtcctacccggtctactacgtaagcaaaagattgatgggcgcacaatctagagaaactgacatttttcttactaactgcatctcaaaagctaagaccgtacttccaagctcacgccataaaagtactgacgaatcatcctcttctataggtacttcaaaagccaaagtccttcaatagactattaaaataggccatggaacttagccagtttgacgttaattaccagccacgggtgtcaatcaaaggccaagccctcacagatttcatagtagagtgttctagcttgaatgaccacctgatagatctagtctcaaaaatgcccatcaagaagatctattttggtggagtgttgaaataagaaaggagctagactagggaacattttgatctctctgcaagggcactagctcctaagtgccctacattttagttcctgcgcctccaacaatgaggctgaacatgaagctatgttggaaagcttaaaactagctaaagaagttggagcctaacacattgaagtacatagcaatttcaggctggtggtgaatcaaatatctggtgagtaccaaatgaaaggtgaaaaaatggctgcttacatcaggatttcttgggagttgctataagggttcaaaggctacaacatctgctaggttttgaggaactaaaattcatttacatatatgctttccaatcttgcaacagaccctgcgatcatccaacacggagtagtcttgatttgtcacctagaaaagccaagctttaaggtccaggggctaaattccatagttgaaaattctctttcctggatggcacccatttacaaatttttgagtttgaagagcttcctgcaaaaaagctacctctaggaaagttcaatattaggctccccattatgtgatcatggatgggaagctttaccgccagggatagtcaatgctataataaaaatcaacattgtaaatccatgagattcatgattgcttttgtagagatcacacatccagatctatcatataaaagaaaatcctttgcaggggtatttttggcctacaatgaagaagtaatgtatatagtatgcccagaaatgcaaacaatgccaaagatatgctaacgttccacgtggactgccaactgaaatcacacacatgaatgcccatggccttttgtagtttgggttatcaatttagtacggtccctccacatgggaaaaggagtagttaaatgcacaatagttgcggttgattactttaccaagtggtttgaggtagagccgatgaacaccgtcacctcaaaaaaggccttggactttgctatcaagaacatcttgtgttgttacatacttccatacaagattgtcttcaataatgggaaacattttaacagtgaacacttcacgaaatttcgtgcccaacatggaatcataaaaagtttttcagttgtaggccaaccatgcaaaggcaaatggacaagtggaagttgtaaatttttttttgaaaacaatgttaaagaagaaactccaggcatgcaaagctcattggccagaagagcttctacgagttctttgggcctatggaaccatggagataacttcaatgaggcagacgccatatgtaatggcttacgggtgtaaagtagtaataccagttgaggtcacgatctcctatcaccaatgagatacctacgacccttatcagaaccattccttgctccaggaatcattggacctaaccgagaaactctgagaacagtcataggttcaattcaaaatgtaccaaggaaatatcactcgacactttaactcaaaagtcaagaatcatacgtatgatgttggagacctcgtcttgagaatagtgagcaagaacaaggagtgggggtactcaggccaaaataggaaggcccatatgagatacttccaaaagtgggtcaatgaactttttaactttagatgatggacggatggatcgaaggtccctcaaggttggaatgcaaaccacttgcgtcggtactatcagtaggctgaggtgaccaagcgttgatgtatctcttatgttttatgtaaatttttgaacgattctcttcttgatgtaaacttatgggtacaaaaaaatgaaaatagaagaagtttacactataattttacaatttttgtttttaagccacaagctatattttaaacaaatgaccaagaagttgaagatgtccaaacttcccagctcacctggggagtactaggcctagctgtgtatggcccccaaaaatgtagagtgtgctatgtttatttactttatttatacatgtcaaattttttagtgtaacttgcatttaacccaaaaaagagatgcattttcagccaaattttccaagggagagactcacctaaattccttctagtgattaaaaattagtgtaaactctaaaattagacgcatttgtagccaaatttcccaagaggggaaaattcgcctgaattccttctcaaaaattttagtgtgtttcctaaattttaatatgtcgattgttcgcgaggtacgaatggggaagccttgcctaaactccacgtgttttcagtcctatcttaatagaaggatattgcctaaaatccatagtgtgtgtagcctgccccgtagtttatgtatggcccttgtggaaaagactcttgtcgataaagtctagactaggaaaatttgcttgaatgttatcacaattttaggccagtccttgaacaatggataatgcctaaaatctataacatccccaaccatcttttccgtagcccaactttataaagactagtagttagggaacacttggaacacagaagcttgcccttctacgagaaaacaatccctgactatcattcttcatgcaacattctatttaagtagttaaatactcaaggcactaagcttcaagaccacttgacaggtcctgaagcaagttaacaacccatttatgttgtcagggtgtttagctaatttaaattcacaactaccaaaagagtcttaagaaaaataatcctacctaaaaataggaaacaagtgtttggtccccaaacacttcctaaatcaatagacagattaaaggttaagcacagtctaaggtttgaagttttgtttgttggaaccaaaaacctttaaaaaacctaagataagaacccttaaattgtctagcatgcaaatgaaacaaaataaaagattagaaggaaacaaataaaactagaagcctatatctattatagtgccacataaactaaggataataaaatgttttcgcaaaagataacgactcgtcccttaaaaccagtaaagatagtcttctacactattacaaattgccccacggaccaggcatagagaaaacacttcttcaaaaattaaaaagtatgtcttgaaagggataataagttaaaaaataagggaataagagtaatgcctgatcatttctatggagggatcagagttaagtttttgatttcggatttgcccttttaggttgtctacctaaaaattgtaaccttcccaagaggtaacttccacaacctctacagattgattctctccagctttatcatccttagcatccttagttttggttttagcctttccatcttctaatgcctcatctttggccccatcataagtatcgaggtacactttgacgtctcttttttacaccttgaacctattggaaaagtcctctgtatcttgagcgagatagcgaaagataatgggaacactctctgataagaacgcaaacataaggacatgggctaggtttacagagctgactaaggctcgatgatgggacttttgctcttgcttgcactcttccttctcctgtgcgagttccttgcactaggtggtaacttccttctaggcctacacctggccttgttgaaactagtaccttatgtctagcgaatcctgtatggtcttggtctttgttacaatgagcatgtccttctctctgatgccagcagttaaggtagtcacctagtcttcaacaagccgacaaagttcctaagctgagtcaactttagccctccagccccttaatgatattatttttgtcctaaagttcttgaagtttgacagacaagagtagagttggaagattctagctcagcacgcttgacctgatttttcctccatttggtttgtgaaatcctctttataatcattgaacttctacaaatacttcttactagccttggcattcgcttcaacatagtactgttttgcctcttgaatgtttttgtcaatcttttccattgcctccttgatattctttatttgagcctccagtgttcgtcatgtggctaaggaaagatcgagctgaaccgtcatagagcttacttctctgaatgtatgctccgtaagaaccgccatctgaaataagaggagaaaagtccaagaaggagcaataacttacaacaagtaaaaaaggagaagttgagtaagaggtcaaaataccctaattgcttgttgcctcacaaaattagccagtagtacgggatcagtgctgctggctatcacccacttctcagtagtcaatctcacacttattgctatgtcctcaagcaagttagaattgagtggtcccatttccctacccaagtggggcacgagttattttttaagggcaagaagatcaatgatgggtttaaagtctcctaggttacagatgcctttagttatttcaaccatcttctctgtagacagccagtcaatcctagattggatgatgttatgctcctcaacaagtcaacgtttcaaataaatgttagccttatgtacttgttcaaacacctcagtccctatattagtaggtttcaagggaaacttaaatggcaaaggtcagattttcggcaaacaagtttggagctcttgggtttgtttttccttagcaatgttggccaaagaagatgaagctagaattaattggttactcagagttgttttggtggttttatttgggtaagttgtttgcttggttggatttatgttgaggggttggtggatgcgagaatgatttgtcgctcgttaaaatttttatcttacagatggtgaattgtattaacagcttgagttgtggagggaggattaaaagactgtgactgttggttcctaactggaaggctctccaccctaacagatctagattcttgaaggtctatggtgcctccagtggacaagtgcctagccctcttatcttcctttttttggatgggagtcagtgctagagcatttcaacgctattgctgcctttgggaataccaagccttccccggaaccctcatcatctgaaggaatcatgggttccctctcttgggtcacaatatcagtggaaatgggtaatagaattgttgcacacctcccacatcctgtggctagtcgagtttttgcatttttcttaactttggattgaatggtggtaggatcaactgtatggctagccccttgagcgctagaggttttaggggtgccagaagctttggcctttctggccctatcttttttttgcctccctttaccatcaaccacatcattgccctttttgatagcactcatcaagtcactcagcatcttggactcaagtgtatctgagagatcaaagtacaacaacaaccaagttaatcgacaaaacagaaaacagtaacccaagcaagcaataaataacatagactagatagtagagatgcattgtgaatgcgatcgtagaatgtgtaactatatggttcctctcttgtaaataaagttacttcttcccaaccaatgaagttgtcgtgttttatgaagcccaagaagaggatggtttgaaaggtatccattctaacaatattcgtgaaagactcaagcttattcaggttcctaactattttttctaccctattaagatatctttcattggatacctacaggaatcgaagttcaggtagtaattttcaaaacccccttagactcttagtgttatatgagacagattgggggtgcaaattacgcagaagggcattttacctcttccagaagtacttgccccagaagaatttttatttgggtatgcgtctaaaaacctttcctgaatctcttctcctcagtaaggtggttcagatgatgacttgaccacgtagttgcgagaagttcctcatattttgctgccttattaatcataacagaaaagtccaaagcactttgctctttatgatcgttgggggtctagggttgacccctacagctgacgccatgaatgctctagagatttgcaattaagccatgctggtgcaacaactcagtggtcaccaaatcctcaatttttagctcttcctctttatttcaattcacctgttagcgtacacctgggggaggattttctgtaagaaacatactaaagtcaagtacagagatgggaatgcattttaaactttcaaaaaaaaagttacagaaagatgaatctcgtacctggaaatttgaagtcaattgaaagagctgggattcatttcagaagaaaacttgtcctgaagaacaagtattcacgtagatttgggcagtgcgaggaggtgtttgttggacagtgagtgcggttgtacttctggaggtgatagaacccaacctttgtagggtgcccccacatgggatgtagtttcaactcataaaaatacaatatctcttccgaggttggggaattttggccctggctttagataatacgaaccatctagagagtagtttatatgaaaccaaaagaagttggaaaggcgcaatccctgccttaacgcaaaattaagcaaaataggttctaagtggaaggtgggctccacatgaaatatgcgactaactccatgccccaaaaccttccacactttgggatggagattccctgatgagggacatcctatgccacataagtctaagaatgttttggatgccaccatcattataatacacctttagtaagccgtaactcctcagctgattgggccattgacccatctccaaaatagaattgttaagtgctaaaggggacatagaagtagctttggattttcctttgcccttgtcctttaccttccttatttcctggatgtcttcaagaggcccctctcttggagttgggtttttaagggcatacacgcagggggtgcattcactgaagacgctctaggaacctcttcaaggcccatgatttccaaatggaagtcattgttttcaccaaacactgtaaaataggacaaaaaagaaaaccccagcagttaataccccatatccaaatggcaagtagggtatcaaggaaggcctcccccaaattgcttggagaggtgcccacctgactcatcacaataaagggaaccctcatagagaaatctgttgtggtgacaaatcaggaatctaagaatacaaaagaagtaaaaaagtctatattttcccttcacaaacaacaagagaaagggggattgtgctgggaatttgcctaaacccaaaaacgcttaacctaaatgttagaaccaaaaaactttgttcatacagacgctcatatcgacaaaattaaatggaaaaaaatccctagcagcactctag

SEQ ID NO: 22174 - DNA, 1883 bp, Cannabis sativa
ttatttgttgtttttaaagtgcacaacattatatatgctaatttgtaatacaaccataataattaagtgaatagactaatgtgtatttgataataatttggtgggtgtctttcaaaaaaaaaaaaaatcgtaactatccataattacaataacataatttttaaaaatttcatatgttttataattattctgtgtaatatattagaatttaacctttctgacttattataataaatatatacaagtggattaggtttttttcgtgtgtaaatagtagatagtctcctgtcaacatttatagtcacaggatgacgcagctatttgatccaaaggtttttcttttttctttttttttcgaaatcacatttgatccaaaggttatggtttaaagagttaattgccattaaaatatgcaaagtgccttatatattaatgatgtgatcaatgcttaattgatcatgcacctcacacacaaaacaaaacaagaatttgatcaagaacaatgctaaccgatttaatattacaactcaaattgattcaaaccagaaaacaataatgaataaacagcaactataaataaaatatgaacaatgatcaatgagcaattaaagacaagaatataaggaaaaagaatcaaatacaactagattacgagattcgaacaagtgatgatgaatcacttgcctactcctcggccagaacagccccaaaggcttgaatcttttattgagctagaagagagaattacaatgttgatactcaatgtgttcttgacacaatcactcgagaagcatagcttcaattacaatcaacttcactcaagactctcttttcttgcacactaaactagctctcaaattatcttgaagacttctcccaagattgctacagaaatactgcagcaattggctatttatagccttggtgatttgaacccgattctaattgtcataatcgacagttaggtaaagtcgttgttagttatagggagttaagtcaaagatgaatatttccttagtgaccaatcacaacaattaatttgttacacttgaaattaatttgtgaccaaaatttttgaatttcgaaatttaacactattaactattagattgaaataattaaggttgaacttcttaatttataaaatcgttttgttttatacttcttttgtccaatttactcacttaagtattaaagcggtgtacgtggcaaaattttattagtccacttaatattaataattaaaaaatattaaaaaataattaactttttattattttcttcttcttatttctttttctttttcaattctgtgcatttcttatttatttaaaaaaagagatctgagagctcatgatttttattatatagcaggtatattaatataataaatttaataaattatatacctactacattattataaaaccccaattatatacctactatatttaatagtttattaatataatagccatgcaaaacaatgcaaagaatcaagtctcacaatattattcaaaccaaatcagatacacaagaacagatctcaaacaaaatacatttcaaatattataaacatgtagaaaaatgacatagttccaacatgtactttgaaatttcatctcattctacctaattaactacaattgacacacttaaaacgacttttctagcaaaaaaataaaaaactgaacagagcataacataataagcagattatataagcaaatattaaacgaatgaaactagcaaaactttgaaattttacgtgagagtcggaccaatctcagttcctgaaaaaaggcctccaaatccatataagaggagccaccttcttctattgcccttttggccatttgagcaaatcctttggctttacttct

SEQ ID NO: 22175 - DNA, 2093 bp, Cannabis sativa
  modified_base (55)..(59): a, c, t, g, unknown or other
ttctatttgcactatttctcgtaatggatttcaattatgtgttgctcacatggannnnnggctttatgttttgagaccggaaatacaaatcgcgctcaacagcaaacttttcaatgttgttaaacctagaaaccataaaagaaaagagatcgataataatgatgaaacatatctatggaatttacgattaggtcatataggctatgatagacttcacaggttaaccaaaatcggtccattaaaaaatgtcgtcttgggtgagttaccagtttgtgaatcttgcctagaaagaaaaatgaccaagcgttctttctctgcaaagggagagcgtgccaaagaacctcttgggttagtgcattcagatgtttgtggacctcataatgtcaaggccagaggaggttatgagtattttgtcactttcattgacgatttctgtaataccctaggtttaagagaatggactagcgaaaccctaactagttaattgtgtattaatatggaattatatgataatataattaatatatgagaatttatatgatttatgatatgataagaccccattaataagccagggggaattttagtaattttgacccgagaagggtaagactgtgaaattaatttatttacgtgcttatggactatattgttatatagtatatctgttgtgtccttttttaggtgtgttctgacaggttgacacggtatagtcacaatcgggtatttcgggccgaactgggttcagggccgaaatacaattctgggattaattattggcattataattttaagtgaataatctgattttatttgggtgtattggtgttatgtggaatgaccattttacccttacaagtttatgagtgtgcttaatggccataaaggcatttttgtctttttgggaatttggattattagcaaaaattggtattatgggtatgttagaaaatcatttttctgctttgttttgccctagcctacccttccctctctctctctctatacattttataatcttgattgaaattgtggtgtttgcttggaattcaagcttgaagtttggaggtgtgaaacttgatcttgaggcttgaggtagcattcttgttgttcttttacttaagattgttgctgagtttttatgattttaagtatgaaaagatattgaatactcttgaaatgcatgtggttgataattgagttgttctagttgttgggagcatgatttgtgttggagctttttgggttttgttttagattgagattagagagaattttaggaatttttgtagtgtttatattctttttattggctctgaaattaattgtctaatacatgagttcttgacttgatcatgtgaatatttgaagatgaaattggttggtttatagctcaatgttggagcttatgctttatggtgtttaagttgaactttgagagttatattattggattttaaggcatgaaattgcattctaaaatctatgtttaattagtagaaaatctatttgatggttttaggttttggttgtaaattgggttgaattggatgagtttaggggctgaaattcgaagttcttaatgttggttttcttggttttgaacccaggtgtcgcggcactgcttttgcatgccgcgacccgcccctattttggtgacctgggaattgaacccaaatgccgcggcatagcttttgagtgtcgcggcccgccctcgtgtttttgggcaaatttgaatacaaacttagaaaatgcataactttgtgatctgaactccgtttcaggagttcaatatatcgttggaaagctcattccgagctctatgtgattatttttattttgaatgtccatgtatatattttataaatgtggaatcaagggataaatatatgagtatattgagattcagggttatgtgtccaagtcataaccgggttggactatgtaattagaactgagatgaaccgttctaaggctatgtaggtctatattacataaatataaataggcatgtgagcgtaacatgaaggtctgtgtcatgcaggcatatgagaatgacattaatgtttatatagtgtgataaatatgtttat

SEQ ID NO: 22176 - DNA, 2475 bp, Cannabis sativa
gattgggttttggatagtgaaagaagaggtttttaaagagagagtttttaagtttgagaccattaaacaataatggttgaatgtttgattaagaagaaagaagaagaaaaataagagattaacactaacaactttatttactatttttaataatatgattaaaaatcaagatcaatgcttttcttattggttattattatagagctaaagaaaaagaaatatgaaactaaaattataacaaattattactatttctaatatattatttcacttatatatcaaccattcattatttcattatttgttatgttaatatataaaactaatcatattataatgataatgaagaggttaggtaatgataggtggtggctttagtatcattggggcctaaagtgtctattgattttgattagttaaaataaacaaatattatatattttttaattttcattgaaatgattattgacttttttaatgtttatccttataataatttattttgtaacactttcttttaacttaagtgtatattaatatgaatatgaaggttctattatgagtgagtttatttgggtaatgacttggatactaaggttaacatgttctttatttcttgaatagtgaactatctaatattataatcaacattatattaaaatcatatcaaagtatttaattttaggtcaaacaaagggatcccattgtattctaattcatataaagatggtttagcataattaattttatttttcaagtaaagtcctcaaaatagaagcctaaattttacatataccaagttgcatatgtatttgctaagtttgcataagatagtagtgcaaatacttttacatgaattgtctattccaacaattcaattcaatctttttatgcctaacatttgtctttacacttcccccaaaataagtataaaataaaaatgatattaataattctctctgcaaatttgtccatatactaacataaaatcattttatttattacctttcattaaaaacaaatgagaaaactttttaattttcattttcaaatctttcatttgaaattgatggcctcatatacttttgttatggttgcgcacgtagatgaacaagttgtaacttgtttcacttcacaatacaaatattaataaatctcttaaattttcattttaatatatttcttaaaactaaaattatattgacttttatttctaaaattattaagtaaactaaacttcaatgattaactttttaagtaaagttatctctttaaatgtgaaatatattctcttacatattacttcattcacaatgtggtacaaaaggtcataaaatatagtcatcaaaatgagtatcaattgtttaccatttaccaaacttaataacaatggactatcctttataattataataaatcaaaatgggattttttttaaggtaaatgaaaatttttattaataggtaaaccgaatataatttattatatggagatattacttatggagcagaattaatattaataaactaattaaactatttacactaaaaatgaaaaaaaaatgaaggacacttgaatttttgatatttttttttatttctcatcaaatgaatggtatttttttttttttgaagatctttactattcttagcataatattagagaatctcaattgctttttaactaaataacttatataaacataagaaaaatatataaaaaatattaaatttttatctagaatgaaaatgagacatatcacacttattaaaattaggatatttttctctctaaacaatgaaaagagagtattttgtatttttctgtttttatattatatacatttatttatttttgtaatttagtagtatgcaatgcatagaagatattaatatagagaggtgatatgtaaaagaggccagagagagaaacagcagcagtccaagacagaagaagacgcgtggcattattagctggcagattgtccaagtggctaccttttgtgggcccagcccaatattaggtgtctcactctcagcccactttatttatttttggattctctttggttgagttgagaccccacttgactcgactcgctcgctcactcactcactcacccctaaaacaagctaaactctccccatcatataatatagtttaatttagataataataataattaataattaataataatatgtggcctcttaatcttcactaaagtcattttcattgtattattcaattcaattagagacctaagtgccagctattttaccaaacttatcatatcattatatttatataaacacttatatatatgtatatactcttgttatagattctcctaacaataatcaaagttttcttttctttttgagtttattgtacataaacaataattatggttcaacctttattcccttcctctcaccaaaaccaccaacttagaaatttttataacatatcaaa

SEQ ID NO: 22177 - DNA, 2125 bp, Cannabis sativa
  modified_base (1142)..(1143): a, c, t, g, unknown or other
ctgcccagaatatatttgccaatcgattgtcttcatccacttgatactcgacggagaagaagggatctaaccttatggcggcgtcaaagtaaccaagtgcccattctgaatccatttctgaattttccaatcttctttgttccccaaccttgttgtaaacatcctttagttggaaagggatatttttgaaccctccagactgtaatgccatatgcgagactatattagaagtctttatccctaccttattcatagacattacttgagcaactacaccgtccggtacaactcgattggatcttagaaagttcatttctgaaatggaagctgtctcgtgattgtgttgtgacacaaattcttttgcaatgtaagaggtttcatccctagtacgcactgctcttaaggctaccttacaaccatttcttgttattggcttggctgttctttgtctgtcttgcatatttatgaacttttctcttcgataaccctctttagagcacacccattttctcattgtgataatattatccacccgcctcacatcttcgtttcgaacactaaaacccgtgtaccttgcataagttcgaaagaatatatcccatttctctattgattctaatattttccccaaaatatctttgggaccaatcttgtcaagtgttgtttggatgtctaaagcttcaagaattgatggccactctagaaatgataatggatctacatttgtcattttataacacctacaataacaagtgtaaatgcatcattcatcttatcactttgataacaataattatagataatcaaataatataaagtaaagccaatttatgttcttgcctataaatgatcttctatcttttatatatggtaattagtatacagatttattccctcatcaacaaaaaatggtgaataatttatatacatacactacaacaaaatgtcgttagaagaagttataaaaagaattaatgtcatttattatttaaatgtcatatcataaaaatgttattaaatataaattaagtatgatttaataatagttggacaattagaaaaaatgttagatttttaataatagattcaaacgtgatttagttaattttgtatgatggtttttttctttttctttttctttnntttttttaaaaaaaaatgtataatttattcttgctgtggttgaacttaacacctaatttgagtttgatttttaaagtagtgttaattaaactataaaaaaaatatcatattatgtaatttattagctaaatagtacgtgtatagacagatgggtggaagtgggcagttatttcatattattttttaaaaaaaaaataaagaaaattatgaaggaagaaagtgtaaaataatattaacaatttattagcagcaaaattaattatatctctcttatctcataaaagtctcaaaaaatttctatagtctttccttctcatatgtctaattaattaaagttgcattatgtccaactagtagaatatgtacagtgataagaaaaaataatcttaaaacaataagttgtactaatcttgttaggagaatctctggtccttaatacttaggttcaactctcattttttttatcaaccaactctcatgctttgctaattagcaaaaactctcatttttttgtggtgaataaacttaatgttatgttagttgaaaacttaaatggtatatctctttgctaggtttaatataaagggttggtcttctcacgtattataaatgctaattaatgaagatttacttgaatatatgataactttttttagttggctagtaatcgtaaatgaaacatgccaaagaaaaaaaaaataaatatcatttacatggttgccaagtcttttgttttgttttttaaacaaaaaaggtaaaaatttaataagttgacaagtaatcataaatgtcatttaattagagttttgtaaatttttttttgagtagttattctactagtatgggctgggccttattatttttgtttttgtttgttgagtaatgtctaacattgtttgcaatatattatttggtattcttttactgttatcaacaaaataataatttaatagtggatggttgataatgtgcatgaaaattt

SEQ ID NO: 22178 - DNA, 1824 bp, Cannabis sativa
atataaaataaataaagcactcaaaatactaaaatatataatgttaattaaagtgataattattgccaaaaaaaaataaggtgatgattatgataatgccatacacaatataattttgtaattgtgcatgtgccatgtactaaactaatgaatttaattatgtgacaaaaaatgttatgtaattttactagcttatcataagaataggtgggaaaagaaaaatgaaaacataccaagtattttactatttatttatagcattattattaatttttgtttcacatattacatttattaaaacaaattgctgttcttttttctttcttttttgaaaataacaaatagctgttcccaatgaggacgttatcttggtagaccaatagatagacttaaattataaatttatgataaattaataataaaatgaaaatataagaaaataaatacacaaatatagtaattaacaatttaacaaatttgccgttttgatatagccgtggttggcgccttgacatattccactctttttactttatttacacatagctaaaaccacacctattttacacctcattattcccctaattttaatcttaatttgattaaaaaaatcttaattaataattatgatatcttttgccctttttgaaaacgtttcacgtttttttttatttttcagttttataatcaagtccttcatattaatagaaaataattcttatacaaaacaaatatataagaagttatgtgttttaactttaatatttattgtgtctatatatataaattaaaaatcatacaattttgtaccttaaatgatcgataattgtacttaaataaaaaagtattatgtttgttacttgtaagtaagaatagattcatttgtcacgtatcataatactaaggctatgtttggtttgagagaatcataatggtaaaaaaatcactattatacaattctattttttagtttaattttaaaaatattataatatcattacatccaatcatcgaccattcataaaaataagaattacacttctatatatgtgtaatcactattaacaacactattcatataatataaattactcttatctcattatttcatgtctttccattaccaaaataattcaaaattaagatattcttatcaatacacactcatttccaatcattttataaataaacaaaacatcttaatattattctcattattattctatcacacacttagccaaacaacacctaaaatatgaatgatttcaattatatatttgataatcattaatattataaatataaagtacaaaccatgcattatgttcataattttgtcatgtttggtttggctttgaaaatattataatgtctttattatgtaattggtaattactattacaccattcattaaattaaataaagattattacaatagttacactaatttagtatagaatctatatcaattgtgtaaaaagttttactttttgtaaaataattctaatgattcatatcaaatatcacactaaatatttcaccaaataaatatattttacttaaaagatcacacgttagttatgtgtggaaataaattattatatataagatgaatgtactactttttctattatcaattagttaagtgatactgtttcaaaaaaaaaaaaaaaattagttaagtgatagaacctcattcatcttatcctaaattataacatggtatgtgtcaatttttagtttatgtacactcacaaattttctcatttagttttgagataaaacctcgttcatcttatctttatacgttttatattatttaca

SEQ ID NO: 22179 - DNA, 1077 bp, Cannabis sativa
ccacccacaatgtgttacaactcctccaactgcttcgtgttcgagaatcggaacttgtggtgcccatcctcttactatcaaccctctttctttcattctttcctcaaatccttctggaagccactcttcttcaaccccttctaccttttctttcttcacaacccaaatgaattgctgcccagaagcctcaagccctgttgcaatctccatcagttgttcatcgttgaaattagccacgcttccaaaactcacatagataaccgaacttggtttctttgtgtcgagccacttcatgcactcgagttggttatttgaattagacatattataatcagacaagaaaagtgggccaatttgccaagtcttaataccgctaacctttttgtaaagatcagcataagctggttcgagctcataaaagctgttgactataatcccataattcctacgctcaacctctcttatagctatatacagcttccctagttcagtactctcatcatggtgtttcataaaataaggaagtttacttgctgttaactcgatttggtctggtaaatcaggaataagaaagtgttctgaatcagaagataccttcttatatggctcatgcaaaaataaacttgcaacaacgcacatagcaaaattacaagttccattgaaaagaagtgtgggaatcccaaacttctcagcaacatctgtggcccaagggaacagcgcgtcgcacacgagacaatcgggaagatgttgttctaagatttggtcgagttgaggggcgagttttccgcatgcttgcacgaacttttcaaacatttctggggtacgtgcagcgggagagctgtctacctcttcaggcaatccgacctcagtagctggaaatttgatgttgagaatattgatctgggaagtgttgttttcaatggattttgccaagaagggtgtgaagtgagaagtggtgagaatggttactttagtgcctttggaagcaaaaagcttggccatgtgaatgttgggtatgagatggccttgcgccatataagggaagaagattacatggagctgatgttcatggctttc

SEQ ID NO: 22180 - DNA, 5359 bp, Cannabis sativa
  modified_base (3008)..(3009): a, c, t, g, unknown or other
attttcgttaaaaattttaatttttatcttcgtttattctttattagagatgggacggagaattctcgaatagaaacagagacaggatgagaatatataaaaatattaaactacataaaaattaaaatattattttagcatctaaacataattttagtatttttctttaaattttaaatttgtctctattatagaaaaattattgagaatgctctaaataatgaatgaaaagttatcttccttccattctaacttttaaaacaacacaaaagattcccactctccataagccttacttaaacactcctatataatttgctaggattttcacactataccaaaacatgacatcatcatcctcatgtaaatttgctaggattttcacactaaaccaaaacatgacatcatcatcttcatgtaaatttgctaggattttcacactactatattgtgtaaaacacttaaccatcaatctcaataattatagcaaataatccaccaaattttcaaaccattctaaatattttacattactgaaattacgatataaatagtcaattacaagctcttgttgagtctctcaaaccacacatacataattcatataacaaaagttaaccatagcttaacattttctcaaaaaaacatagctatacatatattttttaatttgcattctcaaattatacactataaagtgcaattaatctcaatcctaatctttaaaatttgagtgtgcaaattaaaattgtatatacatctatcattagtgatagttcatttcatgtggtgatgagttcaaaaaaaaagtttgctaattggggattagtactttctatattgctattaagtcctcctccgaataaggtgtccaacattattttgatgagaacgcaacgaatgatgagaaccatctcttggaggacaaaagctcacaggtagaaactcttccatttcacatccaaacttggattgagcaaaacgttctactaatgcatctttaccctgtataatatatatataaaataattagttaatatattaatcataaacaaagtaaaatactaaaatgtagaataatatcttatttagatttcatcctttatgtaatcttacataaaatcagtcaatctttgttttgctgatgatttaattattttttaaaattttatatttctagttaattacgatggaaaatactttttcttcgaaatattttagagtttctttgagacctaccaaatggaaggaagcttgcatatttttgactagtagacatttgtcttttgcaagaagagctcaactaattcaatcgttttcttttgtctcagaatgggattaaagagatcgataacctctgtaggaatttttttgggggtgctgagaaaattttagcaagcttcattacacttcttgggatttgggagcaagtgtgcctttctcttcctaagaactacaatggtattggcttcagaaaaggaagtaaatggaataaggcaagctatctcaactaaccaagactttctttgggttaaatgggttaatgacatttacttaaaagggctatctttttagaattatttgattttggagaaaatttgtcaatttaggttgctatatatatgaattaattgttgcaaagcatagatttatattttggcaagcactgaatattcttgtattggcttagaccctacaacattttgggggcaaccgaaaggtcgcttttaatagtactgaaaatcgcgcctaatgtagattaagggcggcctgtcctgtttggctgctcgttttgagagtagtgtcatgttgtaatcttgtttttttgtgatgaatgaaacttttttttttcataagaaaattaggacaaatgtatttttcaaaaaacaaatttaaatatgccttagaaaatgcatatatcccttttatatttataaaataataagatttatgatactatatattataatcttttatacaaattaattaagacttacctgaatagtagctggagcaatttgtcgaattttcttggattgaaaataatcccatttttgattatctttagctttccaaaacttagaagctgctcttggattagtaaaattaacaaaggcatatcctttgttaaaatgagttctgataagacagacaaaaaaacacatatatattattacaacattaaaacactcactgcacaaaaaagtaaccttaagaattaagttacctaaaatccattggtaaatatagaaaatcaaaaactgacttattattataaggtcccttttcttgttgatgattttcactttcacagtaatcatccataaaatccagcatcattttcctcctgaaaaattaatcaaaacccaatattcattatatcatcaaataatgataaactaaactatatataaataattaaaagccaaacaaagaaagagagtatagtcttacgtatatttacaaggaatgttacgaatcataagagtagtaacattaaaaccaccactgccagtactagagtgattattatgtttgggtttacataatactctgttgtttctagggccataattactgttaccgttaccgttacgaatggaatggtttgattttggagttgtagtcgttgaaggatgtttgggcagtttcttatttctggggccacaagcaatgtttttgaaaatacttttgtcattattttcagctctgtttttgggcacccattgcattgatgatattgggtttgggtattgttgatgatcagaagaagaagaaaataagattgtgggtatgaaaataggagcatttgggtttagtttagtagtagaagtagtagtactgtttgtcatggtagttgttgggaagaatgatattcaatattgatagagaaaaacaaagttgagaatggaatagaaatagggtgtttatatatttatattatatatacatgttatatacatacacagacagtaagcaggcattaatagttttttttttaaaaaaannaaaagaaaaaaaaaaagaaaatctgatagaaactcaaaagtatatgtgatgggacatgatgtgcttttttcttagggtagcttcgagagtgagaaataacatgatgtaataatataagacatacaagattttggaggctataaattttgttttctttgggattcatatacctacaataatagggataattatgttcgtttgtaaattaaaaatatatagtaatatttagcattgaaatttgctttcacatttgagaggatagtcctgactataatattttattacaatttcttagttaatttttacattagaaattacattcggactatttttttacagttgtatttgttacatttacaatattacttatgtaaatttttaaaaaatttcaaataatttacaatatcgaaaaatataatttctgacatttcaatttattacacttgttcaaaaaacttaatacttattttcgaaacaataaattattaaaaaaaaatcaaaagtacgggaataatgttgtacaataaaaaatacaccatataatttttattttaaaaaaaaattccaatatatatttttagataaaaaaaattaattaagaaattataataataacactactcaacaaacatttaatactaaatatttatatttctatttatatatatacatcttttaatatagtttttttaactaaactaatttcggacttcttcattcaaaacattattcattgcatttttactctctaaaaacacaattaatgtacatatatcctaaaaaggaaattacattagaactcttctcactaataaatgcaagaaacccatacataaatgtatgataattaatagtgtgatttaatccaggagttgatagataaacttctctcctctttgcatgcatacttacttaattagtagtacgtagccatatttaggtaaatgaaaaaattaacattaattgtaaactttaaatcaagaacatcatcagttgcacgagctatcacaatgatattaaatccttacatattatgattattttcaatgcataatgtataatttgggtcgaatctagtgttggatttggctcaaaagtcaacttgttttgtagttgtaaagatatggttcaactttcaagagttttaagacttgttattcgtcacatttatcaagaagcatgctctctcatttattatatttgcttggaagatgaactacctcatttattacatattgttagtagttgagatttttcttctataaatattgagctcttaaaagaggttttgtatcgtaatgaaaatttgagagagagagagagagcatctatatatctagactttggaaaacacttgagagatattattagtagaaaatctgaatctgtattttgtatatttcctactcagattaataatatcagttgtctctcatggagtaagtgaatttccaaactaagtaattttgtgttttattgtttactgctttgatatatatatttcactatttattgtttctacacacaacaaattggtatcaaatccaaatatagcgatattatatatcaaatcgaagctctcgacaagacgaatccaacgccgcaagaatcacctcaatcagaggttcgacacactgccagtaaccgttagagtgttgatgccaacaactgagttaactcggtcaaaaatggcaatatagaccacaatatcatccaagtacaccactatgaacttatctaagtcttcatggaagatttcatcatgagtgtacaaaatgtggctggcacatttgtcaatccaaaccgcatgcaaaactcaaatgccacataccgagtaacacaagtcgtctttggttcattcccttctgcgatccgaacctgattagtagcttgatctcaaatccaacttcgtgaagtattcccacttagctagtcaaataaatcagcgatcaaaggaatggggtatctgttgcgcgcaatcactttgttgagggtgcgatactctatgcatagtctcaagtaggggtgtacgtcagtcagtttggtcggtttatgctatatttttattcaacccaatgtgaaaatcggattacaaaaatttaagtacaactcacccaattaagaaaaagaaaatagtaacctgttcaacgaaatttgtcggtttagtcgggttaagtcgttcaaacccaccaccaatattttttaattttttttatttttacatacaaatattgtattttaattaaatgtaataataagacaaacatatataaattgaatttgatggcacatgatctgcttttttgttagggtagcttcacgagtgagaaacttagagcatgtttggtat

SEQ ID NO: 22181 - DNA, 5744 bp, Cannabis sativa
  modified_base (492)..(501): a, c, t, g, unknown or other
  modified_base (675)..(682): a, c, t, g, unknown or other
atgcctattattagtaaagggggtgtgtaaacagaaaaagtcagcagtcgtttattaatatttattgcttttaaaatccaccaaattttaaattattttcttctattattactagacatataatactggtctgtgtggatataattaatttatgaggaacaaatagataattattccataaatggtaatgtatactagagtactagcactttttttttttttttggtgaaagaatgaaaatttcattaggcacttaccaaaacaagttaaaggcttataaaaactcacgtaaactcttatctcatctagagagagaacgggtttagcaaggttgtaagcaataaaattcgcagagcgtttacaaaacataaacttaaaagcattgagattattggaaacaaacactacaagaaatgtcacttttaccagcacagtttcgaaaactgcgctggtaaagaggtcaaagttttaccagcgtacatttgcagtggnnnnnnnnnnacttttaccagcgcatttacgcgctgggaaaagtcatctttgccagcggtttttattttatgctggcaaaagttctaataccaacattgatttgacaaccctcttttgccaacacagcacaagtaaattctattttaccagcggaatactaacttttgccagcacaaaaatgtnnnnnnnnaagtgacatttcttgtagtgaaagtaaatattgtaggattgcaccaaaaacaacaaggttgctctcattctcatttagcaacttagaaacaagttagcaatcactcacacgatgcccaatcagtgggtgcccatgttgacgtagccacctcgttggtggttccatcaatccgattgtgattttgtctccagcattctttttatttttctccaaaaataagatataagacttggaatcaggagaaaatatctttcgagtggcaagttagcccccatgcatcaccatgcgccattgtgcaaccgcactaggcgcccaggttgacattagcttggggctcagtgttttgtccttcaaacaacaattctactccaggcatcgatcttattttgcctccaaaataagatttggacacttacgctagtcaatatctcatgtacatatgtgtcacgggcaagtctcctccgacacctatgtgccactactaaatcacccgggtgtcacctagtcatctctagtgaaacatcgagaatcacatgtgcatattaggtaaaatttcaaagagcacttccaaaggtcaaagaatacactaagaatatctatcacattattcaagaatctcaaaataggcctaaagcctaagaaatcaagttttgggcgcctaggttgacatttatatgtcaacttgggcggccataagtcaagttgttatcacagtgacttttctacagtgcacaccactcagtaaactggtcttcactctctcaatttttatccaaatgacgtaaattctagtgacaaattaaagatattttcaaggcgcatctaagtgtgtcacacaccccgccgcaattctgaagatttgagcctcaaaattgactcgaaggctactgtagaatttcccaacaaattttgtgtgaagttgcctattattttatagtaaattaattggacctccttctatataaagagttctcctagctcatttttcacaatttaattcctctctacaatgttagagcttctgtctcttcacactttctctctctagaaattgtgaaggaaagctatatttagtcatttttcctgagttctcttgaaagtcaattagctttttgtggtaataaaagctctaagtagacataactccattaccatcgcaataaaaggagtgaactactattattgtggtattctctttttactttcaattcatacattcactggccgctatcgcttattagacggtatagagttgattgctttttggcatcaacaatttggttctttcattgagaggaccagttttaacccttggttgccttttaggttttagtcttcgaataggtatttcattcataaaggaatgtatataagaacaagcacctaaggacttccagggaaatggtgacaactagggccaccagtactggttgtgatgctttgatagaccgagatttgggcgataagtcgagagtccctgactcgagactgccaaacaatgatgggtgcttaaaatcttatgcttttttaatgagattcttttctcccatgagaaaagtggtggtttgttgtgtgctcaaagccttatggatgtgtttcgtaatatgctatagtgaaatgtggtcttgtcgatatgaggtttgaatgtgctcgttttacgtgggataacaaacataaggatggttcgtttttgcaagaacaactagatcaaatggtttgtaccaatagctggcattctatgtttccaaattcctatgtcgtgcatttgaaactttggggttccgatcatagaactgtcttagcttgcattctttgtgtctgtgatactaggaaacgtccaaagcagaaaggttagttccactttgaaatggcttgggcagattaccttggttaccgtgaaattactgtggactgtggggaggcttttacttcagttgatattgtgggtgttaaaacaaaatatctagggtgtgttgagtgcactaaatgattggaatggaaaggtgtttatatactcgtgaggctattcgaaagaggaagaagcttgatgtgcttgactctaattttgatgctagcacatcgtcttcatatcttaaagtggagaaagagcttgatgttttgctatataaagataaaatagtattggtcttcacgtgaaaataattcatgactggagttttgtgataaaaatttagtttattttcatcaaagtgtttctcatcgtaaaaagaaaatgttattggtggtatctttcacaaaaataatgtttgggttggatcacctctttgtattgcatcagttttttaggattattttcaatccttgtttacttcacatgagccttttgacaagcttttgaatgtggtgctagaatcggtccaacctcgagttactaatgagcatatataatgatgtgtttatgagactgttcacgggatcagatgtttggattacgctgtttcaaatgcatcataataagagccttggtaaggatggtatgggtgctgaattttgtcaaaaaatttgggatattattgggacgaatgtgtgcaaagcttgtcttgggtctatcaatgggttgggttttgcattgtcgatcaatgagactattattactttaattccaaaggtaaaatccccaactctcactagtgaattttggctcattagtctttgtaatgttttgtataaaattattgcaaaaatgattacaaatagattacgagaggtgttgggtgatgttattttttaggagtatattacgtttatccttagtcgcttgatatttgataatgctatgatttgttttgagtgtattaatgctataaaaagatacaagaaagggcgaaaggattttcttgcatataaagtgaatatggctaaggcttatgacagagttgatcgttccttcctttgtggcatattgtctaaacttgggtttcatcttggttggattgggttactcatgcgttgtattacttttaggtcgtatggtattaattttagcagtgagatcattggtcatattttgtcgtcccgaggacatcgacaaggggaccccctatcctcttttttgtttattatctgtgctgagggtttagattctcttatccagcgtgttattggttagggttcaattttaggtcttcaatgtggaagaaggggccccatgatttctcatctcttattttctggtgacagtttttcttcttggaagcttcgacgactacttgttttcggttttaagaagttttgcaacaatatgagaatgcttccagccaacttgtaaatctccgaaagtctgtggtgtgttctcctctaaaatttctcttgattttcgtaagtatttggtgcacattcttagagtttcactcgttccatgtcatgataagtatcttgggctgccgtgttttgcaggaaaaagtaggagtggtctttttcaatcgattaaagacaatatttataacaagctttttggctggaagtcaaagttattcttctcttttgggggacgtgaatttctgttgaaatcagttattcacgtcattccaaacctgtgctatgagttttttctgtctaccggttggtattataaatcagatttaacgaatgtgtggtactttttggtggggtggggatgatgacaagaaaaatatgcattggtatacttggtcgtgttggtacaaaaatgatggtggtatgggtttccaagacatgtttctttataattagactcttcttgctaagcaagttacacggttgtataatgatcctcatttaatttttggctgctaaggttatgaaggggttctattatagtaatgattctttgttgaatgttgaggagacaaagcgagcctcgttcctttggaagagtattttatggggttgtgactttgaaagaaaggatgtcattggcttgttggtttaggggactctataaagattcgaggggacacgatccaaaggaccatgtgggtcagtcttattctttaatttaagagtcgtttgatcaggtcgaagctagtgccatgttgtctattccttgttctttgtttgaccaacaagataggcttatttgtcacttttcaggtgacaaaatttatttggtaaagagtgtttattggagcatagtttcgattttgggttagggataagtttcaggttcctcagggacttctcattggttgaagcttctttggcaacttaatctcctgccaaagattaaaaactttgtttggaaggcaagtcttaatttcctacaatcctatgccaatttgactcgtcatggtatgaaagcttctaaggtttgtcatatttgtttctttccagaataatgagactactatatattcatgctctttggtgttttcctttgctcaagtgtatccgatcacattagatcttgaaagggctcgattctctaaaggatgcctcttgcttttatgaattgttaataaattgtgtacatatttttagtaaacatgaattaaaggagttcattgccctttgttggcgcatttggcataggcgtacgtaatacttttgttcatgatcataagtttcttcctgataatatggtcaatgcttgggccattcactatctttgaagataccaagatgctaatgttggtgggttgtcatctaaaggtcaaccttctcctcaggggcgattgaatagtgtcaactaccgatactgatctggttttaggtgagattaacttgtttgtggatgctggatttgtgacgaaggtcgcaaaatggggatgggggctgtggcgtccaatcctaatggtcatgtcttcttttttggtgtattttcgagcgtgggatcttttgagcctcatgtcgctgtggccaaagctttgctccatggactctccctttgccttaagttgggggtatatgtatgttactgttttctctgattgcacgtggttagttcttgcggtaaatagtaaagttacccgtttcaataattttagtattgttcttaataatattgctcaattggaaatcttttaatagtacatcctcaactcattgtaaaattaaggtctaa

SEQ ID NO: 22182 - DNA, 2570 bp, Cannabis sativa
ctttggtgcaggtataatagttaagaactaagtcaatatctaagcaaaaattatatttacaactatttattaataatctatttttatttagctatttgtaagaacgaacacttaatctttgtgagttgaggaatacatacacatttagtaatactaattcagtatcaactgtacctggtaaactcgaacaatgttcaaagagtctatgttagcaattgattggtgtgtaacctgaacaagggtttatatgtccgtggagtttaaggtaagtaggttttatattgataaatgtaacaaaacaatggatcgattagtgagttgactaaattaatatattttattatgtgtagtgagcactagagcacaattatgatctgtgctagtactcaaagtagtgcatatctcgactcaacgaatgaccttatctcgaacaatattatgaattgtgtcaaaagtaattgttgcaaattaattcactaattaacttatttttggtttagtgttgtggacttgtaaggatttgaaaagatatacaaaataaaggtctagtaaaaattaaccagtacatgtgtcgacattagccggatggagtacaatatgattattacgttatgaagattatttagagtttcatgacggatgataatcctttgtaaacatgcataactcttatgatatttagtttttattttaattatactcacaatgtaataattaatatctttttatcttttgttctacagtttacgttagatgctccctatagtaacgaggagatcaatgtagtatgggatgagtagcccaatttgtggagcctttgataattgattgagtacaaggttaatatttttttattatgatacataggatataatttttatgattgttgctattaactcttttggtattatgtaattagtttgtagttagtttttatgatacatagaatataagttttataatcatttccattaatacctttggtattatgtaattagttaatagttagttttatagtccctttactagaatttattactaattataaaagttatatatacgttttataatcgttacttttaacattgtttatgttatgtatttagttatagttattgatcatatatagttttactgttatacgagacgattctaaaatctaaaaatacatgtaggaaaaattccatagaaattataattttcctttacctacacatatgttttattttataaccgacacaaaaagtactaaaaaagtatttaaaaaaagttatgcatcatttcagaacccacgactcaagtcttttgcggcagttttgaaatgacacaactctttttgcaccacttctaaactgacgcaaaatgttataaagaaacttttatattttgtgtcaattttaaaatgatgcatatagctttccccataattttatataagacgtaaataatacactagttgcatgtatggcttatacgtcaattttatagaccgatacaaaatatttatatgtcacttagtaatcgacgaaaatacccctttataatagtgtatgtaagtatgagctagtctgataggtaaactagtaacgaacaaatcaaagaactctaataatacaattagcttaaagattaatcatcttaggatttagataaattgatctatgatcaactaagtgttattgaacttgaaaagatatatcagtaagtttatgatatcttttccatcataaatatctgtccagtttgttgtaaaccctatacataaaattatagtttactttcttgattccttagaaaagacattcaactttgccaagtgtaagtaaactctatctttgattaacatattagtgtaaatccaatgtactgataagtcatgtaacttaaataattttaagtatataatcacaattattttctactatgatgacatcactataattggaaataactatatgttaataatttaattgaacatatatattaaacatattatagtgaaaaaaaacgtgtgaaccaaaaatatgataatgtcaaaatgtgatttctgaactttattgataataaatatgattacattaaaatattttgaattagggcataaaactcaacaaactctcacttgcactaatataaaactaaaagtataatttaattaatctcttgttttttatgtgtttatctaatgttgtatatggtggtatatttgtaaaaagatctgacaagctgtattaagtatcaaccttctccactgtaatattttccttattcatgccttttatctcttctggattagtaggacattgttggtacgatagatgtatgccatggctagaagggatacgagctcttttgtagttagtcacgagaaggattctagcactttatcaatgtatgttgcctgtgagagagcaagtgatctattcttccagtctctaataatttggatcccatgaacataactagcttcacccaagttctttcatttgaacttagtgctaagccattcctttacgtcaaacattttcttaaaattttttcaatgactaagatgttgtaaagaccgctta

SEQ ID NO: 22183 - DNA, 3458 bp, Cannabis sativa
tagagacaaggatggtaagcttgttcaagcggtttcaggcagtaggattggtgcggtttctcctaagattgctgaagttgtgggtatgaaagaggccttgagttggataaagacgaagcaagtaacgggtgtggaagttgaaactgattctttagtcgctgttcaggctattaatggctcagttcaaataccatctcaatttgggttacttgttcaagattgtcgtttgttactgtctgagttacaaaatatttttatttcttttgttaaacggtctgctaatagggctgctcattgcattgcaaggtaatcctgttttatgtcagattgtatgtttgatgagttttttgctacatcaaatttactttttattgtaagggatgatataatttcaagttgaataaaactttcccttttatttttttaaaaaaaaaaaaatccagaagaagaagaactaattgttaattcgggtgttttcataaataaatttccaaaaatgacaaaagatttccaaaaaggacggatcagcagttttctcaactttttatgtattcattgtttttacaaaaatactacctattatttttacctattctttttatgttactttatgtaaagatgtaaaaaaaaaatagattttagatatttatgtaaaaatctcatgttaattggggtttttacaccacatattcaaatttctaatattttttacgttttttactgtaaggtgatttttttcttttaaaaatattgtgtattttttatattgtgtactgtgttaagttttcactgttgtttgatggttattttttagttgttttactgttgtttgaaatgttctgttttgttattccgtatgataataaaattgttaagttttactcaaacttcagtatttttgtaataatctcatgttaattttcgaaaggataaagagaggcccattattaatttaagcccatataaggcccaaacctcacaaagcactccatcccaaaaagtttcatttggatttatttttatttttatttttttgtcgaaaagatttggtaggaaaattgaacggttattagcgacctctcccgccattgccactgtgcgatctgacctcggaccttcaatggcgacaaaaatgttaatggctaccacgcctctctctttatcttctcctcctttcactttttatcataactataaggtaaactccttttcaacttctcatacacacatcagcttatgtatgtttgtttgcctggaaaatgtagaaagatgaggagtttgtttagtgagtttcaaatttctgtaattgttatcaaaatttggaatttcaattggctcatttgttaggtgtttcattgttcattgagacaaagctcactggttcagagatggagcaatggatattctgggatgaggagactcaagccattttctttcaccagtttaatggattttaagatgaggtattttccatttacatatgctttgacttcatacaagtttattgcattactttatagtgtattttgtatttttatgtgtatgaatttgatagccttgtttcaaaacatattgtttatgagaataggaataattttcacattcacaggccaaaatgactcaaatctttccctgtcttgtttgtataattgtttttctgctctagtcagactagggaattcttgtccttttagtttgttaaaattaacttcaaatgcccacttagagaaaaaaggaattgttttactgtttgattgctttggctggattttaaaggtcaactattatatatgatctgcatctatagatgtgatattatctttgatatgctgcaacatttttcattttaaataattattttgctatcatggaatctggttaatggcgcaatcgatggtaaaattgcttatttgaatttaattaaacaggagaactttgatatgtgcagtcaatcaagatgctgaggaagctttcaaaaagactgtagaagtggacaggctgatagataagttgagagatgcaaatccaaatgaagtaagtagtataattcattgcattgtgcttttagacattctatattatttgaccgaaaagactgttaactcgagttatgaagatacaaaggcattactctagttgctgaacttagttgggtttggcaagacattccatatatttaagacataggagatatcatcaaatattcctgtccatactacttctgcaatggaaaaaaatatatccaactgagtagcaacaaatatcgaaaatttcagtttatgcatcatgagaaagaaaaaatgtgttctatttctatttcattcacatattgatatatagaacaaagttatgaacatatattgcgctttaattactttctttttgctaaacagaaaattctaactgagataatatttgtttaatttattgaattcaaaattatttttatttgaataatttttttctttgaacagctacaacaactggtcgtcgaaaatgtccttgcatttaatgagggcttttggataagactagcagcaagaacagatacttgcaaatctgaggatgataaggcatggtttttaacttagtttttaatgatctatctttgatctgtgttcagtatctgccctctctaacaatgcttcgctttgttgatgtgttctttcagaaagattatgaagaattagctgtatctgttatgagcattgtagatcgacttgtccataagaccaatgtacctatctctctttctcttcatcttccactcactatacacattgattgataaaaataaatgaaaatcaaaataaagcactttctgtttgttatccatgacagtattttaactcatttgttctttatttcattctccacatttcaggaaaagatagaaacatctactgatgtccttaaggatatcctaaaacctgtagttgaaaaagttgaaggtgaggaaattccatggcctcctagagatcctgaggtgcttaatcaaatggagaaagtgagttttttcttttaatgacatttcattgtttccctggtctttcatggtactttgaaatgcatatgatctacaatctcgatttcatttgatccttaagctctttgcgtttgccctggattgtaagtctgttggaatatgatatccagagtgaaattatatatattttccttatagtgtttaagtgccttattattacagtcatttggatatgttttctgataccaatctgacaatttctttttctctctttttcctgatcattaggaagtaattgaaagggagaaagaaggacaattggatgaagggtttcttgctgaagttagtgcacaactacgccaagtgagtccattaattgattcctaaaatacttcacccttctttttattgaagctataagatcttcatcctaaagattaaagagcttttaatctaacacattaatgttgcc

SEQ ID NO: 22184 - DNA, 2670 bp, Cannabis sativa
gtaaacaaatgagtaacatgaataatgtcaacaaaatgacaggtattcatagcaaccctcgctataacatctatctgcctaatgacttcagaatttactcactttcatgattctttggcccttttctcatatttagagaacgaagaattagttaattttaacttttcagataaatttcacagatttgtaatcattgaaatttatctaagctaatataagtaaggcaaataccaaaggcacttcataattatgttattataaatcttttgttattttaatggctctaggtacaactaattatttactaaatcgagatatctaattagtcataaaactatagctcttttctcaataatatcaacattaatttacatctatttgaaaaaaaaaaatacctgtgaaagtaactaaaactcgatgttgatatatttagaaatttaaaatgaagaaaataatttctcaaaaaaacaattcatttcaaatttatagatactaatcccattcgctgggtccataaaggtcaattggccaatccgtcaaagataggcagaacgggactcacaacttggaacctcaataactgtttctcaacaatgaatttggatgccatagtgccagattaacaatcaacaattaacatgaggattgacgtgaactaaagaacgatgtccctaggggtcgtctaggaacaaaatacgaaagggcatccaggattagatagtgtctcgaaggctgacccacatggcacttttttgacacgatcttgagaaattaggtggcttgtcccctgtatcagaccttggaaaggctcacaacaaaaaggaaatcatcgttttggacaaacacccactattttggcattccttattctccacgatggcttatgcccacatgccactgtcaacggtacaaccatttacagacatcagctcaatcaacgttgggtctcacctactcggggcaatagctcaaaatatattatattttaccccatcagtggatttcttacacaaaacaataccttgacccatcaaaaaatttcctataatatggttttaactcttcatgcaaagggttgggaattttaagagtcaaaagactagaaatacaattgtatactccatagccaagagctcaataatagttgctcatggagtaaggctcattaatgccccaatcacataaaaatcttgtcttattttctctctaatcttgctttctttaggttaaatactattgaattcaatttttgaaaatcttggcaaaaaaaataatgaatgatattgttatttatagattaattattgttagactatgtttagcctacgtttcaggttaatatttagagttggttttagtcattaataatgtttttaggacagaattatgcttattttctgtactttcaggttctcgtggtttgtacaagcaagtgcataaagatttaaaaaaggatcgaggcgagacaaatgaggcttaaacacctatttttcttggcattcttgccgcagcgaccacaaattatggtcgcggagagatcactacagaatgggtatttttttacttttgttcagtggttgtggtgaggaagacaaaggctgcaggcagacattattgccgcgcaacgaccatgacttgtggtcatggcgagatggttggtagaaacaaggaatatttttgactttatgaagtcaccgcggtgaggccattcttggccgcggcgacggaggccgtacgactcgagggcatacaaagttgtattttttgatattttgagtttaaattggctctatttaaatggacttcgaagttgaaaagagagagagactcaaaaattgaaccatagaagcagaaaggacgatggctagctaggtcgagagtggcaacccgaagccatttcacaatcagtttctttcttctccttttatttcttttatgttaatttctctttttagtttaattatggatgtgaatatgaatattatgaactagggatatgatgaatgttagttgaagttttcccaacttagtttatgtgattgttagttttttttctctagattattatgatttgttgttatttgtgttaatacatgttttagactggccatcttgaatatgatttatgatcttaatataaaatctgagaattaaatgaatattaaaaatgctctaattgaacaaacattagttttgatctaaaacgagagtcatagcatctgtgacaattacattatgtactcaatgcaaattatatgttaatttatttcctaaatgcaaatagataatatatgatttaggatcttaatgatctgagaagagttaaggttatttctttaatctgtcatcacttaaaggaaaaaaaaaaacagatatattgcattaacaattgggtaactgaaacaacaggattcatattcctaatctttcatccgtagtctcaaacacattaaaaattgtttctatttttttttccttttatttttttgtcaattattttccaacactgtttcgactcaaccgaatagaaacataaatctaattaagtagtacttaattttaatttgctatggttcgacttcacctgtgtgagtaattgcaatgaatacgtacacttgcgtagattataattttaagcgcaatagtgcatgttgatcctgaaatcgagaa

SEQ ID NO: 22185 - DNA, 2545 bp, Cannabis sativa
agtcacaacttttttacttttttagtcacaagttttgttgtaactaaaagtaagattttttgtagtaatgtttgagtgtacatgtttatctcaatttagttaagttttacacttgttttgttttgtttccagaaaatatgattaaaatataaaaaatagagaaacatgtaaaatttttggaaaattaaacttaaatggagttatttttttatcttggtgagtttggcaatgttcgggagaaaaatgtaacaatgaggagaaaattgggaaaattatcagtcaaagccatgagtttgaaatttgaaactgtagtatagtcctccaaataaaaagatctccgcaatcgtcatttttggaaaggttgatcactcacggatgccagtttcggaaagagtcttgtggaataatagtcgagtccggacggaagttcctggatgattatcgtgttcactccaggtttagtcttccaaataactagtcctttcctggaaatgagttgcctctagctagttgtcactcctagaatatagatctgaatagtcgactacaacagaatcaatcctatccagaagcgtcttcagcgagtgtccttcgtccgtgagtctggaagctcacatatgttcttggaggctctaaaacttaagctagcgtggagacttcactcaaagtggagtttgttaagttagttatttctaacgaacttaacaatctcgtttcttctagccaccgaccttaggattttgatcctaagcctataaataccacattgcctttgttatttaaaagggagattaagaactcagagagatagagagttagagagagaaaatattgagaggaagagatagaggtgcaaagagaatagagagattgagtttaggtattgtacaaagaaacttctgtagatgaagaagatttttgggtgtaactgtgagagttcaaagagttgaaacaattatgttaactcaatagagaatctcgtctcgactgtactatacttgttcttccttaattaatataggaatattatggtagtattttagaactggagtagagtcatagatcacatctatctataggacttgaacaagtatatatcttggtgttaatttttttattttctgcatttaatattttctagttttcaatacttgtttgccccaattttttatatgattgttgttctcgattggataatcttgtcattactaattgtttgattgtttagagttttattaatttaattcggcatatttaatcgtaaattttacatagataccatggctccagatgagacaaatgaaaaggaaaggcgtaaggattgcagctccaaaagcaaaaatttgaaagaaaaaaaaaagattaaaagataatgagaaaaagatagatttggcaagtggagttgcggctcctaagcatttttttttattttttagtttaaaatctatataattatagtatctcctatagaacttggtttttttttttatttaagcgtttatatattacaataatgttttacgtgagactcgaacccaggacctccaacacacagactcacctatagctacttgagctagcctcaagtggtttcctatagaacttggttagcttatagaaatatgttatttctaatatttttagtacgttttgagatctttgaattctcaaaaactgatttatacaaactacttattatttttcattttcttcttattttcctttgtattttcttttacgctcttatttttaattatgaatgcaatagttatgcacatgattttcacgcactaatttttttgtctaggatttcaggaagtcactttaatttctatgttatattgttatgatattttattaatttcatcctttctatattacactaaatgatttatgctaaatgcttctaaatactttatcactatttgcatacttttttgatttaattttgagattcgagagatgagaattgtgtatgctagaaatattttactagaatctaaatttactaacaagtacatttattatcaccctaaatttcaatttttaaaacaacgaactttaaaaatatataacgttgagaaaccttacattgattatagcaggatataataactcctcccactcagatctctaacccttgtacttttctgtcgaggagtattatcaagatgtgcagtccgattcttcatcaagttcttggattcttcacaatccgtactagacttgctatgggtgggcatgcactcactcactataggcttgaaatttttgaagaacaatgaaggagattcgaaagagaagaagaaagaaggaggttttaaaaatctctagttccctgacaggatgtaaactagattatgagatattagttggataatgagagcatcctattccttttatactatttcacctaaggttaggattgaattatatggaataaaaatgataaattatagagtatgtggccgaccatatagatgggccccactagttatattttttgtaattttttcaacaccattatcttttatttcacaaatgt

SEQ ID NO: 22186 - DNA, 6348 bp, Cannabis sativa
  modified_base (1960)..(1960): a, c, t, g, unknown or other
tatttaaatgtatttttcaaatgtgttttatattcggtttagcaagttttcaaatacgtgcattacatttttccgcttggagttgagctgctagggtattgtgggctctgagcaggtgctcctgccgaagaggcatgtggttggcccagcttaggtttgacatctactcgctgaatagccttttcgaggttgagaaacccatattctcagtctaaaaactccgccatagaccccacggggccacatcttttaatgtccttccacagttctccgagtaactcgatgcccccgagtatggcagtcagcctcccctctttagttaatcttgcgacttttgtggcctctgtcatgaacctgcttatgtaggctttgagcggctctcctggcctttattttacttcgaccaggtcttctacatgtaatgggagttgacgagaggaggagaactgcgcatggaattctaaggaaaaagccttccatgaattaaatctcccttgtggtagctcgaagtaccactattgtgcaacttctgtaagtgtggcagggagtaccctacactgtacgtcaccccgtactccttgtagattcatttgcatctcaaagtatttaagatgtgataagggatcctcttttcctatgtacatcttctaggtcagcatcttgaactttaggggtagctcaaggacgtcgatctcggaggtaaagggtgatccgcatgctcggtccagttcgagatcagtgagttttgggcagatcagaccttgaaccatatttttcatttgatctacctgtgcttgcacagatgtatgaactgtttcagcctcttcaccaacttgtgtcacgtcaagatctcttagagttgggtcctaagtgcagatgcctggttcggcggctggttgaacgtattatttgtctagacctcttcttctgttcaaatcagtcctgagatcatgggctgcacccaatctattgaatactgaagtaccaagtggtctcagtgtttgactagtttggccggtgggttgaccagaactgtcagtttggatgaagttattaggtataactccacctaaaggacaatcagagagggtctggtcgtctaccgtttggccccacaggtagggcctgtggccgaggattggacgactgaccattatgagtttgggcggtatgcccagcaacaatttcttcttaccatcaagtggaatactgaacgtatcagctggttgctgattagaaacttgataggctctctgtatcagtatagtagcctgccttgttcggtcatcgatggctgcttattgagccttcaatatttccatctccctgtccctccactcaatggactggcgttgctgctcatagaacgcaaggtttattgtagcacggagatcctccttatcatggtgcaaggtgttagtatgaccttgcatgagtccaagggcatcacggaggttttgaatcttagtgtcatcccccacacgttgagcattggttgtggatgggattccagtggtgggagtgctttgatcggctgcagaactagtattcccagtcttttgcacaccttgcgtgatcccagccagaggggaagtcacaccttggcccactgtagatggctatgtgttaggctgctcgagattggttcttggtgggacccttgtgttcccaggggtttgcatagcagggtctgtcaccattgggtcactctgatcaaccaagcctctgcgagtttgcaccaccattttgtatgcatgttgaaacttaaaacaaagaacaaacatggattttttttctctcaatgaaagcaccaaaatgttgacctcgcttttagtcaacaaaatgagtcaattatgaagcaatttgaaatataataaaaatagaacaaatttcaataagtaataaagaacaccaggttttgaagagatccaacccctttagtttggtaatagcctactcnccttagattgtattaactcgagaataaagagcatagtgttacctctctcaaagctctcacagtgaaatcactaattatttctcttagatctctctctctctctaaagtaattctttcgattccttttacagtgaagctagatcactatttataggggcttaatgctcgagggaaggtttcccttttgcttacaatagctatagttggaaagaacatttattacataattagaataaatgacatgggggattgagacagcctgtcataccctctgattcaatcgcatgatcgtagggattgccttcgtacttgggcttcctataccattctgaagtagtcaagtcttggtacacagctctgaaaaccaaacttattctctactcggataatttgccctttaccctgctcggataagcagatgttgtgcgtgcagatgtactaccagaatcccgttcagaatatcttttcgttcaggtgcaaagaatgttggacacgtgtcactcgtacatgctgccacgccatagtgcaaaaaatgggataacacaaagcatgcccttcgattagacgatgagtcatcctagttcgaggaggttcctctgtcgattatagatatctgcatcattgattcatgaatgattatggtcactacgcaaaaataaaaaaaaatagttccaaagctcaactaagaagtctctactcattctccaattaaggtctaaataaaaaaaaacaacaacaagcttaagcctcataacaatgaaaagggacactactacaaatatgggtgttcgcgacggtcctaaaaatatatttttttagagaagtgttgctaagaaaataatgagagtatttaaaactgccgcgaaaataggggttttcaacagtatactgctgagaggtataggcaatggtttttaaacgtgcccaaaaaaagatttcgtgtatttttaaaggagaattgcctacggtttaaaaccgtaggcaattcccgtgcttacatttaatgcgtttcaggtctaaaatttcatttccccgtatcttaaactccaaaattttatttcccacctctcaatatataaaccccctcaaaaaaattagatctcattttttcaaagtcatttataaattttgtttcatttgtcggctctctctcctccgcgactacgatccacgccatccgtctcctccactttgtccctctccttcgctttatccctcttttccgctctctcgtggcagcacaaaggtaagcacaatattctcttatttattgtttcaatttctattagccatgatttggtttttaaatcttgatctgtgtgtgtgtgtgtgcaaaagaaatatgaagcttgcaatccaaagaaatttttaaggatcgtcaagtgaaaagcaatctgaagcctgtaaaaaatttttttgaggaggatgaacatgagcacaacgacggtggaggaggatgaagcttgtaaaggtttttgagcagttgcgacagtgatttcgaggagaatgaagatgatggtttctttttttgggacaatccactatagcgacagtttaaaactgtggcctttagtatcgactatagtcgacgattttaaactgtcaagaattcttttcccctaatatttttccatagtcacttattctacctagtattagtgatgcttgtataggcaacaattttatagaccattgggaattctttacctgactacgtaaaactgtcgaaaatttcgagtttcttagtagtgagatcaacttctctaagtaagatttagacagtctaatcatcaaaatgacataaacacatcatttcaaaggataaagagtgatcgaatcactcaccagctcgatgcagaaaactagccaacaaccctaaaggctaagccatccttgaagcagtagaaacaaatcctcaagacaacacacactaagaaccaacactaaaataattcatctcaataatgaactaaatattagcattgattccacattattacacaatgtaaaaaaaaaaatacaaaaacctccaaaaggggacctccttactacctaactgacaccaaactcaagtgaagcccccaaaagcgtagtcattaaggtacctggccgaagtagcaatagagactcggatctgagactttagtcataacttggagtcccaatccaaggagatatcgacggtacaactttggaagaactgttgtcgctgtcagcctgtgagaaatccaatggatctaagcttaaggccctccaccactccgacaacagtcacaagcccccgattgttgatctccaaccatcagacgccgccacttttgacgacccacaaattgtgcaccaagctcactaccaaggaagacgattagatcgtcgaccacaaattcgcgtgaaaagacgaactgacaacactaagggaaggtccttctaactcaccagctaaacacccaagatctcccctcgcccaagagtgccaccagcacgattaaggttggcacttgctctgtagccgagagaaggtctaaaagaaaagaaagaaatcgtagatttttaaagagaaggaagagaaaagtttttttcaaataaaacttatggatacaaggagcaacttaaaccttttgataacacaaaccatataaaatatcataaaaatatataatagaatatgacaattaattatatgcaaagaaatgaataatcctgtttcatccgtctctctctttgagtgttttgtttgttctctctttttgagagtctgttagtttggatgttccttttgtcctgtactgtctgattgtgttgcttttgttgcccctcttggtacgtgtttattatggcatcaactagtatcccagtggaagatctcgaagagcgttggaaagagattcaacttgaagaagaagaggcagaggagacattctacgaggataatgaagcagatgatgattcgaacattgacaccagatggtgtttggttggccgactactcacagggaagatatctgactttcgtatcttccaaaatatcatggctgatctctggaaacccggcagaggaatgtacgccaagcagctcgaccaaaacagatttttgttccagttttaccatgagtacgacatcgaacgtgttatctcgggcagcccatggacctatgaccgtaaaccattaatcctcaaccggctgtatgaaggtgataacccccgaactattagtctcaatactcttgatttgtgggttcaaatccatgatttgcacaatggtttcatgactaagaaagtggctacggatgcgggaaattatgtggggtcttttattgaatcggatccgaacaacttcactggagtttggcgggaatatcttcgagtacgtgtaaagctttctcttgattctcctttaaaacgtaagatgaagtttcggaaacgtgacggtgcctctttctatgccacatttcgttatgaaaatgttccaactttctgcttcatatgtggtttgatgggacacgcagagagactttgtcccaggaatttcgacacaccagcccatctccttgtaaaaccttacggtatgggcatgaaagctcttcctcggcgtcatcaaaactttgctgtttccccataccttcggtcaggcaaggcttctgcagattcacaacctggtgtgaacacggatgctgctggagcaaatcatgggcaatcaacagatcctattttcatgggaatatcttctcctgatatctctcattctaaaaccaagaataaagggattatgctttatgatagtcaacaagctgatgtggaattgactcaagctgaacttaaaaggaaacgatttgctgcagaaaaaaacaatgggccttcggatgcttcggctattactgaatcgggctcaaaaaactcgaatatggtgggtgctggtatccaggcccaccaatcgttatgagtacgttaagttggaattgccgtgggcttgggaacccacgggcccgacaattccttgagaacattgttgttccaaaagaaacccaattatgtcttcttatgtgaaactttgtgtaaaagtgatattattgaaagacttagagtacggttgggctttgaaggagcccattgtgttgatgtccaaggtcataagggtggacttgctctgttgtggaaatgcagtagtgatgtgcgacttcttggtttttctaataaccatatcgacatcgagataaactctcccaatctccctgtttggcgcttaaccggtctctatggagaaccaaatcgcagccttcgtttcaagacttggcagcttatcaccactctttcctctgaatcccagcttccttggtgcataatcggcgacgttaataacattggcaatcaaaatgagaaaagaggaggcc

SEQ ID NO: 22187 - DNA, 1776 bp, Cannabis sativa
  modified_base (1127)..(1137): a, c, t, g, unknown or other
tctctgtaagattaattattataacattaatgtcttgttgacaaagacatttaacttaaattcatattcacatttcacacacacatcctaacttttatttctaccattatattcatttaatttgggttaacatttatttattaccaaattaaacatgctaatataactacctatattagcacctaaataattgggagttaaggctatgaattaattgtcaagttatccatactacatatagaaatattatataaatgtgtatatatatatatatcacagttactattaataaagagttgttattgatgaaaataaattactctttcatatacataaatatataaatgtaaaatgtaaagtaggcatctttttttctttttcttaaatacctaatttatacaagaaaaaattatatcttttctttaaattttattttccattctgattaattttctgtgaatgaatcgcccttcaaaaaaaaaatatccattgaaaattaaattcacataataattttttttttttgctggagaaaattcatataataattaattgactgaatgttttccttaagacatatatatgcatataaatatactaataagagggtattttcatacattttcaaaatgaaattaaatgaccatataaattttagaggtttttttatttttatattttaaaatagtttttttttttatttttacagaatttcacataaaaatttctattgcaactaataaatcaatctaaattgtaacaaaaattcgtataacaacccacataaaaactacagaaaaaaacactttagaaacccaaaccgtaaatttgaagaaaaaaaaagttaagaaataatttatggagtaatttccctaaattttattaacaattgaattgtcatgttttgtttttcttcaattatgtttttaggttactgtgtgtttattatgtttaatcatatttaatgtttgaaaaaaaaaacacatatactctattctaattgaaattaaatatgattctatatgaataaaataaaatgctttttttttcttaaataatacaacaaaaaacttgttaattatgttacacttttttttattacaaataataataaaaataataataannnnnnnnnnnataataataataataattgtggttctataaattatacatagtgtgaatagaatcaaaagcaatataagtatttgtagaacaagattctaaattgagggatgtgatgattctgatatcaaataatagtattttaggataattaacatttattattaattattaatgatggggttcttcattttaactcaaaattttaatttatgtgatatcatttttgacaaggcagagaaatcgttgacaattttatttttgtttggtttgtcatttttgagctatttaggtatgtagttttatcatttaatgctgagagattagtttacttaagaaataggatatttacaataatagaatagagtagtactctctatacatatatactactatattcaatgatacaaattcaaaaacagatttattattctttctctttggccttgaattatatctttggaaaagttattatcatttaataatggccaaattttgcctattctttttgtactccttattatttgtaatgattcaaaaaaatgttcttggaaaatttaataaaaacatacacacacaaatatacaaaaaaaaaaaaatactaatcacaaatataatcaaaacaacatataatgcctaccaataatttaa

SEQ ID NO: 22188 - DNA, 3967 bp, Cannabis sativa
tcgaaagcctcaatatggtgctcgaaagggttccaagaatacatgttgtagtacctagtcaagattccacatgaatgcgggtgcttacttgcccttgcatccattgtttatatccatagctgacttctttagaggatagagttgatcatgttatgccaaagagtgtatgctgatttagttttgtatgatgaatcttggaccatgccactcgagtaatgtgatgaagattaggattgtttcggagaaggatggggaatcaacaggttgctgacactccatgttatgatcctaacttgttgacttatttatttttgttatactaacctttggtctttactctttgttgaaaatatgagcttcttggctaccatggcatcctgtttgaacttgaagaggaaggttgacgttgagggaaattgagcctccagcaagggaggtggtggcactccttcttcctctattgtctcgaagaagaagattaggaaaaggggtagaattaccaatgctgctcttcctcctgaagaatatggtagggagaattctaacactattcgtgtaaatgagaggactctaattgacctttctctggatgattctaaacatgttgctccaaacttgggttcagacttagcggagcaaggttcttggcttcttgctaaggatgaggcattgattggtgctagggcagagaacattccattgcaattgttggttagcaccaagcctccacacataatttctcaaatatgcttcactaacatctttggagtaagtactttgtcttgtctccttctggcttagctttcttttgttgtatcatcacctaaaattatttcttttatcttcaaacttgtgtttgttatgtctacaccatggatgacaaacacaagaatgtggtggagctggctgagaaccttggagttgttgaagactaggttgttgttgctgaaggccaggtgactgacttgaaggaaaaagtttcttttgttgaagttagtttcttctcttgagagtgagatgaccagctaccaatctcttcttcaacgtgctctcttgagtcatctcactttgaataaggaaactgatgtggctgatgaccaaatggaccaagtcaaggtcttggagaaaaaagtgactactcttgatgatcaagctttgcatgatgtcacccactacaatgagttacgttttaatgccatttatacagcctaggttgccaaatgtaggtcctagtcattcaattagagcagtttccctggccatgatgtgccaaagttcatcgagcagtgtgagaaccgtttggatgtagattctttccaagaacctaacttcactgtaaattgtggtgaactagttgtcagagaaacttcacgagttgaaggctacaaccctgagtgtcctgacttccctccttatgatggtgaggcacctcctggggagagtgaaggcagggaggaaaatcttattgatgtaacattccttcaggaccttctttgactccattcttcttttttgtttctagcatttagcttttgtgtgttggttcgtcgttctcgagaggcctttcgatgttgataagccttagtaaaatgtgattagaacattttgtttagattagaaattatttccaacttatttaaacatcaatttgaatttatatattttgttttaattttactttaactattattgcttgaccgtttaacagttgcacaatatgccatgtcttaagaaactcgattactgggagtaagatcactgttttcttaaagttatccttaccatgagagtacttacatagatgtgaaaaaaaattgaatgctcatgtaaaatatgtctctcgtcaacataacagagcctatatgccacccaagtgatcaaagatatgccttcattggtcactttccataccaaatcccctaggccttcttgatcatgacttttgagtggtgttacatgtgtgatcactctccacttatctgaggattcctagtaccagtgtttaactcacttcagaaacaaccgaagttatctaaagaccaactcacaagctttactcagcgcttagagagcgtcgttagatctgtgacctataaatgattaacttaaatgaagtaccaataaaaactttacttatgctttttctaattaaattaagtacaattacattactgcgaactaagttgaaagaaaaaagaatacactttgatgtagtagctgtagaatttcttcttcattcaagcttagctgaagtgatgctcactatgctaatgcctattcgacttttagcataggagtcataccttagcgatggacctcttaacctagggacaactctgttgcatcctacaagttaagtggagatcgattcacttacacgtagtaaggtgaatctcactgtgaagtgagttgttttgaggacaacaacttttattagtaatactatcgtagatttgccccattctaataccttcgtaccagcactagattcaagttgtagtcatagcgtgccaacttgtaagtttggggtttaagtgcttcaattttgacagatagtccttcccaattaggccccagtactcctactgttgcatcttttgtatccagcaataccggttgtaacaccatgtatccaggcttaaacttcctatcttgaaccttggagatgtagtgttttgtgaccctttactcatatgtcgcctttctaagctcaaatccttctctgatcaattcaattcaatctagggatttagccaataaccgatgattggtttactggtcatatgtaagtctacgatgggatgatgaaggtgtgagctctacgagtatcatggctttgtacccgtaggtgtcatgtgtgtttttaaggagacatggggcacatctagagacaaagatttgataacctcttggattaagaatgatgaccatcacaattcctcgtacagatgtcccattaatttgaaaaagcgcctaatgaaagcttgacaaaaagagttatggcccacttagtgtctttgccacggagaagggtcatacttgtccctaaactccaagaagtcatagaacaacagtttgactacttgacatacagataaggactatttgaagggattgctggtggtgactcctacgcgaatgtagatggtgactcttacgcgaatgcaaatggccacctcagatttacatggaaatcgacctacagacagttttgccttttttgacacaaaatcagatcttgtcccacgtgctaggccaaggtagtgtgcgtacgtacctctcgacagactttttttccttacggctcgtttccaggataatttataaaggagaaacctttgggcgacacgtgtccctgatccagatggtactactcaccatccctgcacaccacatgatcaagaagattcttcaaggccgaacagtcagatttgaaatggtattttcctgcccttgcaatggaatgttgtacaaaaccttaggtgggtaaagggaatacccttatccacacttaaaccaataaataccactaatttttatgtacaaaggatgaacaaaatctctactagctgaacctctacgaaaattactaaaagctttcttctttttcaagagaaacaaaggagtgcggggctagggtttatactgtaaagacatactgtattatcaaaatactttcctaaggggcaatacaactaactcatggactagggaatattaacgcccgaaccatgtaaaaatctcttgcctacttttttattgttttatatatttctgaaactctatttatttagtttatgaaaatctcagtaaatattttggtgctttcattgagagtttaataaagccttgtagccgtcgtaccacctcaaaaatggtgttcactcagaaaaaatttaggctagaaagcttttgaagatactattatggaggaaatggaccgccttgctcccgatttccaatgaga

SEQ ID NO: 22189 - DNA, 2029 bp, Cannabis sativa
tcatttctacatacacaaaacttatctataactaaaacaaattaaacaattagtaacacttataaaaaatatatatataatctatttttttaagactattataaatatattttttaaaaaattaaactaaaaaaattaatatacaaattacatttatttacaattaacatataataaacaaattaacattaataaagaaattaacatataagaataagaaaaaaaaaaaaaaacactaactttttgtgatggctccaatcaacaactttaacaaatttttctcatttatgttttcaaaatttttgaaaaacaaattaatttgtcaatatgtgaccattattacaataaccctaaaacagtacaaaacaaaacctaaaaacaaattaatgtttaaataatgttttttaagagtgtgtgactattgactttatgatatattttcaacacatcaaatcacaaacaatatactagaaatgaaaagctttttcacttggctcaatgcacttttacagttcccatctccactcatgacctttgcttttacagtatatatatatatgataatgaaaattatgagagttttttctgtgtaaaaaatataatatatattacatatatgtacacttacttttgccgagagagatcaagaggccacaactaccattttgatcagaagctaagagaagagatttttacctgcagagagattttgaataagattatgaaagaagaggaagatgaaatggagaagatgatgattatgatgtataacaaatttgaaaaataaaatagaaaaaaataaattcgtacctctaaaataagtgatggatgtggtcgtcggcacaaccactaccaccggcagtggtggatggtggacgacgcaaccaatgatggacggcgcaaccagtgactatgatataagggttttctttttttttattattaaatattttaggttttttttttctatttagttaataaataataaacgatatttaaattttaataaaatttaatgtaaatctgaataataagttgctaattttttttttttttttatatttaaacattacaagattaaacaaaaataaacttatttttacaaaattattttaataaatttataaaataatttgtaaataaattgaatagtatctaaaaaatcatatgagttacattaaaaaaaaataaaaagtaacctaaggcatcttaaacaataaaataacataatatagcctaaaaatataaaaaagaaacaaagtagtttcttttaatattagtcgtcttttttagagacttaaaaaaatatgtttctcacacattaaaatatttattttattatttatatatatgtaaagttttgaaataaatttttttaattgaaaagtaaccaattgatatcttattcacatcaaaagcaactaaatgattgtttttttcaaaactcccaaaaaaatgaaaatttttggaaacgagatttttccaattttttctatttctgataattattttgatttttggtatatatactgatgtggcacaacgatatttgtacaaataattttcataaaggtatttttataaataaaattaattttaagtataacattaaaataaatccctaatcatatattcattgattttgcaagggaattaatgttatttttgtaaacctaccataaataaacatggtatttcgatacaagttgtcattaatttagttttagtcacaacatgtattgtgactaaaaatacatttagttacaacaaattgtgatatagtgactaatacttttagtcaccgactttttagtcacaatgtaggaataacaatttataattagtcacaatattttttacttttagtcacaagtttttttgtgactaaaagtaaaaacttttatagtgaatatatatatgtgtatgtatgtatgtaaatatagtactttagaaaaatctaaagtggtggtggtatcaatattgtttggtgtaacgtccacgcttcaagcctccattgggtccttacacc

SEQ ID NO: 22190 - DNA, 3324 bp, Cannabis sativa
gctcatatttggaggtgttcgagtaaggcgagaaagcacgacactcaacaaccaacagcttgtgccgttacaatcgattcgcgaaagcgtctggagcctccgttaccgtttgagtactttggtaacggagtattcgatgtaacggcgaggtgtacggcgggggagttgttatctagttcgttaagtgaagttgctagtaaagtacgttcagttattgatatggttacaaatgattacgtgttgtcagctattgagtacttgaaaagtcaacaagatctgaccaagtttcaatactcttataaatcgtcaactaacggaggtggcaagtattgtgggaatcctgtgattagtgtcataaactatgtgaatttgccgtttaagggtattgattttgggtggggaaaggagatccattttgggccagcttatcatgaaattgatggtgatctttggataataaggaatagttgtgatgatgatgagtctctcttgattgtgatttgtcttcttgtggaacatgttgaagctttcaagatgtatttctttgatgatatgatttaactaattaccatcactttgtttgtttgtttattgttggggtttgagataataacttatatctattattaattaagctatatatgcactttgttttgggtatttattaagggagtgttttgttatttgaattgtaatttatgttttggtattatgagaacgaaaatcattgagttaataattaaggggtttttttttcaagtatatattaaattggcaaaaatatttacaagtatattgagcgggccatataaatatttttacatgccaaccaataaaattttacaagaatacctcttgctctatttattcagcctcattatctatctacttcaacaacgataactttcagcaaccaatccaacaactaaacacagccgaaacgtaacctaatcagaaagagaactcttattaattctgatgacttcacctgagaagacgatcagaatcaatcaaaatatggactgtttcgaattcatgaaaaatgtgcataaaaattattacaaaactaaaattcaaccagaaattcggtttaattcgcataaaactaatatcttgactttatttttcagattcatgaaatgcaaattgcaaaaagttgaactgaagttcccaaaaaatttaactcaggtataataaaaaaaaaatattacatcaatactatagttaaatatttatctctatgcatttttgttacgttccaaattatcaatgatgaatttgttcatatcaaatcacgaatataatagtaaattcatatgtagatagagttacgtacgtacgtggaaacactgttctggtttttattatgttttataattaacagttgcattacaattgtataaatatttttctaactctttgaaacttgacatatcaatcattacaaattgacaatgatacaatagattttatcacatttgcaagtgtttcttattgtcaatacaatatacaaagctcttcagaaaaaataaataacatgttttgttttattaatatactaaattagttgatataaagttggtttatagaggtctaatagttatttttccatatattactatcaaggtacaattaattatccaccagtgacaaaaaaaatactgacaaatagtttcttatagatacaaattcacatttaacatttttagttgcaattaagttgcatgttagttgaataatagttttgctattgcaatatcatagtattataaaaaaaaaaaaaaaagggctcgtgtttatcaaatacgggacctgaacagataaaatataattattgtaatattcatttgtattaaatatgtgaaattattagctgttttgtggttttatgttagttggctcgctacggatataactattgcattgcagtttcatcacaattgcgttgaagctgactttttctttctcttctgggcgtcgaagttgaaattttttcaggcaaagacaccttcgatttcttcttcatgagacgacgaccacctttagctacgggggtgcgaaatcgaagtcatcattgtcgatgactagacgtttccctttagccttgttagcaactgatcatgacccattttgaaagcttttttggtaatggaaatagagaagcagaacataaggtaatagccaaaaaaactgataaatgaggcaattggaagaagaagatggcgaaggaattttaaacgtgtgtttcgaaaggataatgattggaaggttgtttaggctgacatgaatgtatatgtgtaagtgatattttgataaataaaagctcattaaagataaaattattgttcacaccttatgaaagtatttttgtaaataataagtatcaatttctattttttatataaaaatgtggtgtgtcttatatatttaattgattaccattattttgtttggttgttggggtttgagataataacttatatctattaattaagctattaattgagataatgacttatgtctacttacttcttatttggaatatgtaataagagctacctataccacaagtataaatttatatgagaaggatagacaactgtattttttggccttttctaatttaatagtatggtccccctttgaaagctaatcacatcccattcctaacaaaatcaatggaggttttttttacttattagttatatttttttttatatatatatatatactttaactattttaactcaaacacttttttaaactataatgagatacaacttttcatatgctctaaattattattttattacggtgaatcactttatatattatttttttaactttattttttcatttttactgtttgggttgtttcggtggttgtcttggtagttgttgcatggatagcgatgtagatttggattgcgatttacattctgttggttgctccgtgtcttttcatataaatgcaaaaaaaaaaaagctacttttaaatgtaataataaaaaaatccttgtattattttataaattttctctcttttttatatcttatctttttaattaaaaaatatattattaaaataaacagagaaaaatggtgtaatatatattcgttaagtaacaaaaaaaatgaagttatgctaattaaagagcattgctattaaaaaagtccttttgacatggtttgtttctctagtttctttgtttgtgggtgcttctgtttttattcttgtactacggcgtcttccagtggtgttatggatggggatcgggaggatgtttacaactcttagggagaagaggaagagtttgagggagt

SEQ ID NO: 22191 - DNA, 2140 bp, Cannabis sativa
gttgatatttcataagtttgacaaataaaagaaatagctagaacaagtaccggaatgtgaagaatctgggcagtaccaaagtatgatgcaaaaagatctgcatctagagttgcgctcatcaaaatgaggcgtagttcaggtcgtcgaggaagaagatccttaagaacaataagcagaaaatctggcatcaaattatcactatgagaagttgcattttaaaatttaaattcaaaaatcaaaacaaagattttgattaccttcattcattccacgctcgtggatctcatccacaataacatggcttacacctttcaaacttctatcaacaagcaatcttctcaacaagatgccagtggtgcaaaatagaaggcgggtatccctccctttcacaccctctaaccgaaccttgtatccaacctttgacaaatgaagccaagaataagataacttaaaaaaatttatcaaaacaacaatttaagttgcaagcatagcatcccaagaaaattgagaaaaacttacagattcacccaactgttcccctctttctgaagcaactctttcagacactgacatagcagatattcgcctaggttgtgtacatataatattacaagaagccccgtgaccagattctatctcagattccaaaacgaattgtggaatctgggtggtcttgccacaaccagtttcaccggaaataataatcacctgaaacccaaaaaattttaaccatcacgaaacaaataatatacaagagaatctgttaaaaatagattctatccactaaccaaatgatccgatatgagatcacatttattagtagcctatagagttaccacttaagggctgtaaaattgagagagacctgtgaccaaatgctttttggcatcaccactaggttaaaattaattcttccgaaatttatgagaacaattctaatcaaagtattatatctaattcacaagcaaataacagacctgattttgtgaaatagctgataacactgcatccctctccttataagcaggaagacttttacgaaactccagcatttctctgccttcagaagattcctacaatgttttaaatagataataagttttaaaatatatattttatgcatactagagaccaagaatagtggcaagataccaaaaataatagaaaaaacattgcaaacataactacaagttataatcaagattcaagaacaaagtaatagacagcttgacgaggaatctaaggatttgtttcagtatcctatcggttttccataaagacgaggcatatgaagaatagttgtttgctttaatattataaaaaaaaatttgtacataaattcttacagcttggaatggttctaaacaacctcgcatcaaaacaaaataaagttgacttcttacttttcacataatttgaacctcaataaacttaataatgctaaatacattgtagttattcgcccaaaattttaatgaagaactgagaaaaacaagctgcgactgtgtccaagccaaatactttgacactcagacaaggctttgaaaactaatactgtaagaaatctacatgctatgaagttcttgaccagaaagccagaaatctactctactaactcagattttttccactttttcagatttatttctctgagcaccggcgcataattatgcaggcagacaaaagtaatattaaaaaagaaaaaaaggaagacctgccaagctcgttgctgatccctcaactgcatgcttcttcgccaaagaactttctccatcatacccttactagatgccagtggttcaggtgcctcaaaaagcccttcctcggtggcaatgctacagctactgcttgatcttgaaaaagaaacatctgaattattatccctactccaagacttttgagataggaacctgctaacgaatgattcaacccttctgagtaggctaagaggcaaagtaacctgtccagagtcttacaacctttaatagaagtctataagggaaaaaaaattgaataatttaaaaggaactatagaaatgagaaaaatacacaagaacaacctagaggcataaagcaattagtgatgattttaaggtagaaaatttgtcaaacacggttatgtagcaaacatgggacatgt

SEQ ID NO: 22192 - DNA, 10378 bp, Cannabis sativa
  modified_base (10121)..(10121): a, c, t, g, unknown or other
ataccatcaattttaaatgcaagtctcttggagaacttcgtggtttgcatagcatagaatgataaggatagccccaccgattttattaaagtagcctgactagctttagacaaggacttcagcttccaaccatgaagcttcgagactaagttatccataatgaagttaaagttaacatctttacaatgattctgaaatagcaggaaattaagataattgatattgcacgtcgctgcgtttatcccaagcacctctttaataccacgcttcatcccttcactggtgttattgctgaagaagatagaggttttcgtcttattaatacgctggcctgaccaatcacaaaacttctctaggcattgccaaaagcccctagcctattccaacgtggccctacccaataggataagatcatttgcaaagtacgggggccatttcatctcagcttgactcctctaatgaagccagaatccaaggcctttttgaggatgcgcgagaggatttcgacaaccctgataaagagataaggggagaggggattcctttgtctaataccacatttaggagtaagtctactaacatttcccccattcaggcaaatgttgaaagaggtcgtgtagatacactagcgaatccaaccacaaaacttgcatggagctttgaaactgcatatcacatggtcaatgaattgccagctaagtttatcataggctttcaccagatcaattttaatagcaaaacaaccctttttcctttttttagcttaaaggaatggatgatttattggaccagtacattgttatcctagatgcttcttcctaggacaaaggcagcctgagtagggaaaatcagcctaggaagagcctgtctgattctgttattaatgatttttgaaataaccttgtaagtaacattgcacagggagaaaggcttaaactgagccactcttttttggtttgggacctttagaatgaggacaatattagtttcgtttatacccttatgcataacaccagaatttaaaaaattccaacactacctcacaaaaatcctcgcccacagagttccaacaagtcttaaagaacaaagttgacatgctatcagggccccgagctttacaactacccatcaaaaaaagagtatgtctaatttcctcatgcccagcagtagacacaaaggatgtctgctcctcaggggataggtgatccgagatcaggttgtccaggctctccaaggggccctattcgagattcaagaaaatgtccccaagaaaagctaaaaaattccctaccaatgtccttcctatttgtaagccagacctcatctctattcaagatactttccatagcattccgcctattacggatcgtggccgaaatgaagaagaacttaaagcatttatcaccttccttgatccatgaaacctaagatctctgctgccagtaaagagttttacgtcttaaggcctcatttaatgcttttctcacttccaactcgttggcctaactacgaggccagacgacatagtatggatgttctttaattggtgctctagttggcgaacacaggtatctagcttaccaaattgttctctattccatttacttagagccagacaagtagcccaaatctttttaaagactctagccggagcccatgtaaaagacaaggatttctaagcatggtcgaccaccaaggatctacaaggatccctagtccaccaggcctcaaatttgaacatcttctttggaaaagaagggagaacattaatacggataaagagaggcaggtgatcagaattagtagtataaagcgattggatcaccgctttagggaagatgcgtaaccaatccttattaaccagagctttatcaagggccgacttcacatgctcagcgccctccctgtggttatccggagttaaattttctcctttaatgggcatgtcaatcaaagcattgcgtctaaccaacaaagagataaacgagatgaattggtctttacctttggatcaacacgctcaaagagcaaaatttacatcacctaaaatcaaccagggcttgccaaacttgttaccgatttcaattagattggaccagaaattcttttttgcatggaaataaggaggaccgtacacacaaaagagtagccacgggtagcgcttgggatcagaatacacaattccagaattctagtttttggcgatactaatgctttcaaagataaaacttgatttctaggccaaaacaaggcccccaacagtaccaacaacaggaacaacaatattaaaataaaaatgtaaattttcagtgaacgtaccaaaaaggtggcatccacttttagctcgataatgaagatgaaatcaggagagcacgaccgaatcagggctttcaactccagaactgtagaggtctgccctaactgtaatatttgcttttcttgaagggtaattaattttctttatacttagtttattttgttcgtcaatggggataatttatcattttgaataattttgagtttagtggatgtccttaagggataaacgattgctagatgccttgaaggttcaattgcaaattgtgggtatagattaagatcccgattccttaggatctgcactacactatcaaatggcttgcagggtgcaaaaccacgatattaacatctcagtactaggaagttcagatatgctaatgataactgtcgatacaaaccgcgcaccgacatccattcacattccttgccagatcacaatggaagaactctaataaatacttccaacttcatggatcatcaactatgaaaagacccaaaggccactaccggcagtccactcaacagatccccttttcaggtccaaaaaagatggttcaatcgaaatatccttcccaaagaatgaagaaactccaagaatcttctcaactcaatacataatgtcgtcaatcatcccagaatctgcagagatatcatcctttgataaaggtggttcccctatatatgccttcaaattctctttaggacacatatattgggacgtttgcaattgtctagtttcaccacacctggtaagcaagaagaagcacccaaaaagaaaagtgttggaaagaagctaaaagaaaaataggaaaatggccaaaaggatattggcccacttggcgaaccctcgagaaaatttgactacctactcaaatatttctacaaaccattagttcacgaggacattcaaccgacatgatggggatgtgaagatgatgagcataagccactcccatgttacaaaccaaggaagtccaaatcaactgcatcacatctcttcatgctaaaaggcagcaatgatcaattcacacttccattcaactttactgatggaattggaaaagtcacacacaagcccaaagttcccaacccaaatatccgagaagctggtggtaccttaaagaaaatcactctggccgaagctgtcctcaactggcaaacagagaatatgctagcccaaaacaagaccctccaacagatagacgagaaactttctatggtcacccacagagttacaaagatcaacaaagaattttcaaaattcgacaccattacgaccaaactcgtctacaaaattttgcaagcacacgaagaactactacagatggtcaaatctaagcaagttccccaatagatttttctcacaaaggaagcaaagttaaaaggtctgaagagtcagtacgtctctatgcaaactcaaactcaatttaaggatagatcacctctcactacaggcttagactctacaccattgatgttttcaacattaccaaatctgcgcagtcattagcatctcccccaaaatgagagaccaaattattcttccaaaaagaatcctagatgaagaagaccaacttaaaagaaagaagaaacaaaaaaatcaagaccaatgcagtactcaactcatggtcgaaaggagaaataacattacaaatatcatccatcatcactgtctgaataatctcctacagatcaatcttaatgaagatacagaaaaattagacgacgacgatctgtcagcatcgtccagccaatttgatgactaggaaactgatgaccaaagcagcagtaatggtgaagcgattttgcctcaattcatgacagctaaccatacaacaccagcctcaggagtagaaaaagaatagaattctgatccaacaaaaccaatcatagaagacgtgtcttctaaagagcggtttacatcaactaaacaccaatttagtggcaaacctaacacattcatgcttgatgatcttcccccaaatcaatagagatctcgcttccaagaattcagagcatggacccttttaaaagcacaaaaactgaggacagaaatacgagacatcttgctacagttagtatcaagattcactggaatcctacaagactggtggcaaagccttggagaatacaagcaacttcaatttctacaagcagaatccattgaagcaacactaaatcacttgtacgtcgaattttgtggtcaaatttttcaagatgaagtgttgttcaatgaaaaaagaggatttagaatcacactttcaaagaatgactaagcatttttatctaaatgctggtgtcgacaatccaaacctcaaacaagcattcctagcgtccattccagaaccattaggagaagaaacattcaaactcctttcaacaaataacaagacactatagaacacaacttttggagaattattccaaatggtgatgagagccttgaaaagatgtgctctcaaaataaatttttacaagaatacatgaagcaaacaaaacaactcacaacaaagcatgtagccaaaagggtcttacaatcaaatgttcaaccaaaggcacgtgttcatgctcaaaacagaagggcgagaagagaaaaagcttcaagtatatatctccaaagaataggactccttagaaattccttcaaaaaaaatcctagaaaatcctcaaatcggtgttgcttgtgtagaaaagagggtcactttacaaaacaatggccaaaaggtaaaactgctaaaatgataacacacatagaggacaccatcagggtatcactctccaataacgacgttaagtcagtcttttcaatcgaagacaaaatttcctcacatatactatgtgcgcattatagtctcgggttccgattccgacgatgaaagctatggtggacttttcaacatgggtacgatcaccattggtcaaccgatcccgatagcaaaaatacatgtcatgtcaacaatgtactcaaggccaataacagtagctaaattttttgatacaggagcatcatacacaatcatgaaccccgacatcttactgtcaaaactgtggaagaaaaagaagcagtatttctaagtcacaaataaccaagtactccgcaccaaattaatcagcaagccaataaagttgcaattcttctccggatgtttagttatccatagagtcattggattaaaacttccaggaaaggacctcataatgggattcaacctttacacaaaaaagaaagggcttagaagctcccacaaggattggcctacaagaatttcttcacccaatgggagcaaatcccaaattacttcacatggcgcaagacgtatttccaccaatcaaagaaaatctaacttggaggttatgtgcaaattctcactcagaattctcaacaaagtgcaatcacccattatggaaaaatgaagaattctacatctctctaccattcaaacaaaatgaggatgtcaatccaaccagaacaagccaccctggaatgaatctggaacatcaacggatggcaagcgaggaatgtaaccaacttcaatcacaagggttaattgaagacactaaatctccatgggcgtgtcatgccttttatgtcaacaacatgacagaacaaactaggggaaaacaaaagttggtaatcaattatcaaccactaaactattttttggcagatgataaatttcctctaccaaacaaaaattctctttcctttagcatctctaaagcaaagatattttcaaagtttgatctaaaacgggtttttagcaactggctcaaaaaagaaggcagacccaagacggtattttgcatcccaaatcatcatacaatggacagtaatgccctttggactcaaaattgtgccatccctgttccagaaggcaatgagtagattctacagtccaatcctaaaccaagccctaatctacatcgacgatatactgttgttctcaccttataacaaggcccatctaatcctcctagcccaatttgcagatattactgaaaaataaacacaaagtgtgcggttacaaaagtggacctttcaaagattcccaactacactaccattccacactcaaagagatactaccaataaaaataggcatcacaaaattcaagttccaccatatcgaacataatttccaagtggaaacagattttggcacatttttaagggatgctcatgttcaaacagtataaagcagtcaatgctcaactgctaagattagccagttggttctcacattacacattcgaaatcaaacacataaagggaaaaacaaatgtgatttctgattttctctatcgactataaatatgatcaacacacacactgagaagccaatttttattgatatacatggccaacctatctattatcatcactacatttcctagtgatgccaaaataattgtcaaaaataaaaatccaagggttaaagcaatccaaagagccctagaagttcattctgctctcgtgaggagatatggcaagattatattcgaagaatttggcttctacccagactacccttttgccaaactcttacacatgaaaaacaacatattcatgccaaaaaagataacagacctctactggtatctcacaagttcatacactattacgatcgaaatacacacaataaggcttcatacatccatccgtagctatatccaacaccctaacctcatgcttgcttactatcatccaatggctatgttgcaatggttcaaaacattgcccggataggatgcactcttcacacaagagtgggaaaagattcactataagaaactcgtgggactcaattgctaagataccaaaaacatggcaaacccattgtgctgttttacaatcctgctgctcaagttacatgtcaatccaggcttattatttatggcaagtgtcaaaatacataagtcaagtgaacatctacttgtcatgataggaagcacagaatcaagacagctggaaaagtaactatttgccattaacatggtgattccagacgccatctggccaaaatccgaagatgacgcactatgaaaatattatctacccgagtatctccaaaaactagaagaagatatgaatcattataacaaacactacactgagaaaaacgttgttaactataatgattcaatctttcaagatttgcaatatccaaacactacttgtaactgcctattctcactcaatgatcttgatgaaaaaatatgtaggagactacttatatctccacctatcaacaacaaacctactgcatcaacaagtgtcaacaaaagagcaagtccttcatcgacatggcaagaaggcgatagtgacacagatgagtacatgaatctcaatccctcatatgaacccatcaacaaaaaacagtaaagcacctaaaccctacaaagatactcatctgtacttatgtcgtgtttattttatgtcaatgataaggtggacatatgactcctgaggaagtcaatccattgtttcgtgtaacaagacctttcactactcacaagatcaatagagattcctactcagaacaaaataacaactgaagacaaggaatcattcgcacgacagaggaataaacaaataaacaaatgaagaaaatagaggagaagtcgacaaacagagggtgaattctttttttccttaagaaaaataaaaaatacataatggcacaaaaataataatcaagttgccaatggctcacaaataggtactacacaattagccataaaaaaaaaaattaataagagctcgaggccaacaattaaaatcagacaatgatcagctcctcgcgaaaagaaaattactcaagaaatgcatatttaaatttcaaaaagcactgctagaatttttatcagaggactgaaagagtattggagtgtttaaaaaaataattaatacaatgaacacatctcctgctacccgctgataaaaattcaagagccacgttaaccctaatccatattcaaattcagaatccacaccaaataagaaaccaactatcctctaatatataatttatttatacagtctaaattaaagcaaccatagaaataagaagaatttcagtgatttctcagccccattttagagttagtgatttctttctttgacgatagggaagggtggcaacagcagcacagcttcctctgtttcaatcggatctgaccttagtatctacataatccaattcaagcaaaaattataaaaattaaataagcaaaatatagaataaaacctaaaagaaacgtaattatatagaatcaaaaaagagaaaaaatagagtaccgggtcttggagaacaggcttggtgtcgtccttggctggtctgaaatggggttttccactcctaccactatcaccatgactgttgatggctttcgtcgaagtctctgaagatttcattttcacgattttccttttgactggaaaagtctaaaaggctgggctattctcgttattttatatcctttcgggaaagagagaccatttttaaccgatgtggtacttaaaaaataagctgtacggtaataaagaaaaactagaactagaggcatagataatagatatgatataatggttgggaaaattgtgaaatatttttatgaaaattataagtaaatatcctacaagaaaaaagtctcacttcttattcccttttattaaaaacgaagaaaaagttaagcaaataaataaataaataaaaaactctcatatgctaagagtaagtaccattaagctaatttacgacgtcactttaactaactcagatcttcaaccgggaatatctgatctcagttagtgtttcttttctaaattcttttgttctgttttagttgaatgttaaagagaccatgtttgaatttatgaatcataatagagaaggcagtccttcagacaatccagaataacattttaataaactttttttttgagttaaatacattcaggaatcaaaaaacgtttacaacaattgataaaagaaaaacagctcccaggcgaaagagattcccagccgaaattcaccgtcaatatcttgcagagagacccagaaaaccagtaaagctgagcttcaagtaaatgttaggaagaaaaaaaaaattcacaagagtaattaggaaatcattattgatgaatcatgataaccaagttttccactaagataaatgctggatctactcaagcaatttcaatatcataacattattataattaaattaggtctattatcactacattccaaaccctttatttttatttaaaaaaaaattgataaaaaaattatacaccacttcaaaaatattttagttacagaattttgttattaggcaccttaacctattccagcaacaacttgtgaagaacacagaacattcatatagcatgatcttcaattttcgtttgttaaaaatattagaaacctgatttttttagccaaaagttcatggagtctctaatttttttagagttcaaaatttgaattaaatttttatcttgtattctattattcaaatctcgaacaaggactgtcttaactattacagttaggattctgcctttcttcccaagccctaaattaaaacacacacaattaccaacaaaaaaaattgtgacacattttgtccattcattcactttaaaataaaataaagaatatactattttattttatttttttaaaaaaggttacttgtgtcatttcacgaaaagagaaatgctaaagggcaccattggtgcctaagaccctcctatgtgtcgatatcgctattggtccaactaagtatcgggcccnatataatttaatataatagctttagggtagtatcgctagttaatcacaacgtgtcatgtcgagaaggtactaggcaccactggtgcctaatagcaatgctcttacaaaaaatgtttatacgacaaataaatttaaaaagcaataaatctacttactagaaaaaaggatatgttcattacttttggcatgctattatattcaaaatacttttgcgcatgtgttatattgaggtgtaaatagcatttagatattataaa

SEQ ID NO: 22193 - DNA, 5890 bp, Cannabis sativa
ttaaattatgtgaatgtaatatttcagtgcatatttataattaatttaaagctaattagaatatctatcaaatcaaatcctccctcaattttaacatgtactaaactttgttatttatcaaattaaactctcgaattttgacatgtaccaaatcgtgccccttaaattttcatcatgttagactttcgttagtgaaattaaacaaaatcctttaaatcaacaatctcaatagtttaaagggaatttttaagctactgaaaggtttaaagaacatggtttgatacgtgttaaaattggaaggaaaaaaattataattaactaatttaattaaagaagaattttaaaaatattttttttatgttttatttacaattttacggcctaaattttttattaaaaaaatatacttgtaaaattataaaattataaatatacactttgctaaaaaaaagtaagaaaacaaataaacgacaaatcaatttcatgacaactataaatcaactataaataaactataaaacaacaaaaaaaaaataaccaaaaaaataaactcatgacaactactatacaaatttgattggtgtagatacttgggagttggtaatttctatggtcaagaagaagcaggcctaatcttgggttaaggcaggctaagtctgtgcttagggcctactcaaacctagggcccaaaatttttatatagtacatttttttattgaaaaaataggatttttgaaaaaaaaaaaatgtgaaaaaaagactcaataatattcatgttttactttaaataaaacacaccttcaataaattttttagactcattattactcgccctggcaagaaagagattctatcaaatgtgtttgagaaagttgacactttacttgtgccataacttcttatatagacaaaaacaaggttaactttactagtccttattaatttaatgtatcaaatgttatcgactttgaagtcttattgttcttgaaaatctaattagagttcttcaaatacattcatagcaatttctcattttttgtggtaattggatagttgcaagcagaacgaacaaacagggcgtgctttgaaagaaacaatttgttacctcgctatattattaagataaatactcaaagtttatatccgaagcgagttttcaaaaaactactcgcgtttaagcaaaacccacgttataaaaacaagacttatcagaatcgaacattcaaattattggggtcatgaagaatataaatttcaagttttatgttgaaatgccataatggttcaatttgaaggctgcattgactggtaaaactataatctttatcttttaaacctttatatatatacatatacattgtactattggtactaatagtaatacattaaggaccaattatataatttggggtgtgaaattatttaagcttctctattagtattggcttggttgaaggaattctttctagctgtggccagaacagtcttgtcagcaactatgaaatatgcagctccagccactgtcatcagattgattaaacttttcattaacaaaaacccaacattttatcttaataactaaagaaaagagtatagtaagtaagtaacctgtggagataataagagcttgagctgtgtggttgagatgggcttttgcccaaggcagaaatctcacactagcaagctgtgagtaaacaatatatatatactatttttcagaaaattttgaataatttagtataccaaaatcagtattctaataatcttttgtacctgcgtaataagtacacgtgcaataaactgtttgaatcttgatttcgatattgaaaattatctagaattttttgaaaatttgtgtgaaggagagggacttacagttggaatggcagtggcaatagtagccacaacagctgccttagctcctgctttgacaccttctgtttttgtgtgaaaaaggtaaaatgttattgcatttttttattggtccaagactatgtttattgaggctatcaatcatttttaaaagattagtatgagtcagtttggtcggtttagattatattttatttaacttaacgtaaagattgagttacaaaaatctaagtacaatccgctcaattaagtaaaaaaaaattcaacctactcaatgaattagtcggtttggttgggttaatccatccaaattgagcactaataatttttttttcatattcaattattatattttagttaattgttataatgagataaatatataaataaaatttaaagttgaaatcaaccactatcaaagaaatatagtaatttgaaatttttattttttataaatatgtatataaattatattatatataataaaaaaatatatataaactctcttaatccgattggtcgagttagctcagattaattaggcagattggtatcattctcaacacacccaatataaagattaggtaagttatatttttgtcgggtttttcagtttatattttttttttcgtcaagttatctcaatttggtttaagcgagttgttcgagttagatagtttacaaaaattatatgtacaaccctaatttttaattcagttgctatttgtgattatatgcacaattattacatacaaaacataaaccaaaaaaaaaaacttttataggtattttctcatcttttggttcatcaaacaaaacaaccaaaatcttaagagcattttgcattgaaagattaaaagcaacagaaagaagaacataccatcagaacatcgtttagccatggccaatctttggtcctgtgaagattgagctacattctttgccattaatttgtattataaaagatataactagtgaagttgttgaatttgattgagatatttataagcatatttgaatgaaaataaaaatgagaaatagttggtgaatcagagacatatgttgaggttgttttgatgagagtttgatggttttgctttgaattctaaggtctgtggtaggcacttgttttcatcaagacacatgttaatcataatcagttgccatttgtttttcttttttcagattttattccttaattgcccttggtttcacaagacttgtcttagttttgttgagggcctcaaggtaattttgatatattatcaagaaaactcttcttttttgattatgaaagattatttttacttctcaaattttgattatgtagatgtgaagctcaatccactggttttaagacaaaagtggccaaaacaatcatgggtcttgcatatgtggaatgtaatcttttctccaatgtaactaagacaaatgtttgtacaagtattaaaaaagtggttttatatttaatgcaatgaaataaatattattgaaaaaattctaaattgcacccaaggatgtatcggtgtatttctatatgttttggtatctgaaataattttttagttaattttttttcatagtcatatacgttatagttattttagacatcttgcaaaattttaaaacatttaaaaaaattaaacacgttgaaaacgtggttcaaacattgtgttacatacatgactattttattttatacgtgtgtaatatagactgtttgaacactgctttttacattgtaaattattctgaattctcaaaattttgtaacatatcttaaataactataacgtacacgaatatagaaaaaaaaaaaaagttggacataaaaattcttttagatgccaaaacagatagaaggtacattagtgcactctttttaaggaggtgcattgtagaagcacccaatattattttggcctaatatgagattgagttattctacaatggacccctttaaagtgagtgcatcgatgcaccttatatctatttttaaaattcaggataattttttagtttaagttttttcagtcatgtacattatagttatttatgacatcttttaaaatttggaataatttacaacatggaaataaatgttcaaagagtctattccacaaaagtataaaataaaaaaatcacgcatgcaatagactgcttgaactctgttttttgcgtgttaaatttttcaagaattcctcaaacttttgcaagatgtcttaaataactacaacatacacgactatgaaaaaaattaagctaaatttttttctcgaataccaaaatagattatgatacatggtacacctttttttaaaggatgcatggtagaatattactataagatttattatggagtgattttcaataacatattgtgtaacatgtgtgtattggagttctttgcctatctcctttaacatttggctattttccaattaaacgttaaaattaatttttaaacaaaatattaaaatcacatttattttccatttctactaaaaaatatatatttttttttttatatttttacaaatttttttagttaatcttttatgggaaacaatgttatttttatgctgcaacataatatagcatcaataatgtgaaaataactgtatgtatttttgtaaaaaaaaaattaaattcatgaaaatgctaaaaaaaaaactttaaatctgtatttttgtaaactttttgcaatattatgaacaaaatcccaagttaaaaaaaaaagcttcacaaaaatataggaaaagtacatataacatataaaagcattactattaagcatcagtggtgttcgtgtctcacaattagttagcaatattctctaaaagttatttttttaaattatgtgagactcatactttttttttactttggagaaagggaaatccgaacttaagacctcctctttgtgaggaaagtgtggaaccactaggctatgcctataacctatgggactcgatacttaattatagcagtatgacactgaaaaaggtattagacactaacggtatcttttaacaattctctatgtataaaaaaaacaattccttcttctgtcaaagaaagaaaggtattgattattttttttttcctttccaacataaactcattatctagtgttgttcaaagccaaaacaaactataaggaattggaaggtgcttcagacaaactagtaatcaaaagagttttatcttggaaagctgatatgacctcaaaaatcaagtatttcaaagtgaaaggtattgattagttaaataacaataataataataataagagtaatttacagcataaatatctaagtttaacttctggttacagagaaataacagctagaacaaatagagaaccaaaagaaatagtggctgacatgatattgctgtaaaaagaggattacagttaaatggttctctgagattcaaaactcgattcatgcctaacatcactctccccctaatcttctaccttactaatcttagggtctaacagtcctcaaaccgaaacagcaggagacagacatattgcaaaaaaaacatgtaaaagaaccaaaccaaatcacctatgaagaaacattattactttaaaatatcaaaatagcatcataaacatgtaatagaaattagcatgcaaaatttaaaattagaaatcagaggaaactcaatgacaagcttaaatgtatgtgttcagtttactatgtaagccacctaagaattctatgattgatatcctcttatgtttagatctcattttatcctcaaaagttgtaaaagcactcaccttctcatgttctgcttcaatttcctcgtaggtggaagcctgcttcttcacaatatcgacttttgttcgatcagttgtctgcataatgacacagaaaacattaacaatggtgagtttgaaagaagtgggcaagggagtggtaggaaaaagaacgaaaagctatgctataacggctcacctaatctcttccagtttgcaagggagagggccgaaacagacttatta

SEQ ID NO: 22194 - DNA, 2980 bp, Cannabis sativa
ttaattttaattttttcagggcctccaaaattgtggggcctggggccaaggccccggctgccccaccctctggccggccctgcctccgctacatgaggctcaaggtaaccagtaagaggagtggcagcagtgtaatacttgttgttatgggtttttttcatgcttaattattaaagttatgatgtactgctttgtagtggtgggataatttataacttaagttgtaataatttgggctttttatcattgaattacacaaatatttgttggatgatacatacaataacaaacaaattatttctaagtgattgaaatcaaaatccaagtaaactttaaaaataaatttataattttaatatttaaaaattattattaaaatgaaaaatgctacatatttgtaagttgaaaaaattagataaaactaaaattacttaaaaactatatttgtaagttaagaaatttagaaacttgtactatcaatcttagctccctataaatactaagcttaagttgaggagctagtgtaaccaacaccataaagctaaagcttactactttagatgcaattctctcttttaagctaaaatattttttttatcaaaaaaaaaaaagctaaaatatttttatatactaaattaacagccactcaataacactaatacttcactactttaccataacattaacaaccattaaacacataattcacatatctacctattttaaactaaatcaatacaaatttattctcaaactattgtattataattatattagtaaaaaaaaaaataccacaatataatattaataatatatatttatgtattttgatcaaaattatatcatattaaataaacaattttacatatcaaatcttattataattaattaaaatatataataataatagtaatacatgaagtataatttttttaaaataatcaaatcacatatgaaattacaaaaataattatatatgatatagattcgttaattaatgaataaattcactcttataatttttttgaggtaatatttttagaagggagatataaaattctactaaaatagaatgatcatactaaaaattttacattatgtaagttatttttgttaaaaaaaaatagtcatagaaacatttttatttttcaaactttacgtgatcaaaatttttaactttcaaacaatttctaaccaatcgaatgtttacgcgtaagccactaactctggacctcatcgcatttgatcaaagcttccttccctctcggttggtcaacactcaaaaactcatttttttctaactccaacagttcacttcagtccgtaccaacaaccgccgtcctaccctctcaccgtcgccggcgctgttaaaaatcttctctttacgaaaacgacatgtctctttgttcgcctggattctctgcgtcgccatcgaacctcttctacactgacgtttcgaccaggcaatgcggcttccaccaccaccacaacctcgctgtcgatggttgggtttttcattcttcccgccagtctttatcgatcgagaacagtgggtttcgtctgaagtgcactgaatcagactccgttgctaagacgatcgagtttactgatcgcggcgatggtggtgatggtgggaattttttgggtggcggaggaaatggaggcggaggcggagacgagggtgatggtgatggtgaagagaaggagtttggaccgataatgaagtttgaggaggtaatgaaggaggccgaaactcgaggagtgaagcttccttccgacatggttgaggctgctaaatccaccggaattaggaaagctttcctttcccggtacttagatctggaggtgaaagtttttcagtgtttgcaatcatttctttttcacaatttcgttttttttaattagtaatcgtttactgagattagctagccaagtttagaatctaagctaattttattcatttaataaatttgattttttaggatttaaaagtaaatcccagcttaaatttttgtttaagaagctgaaaaatcaaagctttgtttgtaaattgttaattttttttcccattcacaattaccaaatcatgctttttctgaattttttaagccgtaaaaattccgaactattaagattgttagattcaaagacattcgtctaattctgttcaatttcactaatcggctgacatggctgaaaattctaagggcatgatttgttacacgcaaaattgttagtaaaattgaaccgaagtagacaaaagttattgaatccaacaatttcattagtttgagagaaatttttaacgacctaaaaagtttaggctacgatttggtacacgccaaaatctggagataaaaatcttagctagcctcttgttttcttttaagcttttattaagcatatggttttgcagggatcagcttggccattgggttttctcatgaaacactgctctatgttacgaaatcgaatgctggcagatccttccttcttgttcaaagttgggacagaggtttgttttgggtgattaaacttaaaagtattgtgcacaaattcaattcattgagctgagggacctttagtctcacctgaatatgatttgaaatggtttgtgactgcaattgtttcttattaatatgatttttttttttaatgttcattagtgtttgagtagttcttattggtttggtacaatgtaggtagtcatagattcttgttgtgcaacgtttgccgaagttcagaagaggggaaaagatttctgggcggaattcgagttgtatgctgctgatcttttggttggtgtagttgttgatattgctttggtaggcatgttagcaccctatgctcgaatagggaagcctccatccgtgtcgaaaggcttatttggacaaatacaacaagctaccagggcacttcctagcaggttagcctcccatggtaggaactttagacttatagaatggtgaacgaactaaat

SEQ ID NO: 22195 - DNA, 5061 bp, Cannabis sativa
ttttttttttttagaaattttctgctatgacgactgatagtattttggccataactctctcgatattgcttgaaattagacgattcaagatgttctggaaagctaacaacgagatctaaaattttcatgtagagctccaaatccaattctgcttctaagatcgtccaaatttataattaagttccgccttgtaaaactgagctcgccggcttccactattttccaccaaaatatgctaaaatctctccaaatgcaggattagtcttcaaaatatcctaagcaaattaaaaaaaatcaaactaatcaataatttaaagaattattttaaaaatattaatacataaattagctatatttataagacaaaataacaacttatcatgatctttcaacttggactgaacattcacaatttcaaaataaaatcttacactccttttgattcaccatacttaatggttgtcacttcatctataaaatgtccaacttcagtgttttcaccagtatcatatggttttctatatcattaattttttttttggcatttgtagtgtctagcaaaccactcaatagatgttcatgaattgaactattcaagacaattttactttttccgttgttcatgaaaagttttctgggcaacagtgctgatattagtaagatcaacagatttttttctcgcaggcataagttcaaatctattatgtctaaagtaattttcacatctcgttttcatgccttaaagttggacacattcagaatttggatggaagtattattgttgttcacagaaaggagacaacaaactcaaaaaattaaaacttgatcaagatatatgagtgttatacccaattttcgcaaaaaaataaaaataaaatggctactcttgcacaagggtccacatgccaacagtacattgaagacactaaagtcaaccttgtgactttgaccaaggctcataaatatcaaataaattaagacatccgtcttgagggtcccatggaacctatagagggcttgaaaacatcaaccaaccatttggcgccggtactcacacacccaagtgtgcccaaactagggttcatgggcccatgcaagcgtttttgctttacaaatctcaatccgccaagaaaactaataaggacttgacttatttaggcatgagaatgacttgggtttgtgcataaactcaaaatggcattaaaaccacaagaaaagagggatacgtgaccactgccacaaggaaatggcagtgctctccagttttggtgaccactgccacaaggagatggtagtggtctctccctgcaaaccatggaaggaaaattgttcaaatgggttccctcgacaccaaggagttataaataagtgaaaaaaaaattatttctcacctaggaatcaccctagatgactacgacataaggaaatagcagtgctctccaatttcggggagcactgccacaaggagatagtagtggtcaaccaagaagaagggtagtgagattatttaccaacaatacattttcatcaataataattcaaaaccaatgaaagaagccaccaagtgataaaaaaaccacttggctaaccactggcataaggaaatggcagtgctccccaattggggagcactgccacaatggagtgacaatggtcagcccctacacaagaagttggccaagttacatttccaacatatatgtatcaaataaaaatgagaaaattcatgacccaaggctttacaaggtccttatccgaccataaggaaatggtaatgctccccaaaattggagaccactgccatagtggagtgatagtggtcaagtactacacaaggaaaatgaatttattggtcaaattgtattttcaaaatacatgtattaaatacaattgagaaacaccacccatgacttctcacaagccatgtccgaccaataccattgttcgactctaactagtggcagtggtctcccgttagggtttcagacatcgaaatgaggtttttgggtcccaggatctccaaaatatgactcaacatcaaaaaataagtcaaaacacacctcgaggggtctgagagcatgcatggccgaccactgccatttgcccatgttagtgctcgtaactggtacaagacatcataaactatcttcagtaaaatagtcataactctctcaatttttatcaaaataacctgattaaattgcataggaaatataatttgaagacggatcaaagagtctcacacccatggctcaattctgaagttatcaggtccaaaatcagctcacaaggccggctggtatattttacttggaaattgagtagtgcggctaagcgaggattgttggaggacaccaccacagcccatgtggcgttgtatgcgatcattgacactccaaaatacatattttcagcactcatcaccaatgtcatgcatttctaggagagaggtgacatctcatcactccgtttcaaattggtgcatcctaaaccgaacataacaactttcccaacatttgtgggatatttgcctagaaacaaggatatttttatagatatttattttcttgtaatattttattaattaaacagagtagtatatggaatttgttagtgagataccccgacatgtgggggatcactaacaaattgtatagcctatatatagatcaagtataggctgagaaagggacttcctttgggatctgacttttgcacttcaaacttttggatcctcttatctctttagactctctctttaaaaccttcccctaaaaaatcacttgacggcagccaagaacaccaccttgatttcttcatctttccttgagtccaccatactcagacgacaccagtcctcaaaacaccattgatacacacctttctttacaagttattagtttattgtcccaagaactttataatctttaatttagatcaaatttatgaatatcaagcttcccatgagccttgtattcatagatcttgattaagattttaccaagaaatctcatgttgtatttttatccacaaactcttgaaaatataactctggtgtgtcgaatctaatcaataaaattaaaattagacgtagccacattaccatcgcgacatgggaggtgaactactataaatctctggtgtccaatttatttattgcggttttattagtcaaattaattcaccgtgatcctttttattttttacgatcttcttagaccagttgacgaaaaaccgcatcaacaatgagcaatgcaataagaaaataatatagagtcaactggtcattataaacttccctttgaggtgagaatataacacacataatttatcttcatgaagttaacaataaagaaaaatacatatcaattaaaaatttattacctttagaaaaataaatttcttaaagaatatacattaattcaagccaaaaaatattaaataatatatatttaaattattactctcgggcaaataattaaaatatagacatttaatattaacttacttcatggaatgtgaactattatatatataacttataccttcgggcaagtaattacacatatagccaaccaaaataaataatattttctacaacatataaaatttagtgataaaataatcattgaaaattcataattttcagtcaaatttttaaaagagatatattaattgcttataatatatcgttaatcaaaaaataaagtgtacaccataaaatattatttttgcattaaacaatcttgtttcgcaattttagaacaacaaataatgtaaatatgtgaaagaaaaaatatttgtagaaactacatagtcaaaataagagagtgactatgtcaaacagaacgagaagaaatcaaaaaaaaaaaattctataatttatagatttcaaaaaataatcaaaaattaatttcagtaatttttaactgcataattatcattaaattgatataattattaatcaaggttaaaaaaatagaaaaattaaaaattaaattctaatcatgttgaaaaaaaattgttgaaaaatgatgtcagacgacagcgcacgtacccccacgcatcgctgtcaagagtgggcgttgctaggagaaggttgtctttaaccttgaagtgggtcacgtgacccgatctgtgcgcaggcacgccgaagctattttctgactaaaaatgactcaaaacggatgagaaaaaatggagtttagttttggatgctatttataagagatatatggtatcaatttagagtaaaaataactaaagattggtagatcaaataaaaatcatccgaaaactaaagaaccaaacaaaaaacttcaattttggtatatttctcaagcatttcaaataataaattgtgtgaaaatactataaataagtcgttaatgagttttgtacaataaattttaatcaatagtcaatagaatctaaaaactcaaaatcaatttcataatatagttatataaaccctaaaattttaatcttataattctctcaatttctcaaaaattttagtcataccagatatcaatagaaaaataatttcataatgaataaaatgcctaaacttttaagatcgaaaaattaaaatttcaacataaaataataatgaaattaatatatatatataattgaagaaaattaacgtatacatttattatatacatataaatggttgaattaattataagtcttaaatcatatacaatacacaatctgataccacatgttagaaaaatcaaataacccaagatattaatttgtatataatctgcaacacaataagaataaataacaattaggtatacatatctataacaattataataatttgatagtgcaatactatcaactaagttttatttcctagatttttaaatcaaaagcagtttaatttatctaattatcaaaagtatacaattatgatgaggcaatatgtattcatagaattagggagtgaatttagctaaataattctagttagactagacttgctcatcaaatgtttctgctaactagaaaagctcacaattctattttaactagactttacataaa

SEQ ID NO: 22196 - DNA, 1615 bp, Cannabis sativa
catggagttgcattattatttttgtctgctgtagctggttctgtctattgactggtatattgatgttgctgcaggataactgaaaccagattgttgctatataagctagtttttgagaaagccaaacagcatttaatgtgcctaaagcatgagaaattgctggtattcttctttctcagtaattattacttagagggtgagtatttttgcttaagtatagtaagtttaatttcactcacccttgcaagcagaaaaaaggggaacttttgacctctggaattgaggagtctcaaatgttgaagtcaaattttatccagcagttgaattgtagaagagacactcaacttgtagcctgtcatcttcaggcatgttcagataatcttgatggtgaatgcccggtatgtttacatcttaatagatgggcttttatgaagaaaattaaatttctgcgatttcttcatttttatctgaacctggtagaaactttttaaacaagattattttctagctgggaaagaagcacaattgttgcaaacaaaagaaaagtacatataaatacatatacatatatttatagatatggtacattgtttaaagaaataaaacatttgttaaaattttaaggacattgtgattccatgtcagatgtttgtatatttctctagtgagatgttttacactatgtttggcaagaaggaaagaatgttggaaagatggagagtttaaaaagtagggataggagtgatggatggaatagataaggatgaatttaaattttaaatataaaattgctaaagtatttattatataataatgtgttttattgttattgaagaatatatatgtaactcttcattaaagaatttgtcttattatataatccttcaaatttggaaggattgattttggaggatttggagggagatctcttccctcttatctttcttttgactcccattttctctcttgacaaacatataattttggctctccacccaattctttccctcctaacctttccatcgttccaaatttccttcttaccaaacatactgtttatgctttataatgttgaagcaccagataccataacatggtaactttcccttgggtatatgggtatcatgaagtccgctattgtttggaggtggtgactcctggccttgtgcttatatttggattcaaactgtttagtaatccataagtttcaatctcttgtgtagtcttacatatggatttgactttaaactagaaaaattaatagctggaatgaaactctcttgccctccttctcagtctaaggcacacatacaacatgtgcttgtgggcaccaaggtcaaaatatgcaagaaagacactgaatatttgtatgcatgactatattattgtttctttttttttttttgaaaaattgttgatttaaattgttagagctggagtttgatcgtgtatataaatgtatcatgtatctgcttactgttttattttgatcagatctacatttattgaaaaaaagaactgatcaacgtttatccattttgtgaatgttataaataaatttcttaatggttgaggttgggctgtaaagtttttgtttattactttatttttatga

SEQ ID NO: 22197 - DNA, 3165 bp, Cannabis sativa
gccccgagaccattacacgagaggtctccgccaaggcttgactataaattataaaacctgttcatattaatgaacaaagtaatcaattgtggcacacttgtacatttttttggggcacacatatggtaaggcataatactctccaagtgagctgagaagtcttgatgtctccattttatcggtcacttgtctaaaatgtagcttctggccgaataaaaacgtaaagtgtatacaaaggttatacataaagaggataattacattaaattttaaacaaagcttatgagatctcgtcaaggttgtgaacctctgcctatttgtagtaccgacataagtggtctacattccaggtgtgagcgacccacgatccgtccatcctcttaaggtgaaaagttccttggcccaccttttcaagtatttcgtaaaggccttccaagtttgggccaagtactctcacccccagttcctgcgaagcagggaatattctcctcaagacaagatctctaacgtcaaatgtacgacttttgaccttagaattgatgtgtcgagcaattttgccttggtacatcttgagttggacctgtgactgttcctgcagttcttcggttaagtccaacgattcctggagcaaggaatggttccaggaagggtcataagtatctcgtcgatgagaggggactgtggtttctactgggatcactgcttcacacccataggccattgtgtatggcatgtgtcttgttgaagttctctctatcgtccgataggacccaacgaactcagggaggttctttcggccagtgaattttataagcttggagtttcttcttcaacgtagttttcaggactttgttcacagcttccacctacccattggccagcggttgggctacagttgagaagcttttcacgaatttatgttgggcacagaagtcggtgaaatgcttactataaaactgtttctcgttatttgagacaattttatatggatgtccgtactgacacacaatatttttaataacaaaatctagggtctttttagaggtgacagtgttaattggttctgcctcaaaccactcggtgaagttatcaactgcgactattgcatatttgactcctcctttccctgtggggagggatcctactaggtcaattccccaaactgcaaaaggccataggctactcataagcattatctcactgggtagtgctctcggaaccttagagtatctttggcattgctcacacttctttacatatactatgcaatccttcttcattgttggtcaaaagtacccctggcaaaggattttcttagaaagactgggctctgaagtgtgatcttggcaaaaacttccatgaaccttatggattacttattcagtgatggctcttcccattaggtgtctggtgcatatcttccggatcgtcgagaatcaaaggatgaaatcttataagttatctagattaatcctctcagttaatacatcttttctcatgatcatgttacgtgtctttcgtctgaaaaacgtgtggataacaatagtcatttaatattttattaagaatataaaaaaaattattattgtttattcttttattatttatataatagtaatatggtaaataaaaaatgtaaagtttagtaaaagtcaataaaccacaatatctagtggcattataataaatataaaattagtatttattgttggctaaatttaacatagaattattttttgtgcaaagtgccataatttttattatgtgtcaaatttaataaactttttagaatatcattatgaaatattttttttaatgatgtgtacgtcaaaatacctattgattcataacattgcaagcaatatatatagtcatggttttttattgaatttaatgtgcattcctctagtaatgtaaacacccgtatttgtgagtatgattgctgattgtgttagttgtgaccctttgtttacttgatctaatagtaatgacctgcttcacctcattattaaggatgatactgcaattggaaaagtttgaaagtgacatctgtaaattaattaagcacataattgctagttagtacatactgactttttataaaaaaatatataatgataaatacatctggccttcctttaatcataatttaatactgaatttttccccagaaaacaattaattatatataactaatatatgcatgcattagcatatgcatatatgcatattcgtgtagtttattatcacaccgatacctgcataggatctagcatagaatagaataatatcgtaaggtagtaccaacaaacgacaagttaatcaacaaggcataaaaaaaatcagatttgagaatagtgacaagatgttgataggaaatcttctcttttgttataatttaggagaagatatataaagtttcattataaaattaattagttgttagaggagtaattcatttattataaatatgctattttatttttatacattataataatatgagactaactcttatacactctcctcacgtttcgagttagaaagtgtgagtataacgaacgatctttaagagaccacaatcacatttaaaagaatcctacaaggtcaactccaaaaatttgtaggtgtacacgtcaatttttttttagatttttgaaacaagtcaaagactccaccactgaaaactaacacacattggctaaaagatctcaaatgaaggttaaatgcataggagaagcggtagttttttgtttggctcttcttttttgggctgacgataatttaggttcacaatagatcttctcttttatggctagtattttttgatcggcgacacttcaggcttacaatgaattacaaacagctctgatacgatgttagaatttaaaataagatgtgtaagattttatttcaaaattaattgacaatcaaaaaaataacacattcatagttttacaaattaacaatgtgggtgtaactttaatatatttattttaatttttcttatatatattgaaaaaaaaaataaaaaatatgagatttgattaacttagagtaatttgatgtaaaaatgcagtgttcaatactattgtcgtttagtgagtaccataggtcaaatctgttgtcgtttagtgaatactattgattagcccctaatatgcc

SEQ ID NO: 22198 - DNA, 6487 bp, Cannabis sativa
tgtacttcgttggtctttagttcttagtcgttactgtgttcattagttctaggtgctactcttaggtaagatgttattgatttaagatagttgtaaaatatttccgaaaataggactaaaaataattgcaaatatgtagaaaacaattcccaattaaaaagctaggtcaccttgcaatccacataaagttctttaaatccagaatgagtttcattctgtgacaggctgccaatatgtagacagtaacactaataaagtctaaagatggaccaacttcagtgatgttgttattggctgtcaaacctaaataattgctgtaaattgggtctctttgtggagtgaatccccatgtaaaaagctatgttgactgtatcaagcgagcactaaatagtttattgtatattatttgaaataggctggttcaggcattggcggtatgcttggtgcaatccatggaattaacacaggtattcttagtgttctttcgtcttcaaaaagtatgtgtttattagtagaattgctaacttgacatgattgcagggattccatacctgcagaatcgtgtgaagggaccaaagtggcttcctttcttagttggggtaccttcaagctttctctctttgtcaattttttatttgaatttgcgctgcaatttttttccctatagtgtctactgtctagtctattatctggttttatttaattttcttgtttgatgtttagctacctccactgctaatgttctcgggtgcaagtgctgcatttggaggtatgcccttctctctctctctctctctctgctgattcactgctttatatgggtctacactaatatcaatagtatatcatgttgctaggtattttgtatttatatgtgttaaatatagatttgacatgtgtagggacatctgacatattttatagagtagttatgttgacttccatctgacaagggttggtgttgaacaggcttttttgccttgtagaatcgataattttcttccttcatcaatggcttgatttgcaattatttactctacctctctaggtgaagctgtggctgaacaaatgccgcacattattatcatgtgctcgagtgtgttcttttcctttttttttggtttctatctgatctgtgaaaaagcttcgtagatgtccatattggttgtgtgtaggttgtacacattgatttgcttcacataattttgctgagtaatatgtttacttgtaggttatgctcttcctagttttgctcaactcactgttacttcctactatgctgcctcaagtgcctcacattatgggatttcactgcttacacgatatgttgaagagttccatacttctcgtggtcagcaagaaagtcgctgataatttcttgtacatggacatattatataggacctacactgcactttaacttccatttttgtaagtagtattacatatgagcaatatttcagacaattctgaatggttttttgttttgtttttttaaatatataaattgaaattaactatttagatgactgtttgaatagtcggcgaagtgaaaggtcaatgaccatatttatacttttttttgtcaaatgttttcattgaaaaacaaaaaaaaaaaaaatgggtagatgtgagtaccttttaatagagggcctcatgtcatcactattcactgctgtcatttgaataagttgtgctttagtaatggcacaatttacttgacaagaaaaataaaggggacaataaattaaaaaaaaacagaatatgaaatggacagttcatgaagacaagcaaatgaggtcaacttcattggtgttcacaatttttaagcttatattaaatcacaagttatatttaatagctcgtcaagtaacttaatgtatgtgtctttttctactttcttgcttttctcaagttcctctgatatatatgagtattcatcaccaagcacttgcaaattttgattgaatatttgatttgattacgtggtaaatgtattattatgttagatgtattgcttaaagaaagttgtcacgccacccaaagtcactcagctttcacatactttattctctccctcttttgttatgaacattgaaagttccaacttcatagtaacacacagtccacatgaatccatgctctgttattattttagggaaggcctgcaactcagctaaagttgttcagtcatctctagcatactattgtactttacatgatttgtcactcaatttcgagtacaagacaaggcacttggagatacaaacaatataataaaataaatcactttgtagagtgtagatatgtgaaacctgatttgtttgtggattcagatgagtgactatctttacttgctttatgctttcttaatttctctctcttttgctcagcagtggatgcagaattatgtatcttttgttttgcagaattaatgtttaaattttatttgatatactcaactgttgtataaacaagttatacaagacaatgttgaaacatattgttataggatatgagaggattgtaaatgatttatgtataggagagtaatagagactactgatgcatctaagtcattagtataaagtagtactaataagaagtaatgaataagagattgattgagagagaggataggcagccaaacagaacctacagatccgaccacatggtctataacatctgtttagcatttattacaaaatgctaagctactccataccataccataccaggccaccactacgtaccacctccactagtcttatatggaaacaataataataatataactatataaaatgaaaaatccaaagtcactcattgtattctcttatttttactaagtaacagaagtgtaataataataatatataatagtaatattatggtgtgggccgatgtttcataaattccgctgcctcgtatttctctttgtgttaataagccatgtctgttgtcacaactcactactgggatggatgagaatgtggtcctcacctcaactctctctgatgggttttttactctctttttcttcactatcattccttttatcatatcttccttctcctcctcttagattttgcatttacttgtggaccatctttatagttggctgaccttaattcactctttcatactaataacgtctatcaatgggaggaatgcattgttattttgcttaattaatgtttaaagttaaaaatgtaatttaattaaattgtctgatcttacttttttttttttttgaaaaaattgtctcttacttttaaacgttcatgtaagaatatatatattattgtgtaaatttaacctgtcctaaaaaaaaaaaacaaaaacaaacatatatgtatatatatttataaaattcgatataaaagcacctcagggggtccaagacattataaaacgattagtgtaaatcaatatattatgcatcatatatttaaggcattgctattgctattaagcactagtaatcttcataaatacttattttttttaagtgatatttaataatagttataaaatgtaataatgtgagactgatctattatatattgtaccaatattaataagacattgtaccgtgagtttctaaactatataaattttgacaattcttaaattttattgtttgacaaattagttctcaaactatatacgttttggcaactttatcctcaaattttatttttaataaattggtccacaaacttttattttatatattagcaacgttaattcctcactcttagatattaatatttttattagtttttatttattttgcttactttaatttttttttttgttgttaaatttaaataatttattttttaaaaaattttaataataattatattaatatatttatttatctatttttaatttttaagtattcatataatatttaattattttactaataaatatttattttaaaatatgctctattcatatatattattaataagaaaaaaagacataaacattggccaacccatataagaaattttagccccctcacatttttatattttagaatttataatatattttattattgatttatgaatatgtagtattataatttttattaatttttaattgtatatatatttattaattacttaaattttatgtcaatgctagtaaaatttcattagttcgctattgagtaggtataagttaaaaatataatttataatataatttaaagtttataaaaaatattattattttaatcacaaaataatatatcactagatataattaaatagatttcttattaatttcttttataaatttaagaaatgatcatcctctaatcagagaagtaataaaaaacttttattaacttatatatagttgtttttttttttattgtgcaacacatcaactatttgatacgaaggaatattcgcttgaaatacaaaagaattatttaatggcagaaatatttcatgtgagtgttattcataaaaatataaattgttagttcacatgtttatatagttttaatgttcaaatttaattaaaaaaaatataaaataaataaaattatatatttttcttcttattatttcactcgatttgttttttcttcttattttagtatatttaaaaaaaaaaacatgtctatattttttttctttttattttaacatatttaaaaaaaaattatatttttttaatttaataatgtatattaatataaaaatattaaaaattaatataaaactaaataaataaataaaataccaatgagtgaggactttatgtttcagagaatataaaactttgggaactaatttaccaaaaataaaatttcaggactaacttgccaaaattcaaatagtttgaagaccaatttgtcataaaataaaatttagtaactaacttgccaaaacttatataatttaagaactagggtacaaataaacctattaataataacaatgttagatgatagtacccttgcgcaattcgttagaatattgcactgttccttccagaaatttaattttataagttctactttttacctaaaataattgaattggaataaaaatggtcctaactcctacgttatgaaaggtccaaaaacattaattatactcttaaatttaatttttgaaattaataattcattttgactaacataaacaaatttttacctgccttatatatatttatatgaatattattaccttctatggtaacattatcattacacaaatcacattatagtgtataagatcaccataccatattttgtatttattattctaataaatgtttgcctcgtttttataactcaaagacatattaggtagtgttttttttttcactgttaattagtccggtatgtatagaaataatgttttcatttataatctgattttgaataatgttatctggttcattaattgtccttttttttctttttaaatattattagataggtacttttcgtctatttttacatggagtctaagttaacgacttttttttaatgttctattctggtacaaaaaaaagtataaaaataaattaatatgtaaagttagttaaatgttagttaatatctcaaaaggatgaaatttttcttagtatgctagctgattttgataaagaaaaccatatattaaaaaaaaaataattaagaaagaactattgtcttactaaaaattaactatgtagcatttttattagatcgggtatatatattaattagcttttttgttcttaagagctatatataagtaatgtatatatatgtgtggtaatttaattggataatttcttaattagttaattattcatgtatattggtacacataatatgcagcatattatcatgattcttgacagagaatattattgtaataaccggagaaggaacacttgcataagcttatatatatatataaatatcaaaatagtactatattggctcatcatattatatatatgagtgttacatagtttggaaatattaattatttgtcgtatgtatatgtctatatacatatttatattatgaagcacgtactatagtaccttctgcaaaataaaacttcaatgaatgcaagttattaaatttctttacagtaatttagatttacaataattgatataatcacttcacgttcggtgacaaaataaagttggccatataaagttttttaattgttttctttgagatatattagttttagttaatattatatatatatatatgcagctcaaaatgcttttatatatagaagattaattgaaagctatacaattttcttgagaatttatcgatattggatgttcatacatctccattattagtagaaatcggatcttacatattgaaattaaaatattatattaaatatatttaaattaaaatcaataaatatgtacgtaggaccattctaataatactaattacactaattaatggcaataatatatcatatttatt

SEQ ID NO: 22199 - DNA, 1693 bp, Cannabis sativa
  modified_base (1365)..(1371): a, c, t, g, unknown or other
tggatcattggatccatcaacaagctaatcatatccatttaaatcaaataaataatatatttatcaaaatttttttaaataaacaattaaataaataaacagatgtgtaacaagttaggataactggttatatgatttagtttgaatttaaataaaaaaagtaaaccctaaaatttcaaaaattagagttgtaataaccccaaatatctttttcaagaaaaaaaaattcatctaactattcaaaatttatattattttaaaaaataaaataaatatttaacaagataaaatgataaataactatttttttaatctcataattaaatttaattaaaataaccaaattttgaagaaaaaattgataaatatatatggttagatttcaaaactatctagaatatttttcaaattatgttcatattttaatgtcaaataaggccatttaatttaatcaattaaataagtaaaatataaaatatattaccttataattaaaataaaataataaataaacaaaattaaaaaaataaccataatagcaaatttttgtagaaaatatcaatttttaattttaaggtcttttaatatataaaattaattaaataattaataattaatttaaatctcataattagttttaaaatttgaaaaataaaaatctacacaaaaaatcaaaatttaaatccataaaaaaaaatgataaaatttgaaaaaattgaaaaactggtgaaacatggatagtatgcattgcatattgtccgctcgcacgtgcaagggggcttgaccgaggggcaggcgacattgcagcctcatttggtgtgcggggggacattcagacaacaactgcctaagaaatctaggacgtgcttgtctaaaaataggttttgtccaagccaatcacccattccgcacgcataaggggaaacttcaaaaacctcaaaattgtataacattttcaattttaatcgaaattaagttttgtaaaaggaaaatttgcttaatttttaacgaactatcaaaataaaataatatcagatcgaaaatcaaattattttttttttttatagaaaatttcataatatcaaataaatcatcaaatatcacataaaccaacatgaacacatccaaatcaagcaaacatcttttgaaatccatatttcatgaaaataaatcattaccattgttcttaggctagtttttggaaatattttactaggatctagatttactatcatgtatgtttgattataaatctataatctaacttcctaaatatgaattccctaaaacaatgaattaaacacacataaagttatagaaaaccttacattgatggcagtaaaataatatgactccttccattcnnnnnnntaacccttgatcctttctatcgtaaagtaagatcaagatctgaacctggtttctccttcatgtgataagaacaccacacaatcttccacactatcttcagtattaactcaaattgtgtgggcaatcactcatacacaatagagttcgaaattattgagaataagaagaagggaattcaaaaatagatggagctctctttattctcgaatctatctaacaaagagtcaattaggttataaaataagagctataattttctatttatatggtagctattagggttaggtttagaatttatatagaataaaagaaaagataaatt

SEQ ID NO: 22200 - DNA, 2485 bp, Cannabis sativa
tttgagattctcaaccaatcacatattcaattttttaaaactcaaaaatattaaatcacactacaaccaatcacatatttagaaacaatttttcacttaataaattaaaatttttgtttccaaaacacatttttaaaaaacacaatttttgaatcacaaaccaatcaaaccctaaacttattccttatgtcaaaaagtattaaacttgagagtttgcaaaaaaataaaataagagaggtctgtcaataattttttcttacaaaatataaaaataatgcattcaatacaaacaaattgcttactgtcaagtacagaatgatctgcagatacatcaagtaagaggggaggaacctgtgacgcaacaagaagcgatcagaaatttatcagataaagtaaaaaactaaataaaaagaagcaattgtaattacttagtttcctagcttagtttctctagtttgatatataaatacatgctattctattgaataaaatacataattttgatttactattttctacatggtatcaggtttcaaattttgtgttttcaacgttgaggttgtctttgggtttacaaacacattagggttttgtttctttaagggcaccatttcagaaaatttattttttgggtagtactttattcacacagcttgtccagagaagaagcccacctgccgatctgcctatcgccggaatttggtgcccagaagcctcgtgagtgtgccccatgctccgtcgtcctccgctgggacagctcccacgcacctgcgtatgagagcacgtgctgacatctccattggtcagttttggtccgatcattcaattttggttttccggtcgttcagtgctagtgtttttccaatcacctttgatttgtggttcacaaggtttagttcttctaattttggacttttgatccttttgttagcctcttcatctttttgttctctattgaactttggttgtgagaattttgattgttggctcaatatctcattttgttcaaggcttgttgtcttaatttgtttgcttctttatcgaattttttggttggtttgttatttgagttagtttggggggacgaacatagtatttgcaatagcttctgaaagaccagttcttgtttctgcatatgaatatgcagaattcttacaatatcaagagtctatctcctcaccactattaataatttaggcaaaacaaatgtgtcttctttcttcaattaccaaatgggttattgattcttgtgccacagaccatatgacaggtaattctagccttttttttctcattttcagtctcacgcttctactcctaccattaccttagccgatgggtcaccatctcgtgttattgggtctggtatatttactcctactccaatgcttcctttgtcatctgcggtacatttaccaaatttttcatttaattggatctttgtcagccaacttactcataatcttaactgttgtatctccttttcttactaatcattgcttatttccgaatcctatgacgaagtaaattattggcaaaggacataaatctagaggcctctatattcttgacacaccaatacctagatccattgcttgttctagtgcacaatctcccttcatggcacattttaggttgggtcacccatctcttcctttacttaaaaaaatttgtccacaatatagtaagttgtctttgttagattgtgaatcatgtcaatttgccaaacattatcatcttagtatgagtcctaaagccaataaacgtgcaagtgtcccttttgaattaattcattctgatgtttgggggttctcctactttgtctaaaccttatcttcattattttattacttttgtagatgattattctcgtgtcatttggttgttttttatgactctgagttgttctctattatatgtgttgaaattaaaaatcaatttaatatttctatttgcactttaaaaagtgataatgccaaagaaaagagtatacatcttgtttatttaaatcttatatgattcaaaatagcatatttcatgaaacttcttgtgttgatacaccatcccaaaatggtgtagctgaacggaaaaatagacatcttcttaaaacagctagggccttcttatttcacatgcatgttcttaaattgttttgggtcgatgttgtttctattacatgttttttgattaatcgtatgtcatattctgttcttcatggtgagatgagatcccttacaaaattctttttcccaataaccagttgtttcctattgagccaatgatctttggtagcacttgctttgttcgcgatgttcgtccacatgtcaccaaattaaaccttaagtcattaaagtgtgtatttcttggttattctcgtcttcaaaaaaggtataggtgttattgtcctaatcttaatagatatcttgattctattgatgttattttgtggaaaacacgcctaacttttcgtcttcatctactctac

SEQ ID NO: 22201 - DNA, 5876 bp, Cannabis sativa
acttttgtttttcaggagctgtatgtgctggtgtttgatttgattttctttgggattgttttgagaataaaatcgaggtagatggttcttcggtttgaagatattagttaacatatcttgatgttttcacttagcttcatgagaaaaagcatagttccttcccatttgagagtcgattaccctcttatgacgacagatgagatagcttctctcgacattttgacagaaacacagataggatgatcgtgatcggttcgaaaccacatttataagttagaatgtaggccaactttgtaagtataggaacactaatgtcaagggtatgtttttttcttggcaacatgatgtattttccgaacatcattgtcttatgagaaagaaataggagtgattcttttccattttttcaactatacatctcacaatagtgtgtttaatatataagggaacttttattatattcatattttaatattaattagcttaactattcaatttttaaactttaataactattttattatacctttaattatttttattaataaggtttttgtttttgtaagcatttactttatttccttttttaattttgtttatttaattaactatgatttagctaaattttttctttagaagacttttttaaaaaaatatatattatttgaaagtttaatgagattgggtgtttattgtgaactttttgttttaactatgtgctacttttatctacttgttggtgttatatataatttggtactaattagtatttaaaataataatgtgcaattatatatttaatagtgtcatattgtgtactaattagtatctaaatataaaaataaaaaaaaaatgatttctaattagtatctaaatatttgaattaatttctaaatggtattaaaataattttgttaactactaattggtatccgataacatagaattggtaaaaaaaaaattgactaaaaactttatgttgtggttttgaatactaattagtagaaaaatacttaccataaaaacctataaaaccactaataatatataaaatcaatagtatgttacatatataagaggtagtcgtatagttggttatcatttacaacttaacaataatcaaagtattaaagtgcttttatttcgagccgtttaattactaataatattatgatttattttgaagttttacattatcttctaaggaaacaacaagggactagggattatatggttttgaaattagatacgagtaaggcttatgacatattagaatagagttttcttagcaaaattttattaaggatgagttttttcgaacaatgggtattattggttatgaaatgtgtaagtatcgtgcattataatatcattcatggaggtgagtccattgggctaattattctggcattagacaagtgattccttttctccttattatttcatactttgcgttgaaggcttctcagctctcattcgaaggtatgaggaaaggaagtggatccataggtgtaaagtggctcgaggtgctcctatgatttcacatatgttgtttgtagatgatagttttctctattataaagctaatgattttgaagcttccaaagttttggagttgttggctacctttgaaaaagtttcggggaaaaaagtgaaccttcacaaatcttttgtcttctttagtaacaacaccttgcaaagatgtaaagaaggggtcctaaacattcttagcatgttagaagcgcaagaaggtacatcttatctaggtttaccaagttcagtaggcaaaaataagaatttagcttttggtttcttgaaggatagggtcagaaaaagagttcgaaattaggatagtaaattactataaagagatggaaaagagattctcattaaatcagtagtccaattttaccatcctatgctatgatcatgtttcttcttccggatagggtgtgtaaggataagtaacggttcatgagacaattttggtggcggacttcagttgactttaatttagccatgcttggtaaacaaggttggcgtttactcactcaacctcaattcttggtggggaaagctttttatgcaagatattatcccaatagttcttttttgagtgctcaattggattctaatccaagcttcatttggagaagtattcttgaagctcaaggcattgttcgactcgatgttcgttagagaattgattcaggcagtgacattatgatcctccaacaaccttggcttcctcatttgagtgacccttttgtgcattctgatcatcttgctctccatggaaataaagtctctagtttgtttaaaagtggcttaaagaaatgggataaagaaattatttctgatctttctgaggatagagataaatctctcatttttagtattcctctcaatgagtttgaaaatagggactcttggtattggagtaaagaatcgtttggtgcttactcggttaagagtgcttataatcttattcaagaatcaaatggtcatttggattatgtagatagttttagtttttggtgcaaattttggcatctcaaagtttctccaaaaataaaagattccatgtggagaaccctgtctcattgtttacctactactaacaatttgaaagcttagttatgtcccattgaaagatatttgtccaatgtttagaggaggaaaggaaactactttccattgtttggtggaatgtccttttgccaagcaatgtttatctcaagtaattgctggtttttctcaaaatggttggatgaattttactagttggtttgtggacttctgttcacataattttgctgcaattattgagaaggtctctgttgtttgttgggcaatttggaaggccagaaatgaacttgagtggaatgagaaagtttctgtgatagaaagagtgtttgttaatgcaattacttatcttgatagttagattttggttcaatctaatggaggagaattctattccgtctcaactctctctgctgttgcaaatgagtactagactaaacctgaaatgggttctatcaagattaattgtgatgcaaccattttcaatgcagaaaatttatttgattttggttggatagcccgagaccattcattcagaccatttgttggaagttgtggcaggaagtaaactccttttgatcttgtttctcctattcagtggtggaactacttgtatctatggagtggccatggccctccctaactttttagaaaaaaaaatatacataatatataaattaaattaggataattagattttacttataagaaaaatatgataattcttttattattaatgcctaataatgaattgtgaaattgaaattgaaaaagaagctcaaacccaatagaatatttaaattagttatctattttatggtaaaaagtgacaaaaaaaatgattaatataatttatttttgaatagtaattttgtatgatatatatatttatatgtatctttatatatgtattcttatggtatctaataccatattaatatgacactttataagtagttagcggtttcttatattatttattaaattaaaatatttaagactcgatattattttacactaataacggatatgtcactttttatagcacttggcactataaggtgtcctttattatttttcattattttatatatattgtataaagttaattaactttttatattgatctataaaatactatatactaaaaaaattaagtgaaaatacattttatttggcctctccttatatcgtcgtctagttccgccactgctcctattggtttaataatctcatattgtaaacgtttacttgcaaatttgtccaatgttgttatttcttttgttaaacgattagggaacaagatggattattggcgctatttatgttctaatcatatttgtattgtcaatgggagtgttgtccctattgagtttaatgtcattttattggctgaagtttaatgcagatgcttttattctgtttcaaaaaacatgtatccataataacatattattattgtgtaaattacatggataattaataaatggaataatctgataccaaaacgcattatatatttattgtactaaataattgttataagaataatgttaataataatgagtgatttaggatattcaattagttaggatatatttgttttaaatatagattatattttatgctagatattattacaaataaattgggtatattattttatatttaacaaaactttaattatttgtttgtataagtatagatgtgaaaattctccttttggtgttgggcactaatagtaatatgggcttaaattcacaactaactcaaatatattaacacaataaatatggtggttcaaattatgattttgcttacaaattaagaatgtgtttagaagttactgtataattaaagtaataattacataaaaaaaaattaatttgcttacaaattaagaatgtgtttagaagttattgtataattattaaagtagcaattacataaaaaatttaatgtgttatttgataaaataattaataattacaaaaaaaaaatagttaatataaaaagatttttttatatatataattatagtgtaatggcaattaattctcataaaatcatcaattatgtcaaatataccataactttccccaaggcagttgggcaaacttgccacattgacttccctagactttcctagtgagcactatcaatctagaaacatttaaatttattttttattttaagatttcttattttttttgaaaaaaataattggtataatataaaaatttaaagtataatagaaaaattagagtttgatggtgtattttaattataaagtagagaagctgaaaatgctctgtaattaaaggatcaacataatttgtccttttgtgtaaatataagactgaaggacattactatagaagacatcaagtttaaatgattgcaatccctcccttctgataaggtaagtaaatctgattgaaccaagttattaagaacttgttgaacagcttatgattcaatattatacagttttcagttaatgcaaagaagaaataattaacgtccatataaagatcaacatcaaaaatacattataaatagatgtatacataaattgtaaactgagtgaaagacatctatacaacttcatggccaaaaaacacaaatatctatgacaacgacatgggatttgattttcgttcagcaaacaaaaacttatgtgaaacctttatatgctgtacaatggtacttgaacccaaaggtccatacaatttcgccataacagtcttaccaatacaccacatcactctaattcaccagtgtaggataactcaagatgaaccgttgagaaaatgtgccagtgccttgtctgtatcattctcatacattattagagcatcagcaacgctcttggatggaaatcccatctctcgtaagagattgtatccattgacaaattctggaacctgaaataagtaaaacaaaaacacatcatcgggtgtttctcagcaccgcggctccagagcaagatattaatactagagaccaaaacatcctgtaccacattttaataacataaaaaatgctaccaagtaacaataggaatagcatagttgtagaactcaagaaagtaccttagtggaattgtctccataatgccccacggcaatagtaacagcttctcgactcagccctgaagcaatatatttcgcaacggtagggtctgggatggatccctgccataaaaatttattcaattaacaatttcttatgaatgtaagaccaaacatatgcaatatattaaatattcttttgcaagtaaattacca

SEQ ID NO: 22202 - DNA, 2780 bp, Cannabis sativa
  modified_base (173)..(183): a, c, t, g, unknown or other
ccgcaaagaatttcaaaccgtatttttttttttgtgatgcagtgtatagtacgagcagtttaagcagtttgataaacacccttaagtcatggtcatatgaagatctgtgtggctctttcagtattgtctgaactaaaaataactgcttatttccttttctttttttttttttnnnnnnnnnnnagaaaaaagaaaaaaaaagataaataaaaattatatatagtcgttttttattttatatttgtagataaaagaagttaggtgatatctccataaaataatttattatctgttgtacttttgagttttttttttcttttaaatatatataacactgtttgtaaaagaaaattgctaaaacatatttattggtgtattgtattttcttccgtatcatattattattattttaattaaatatattttttataaaatattactaattaatagtcagacatgttagacaccactggtactgttgtgcctaggggtgttcatcaaaccgctgaaaccgctcgcaccgcaaaaaaaaaatgcgatttgaaattccgatttgaattttttctaaactgcgcagtgcggtatagtttgcatatttttgaattgttaatatgctgttcaaaccgcaccgcaccgcacattataaaaatactaatttttatatttatttaggttcagtatatgtgaattatgtccaacccaaagcccactaattcttgtattattgaaagttaattttttttttatatatttattttcaaaccttatggtatttttttaattattggtgatagtccaaagaaaactgcatgtgaaaataaatttgaaaaaatagtcaaaaatcggacaacccaaccgcgaacaagcctaagtgtggccaatagcaatgctattttgtaaaaatacaaaataatataatatttcataattgtatgagctattcctataaatatgtaacatatatttatcaatcctatctaataatttatactctcatttaattcacctcacatagctaggcttgttggtttagcttcatttattaaaaaatgtctctggtatttggcatggagttccttatggttgtgagtatagtagtttcactatcatacgccctagcatatctccttaaccatcttctccgacgacgagaccaatgttgctacatgcttgcctacgagtgttacaagccccctgaggaaaccaaactcagcaccgattcatgtgctcaaatcgtcttccgaaacaagaacctgggcgtcgatgagtaccggttccttctcaaaaccatggtcagttccggcatcggagaagaaacctactgcccaaaaaacgtaatggaaggaagagaagagactccgactcttgccgacgccttggccgagatggacgaagtcatattcaccacactcgacaacctcttcgccaaaacgaagtcgtttattacttccccaagcgagatcgatatcctcgtggtcaacgtctcgcttctctccgtggctccttcgttgacttcaagaatagtcaaccgttacaagatgagagaaaacgtcatgtcgtttaacctctcagggatgggttgtagcgcaagcatcgtcgctatagatcttgttcaacacttgttcaagaatcacaagaaggttaacgcaatcgtaatttctacggagtcttttgggcctaattggtattgtgggaaagaaaaatcaatgatgctttccaactgtttgttcagatcaggtggttgttctatgctctttacaaacaaccgttgtcttaagcaaagagccattttacagctcaaacacctcgtcagaacccatcttggtgccgatgacgaggcttaccagtgttgtattcagttagaagatgataaagggtaccaaggttttcgactcactaagaaactcaccaaggctgcttccaaggctttgaagctcaacctcaaagttttggtgcctaagatattacccatgagagaattacttcggtttttcatatctaacaatcttagaaacaagaaacgtcacaacaaaacttcattcggtttgaactttaagacaggagctgaacacttttgtattcaccctggaggaagggctgtgatcgatggtgttggaatgagtctagggttgagcgaggaagaccttgagccgtctcgaatggcgcttcaccggttcggaaacacatcggcgggtgggttttggtacgtgttgggttacatggaagctaagaagaggttaaagagaggagataggattttgatgatgagttttggagctggttttaagtgtaataattgtttgtgggaggtgatgaagaacttggatgatgtcaatgtgtggaaagactgtattgaccaataccctcctaagtctttggtcaatcctttcatggagaagtatagttggatcaacgatgattatcttggctttgttcgatttcagcgttaacaaagtcttataattgtctcttaataattattataatctctctctctacactactagtggtcctaattaataagatacgcgccgagcggccaaagccaatatatataggagtgtactatagttcctttacaggtacactcttatagttataaggttataataagtgtcattttcttttaattctatatcgtttgattattatataagatcttccctcctctcatatatagatatgtataattaataaacaatttaatatatatgttatgaatcattaatcatcctttgatgatataataattgatgctatatatatttattatactacca

SEQ ID NO: 22203 - DNA, 1943 bp, Cannabis sativa
aaatttaaatgcatccaaaatcaaatacatctacaatttaaaacgtactttttttattagaaagaattcaaatcaaacataataattagtgaaaattagtaatacagagcacacataataagtaatacagatttcagaggatacatacctaattctttgctccagttctttattatcctagaatatgacatatcactagtaaaatttagtaccgatggtacttttagcatttctcttttaattttttttaaataatttacaaaacactgtttatcacaactacttttttacgatggtaatattaacaattatatgtttcttttttttttttcttttcttttttttaaatttttttttttttttaaaaaaaaaagaacgtatttgaactctatttacgcaagagaatcttgaacaaccagcaacattatagttcattcatacactatagccaagttctttcagtcagcaattatgcttcagccatagttcaaaaaaagaaagaaaaagaaaacaattcttcagaggacacttataatgaaatccagatctctaataacattttccaaaatcaatagatattagatgacatgattcacttttatcaattctggaaaacacaaacacacaaatctgataatcacaattcagtagtaaaaataaagacaaacagaaaaatgaagtagacatacaagaagggcataataactaataagtactaattagctttactcaaatgggacaaatttaacacattgcccttggccaggttggccttaaccaattttgggttttgaagaacaccccaaagatcgatatctaaattactgacagtacacaacatcacaagaccaatattatccaattccagagatgcaattttatgcttcattgatagaaaataaatcaaagttaacaaattctacaagtttcaaatcagataagctaatgctctcaaagtccaaaaccaaaaaccgctcgtatcttgtgaaatatgagatccctccatcctctttctgtattctccaccacagtcgcattcccatatctgttcaacaacaaagaaagttaagctaagtttctgaccaaaaaaaaaaaaattggtaacatgaaaaattgttaggaatatgaccaaaaccaacctgtcttcctctgggatatcagtatgtgttagcttaactacagtaactccaggttcagtctcatccaaagtcaatctcacctgcaaattaaataaaaatcaaacaaatcagtcttttcacaagtgacataactaatccatcaatctaaattcaaattcaacaacatttttcagaaaggtacatatatttaccgttgagtgaatcccatcaggccagctcccaaatcgccatttctgaacaatcaacttcccttcttgcaattccaaattggtaccagtcacagacccatcaaagatgctaaattcaccaccaacctctttgttaatcttagcattactactagtaaatcctttccacctattctcatccatcaatatctcaaacatatcccttgctctacaactaaacttctcagtcaaagaaatggtcttaaaccctttcttgctcttcttaacctctttcttctccgcagcagactcttgcttagctgccacagactctttcttggctgccacaggagccggagccggagctgcggtcgtcccactactcttgggcaccaactttttgttctccaattcatccttggcaggcccacctttcgacatactctgcacataaaccctaaccttttcaagaatcaaaggcttacctttagccacaatagcctccttcaacctcttcccaacgggtccctcatctttcacagaaaccctcaattcagggtcctcatcggcattctcatcggctatataaggaatatccacaactccttccaccttgagcaaagattttccatctgcg

SEQ ID NO: 22204 - DNA, 3141 bp, Cannabis sativa
ttaaaacattttgaagagtatgttcttatatttttttttttacgaaatggcagaatctgatttttccggtgagatttggattttttacattatatcgataatatgtcgatgttttatcgatggtaagcttaccaaggttggagaagactcttatcaacaatttttcaatggtagattgatggtttctcgatgatttccatagttatgtgaattttttattttttattatcattaattaaaagttcaaaaattgataataaatatatttttatgtatatataatgaaattttcctttgaaaatccatcctatgaggctatgaccctcacacactctaatatcttttagagtatctccaatatagagctataaatgtggtgtactgccattttttagaatattttgcaaaaaattaactccaatggtaatgtaaaatgtgtgtcaaatttggccctagctaaaaattatgctaaattttagcccacaataaatgataccttttttaaattaactatttgttgctcattaatactattcattaataaaaaaaatatttttatatttatatgttatttgtatattttcaatgaatattaatagtattgatttttataactaatttacacattgtgcattggagtacaaatacaaaaattgagccaaatttaactcaaaatatacaccatccattagagatcttcttatgggcaattgagattttgccacttaagctaagtgattattgtagcatgtaataattagtgttgtacataaagttttgtaaaccacccaaaccgaataacccgcccaaaccaaaccgacataacctaacgaataatgcaaaccgaataacccgacgaatttataacccgcacaatctttatattgggcaggttgaaaataataccaatctacccattcaacccgaactaacccgaccaacccgattaagagaattttatatatgtatatatgttttattatatatatatatttccatatcaaataatttacatacacatttaaaaaatataaaattcaaactactatgtttttttataatagttgatttaaactttgaattcaatttatatatatttgtcttatcatcaaaattaactaaaatataataattaaatgtaaaaaaacaatattagttgtcggtttgggcgggttaatccgactaaaccaaccaattttattggacgggttattaatttttttttcttaattggacggattgtatttatatttttacaacccgaattttacattgggttgaataaaatataacataaaccgactaaaccaacaaacgtacacccctagtaataatagtgaaaaaaaaaaactaacaaatattttttaaaaatattaaaaggcactaataatgtaaaatatcttattgttattaggtgtaattaataattttgtatattttaatttaatcattattataaaaaaaaaaatattaatagttcataaaatatcatagtgatgatataaccaatatcaacgttcaatattttttatttaagaaaaaacaatgataataataacaacaagtaatctaatttggcttttttttgaaggataatgtggctgctttcaattagtctttttcttgcaaaaaagaacaaaatgttggctgctttaaataaataaataaataaataatagtagtagatttgaaccaatgaagaatggagcttttgtttgaaaagtacccctcctataataattattaggcacttttatttatttattgctcaaatcaagtattgaaagtacttttaatctttttatgaatatagagaaaagcttgccattattaatttttttttaaaagtttattttaatggagataagtttttaatcataaaaattttttaagtttcatattcttataagtctgttggttatctttttaacagaactattagtttctccttaaatattacgcgttgataccataatacggtatataaaaatttattttgatgtagattagtcttcaatttcaaaatattgtgacagtactagcccaagttgaagattttcgttagtctgtatgtacttatttttgaacaagagagtttgctaaaaaaaaaaaaaaatctaagtaaaatttgaactagagaaactaagatcaaaaaggggccaccaaaacccaccacccactggagatggaaattagcggaacagattcaaggagagggtcagagcaaggtgcagctacttaggattttttggagtttttttttttgtaattgtttttttagggtttttcgcacgggatcgttgaatggaatgaagaagaaaatggagatgaaggaatgatacttgtcgacaacaagcttccaccaccaaaaaggcagtggtgaataagttttatatatataatgttttttaatctttaataaaataaaatgaaaaaaaaaataataaagtggaaattttaagaacggcaaaacaaaactgttaaattgggtacctactgactaacgagatatttgtgactggaatttatctatattaaagtaaattttttgaggatttatctgtatcaaagtaaaaattttgggaacttatgtcgcagtgtaatatcaacatgtgatattttaaagggaattaacgggtcttttaaaaagagaaaaagacttataagaatgtcaagcttgtagattattgtggctattttttaaaagggaaatttgattttctatacttacatatacctaatatttttttccctaaactaatacttttctacattgaaaatatataaccacttttttaaaaccctaaaaatacccctctcgaaaactcaaatcctttctacattgaatttttttttcaatttttctgggcttttaaagggtcgggtccgatggggcccgatattgtctgatgcccgtctgatggggcatttttttggggttttgaagtcgggtccgatgggcccgatgccaattttttttgggttttaaggtcgggcctgatgcccgtccgatggggttcgatgggcccatcggaccccgaccttaaaaacctaaaaaaaattggtttttgtgcggtaccgtgcgggtctcgatcgaagtggtctgataacggtgctggtggcggtggggggtcgtccgtc

SEQ ID NO: 22205 - DNA, 2549 bp, Cannabis sativa
catgcttagttatttttcattaaagaagtattttattgtctttatcttaaataattttaaatggactagcgagtatgacgtctcgagaaattgaggcgttacaccaggcttgtccaaaagatatttttccattaccacaaattgaataattagtagatgtgacaacagggcacaagctgatgacctttattgatgcatattcttgatacaataaaattaaaattcacattccagattaagaacatacaagcttcgtcactaatatgcggctttattgttacaaggccaagccattcagactaaaaactgctggagcaacataccaaagacttatgaatggtatgtttgaaaaccatgtatgttggaatattgaagtatatgtggaagacatgcgtgtaatgtcagctaaaagcaaggaccatgcaaaagacctcacagaatgcttttctatattgagaaaatacaatatgaagttgaacccaaaaaatgttcatttggggtatcctcatggaaattcctcggttttattgtaaatgaaagaggaattggagctaaattcccaaaaaataaaggcattgctcaaaatgcattcgccaagtaaaccaaaagaggtttagtcattaagtggcagaatggcaacattgactagatttattttgaaatcaactgataaatacctcctatttttcaacattttgtaaggcgataaaaattttgaatggaatgaagagtgcgagcaggcctttcaaagaagcatctttccacaccaccagtgttggccaaatcaatataattggagaggagttgtacatttacttagccatcttcgaaaatgccatgagtgatccattgatgtgagaagatggtagaaaccaacaaccaatttattatatgagaaaaaggttactagggatagaaccgagataccctccactcaaaaaacttgcactcagcttggtacatgcatccaaaaaattgcgaccttatttttctgctcatcccattaaagttttcacagaccaaccattgcgataagtgtcatcaaaaccagatgcatcaagaaggttgataaaatggtcaatcgagttgtgaaatttgaaattacctaccatccaagggtcgccatcaaaggtcaagctttagctgacttcttggtggaaggaataaactcaggagaagactccataacaggaaatgataatgatgtatggaaactatttacggatggagcttcaaatgagaatggcttgggagtaggagtaataatagtgtcgactgaaaatttctagttttattatgcactaagattccaatttgatgctttgaacaacaaggtagaatacgaagccttgtttttttttttttttgaaaaaagggaaagctttattccaaaaaacaaccaaaacaaacacaaggcaaaagcctacaaaactcccagcggctgctgctgcagaaaaccagcaactacagcccccccaaaaaaaaccctaccaattacttattacattaagtaaatacttgtttcttttacaatccttacccttgctaattatcctcatccgaacagtgtccttaatcccctaaactcaagcaactaggagttaaacaactaagatcaaatatgcatttgttcctattcttccagagaaaataaagggcagcagccaagacagtattggttattcggtttgtcaagttctgctttatgttgcagcagccaagaaccatttcggcaatcgaccgaggccactggatgcttcccatccacttgttgacagttgcaaacacctgaattgcataggtgcaagtaaaaaataagtgatcatgagtttccaaagctgaatcacacactgggcagaggttgctcggaatgactattatctgctgtaagtaatccctcgtgagcaaatgtgtgttaaaaatctgccaatatatgaatctatgtttaggaacaacaagtttatcccatatagctcctgcattaacagcttggttatcttccacaaacaagttataacacctcttagcactaattttattacctctagttgcttgtcttagcttcgtttcatccaaataatctcttaagctcagaattttcttgaaataccaacttacatcttccttcttgggccaatcccatatgttttggtctttcaagtacattgaattgatccatttaaccgataagcaatcatcctttttagcaagagcccaaagatgcttagccaaaagagctttgttccatttctttccttcccgaaagcctacccttccaaggtttttggggaggcaagccttttcccaagacgctctatgaagcttgctcctattccatgaaattccccagagaaagtcacgacaacttttatcaatagctgccgttaccttagaagggaggatgaaaaatactcatccaataattccgaataccaagcatcactgagtgaatcagttgtgccctacctgcaaaagataggtttctactagcccaacagttcaggttcttgttcagtttgtccaaaataactccacaatcagcagccttc

SEQ ID NO: 22206 - DNA, 4889 bp, Cannabis sativa
cgtctcctcatgaagtgtaatgtgttgtttgggctcctttcctttggaaattgcttcctcaacatttccacttttatatttctctcttactcctttcttttttgaagaactttcaccttctgcagacatactatacatagaaaaaatatttgaaaaatattcgggaattattatttgatattacatcattgttacaattacaattcatcgtcatcatcatcatcagttattgttacaacattatcatcactatcactttttaattcttagcgctcattattttttcttggacatttgaacccttatctacgccatcgacaatgaatttatctaaaccttgagtgtcaggattcacgtgatgcatgtttggtactttacttgggtcaacatcatgaggatcatagtcaacatcatccaactgtgaaaggtgtacagcttaggtcaacatcatgatagacataatcaacatcatccaactatgaaagttgtacaactagctaaattcagctaagttattttcttgctttcttgcctttgggttttttacgcttggcatcaaggcgtctccggaggtcaattgtacaccaactctcttcacaaaaagttttttctatcccatcatcttggttaatagaatcactggagaaatttctctttctcttaactgtaggccttgtcatatgagtaccaagtgtatcgttatgcacaacttagcctcgtggggtagaagggcatccaagcctagaggcattggtggtcttattctttgtctgtaaggactggttggttgtgttcacgttgtttttatgagacaatgggatagtttcaggttgaggctcgcctacctttgccttccccttgtccttcataggttgaggttccaacattagtagggtttgctcttttttccaagttaatatggtcttccaaggtatcttactcgaagtgttcatctatatcgccgagtttggctcaaagtcatgcatcattttctccattcaatgagagaaaacttcctgctctgctagcttttattgagctttaggtagctcgcaagatactcaaaccaccttgggatcttgctcatagtagtatcaactttttgtaatacccatctataatttcaccgtcatcttcatcctcatcttccttgtattttgggtttttctcaacaaattgttctggatgttcggccatctcagccgctagctttggacacttcttcatccctcccagtgctcgactgggcatgccctggagggagcaaattagcgtcatccatgacgacatcctagcttggaggagggtgattcttgacgatggtcttttggtagccacaatttttttatatgtaatgcaactttaaatctttcctcgactctcaatgaatgcacaaaaatatttaccatgattttcggtaactaaattagagaagatcttaagaaatgaaataagtaattaagtaatagagatggagatttttacatggttcaggtgttagtgaaacctagtccatgagtcaatgtattagccaatcgacttgatgtatttcaagtgggtcttaagagttcaagaaccctaattttttgctatctttcctcacttgagattttctcagttagagaagaagaaccctaaaatttgtgaagtgaattgtccccttgcatgaaggtataatttgaaatttataggctaagatctaaatttggacatacgcttgaccaactagggttactatgaaaactaggctcactattggggtaaatacataaaatacttgactttaaggcccattgtaagaatctagcttgtggtggaggttttgtacggatggggtcccctcagtctgggatggtgtcatgcacgggcactactacagtagacaaagatgtcagataggcatcattggatcaaaaggatgtattcctttttttggtgcgccctcttcaatgttataacataggagataaaatctaatttggttgtaccaggcatcatagagcagctatgtcacccctcaaagggcttttagagaagcctctaagattccccttcgggtgcatacagtgctgaatcggaggtcttgcttattaggcgctctagaaagctggaagccttcaagatctagaggagcctcatgtttataggtgaggtttctgagctttagatggtcttgggctcatcttccatctagatttggccttgctacgttgaagggctttgacccaggccattccagcttaagcatacttgagagataccacgtgccatccttccaaaaacatagataacatttaccccaaatattttgggacttgagagtggcggtagcttactgtctttctctcagattgccttggatatgtggacaactttagaaaggaagaggacatttcatcttttgtgcttcagaatgtggagagttgggacctttggactacaactataatcgcaagtgtgtcctcgtcctctaggtctgtgaactctatgcgtcttgggagggcctgatatcgcgatgagggttgattgatgtcatgtgcgtatcaaggtgaatatttatgatgaaaaagcctctatccaaatgagttgtagtaaatgttgtccttccaactcctcaaccattggaccaatattgtgttttttgagatgaaatttaagccccagattggtgagcacttagatcaccaccttcactgtataaatacatctaaagaagaaccatttgccacttttacaccttcaaacatttgaattcaaatttgagagagagtaaactagaaagccccattcttcaacccaattgttgtctagtcccttctatgccattatccattgtcttatgcgcatctgagccagagagtacccagtagcacctccactgaggatagtaagctatcgtcaatccacttcagtcgctagacattcaagtgggcacttgatttttaggctagtcattgttgcactccattctctccttctccaagtaaatttttccctacttttcagactatataatcttttgtattcatagaaatgcattctcaagttttaaatagggagaactttttcatgtgaatgtgaggtttaaatgtatagtatctaggttgttagaagttttataattattgaggcacaaatctaggtagaaatctgaggattttagatcttagctcatttatctatgtaggttaagttcgagacagacacaaattccttcatctaaagttattatggttttcaattagatttctaggttttttctatttacccttgagttctcgatctggttgtctgcatgaatagctctacaatgacttggcttcggagtcatgggtcctgaggggacctgtccatgcatttttaagggaggactctcccatacccttgctagtcttttaggtttagggtattaattgcttaggttttcttgttttctttccagccataaacaccatgtctgaccaagagattgatcttgagatggtggacctcgtgaaggaggaagctgaaataggggaactaggaaaagatccaactgaggaagtcatcctggagacttctccacagagaaaattcccaaagaaagtagccccaatagtttatagttcatctatatgggagatggaccgaatctcaaataagttcaagagctatgacatgctccaaagatatgatgaacactgagaagtcaataatgttccaagacttttcaggcataggcttcactcttgggggagtctctagtcaaatacgttgatggcttcagagcatggagatgggcacttatcatctgcagagcccattttctcgtgtgcagttattttatgaacttctacactgctatagggattgcacccttcctcctcatctcgtagtcttataagctcctggcgagatggtaaattctttgcaagatttgggagatggaggttccaaagctagaggaaatactttatttttatgcagtcaagtcgtagcccatgcaaaataacaaaacaaaaattgggttttctaagttggagaagccctccaacaagtcgacttgtcccactagcttcaccaaatatgtcccgaactattggttctacataatgatattcctactaaaaggcttttgaccttatccctttatttttccactcagggtaagtactttagtttttttctttccttttattttcttccgtatgttgtatccattttgtgatggaagaggttccatccttgcaaccaacatcgaactaacacctccaaccatgtcattggtgattgaagaagtgtagtaccagaagattctcactgacgtactacaattggtggacttggtcactacagagaatctccacaagtatgggttgattgccaattactgaagcatcgagccctacaaaattcatgacatctatcgtgatccattagtgatcaaagaagagataaaagtgatggtttaagcggagatgtgaaatttttttaagctagacaaaaaatggtttgctaattaggagtgagcccatgcagatccaattagtgagtaagctaatttggtcaattgtttcattacagtggctcaaaacaagggcacttcgggtgtcagcacttttggaagaggtaaaacatcattttgtctcacttatgcttcgcgtcttgatgaaatggctcacatcgaacagggaagctttgaagataactttctaagtgtatatacttatagatatctaatagaaaaatatttcagtaggataggcaaaatcatatggaccccagagcactttgaaccacgatcctaatcttaagggattgatccattcctcgtcatgttcaatctttgttttgaggagtatggtagcttttggatagggaagatatagcttcatttgctcgggaaaaac

SEQ ID NO: 22207 - DNA, 3919 bp, Cannabis sativa
ccaagttttgatcccggtctaggtctgggtgtgggttcgagtctaggttcgtatctggatccctatttaggtatgggtccaggtttgggtcgtggtctcagtcttgatctgggtacacgaccgtgtttgggcctgacttctggtctcggtttgggtttggggctaggtccgagttggcttctaggtttgagcctgggtcttggtcactgtcctagtcttgttagagggtcctggcctgacggttcttgttcaggttccaattttgggtgccgggtattggttagggtcagggttcgtgtcctgatccaagtttgggtcctggtctgtgccccagatcttgatacctatcacgtgtccagtctaatctggtggcggttctaggtcccaaccccagttttgtgccctgagtctggttccatgtttcgatttgagttcgagtccatgttcgggtctcgagtctaggtctgggttgggattcgggtccagcttcaagtctgggtctaggtctgggttggagtcaaggtctttgtccggttacggttccaggtctaggtccaggtctggttacagttccaagtccaggtccaggtctaagtccttgtttcggtcccggtctacttccaattttgggtcacagtgtatgtgtttgggtcaaggtttaggtcttcgagtgggttcaagtctagatctggtttggggtcttggactgggttcgggtctggggctggctcctagatctagacaccgactatgagttcggtccaagccccgcgtccagattcagatcctaatctcgggtgccagtgtagttccatttcgagtgccgggtcacaaattgtgtcctaggttcaagtctaggtctggggtcgggtcttgggtcccggtcctagttttgttggccacgtccctatcctgattctaggtccaggtcccagttcttgtctaggtttgggtcctggtctaggtttgggtttgggtcccactagcagttcgggtttgggtctgggtctcggtttttatttgggtttgggtctgggtctgggtcctggtcctggtcctagtcctagtcctagtcaagttccaattccagttgcgattctgagttcgagtatgggttcgtgttcgtgtcagggttcatattcggtcggggtttgagtcctggtttgcgttaaggttcaggtccaaatctcggtcgaggtccggatcaggctccgagtgtgggttagggtcctggatctgggtccatgttcgagtctgagtctgaggtttcgatctcaatctgagtctgggtttagtttggtcctggtatgggttcgtgtctaggttactatcctggttatgctttggggtaggtttggggtccaggtctgggtccgacattggattccagggtccatgtcaggtctttgttcgggttcgagtctcgaatttagatctttgtctgggttttggggcctaggtccctagtctatgtcccccatacaagtctgattcctaggtactggtctgggtccaggttcaggttcgggtctcgagtctttgttttattccaatctcggtacgggtttgggtccatgtctgagtcccaatcttggtctgggttcaggttcaggtccttattaaggtctggatctcagtttgggtcccgagtcttaggtcccgctgagggtttaggaataggtcaggtccacgtcccagtccgggccctagtccaggtttgggtcctcggtctcaagtcccagtccttgtcaaggtctcggtccaacttgtggtctgagtttgggttattgcttgggttggttcttgtctcaggtccgggtcctagtcacagttcaagttccgattctgggtttgagttaggttctgggtccaggttggggtccgggtccgagtctgggtacgggtttcttggatccaagtttgagtctaggtccaagttcgggtcttgggtctgggtcccatgtttgggtctgggtttgcgtctgggtccaagtcgagctctcgtgtttcgatcccagtgtgggtctgggtcggtattcgggtctgggtctgggttcgtgtccatgtccaggtctgaatcccagtttaggtcaggggctcggtctgggtccgagatcgagtcccgagttcgggttcaggttcgggttgaggtttgattctcagtctttttcttggttcgggactgggtttgggactaggtccgagctcgagttttagggctgggttttggtctagttccgggcccgatccaggtctaggtgctggtcatggtcccggtcctgttccaggatcttggtcatgttctggttcaagttttagtttcgggtcccaggtctgggtctaggtccatgtcctggttcagcttcgggcccttgtccgtcccatatcaagaaatcaactatgggtctagtccaaggcccggttctcagatctgaggaaaagatttggatcccaatcacgagtcctaatctggtttcggttcatgtcccaggtcccggtctaggtctgcgtctaggtctgggaccgagactagggtctagttcttggtcttgatcatagttttagggcccaagtcctgttcaatgtttgggtctgagttcaggtctgggttcgggtcccgagtcctttttctggtttttatttaggttttggacccaatcccagggtgggtctatgtcagagtccaggtcgtggtcctgttcctgggtcacgatctgcgtctagtcttagttccagtttcatgtcatgggttaggggttcgggttgagtttgggcccgagtttgggttcaggtcctgatttaggtcaagggcaaggttcaggtccgagtttcagtctcagttagggtctgaggctgggtccggttccgggtttgggtccgggtccaggtcccggtcccgttctaagatcgaggtctggttccagttcaagttttggttttggttcctgagtgtgggtctgggtcctagtatgtgtccaggtcctggtttgagttcgagtttgggttcaggtttttgtctaagtcctacatctaaacactgactacaggtcgggtccaagcatcgattctcggatcctatgtctcgagatgggtcctaggtcaaggtttgggtctgggatcgggtcctggctcccgatccaagttctaaggaccaaattctggtcctagtatgtgggcccaattcgcaggtctggtcccccatctatgttcgggtcctaggtcttggtccgtgtccaagttcttgtttttgttcgggttcgggttctggtcttgtttgagtccaggtcccgaattggttttgagtcccaatcccagtctgtgtctgggtttcgggtcctacgtccaagtctggttcttgtgtcctgtctccatccccagtttttgggtttgggtctaggtctgtgtcccggtctcggtccgagtcctggtcttggtgtaggtcctaggtgacaggtcctggtctaggtccaagtcccggtatgggttctggtctaagtttgggattaggtttgggtcctgttacattcccatgtctgggttctaatcaaagtccttgtccgattccggattcgggatcgggtcgaacctgaacctgcgacgcgatcccagactgaactcggacctagacatggatgtggacacaaacttggactcaaacccacacccggacccaaacctagaccagcattgaaactgggactaggaccccgaacataaatatggacccaacctggtatctaggaccttgaccttgatgggggacctggacccgggccttagaaccaaaacccggattggaactcgagacttggacccagaccttgatctggactcgaacttgcgactcaaaccttgatctggacccagaccgggataagaaacccgaacccgaactcggactaggacttgaaccccaacc

SEQ ID NO: 22208 - DNA, 7210 bp, Cannabis sativa
gccggcgcagtcagggtacttttgtcggcgcaacaatgcgccggcaaaagctggttttcttgtagtgtttggaagatcaaaagaaagcaccaaaaaataatcaacaaaaggattctcatgcattatactgcttgcagcaagttatggcagatgatctttttacatggaaagccaggatctttcaaaaaatagattcctattcgaagattgtataaccgcatggataaactcatactaacctgttaatttaggatacttccaattacacaaatcaatagttcaaatcacactcaaaggtagggcatttcccatggtaaataagataagacctaagcccagaaagactattatgggcgcagcaatgacaaaagaagcatgggacacgctgcaggaggagttctaaggaataatcaaggtacgcacagttagactacaaaagtttagaagagattttaaaaatcttaaaatgaaagataatgagactgcaaaagattactattctaaaattaaagaaatagtaaatgaaataggagcctatagagaaataatttctgacaagaatatagtacaaaagatactaatttcttgtaaagaaaaatatgattcaatagtttcgttgatagaggaaactaaagatttagaaactctatcaccaactgaactaatgggctttccagaagcatatgaaaatagacgagaaaggcataagaaaagtgaagttgaaaatgcctttcaatctaaaatcaagccgcggtcttaaaaactaaaagctgatgggaaaaaaatacaaagaaatacaaaaagaaaataacgacaagtatcctccatgtggcatttgtaaaagaaaaagtcacttggagaaagactgctggtttaaagaaaaatcacagtgccaaaattataaaaaatttggacacactaaaaaaacttatcatttaaagaaatcgcatcaagttaattttttcgaagagaaaaatgataaaagtaatctcttctatgtctaccaagctgcaacacaagaaagaaatgatacttgatatcttgacagtggttgcaataagcacctgacgaaaaataaacgtatcttttgtagtcttgatcatagattcaagactaaagtcaaaattgataatggtgacttcatggaagcagtcggcaaaggcaccattgtcattgacactaaaaagacaaaagatacatcaatgatgttctcttggtacccaacattgataaaaacctacttagcgtaggccaaatgattgaaaaatggtactctttgcattttgaaggagattcttgcacaatttatgataaccaagataaatcctttcaaattgcaaagaaaaaaatgagagaaaacagatgctttcctatacaatagagatatgcaagtagtgtggtgatgcaagcacaaacagagaatcacggccttggcatagaaggttcggtcacttcaacttctacgggataaaaatcctcaagcagaagaatatgatgcgagacatcccagcaattaaggagatcaacacagtttgcgaaggatgcgtgctcgggaaacaacatcgacaaacctttcccattcggcaaaccttggagagccaaaagccactagagctagtccatacagaagtctgtggggcagtacgcacctcatcaaatgactaaaacaggtacttcattctcttcattgatgactttactagaatggcaggggtttattttatgaacaaaagtcccaagtctttgatattttcaaaaatttcaaatcccgtgtcgaaaaataaagcggacactacatcaagacaattagaagtgatagcgacaaataatacacttctaatgaattcaataagttctgtgaagataaagggatggagcaccaactcagggttggatatgtatcagaacaaaatggcgtatctgaaaggaaaacaggactgttataaaggcagcaagagccatgctactagagaaatgtctcccaaaacgattttagacagaggcagtaaacactgcagtctacttgctcaatagatgtcaaaccaaagtcgtgcagaataagacgccaattgaagcttggaatggacgtaagctatctgtaaagcatctcaaagttttcggctgcatatgttacagtcacattccaatagataaaagaagcttgatgagaagactgagaaagaaatctacttggcatgactttggtaccctactgtggattttggatctgatgttggatctaagaaagtcaacatatctgaggtaaaacataattcatgtgtaggttgattttatttttgttcattatgcatgttactagctctctgcagatatgcattccataagtgtgtaagttctttcaatttctagatagtttcataagtttgatattatcctgaatgcaaaaatgattggttttcctagagcatcaaatgcgtgtcttgtcaacatgtggtttaacaagcatgtgcgcttgatgttcatctacctgaacaagctacatcttgttttatatatgaagattgataattgtatgttgttccttggttaatgtggtgttgtaggaaattattcatattttcttaatatttaatctatacgctttaggtacttgatattgaggagataacatgggctccaaaatatggtttgaaagggatgattgattcttctattagagttgaagtagaatcaaacaaaaatggaagaactgagaatgtgatgcctttagaatttaaaagtggaaaagcactgaatggccaggtaagtcttagtttcataaaatttgtgcaattaattccagaagaatacaaaatttgtctgttgtacagaacactattgatttatgtcttcttcctctctttgatatttgcgtagtcatctacagaacactatgcgcttttgatgtccgagaggtatgaatctgttacattattctttaattctcagacattagatttctaatttaagtggattttgatgtccgtttttaggtaccaattagtcatattgatatgggtcttctgtactatcttcagtcagatcagacacaggtagtgatagaatacataaattatatgttcccattaaaatcttgaggtctatccaatgtttgttgatgtctcttgggaatttcagttcgaagatcagacctaattggactaatcatgcgtagcaatgaacttgcaactgatatccttaaggcattaacaacgcaagtgctgccacccatgttacaagtgtgagctgttgtagtagtagcaccagaaagtgattctagaaggaaaacttcacttagcatgtttaaatgtaaaacatggcatattaatataccacctaattagaaatagggtatttatacttttaatatatttttctctctctctctctaattctctgactctaactaagtcttgccgtctccaactcgaaccaccttgaaatccccacccatcatcggagttctcaaccccattgcttgttttttacattttttttttgtttgtacgatgtcactaaatatttctaaatgtcactaaatcacaatattgctaaatgtcgttgaatcacaatatcattaaatctcgctaaatcacaatatcgttaaatatcgttaaatcacaacattgttaaatgtcgctaaatcacattgctaaaaaatatcgctaaatgtcattaaatcagaatcaaattttcataatgattagcgatgtttagcggcacgtttgcaatttttagtttcatattgaaaaatacatcgttaaaatcattcttaaatatgcaaaatattgctaaacatcgctaattatcgttaaccttcatccctaactttagacttggtctatcattacaaatatatcgttacatatcacaaaaaattagaaaactagaaaaaaaaaacgcaaaaaatcaacgaaacacaaaaaccaatgtgtagatttgttagaacaagaaaacgagaggtgcatggtggtgagcagagcacgttggtgagcgttgtgctgtggtgagtttaggtgttctttcatgagagagagaatagagagaatgagaggaagaggagagagaatggggaaattgaaatgagagcgatatttttgagtttaagtaaaataatagcatatttttgttatgggttaaatgggtagattagtttgggttccatgctttacatttaaaaatgggaacccaaatttcccttctagaatatgtcatttcacaaggtaattcttttgatccttgggttctaattgtctgctagggcgatcaggtctattatgtcatgtaccttcttgtataatttcaaatatttctctttaactattaaaaatatgaaggtttgaaaaggttttcaatgtgatcatatttaaatgcttcaggtcaatggtggtagtgctgagaggagtggattgggggatttatttgattcaaacacccaccacctaacaacttcccatggcagtttccttaagcactgggattggttgattgacttagaagctaaagagatacaggtgcaactttcgagatcatgatatgcaatactgtaccaatagctctgtacacaaaatttcaatgaagtcatttgttttacactttatctattttttcagctttctaaaaacaaaatctggtgatcacacaatttgaggagtggtgatgatgctcgtcttttttctattgctcttcataatgaacttccacattgggagattaagaaagataacagatttatcttcgtttcatatgtcacagtgttccttctgttggtaagaagttatctgattgggattctctgaatgacccatcttctctggtaaaagattcgttgcactttgaaaagtggtacgagtatttacaatgtaaattcttaataaaagtgcacattaaattgtttaacataggtgtactaattcaaggctcttaatgtagagtcaccgatcatactctgcacataaatatgtatgtacgtacacatacacgcatgcatataattatatgatttagcagacatgtttgctcactatgcattttttggacataaacttatgatgccagtgtacatgtctatgtgaaatcgtcatttataaatccttggggaattactccatatactatttttataactttttttttcaaatttattgtttgggttttaagagtggttgcagcgctagttgcaatagggatttctatacgattttttgttaaatttaagttgcagcattagttgcaataggggtttctatgtagaattccctaaaaatacaaaaaaaaaaaaaattgttttgaaatataaaattgaaaaagcccctaaatcctttatatgttttctttttcttccatgtagtattatctttccagttcctccagttctggttatatattttcaaacgcaagagatttatgtataggaagctagaactattaaagatatttcttatagttctttatctttcaattgtcttatttatcggtctgcccctgatgagaccctgttttgatcaaccaaaccaatacccaaagaacacacaaacagtagcaagaatagacaagagtgtccaaaacaatgaaatggtaggaaaattgtagaagattgatattgaatatttgaatacgccaattacaaactatgggagtccttaggcccctttgatattgaatatttgaataagctatgcttgtgtggtagtgaaaatccaagaaactgtagttcgtcacttcttggagattggcatatgattaacgttgctcttacaagagccgaggtaaagttccctataactgcacatattagtgttcttcttttgttttattttatgtacgccaacattttaatcgtatacttctgtacacaaaaagttgataatggttggatcatttaagactctatcaaaggttctgctgctgaagcttctaatcgagaaagttgaagagcaattgggcattgtttgtgctcccaagaagggtagctcaacaggtgttcacagtcacaattgagaacttgagatgatagtataattaagagagcattttgtattcaagtgtagatataaaattttggtgattgaggttgtgctattgtataggtgaacagtggttctataacagtttcagaaatgtgtttcagaaatgtaataaaaatgtttatttttctcatggaattctgctacagctctagtatccatctcaaatacttgggatgctgtaataaagcaatataaaaatatactaaaaacgagaaatttctattttagatctaaactaaaatgaaatgtcaaaataataatattgttacatgaaaattatagggactaattagaaatttttagtattgcctagttagtataaatatgtaatactattacacaaatggggatcaagaaatgaaatcagagaaaattaggattattcctattggagtttggcactgactcgaagagtgcaattcgattcgatacaattggtaattgtatcaaatatcctgcgattactatccagttttaataataatgaattagaatgtttgtcagaggcgttgtccaaccttcttgaggtatctttgatttatgtttgttgtacgattaatgtgtttgttgcaaataaagtaaaccaatgagatgctgctcagaaattatgatgatgtgcccgatgagctcgcagacgagtctggacaatctgatgaagaacctgatccatcagcttatgaagcttctcttctctgcatcacaatattattactagacccgccgagccatgggactacgttacacattatggacgatccaaatgatgtttttactgatgaatgtgatactgctactgatgatgattagattattagttaataatgtgtattttatgcatttggcatttaggcatgtcaaaaagatccatttagttggagcgggttggagtttcgatccgatgaatcacctctgatccgaaacattcggatacttattagatcttggatcagaccgctccgccccgcctaatttttttctggatcggatctgatccgacctgatttcaatttatttaaaaaaaaaaaaaacttaattcaagactcaaatcccttgggacccggacccgggacccaaacccagacccagacccggaccagaacccagatcgggaccccgacccggactaggactgggacccgaacccggtgttgggttttgtgccctaaataaaaccctttaca

SEQ ID NO: 22209 - DNA, 1933 bp, Cannabis sativa
cggcaaatgaaagacctgaacccaaaaatgagtaatagtaattgagtctaaagaaacattttgtagaacacttggaaggcagagaaccaagtgttggttatggaaatgccagggctctttagaaaggaccctaagaaaatcaccttggcagccaaaagtgatcatttagacatcagtgtcataagtagaagtttctactggaaatttccctatccaattcctagtgacaaagttaaaaaactgttttggattgtgatccctttttgagtagattttgcagaggttgtggttgcattatggtcgagggtgaggagcagagataatagagatattaataacctctttttccttagcagttaatgcttgagagatatcatttaggaaagaacccatgaagaaatatgaaaggagtaagatgaagagaatcaagggaagaacatgaaaagagaagatggaaaaatggagacggttgtagagaaaatttgcagaaaaaaactaatcaaagaagttgaaaagaaaaaaaaaactaccataactaccattatgtatataaaggatatgaaattcttgaaatttaatctccatttggattactatgacagccaaatacaaaaaacatagaacaaaaaaagataatacaaacatgatttttttatacagtttattaattgattatctaattaaaaggctatctagtcaccaaagcttgaaaaaaaaatacacgattattggctaccaaattaaggaaaaagaatctaatcatgatcatcttagaccatacaaaaccaccaaactacacacttgaattgaatcaaataatctcatgcatttaaagatcatcacggactctaatattcagtcttctaagccaaaccgaatgaagaatcatgtgaaacacatcaaatctcttaggaggagagttaacctcaaagtgtttcctcactttaaccactctcctctgcattcttatgtattgcctaggagaaatgctcattagaattttcttcaaatttcgaatttcgctaaccggtacctccaccgagaacgatttccaattaagaacatcgctaaaaggcggtacatagtgatcggatatgaggacaggcacgcagcctgtgtagatggcctcaactatccttggactcgcaacctcatatccactaggacaaatgcagtacttgctctttctcaacatgtcatagtaagatacccctttgggaaggtattgatgtattttcatgtcttcatctttgttctcccaatgctctagtaaaataggcctaattgggccatgaagccctcctgcaaaaaaagcaagaatcggacgcttcgaaactgaaggaccgcctagaaaaccatcggttagcccggttaggaggttgatttcggggaaggaaacatcttttgtggggttaaaaccttcggaggtgttggcattgcataatacccttattgagtttttgcgtaggttaggaacagaggatgatgcttctggcccctgaaaaaacgacaatgattcatagtttagaaacaaagaaacgacactaatttattattgtgtgtaatataaacgtaatttacccaatcatggcaagagagcatgaaatggtcagctccaaggctacgattccaaaaggggtatttggaagaaacgacattaacatagtcaattacggtttgtcgtatgggactaaaatcgtgggagtctcgaacataaacataacgaaccaacattgtaacgctaaaaggtaagaaaaaaacgtgtgctttttggggatcttttgttcgaaactggctattcatttcaagctcgtggatgaaatttccttccatggaatatatgctcttacaaggcccattgtgaaacaatggtggttctccttcttcataaacaaacaccttaaattgtttttccatttctaagtagctcctg

SEQ ID NO: 22210 - DNA, 4409 bp, Cannabis sativa
  modified_base (1589)..(1589): a, c, t, g, unknown or other
aattttaaatttacactaatttagcatttttcttttaattttatttttttcaatttattttaaaagagtgttattgagcagttaggcacctgtagtgtttatagtacattctaaaatgatgtttatgattggttatcaatattttttaaaaattattatattaaattatatttaacttaatacttttttttttgaacaatatttaacttaatacttaattacacaccaataacaacaatatgacaacaaagaatataatccttctaacatttttcttatataaaaataattataaattaattattgataatatattaattattgttggctatttataatatcattaagtggcttagatgaagacatgtgatgcaatgatgatttggaaagtggcccactagctagctaggctgtttactttcttttctgggtgatatttttcttaagctcaaattataatttggtagactttgtcttatttaagcccccacacattatatttattaggtaagatttgtctttcgattgtggtgctcctatacatgggattggatcaaatgccttgttctttgacaaaaagttcgatacatatctttatttctcatatatcttgagacatttttcgcaaagtaataatagattgagctttgttattgttggcacatgatgagtttgtgtagtacatattagtcaagacaaaaaaaattaaaaaaaaaaaggtaataaacctctcttggtacaaaatttatgactaattggcatggatgaaaataatggagaaggttggtacttcggtaaaagagaaaagtagctagaaaaacaagcaaacaaaaaagaaaagatggttaggtgattcatcctttttcttttcgatttggggagcccaaagcttttagaatttactagcatattctagactcttatttagtaatgtcaaattttgcacgaccacaatagagtggagtcgatcaaacaatatttttatattacattgtagttgtagatacatgtgtcatgtgtgtgtgatcgtattaaatatatacgtctgtaatataattaatagattatatagaatgtgatatatgatcatgcatgaatggtcctttggttttagaattcaatagtaggaaaggaagaggggcttgggaggggtccctagctagatagttagtgggacctagtattaatgatgatcaaagtagtaaataataattaaagaaatgctaattaatatcattattggtgtaataattattagattctacataatttaatgtaataattttttaataatatgattagctaaatacgtctaaaaagtatcaaagtgcactaatgaaaaccaataaaatcagaatttaaaagtaggacaatagcactagacaccatcaatgtttagctcatgtttatacatatagtactataggagggccattgcttatgggttaattgttagtagttgctacttctatttcaaagtaaataaagtaatcgcattactgtgttcgtgcatgctcaagtagtcaagttacgtaaatatgtacaaaaatatatctatctatacgcatattgtatatatatatatatanatatatatatatatatatgcaaaattagcaatttataaccttactttttcattcctcttaaagccataatccaaagtcaaaaggctgcattaggcatgccttttcatagcaaagaaaggctagttaattcataaccttattccattatatatagcattaccatggatcagccattattagacacaatattatatatttttatataacatatatatatgcttatttaatttttatttttcattttacacattttggtagttgaatactatccatataaaattgatcgtacacacattatcttagtataaagataacacatgaaagggaaatcactcaaatgaaaacaataagtaacaaatatgcagtcagtcttaggtataggcgggttaggcttatgcttagagcccacactttttgagggcccaaaataaaaaataaaaatttttattagacttttattaatttatttaactaaactttaagtgtattaaaataataaatatttatagtttaattactccaggtgaatgccatattatcaaggtcatgagttcaaattattatatattttaagggcctgcaaatatgtatttatatatatttataaaaatcaccatcaaaggactacgtgcgaccctttgaagagattgaaccccttgagaaaatttttatggtggctttggctgctacaacttgtcaacttggtctctcgtcaaaatttaggtggagttttcaaagtttgaaagtaaaaattggggttaatatatatatatagactgagtaatcgattcattaattaggcatttgggtggcgtgataacacgttaactttggccctaggaattagtatgtacaaatatgtatatatattattaattaagtctctgacaactaagttctatattaatatatcatattatatctatattaatttaatccaagacattaatttgtttaattggttgaatattgtttacttttatctccaaataaacacttattattaatattatttaattattattagtagtatgtattagctattgggtgtttctcctccactaaactcaggcgtggggttgtgaagtaaggccaaataataatttaatttgttaataattaatcaatatatttgcttggcgttttgttgattgtatatagtataggtcctaagcattatataaaaaatttgtttgtttcatgtattgaaattcctagctaacctcactcagtctatgaatcatgataaaagattcagagaaaaatataattaataaagttcgattttagaataatacttcgtatataccaacaaaatagatagagtattgaaagccgacctaattaaacaaaagtcattagatatataattaatataaataaataaattatttttaatattagattccctaaataattttttttttacttgtaatcgcaaaaaaatttgtgactaaaaaataaaaaaattaaaactatttataaattattattcttatgcatgttgtaactaaaaaatttgtgactaaaagtattagtcacaaaaatcacaatttattgtgaataagtatatttttagttgtgactaaaactaaactagtgataattatatctaaatgttatatttttgtcacaagtaatttttttcgtgactaatatcacatttagttacaaaaagtttatattatgactaaaaattatcattaaaaatagttgacatttgttctagtaattatcaccgtacaacactatgagacaactatgagtttatatcataagtaattcaatacaaaatttcaatgtttataccaataaaacaatataacatgagcgtacatatataagagcattttaagagagtgctaattgaaagtatggtgcatatatgtctattttagcatttcttcataaaaaataaacaccaaaagcttgtttggtatgtcgtattgatattatattatattgtattatattaaatttaataatatatattatatttcatataatgctattttaaattttaatttatactaaaatattatatatttaggtactcataaaagttaatacaacatataattttacatcaaaatattgcataatacaaaataatttaatactatacaatacattttacggtgtaattcaacgtataccaaacgaactccaatagtgatatataaagtagtctaaatttagcaaatcctaaaggtaatattaaatttggcacaaaagatatgagctaaattttacaccacaataaaaatcactttatttttatttacttatttttacttattaatgtaattaataaatttttactttaatgaccgcatgattataatttggattagtaaaagcaattaacattaattattgatattttatgattatgcatgattgtgggatcaatttttagaaaataggcattagagttatcattactcaattctagagattttattaaactctaaaagtattatttatgttatatacaaaatttacaatttttatgatttttgctctcggtaacggtagaaaatgcgacggatggccagtagagtcacatgggtgagtttagaaccttttatttagcaggacattcatatgttgatatttggagtatcagggttaggcggggttatagttttggaccactttacccctagacctataagttgcttaagtttaacgcaaggggcaaaattgaaatttgtccttttattgagattttgtcttgtagtgaagttagtggaaactcccaagttttattttatgctagtggtatgatctagtttattaaggaaatagaaaaagaga

SEQ ID NO: 22211 - DNA, 2704 bp, Cannabis sativa
atattgcagaacagtccctgcatactatcctatattcttaactccacccctcaagcgaagtggtgaatcaaccaatctgagcttgtccaccaagaacttgaatctagatggtgagagtccctttgtgaggcaatcaactgtttgatcatgagacgggatgtagcaaattccgagtttcttttgtagaactttgtctcgcacaaaatgtacattaagttctatgtgcttggttctagcatgaaacaccagattcgatgctagtgcacaagcactcatgttgtcacaccaaattattggtgttgtcgaggccttgaacttcatctcttgccatagttcttgtagccaggtcaattcggcagcaaggtgtgccaatgatctatattcagactcggtactcgatctcgccacaatattttgcttcttagatgaccatgatattagagactcaccaagaaaaacacagtagcctgccaaagatcttcgatcgtaaggacagcaggcccaatcaacgtcagagaaaccttgtaagttcagattaacacttggggctatgtgtaggccaaggtacatggtccctttaagataccgaagaattcttttggatgcactccagtgagctgttgtcggtcctttgagaaactaacttaacttgttcacaacaaaagagatgtctggtctagtgtggctgagatactgcagggctcctatgacgcttttatactcagatggcttctctagtggctcaccatctttgattgaaagagggctgcctgctgtcatgggtgttggactcggtttgatgttagccatgttgtgcttttgcaacaactcggctatgtatttcctttgagacaagtataatcctgtttcattcctaaaaacttcaattcccaagaaataatgcagctgtcccaagtcctttaaggagaagatcttgtttaatttcacaacaaatttttctatttcacccgagctgctgcccgtcactatgatatcatcaacatagatgagtacgataataacatactttgaagtcttcttcaaaaatagagaggaatcagcctttgagttttcaaaattccattcgacaagggtccttcttagttgatcataccacaatcggggtgcctgcctcagcccataaattgatttgtttagcttgcaaacgtaatccggtttgcctgtgtcttcgaagcctgaaggttgcatcataaagacgtcttcttcaaggatgccattgagaaaggcgttgttcacgtccagctgcctgatttcccagttataagtgaccgcaatggtcaacacaacttgaactgtcgaagctttgataacgggactaaaagtctcaacaaagtccactcctgaacgttggtgaaatcctttggcaaccaaacgagacttgagacgttggagactaccatcagcattatatttgatcttgtgaacccatttgcagccaactatgttgggtgatctgagagaggatcggggaactaatgtccaagttcgatttctgcgcaaagctgtcatctcatcttgcattaagcaattccacccctcatgtaggagagcttcttcgactgtgtgtggttcatggagagaagtgtcaaacttagcataaccaaggtaaactttaggtttgtacaccccgacctttgctctagtaatcatagggtgagatggctgaactgggacatgttgttgttgatttttcaggagatatatcttcagatgtagtggcctgagaagcaatagaaaactcacggacaggtgagacagcagtatcagtattgaattcagaactacaaacctgctgtggagatgaatcatgtggccgagtagatggttctgcagagtgatgagttggagatgttgtctcggttgaagcttcgggcagaggagagatgcattgagttttgtctatggtgcacgactgagttatgacaggtagagtaaaccaagaatgtggagcatcaagcgtgactgtttgctctggcttgtagttgtcaaagaagccgtgttgacatggaaattcattttcattgaaaattacatgacgagatatatagattcgaccatgaggactaagacaacgaaagcctttgtgagcttgactgtatccaagatttatacatttgatggagtggaattggaatttgtgtgtttggtaagatcttaggcacggaaagcaagccactccaaacacttttagggactaaaaatcgggtgtttttgaaaagaggatctcatatggcgatttgccacgtagaacagcagtcggcagatgatttatgagatgcactgctgtgtgaaaggcatccatccaatatttcaatggcgtggatgcttgagccaagagggtgagacccatctcaactatatggcgatgctttcgctcacccctgccattttgttcagaagtgtgcgggcaggagtgttgaaacacaatgccgttctgtgttactatatcagtgaaggcctgaaactcacctccccaatctgttctaagggctttaattttcctattaaactggttctcaaccaaagccttaaattgtatgaaggccaagagagcatcaaatttgtgttttaaagggaaaagccaagtgtaccgactatgatcatcaacaaagtgtatatagaatctgaaattggtgtgtgagttcacaggtgcaggaccccatatgtaacaccctaactaaca

SEQ ID NO: 22212 - DNA, 1671 bp, Cannabis sativa
attttatttacagaaaattatgttgtactcttgttaattagattggctgtggtagttttgtggtccggtctcgttttccctttagtgccgaaagtctgcttgtggttggatgtctcttcctcgttcgttgaactaggatctagggttatgcttttattttgtgttgtttcattttagagatttggggctttgtattcttgttctgtttctttaccttccaaaatgaccatgccttggtttgtaagtctaataactttgttgttgtttgctcacccttcttatgattgatttacttttgctcgccctttgatttttccttaaatgaaactttgatctttctaaaaaaaaaaaatcataaaaaaaatataaaattataattattagtatatttttaaaaatttataaaaccaaaaataaaattcacatgttttgttatatattataaattttttgttagaatttttgtcctttaaattttaacacgtaccgaatcatgctttgaaattttttaagctgttaaaaattcttccaaattattgagcttgttaaatttgaggatttttgtttagttatactaacaaaattttgacgttgatagaagttcaaaggggacaatttaatatattttaaaatttggaagacacaatttgataaatatcaaaatttagagtgcacaatctaatacatgaataatcaccacattagtaaagttagataaaattgaacaaaaatcttaatccaaccatcttaataatttatgagaatttttaccaatatgaaaagttcaaaaattatacatacaataagaacgtatacgataatagaaaaaagactaatttgcagcctaattttatctaaattatatttttaaaatttttgtaagtaactaatcgttaaatgtcaagttaatcgctttcttgttaacatatttaaatttaaattaaaaaataaaaatttaataatttaaactaatcaaaaactatcacgttcagtagacttaacaaaattaaacaatgcaaattaccaaaatccaaaactatttcttttcttaaatatggaaacaaatattgcaaaaaactcattttacaaatgtttataacaaaattttgcactaagttaaataatactaatttcctctttaatcagaattagaaagttcgatctgacaaacattgtttgtatatatataatctgtgtcagtgccttatcttccatcttcaccgccttgccgattcaattcaacgtcatcaccatatctatatctttatcttctcacgtttcccaatgattttttattattattatttattcattttcttccatgaacttttcaaactattcacataaaaagcctctctttttctagttttctgggcaaaaagatagaaagaaagaaactttgatattcaaactgggttatctgtacataatcacttgtttgaattcttattacaacaaaaaatttacccttttgggaatttgagctgaaacccaaatgggatttggagcataatttgttcctcacctataaaaattaaatcttgaattgaaagttttgagtttgggtatttagggttgtggggaatttgagaaaaagaaagtttgattttaaatcccatttggctggagatctgttggggtgttagttttctcttttgaagcttcgaaacc

SEQ ID NO: 22213 - DNA, 4576 bp, Cannabis sativa
ctggtgacacgtggctcctattttttacatatggatgaagagatattccgaacagagctcagtatacatctgcacggatagagtctgcctggacgagcaaggcaagggtagacaatcctaacaatgtatcaagacttagtagtttcaagacttacatcatgaagcacaaaatcaatcctataatccagggatcgtatcaaagggttatgacaagctgtcagaatccctcaatctatgtattctaaatatgtaataccaattatagatattgtaagcaaaatgaaaaccttccctcatgcatttagccctataaatagtgatccatcctcactgtaaaaggggtcaaaagaattactttagagagatctaagagtaaacactcagagacttcattgtgagagtttagagggaaacattgtattctttgttcttgagttgataccatctaaggggagtaggctattaccgaactaaaaggagaacctctttaaaaccttgtgttctttattgtttactagttcttactttatcttaattacatttcttatcgcttatcttattaagactcattgttgttgttggttaaaagcgaggtcaacaacaagtgtcagacacgtggtactcaataattgtcattgcgtctattgaggtccaattttcaaggtagagcattaaatgcccaaaatttgaaggaacatccagatattggtatcctgcaatcagatcaagtcaagtcaaaatggagtacaagaaccgaacatgtgtcacccatccgagcaaacccagtggccgagtaagtccatgtatgagcaaatagttctcatgtggacttagggggcaaatattatcccatttctacacagggtgatgtggcatttaataagagtgacacgtggagagcatttccaaagtttggacgagtgattttccttcgacggtttgtctagagagttttatgtgaacctaattaagtttaaactttcaacatgtattatccggacagagcctgtatgcgactatctgaacagatcctcaccatccagtgaaaccaaatcctccgagcaaaatgacgcgattgaaacagatcttcaaggatattttctgtaaatcctccctcatttatagttcaatcgaatccctaatttagtgggattaacacacattaacagaaagataatagaaaactaacttagtttcctatttattcctaattgtctcagaacacttatatcatgtattttttcctataaattgtggaatcactttattatttagagatccaaaatcatatgttttaaagagcaattatggtgtaaaaataattattaagttttcctaaggattgttgagaaattcacttaaccaactccttataatctcgataattctttgaagtaatacaagtaaaaagagagtaggctattactataattatatgatcaaatctctataaattttgatatttttattgcttaatttcgtttaattattatataatattctatcgttttaaatactcaacgggctaaaatgatttcaacattttttattatatttagttataaaattaaattataaattttttaggttatattttattattttagataataaaattattattttacattaatttagatcaagttttacagttgtatattaaacgatttaaaaaattgatacaaatatagggtaaaatcattttttaagcaccattatagttatcaaataataagaatcttcgtataataattcagtaaagcattaagcctagctccaaactctgcctgtgacaaatctgaaaataataatttcaaatagtatgacctatggtctatagagaacctatgaagtagcattcatatcttctgcttctttttttttctttcttcaactgtatagtactgtacctgatcagtctaccatttattccaacaactttatttattaaaaaaaaaaaacttccgattacaacgcttacaaagcttgtgtttcccgatcttgcaccaaagccctcaatcattaagtccataaactattatatccttacccaacttgtatatataattaaaacattgtcttcttaatacatgtggttgccatattgatgataatttataaaagagaaaaaaaaaagaagaagaaagaaaccgtcccttgtctttataattaaaaaactaaaactaaaatcaaaaggttaaaaacaatgtgacggaagaaacccacaaatgaaaaatatatataaaaaagagcaaatataccatattatatttttataataatgtaaaaggagttgaaagaagcaaagtttagcaacccatcaatatccataccacacaaaacaaaaaagtaagatccaacggtggagagacatccatccgcggaaacacggagccgctcgcacccaagactttggaatctcgcacacaaaaggtgcccacatcacaaacaccaatcactaaaccccaaacaacgacaaactcaacccaccgctttcattttctctttctcggctctccacactcacacgcaataccactaaatacacccccaaaatacacactttatacgccctcacccactacttccactactcttaaattactaacctaaccttactctaacccaacctagtctctacttcttaacttaaccttaactctaaacataacccaccaccttcctttatttatgtatatatatagcttcctcctctgttcctgcccagcttaatttcagtttctccatttttccagcactctcgtttttataagtttcttgctcccaaagaaataaatctgtgtgtgttcatgtgaagtgtgaaacctgaaatcgagaacatattaatatagacataatataaatttatttatacacatacaaaaaagaaaaaaagaaagaaaaagatgagctgcaatggatgccgtgttctccgaaagggttgcagcgagtcgtgtattttgagaccctgtttgcaatggatcgaaaccgccgaagcgcaaggccacgccactgtatttgtagccaagtttttcggccgcgccggccttatgtctttcatttccgccgtccctgaatctcagagacctggtaaatacattagatgagttgatagataaatatagagttaacttttctttctttggtgacttttcttactgagatttctgttatctgcttatgcagcgttgtttcagtcactgttgtttgaagcgtgcggacgaactgtgaaccctgttaatggagctgtgggtctgctctggacagggaactggcacatgtgccaagcagctgttgagaccatactgcgcggcggaacgttacggccactaccggaacttcttggaggcggcggcacaggaacgatgacggcaacgactcctacagctgcctccgatgaggcctccgaggcagaagtaacttgcacagacatttggaaggttcgagatccgaattctggctctcgattctcgacgtcacggtccaggttgtcgccgaagcgtaaacgttccgattctccagctaagctacgaaacaccgccgatctcgacctccgccttacgccgatctttccggtgaaaccgaccgcacggaaagccgatgttcgtcggccggtttctccgtcgatgaactcagaagaatccgagacgacgacctgttacgatagttgcttggctgatcagagtgcaattggtggagatcgaaagctcctgaacctcttcttctgagtttctaatctaaacaagccatggctttttttggtgttctttcagtttttcttttttctttctattgggtttaattacgtgagtcgtacgttcacgcgcgctgaggttaaactatgtaatattcgtctaatttgtcttttttcactactagaaagagaagggctttttcggaagtttaattagtttccggggagtttttgtaaaattaccggcgaaaggatttccctctttcttatgagtctttattaagagaatagaggggaatatgatattttggcggtggccctttttcttagctatattttagtgtgacattgaataaatcaaactaatttcattttccttatttttatttaatattcagaatttgtatgttttggattttggtttagtttagtttagtttgggtgaggtcggcactttacgcctactgtactttctccgtaacttatatcaaacctgcacaacatgttggcgcaaagtcataccaaaaacgtgttggcactgactcatgttgtgtcccaaaggccaactccattatattttcaaatgaatttaatctaacctaaactaattaattcagtcctcatttcataaataaaataaagtttattttaactcattccttggtttatgttacgcaaccttcattaattggtcaaggacttacaattctagaacagtaattttttatgagaacgagtgagtgtaattaactaattttttgacttaatcaattccttagatttatcaaggaactataaggatcagttgagttatacagataataaaacgcattaaacaagtgcaggcataattggggacaagtctctctctctctctctctc

SEQ ID NO: 22214 - DNA, 5109 bp, Cannabis sativa
  modified_base (3791)..(3807): a, c, t, g, unknown or other
ctacataactcagtttcgaaacactaagatgacaaggtcactcagtgattatatgctcaagatcaaaggtatcattgatctcctagctactattggccaccctcaaacacctcaagatcatatagaagtcatattcaatgggttgtcgtcgaagtataatgtgtttgtcacgtccgtcaccatgaaaagatgcatacatattacagagattgaaaccttgttgatggctaaatttattcaaatagagaaaaaagccaagagtcactcgcaaacaagaacccctgggtccaatttccatggtcgatcatcttactcaacactgcttgtacctcttagattcaatgctggctcaggtcgtggtcctatcagtccctttttcaacaatagtggaagctctcactataatcccatggcatgtggtggtccctcctatggtcatggtccccaaacaatacagcatctcgaggtgggtcttctggttatggtcgaggtcagaataccaattgggaacaaaagccacaaaattagttgggccacattataaaagcattatttttatcgcttcgataagtcgttcacagggcaagaatccttcaccaactttcctccaatggacaatatagccgagatgtaagtaatttgtgtgctggtccaaaatctgtgagtgatgagagttggtatcctgacattggagctactcacaacttgacatcaaattttgcaaatctcaacaacaataatccctactcatgtaatgaaccgattattggttttatggtactaaatcagattctcagcgaaagagttgtgattgattatcatcgtatcatatacctaatatcaccatatgtatatatgttaaactaaaagtaaatagataaaaaaaaaatattaccacttgaagcctatcaacatatctttgattcttttcgcaagttgtatcttttttggttgattagaaaactcatattgtagccttccagatattctaccacacaaaaaaattagtgtaggctagtaagataataaagtgtgtagagttctttagtttatctcagcaaatgagcaagaatttttctttttagtgatagagagaaaatattaatcaaattaacctctttaggttttccaaaaattatacgtaataattctcattttttgaatttggtttataaggtatataaaataaaaactaataattattttatcttaaatttaaatctattaattaaatcatatttacttatttgaataattaatataactgatttcgttatagatatttattttctataaccaattgagaaaatctctcaactacattgagagaatatctcaaccataaaaaaatatttataaccactttttaaattcaaatttaaatatttaaataaatattaatctttagaattaattaattaatccaaaaagataaaatcagtggagacactcaatgtaggtagtgtcgtctagacacagtgtaggttgtgcctcccttgtctctattaagacaaagggtgtgtcttttgtcctgataactcttgtctttttccaatttatttaatttaattaatttaaaaaataaattatttattacaaaatcaataatcactattttttgacaattcaaaatagatttttccaaactctcatacacatctattttctcttcctttgtcagtgtttgatagtggcaatccagtaccatggacctataattctaagccccaataaactaatttatttattgagtttcatcaaataaataatcttgcactactaaaaaaatgggctttagaggcagtctttaagggctttcagcattagtttttgtgaaattcgataccgatgctattttaggtgacaccgtagggggaataaccgataaacgtcgtagggggaaagcattaacagaagatattatactatcgattattatactatcggttattacataataaccaatgacataggggttatttatttaatgacgtgcctttatggcgtcgattattagcaaataactgacgtcatggtattttatggcgtaggttattttcaaataaccgacgtcgtagggtgttttctaaagttgaaaattaaatatttttgtttatttttcatatattttatttttccttatttttattaatatatttaaattaaatattaatttcatataattaaaaataaattaaccatataattaaatgtatttataggcattattctaaataaatatattacacaaatattttaaaattaatccaagtggttacaagttattatctaactaaacatagaaaaatgagagaaaaaatatttacaagttatataattaaacatagaaaatatgggaaaattcttatacaattcagaatcattacaagccttcgtgaatcactgcaagtcttcgtgaatcaccgtaaataattattttacccaatgtccttgtaattcaatttttgcatcgtatgtcttcttatatccccaaactataaaaaaaaaatatattttcattagtatatatattaaaatgtttgttaatataataaataagataattaataattaaaacttataacttttatatcgattaagtatttgttaagatttacatgtgtgacgatgtcactgatgtattttaatacataaaaaccaccttcttgatttttaggttgttttgattattttgctattgatattcctggatacgctccaatgaacgcatttgacccctattgactcaaaattttaaactagacttctaagccacgcctactcgctggattggcaagaataaaacagttgttaagtaattataagagagacacaataaatttatagtagttcacttcctgtatcacgacaaaaatagaactatgtttactttgagtttttatttctcacgagatagttttatagaaataggctaagtgtgagaagctctaatttctagagatagaagctaagaaaactacccacaagatcagagcttcttaatcaccatcaaaaattaggatttcagttttcgagattgtcttaacaataatatattaattctatgtatacaaaaaataaaaaataaataaataaaagttctcaacacattatttttgtaaaaaaatgttataaaatgtatatgattttaaaatttatggtattaatttagtaatattaatgataaatataatgagaaatataaatttaatcaattaattatctttccgttaaagttgatggtgaaaactaacaccgttaaatcaatcaattaattatcttttttttttaagaaaaatagttttaaatatctaaatttaatttatttattaaaatataacttaaattattatttaaaagtataaaaaaaaaattagattattagatgttaattcaattaattaatcgtactttataacaaatatattagttatattgtttaaaatatttaaatttatttactcattttataatttaataaattagttagacatatatttataaataaattttaagctagattaaagtttataaaaatataattgaattgtattagatttaatttttatttttgttatttaaattaataattaagtaataacaactctaatataaatatgcatcacatgttactataatacctagtacatatatatatatatattataaaaaatgtaattttgtaataaaattattgttttaacagtattattagattttttttacgttaacttaaacagaatatactataacttaacataatatttattattaattttataatattattnnnnnnnnnnnnnnnnnaaaattatgtagatattttatatgtgtaaggaaattttaatttaaatttaaaatacttaaaatattgtagataattttaatcgtaccatatttttaacttttttagtttaactttgaattaaaataagatttaattctgctcgaatcggacacacaacaattcaccatgatatttcacttgaattttattgtatatatatagtcatatctaaacaacacaataatgtagccgcaatatagttaaaaaaaaaaatttaaagattaaaatctcaaacctcattttaaaatttttaaaaaaaatacattacttaattaaaaaaattaaacatacatatatattacacttagcatcacctaattttaaaaaaaaaaaaaatcctaattatacatgcattatacataataccaacatagtataaaatgtcaaacacttaataatgttgttccttattaggtaaataatatttcatatgtctagcttagaaccattattattattaattgactattattatttatctactaaagacgcatggtccattaatccatgaatgattccatatcgtaaagctggattttgttaatgataataagttggataatgataaataggagtagttctaaatacattatacacataccaacaactcttacattaattaatattaatattgtttgtttttttatagtctaacaagtatataactcactgtctttgattagttaggatcaataattttagtgtactaactaataagttggtatgccctagctagttgaatagtatcgttatggatttaccaagttaaaatattgtaaaaagtcaaaacactaggcttgtaaatttggtataaaggtactttcattttcagtacagttgttttattgtataatttctcgttcatatatttaagatcatgaatgtttatctttctttgttaatatattgatgattattatatttagattaagtttttttcaatacactattctgttataaaacttggactttttttttttttagtgtaacgtaatggcattttataatcatatattagcttaatagtttaaaggtcctaggttcgaacccatgacctctcccttaagatatgtaaaattttattaaaaaataaatatatattttcacatgtgttggaccgtactaaattttgacttttgggcttggaaattctgctgtataaactaaaggaataattacataaaacactatttttttataaaatatttacatttttacgttcaaagaatatttttttacatttttacggttttccaaaaaat

SEQ ID NO: 22215 - DNA, 4984 bp, Cannabis sativa
  modified_base (4829)..(4833): a, c, t, g, unknown or other
tccaaacacaccttgcatttaaaatatagtgtaattactacactgtgtaattactatcttaataattaccctacctagtaattacatagttacttccaaacacaccccctatacaaattgtcatctttacccaaattagcataatatataaaataatttcttctatttgtaaaatgtaatttaatgtcttgtattttgtatttatttatttatgtaggttttacccttgtggagttgtcataataagaatacaatttgccaagttggtaaaaacaaagttcaatgttatgttacctgcaaaagttcagattcactgtttcacatatctctttcactatatttttggaattcccttttgacattgaattattatttttcattttaatatgatgtggcgtgtttccattaatttcttttaacttgtttatattgtcttctgaatttttgcagtaaataaatcaaccccaaaaattaaaatcctttgcttcttgtcctattccaaatccttataataataataataatattcattattccttttctttattcttttcataaaataaatatttattttttcaaaatcttcatcataatctatatcaacaaaaacccctgtaaatcactcacatccttaacagcaaaaaaaaaataaatacttttcttcaattttattttatttttttatatatttatttatttattaattttctcaaccccacaaaacactattcttcttgtacttattattaagccaatcccatcaatttcagaagctcatttcattgccctttttgacctttttatttatttatttattaattatttctctctttttaagtacctttcttttattctcaatttcactcattttttttttttaaaaaaaaaaacaccatttttttttctccttcttctataaatctccccaaaaccccataacattaacaaaccaaaaactcttctctcaatatatttttctcaaacccaatttatttttgttttcttgattttttttttcaaaaataccacaaaatttagaaatgaaagagtattggacatcttttgcttcattattaggagttttagccttctgtcaaaccttactccaaaccgttttcccaccggaactccgtttcgccttaatcaaactctttaacagagtctttcactggttctcttcctactgttacttcgatataacggagattgacggcgttaacactaacgaactctataacgccgtacagctttacttaagctcttccgtttcgataacaggttcgcgtttgagcctcacgcgagctcttaactcaagcgccataactttcggtctctccaataatgacgtcatcgtcgattactttaacggcgttaacgttctttgggaacatatcgttacacagcgtcagtctcagactttttcatggcggccattgccggaggagaagagaggtttcactcttagaatcaagaaaagagataaaagcttaatactaaactcttacctcgatttcatcatggataaagctaacgagatcaggcggaagaatcaggatcgtcttctctacacgaattccagaggcggatcgctcgattccagaggacatccttgggaatctgtaccgtttaaacacccgagtactttcgatactctggctatggacccggagaagaagagcgagataatgaacgatctgaaagatttcgccgacggacagaatttctaccagaaaaccggtcgagcttggaaacgtggttatctcctttacggaccaccaggaactggtaaatcgagtatgattgcagcaatggcgaattttctcggttacgacatttacgatcttgagcttaccgaagtccacacaaattccgagctgagaaagcttctgatgaagacgagttcgaaatcgatcatagtaatcgaagacattgattgctccatcaacttatcaaacaggaaaaaacctaacaacaatatcaactccaactccggtccttcaccggacatgcgaaacggatcgggtttcggatcgggatcgggtcacgaagaaggaggaggaaacacgattactctgtctggtttgttgaatttcacagatggattatggtcttgttgcggaagcgagaggatattcgtgttcactacgaaccacattgagaaacttgatccggcattgttgagatgtggtcgtatggatatgcatatcttcatgagttactgttcattctcttctctgaagattttgcttaagaattatttgggttataacgaagaagaagaagaagaaggtaacaaggcaaacgacgtcgttttgggtgatatcgaaaccgttatagaaaaagctcaaatgacgccagctgacgtcagcgaggttttgattaagaaccgtcgtgatagagctaaggcggttcgtgagttgttagaagttttgaagcttaaagctaaggctaataacagtactgagttggggaatcggacgagtgaacgagttgaagaagaggaagaacaagagaagagagctttggagagtcctaatgttgactttgaccatcttagtagttgtgataataataagaatggtgaaaaagaagaaagtaaagaaaaatgaagaatgaggaaggagggactgattttgaccgttttagaaaggaaaaatatgaagagggactgatttgcaaatttgaagaatttttagtagtagtagtaatagtagctaaaaaaatttaaaaaattgggtaaattaattatggtataatccgaatttttaacttgttattaagcttcaataatgagagcttattttattttatgtatatataaaaattattagtgttagtaatatttaggagtttttttttttaatttttaaattacttttacatttttacaaaaattaactttgcaattcacataacaactaacagagtaatttaaattaaacatctaagcaatataaattgttaaatataaaataaaaaaaatatacggtatatgaaataattttttttaatatttattattattaggaagaggctaaaatgaatagagataagcattaatttgcatatgtgattgtttggccagatgggttatgttacttttgagtggaaaacaatttgttcatttactgaaaatagaagtgttatgttttttttcatttttaattgtatataattttattgttaggtttttttttttttttttttggtggggtttgtttttggaatttaggaaaagagtttatataagtgtttgctggcttatattggaagtggaagtacttgtgagatcacctggcaatcacatggcaaaagatttgtatgtttcattagaagatgttagaaactttatatttatacaatcaaataaaaagtggggtttttcactaactcattctccaaataacaataaataattataaaattaaatcattatgtatgtataatgttccatatgtggttacaaatttaagttctatttaattattatgcccatatattctttttaatatatacacgtgatttaaatataatagaagtaattttaattatttaaaaatatatatatgcactaataatattatacataataatgaatttgtttgttataattatttacatctattttagataaggttggttatccaaaaatgtaataagacatgattatataatattttagtgtattaagctggttgagaaattaatattattaatttgttaaaaaaaattaataaaataaaagtatgcttaatggaagttggttataaaaaggtaattaatcttttgattatatttattatatttttaagtttatagcaaaaattagtggctttaaaaatagtggtgagagagtttactttctctttgaattggtatatatctatatgttaattagtggtcactaaatgaccaaaataattaaattattgagaacaattgattagggcaaggccaaccccacatacatcaaatgttaaaagaaaaaaaaaagttgttctccaatagtgtgatatgaaattgtatgaagaaaaacgatttgggaaaaaaaaattggaactttatgagttttggtttgtttgtatgtactttatgtgaattgatgattccatcatattattctccctagggaaacactatcaaccaatgccatattagcaagctatcactagtacctttttctattattataattattatgaaaaatgttaaaaacactctctagtagtatccattatcttttcgaggtattatataatgttactgatttaattaagaaaaatattagtagtagtgtttattaattttttttagggttatatatattgatattaatataattaagtattaagtattaaattttggaagtaataatttttaaagaatatcaataactatttataaggcactatctttagataatgctaagaactactgatgtctaataataatattttttaattaaatattaaatcttatatatatattttatttaataactattattaaaaatcgttaaccattagcaaatgctaactcagttgtgttattgagtgacattaatacctaagagcaactccagtaaaagttgtctagagattactcattaataaagtagatctcagttcgacaaaaatttctctaacaaatagtccaacaattacaacagtgttgctttatttttatttattttatttgtgattggttacttttaattaaatataatatttcattagagatgttttgataacagcattattattgaacaccagtagtgttaaatactttttataagtggcattttacgattgattagcgatattttttannnnntattttcttaaattatatgaaatttgatacttaattataccaacaatactataataccgaaaaagataataagtactagtgtgttatatgatattataatgagataaaatataaaaggatgacctaagttaatggataggaatagaagggt

SEQ ID NO: 22216 - DNA, 3346 bp, Cannabis sativa
agagagagagagagaggaggagagaaataaataattaattgattagtatatgattaatgtttaaatttatatatattaaaattttaattgtgtatataaaattatttaaatttatttttctataatttttgtttaccgagatttttgaaaactaattaaatgaaagctttagaaattaaataactattaaataaataaaacgaaagatcttgcgtggttcaggcattaattatcactagtccacgagtcagtatattagctttgtaggtgtacaaaatataatacaaatggtgtttacaataaaatcctaactctgattctctagatttctcttgaagaagatgaaagcttaaagagtattttaatagagcctcggctacgtaaatcttttgatccccctttgtgaggaaataaagggatttatataggctaaaatacgggtatgggcatattcatgacccgcttagggttttctgtcaaaagctcacccactaatagggtaaaaatacataagaatactgactattgggcccctaagaaggctcttcctcgtgggacgaaggatccgtatatttgggaccactattggtgcacgacgtgtgtcgtgtgaaggattcacctagtagacaaaatgctcagaggagcagttggacaaaaaaatatgatcaaaggaggtatgcgcactaccatggtctgacgcaaaggacaagatctgatccaatgtcagaaaagtatatctgttacaaaattcatatggctctagcttcgtgatagtcctcaagtttctcatgtacaattggcatccgtcttagactcttcgtaatgctctcaggtgtctccctgtaagaatgcggtctcctctgggtcccaaagggacaatagggctttcgggttcaagacggtaaatggccttcgagtgaatctctgagcttaacccaaatttatttattcttttcgccactttctccaattaaagacacttaattggtagttacttgaattgccgccttttgcctcttgccacgtgtctttcattcgaaaatgcgggtaataattttaattataaaattatttagttgaaatatttaatttatttaatgttattttttaaatttgaacaaaattgtataaataaaaatggagtcataaggccgattggaagttgaataaaatacctaccatccatttatattataacttgggaatgaatctgtaattcgcgcttcacgcaattttcaactattttttttaagctaattaatctttatactgaataagtggtatataaaatatattatatgttttttaatatataaaagttaagatatatgcatatctatataaatctgaattaactttaattttttaataattaatctattcagatataatatttattagttctatcaatatatattaataatagagataatcacttgtgataaaataattaattatttatattaataatagggatagttagatcatgtgataaaataattaacttattatattaatatgaatatttatctttctaattatttttataaaataattaattgatcatcactaatagtaatattttgttttcacaatttcaatattatttttttaaaaaaaatatcaagttcatcatataagttaatattctatgctactctcataaatgtataatcatataaattactattctattatattaatacgaatatttacccttttaattatatttataaaataattgatcatcactataatagtaatattttgtttccacaattctagtatttttttttaaaaaaatatcaagttcatcatataagttactattctatgctactctcataaatgtataattatatttgtttatatatattgttagtattatatatcaaaatatacgcacatctatatcatctttaataaaaagaaatatataaatatatatttatattccaaacagttgaaaaaagtaaatttaaaaaatacatactcgagatctttttatagtattataatcttcattgttttaatattataaacgtatgtaataatcacaatatcaatactattattattaagttgtttttttttttcttaaaatatataacatgcaatacaacatagtatagaaatactaattgtaattgtaaatataatttatttttctttcttaaatatgccaatataattgataacctttgatttcgattgttatattttttttaataattaaaaaataaaaataactacaaattagatgatataaattgttacaaatagaatgcatttaacttattttagatattaattatagttaaactatataaaaatttatatctaaaaatattttcatattatctaaatttttatttcctcacacttttgttttttatgtcaaaaataagataattgtttggttactatcactacaaaaaatgcatctttgccgatgagtcttctcgcctgtgaaactaggtgtaagttgccagtaatattttgtcaacgagcttatgtaccgagaaaggctgccgaggatgcttggtcaacataaggtgttttgctggcaaagtaccttacttcgccagcaaaagtattttttaatgacgatcttcttggccaacataagtttattcactggcattaacctatcagctgagggctgcctaacgaggttttactggcgaaatcaatcgctgacaaaactttcgcgccaaatttttttttgtgcgaaagttttattggcgcatcttacttcaccggcaaaactttccaaaagaaaattatttttatttttttggcaaagtaaattgcagtggcaaaagttttttttatttttaaaattttaaatttatatatataataaaattaaaattaaattaaaactaaaaccaattttttttaaaaaataatatataaataaaatctgaattatattttaaaactaaaatttatattacaattataaaactaaataaattgtctaaaactaaataaaagtattgttagtttataaaaatttgtattatttacactgtaagctaaaatataaaactacaagtcaacaacagtgttatcgtcgtcattgtcgttatcgtcctgagtgggaggggcatcatgtgaagaagacccagcaccaggaggccaaattggtggaatcgatagaatcagagcaatcgggggcatgttgaatactgaaacggcactagccagatacatattttgttgctaaaacatgcttaggatttgattctgagtcttcatcatttgtcgttgccactttttctgtacttcctcctcgtccaccctttgcttcaaggcttcatattcctcttgggtgacaata

SEQ ID NO: 22217 - DNA, 2719 bp, Cannabis sativa
gatcttttcataatagcaaggaggctaagacaacttcacttttcccattgtgcatgaagagttctctttatggttatactagtgtcagtaaaatcaccaggtttttttttctcacatgcacaagtccaaatccattataatcttcccttaatttgaggtgagaatataacacatgatctactttcataaatttaacaataaagaaaatacatattaattaagaatttattacctttaggtaaataaatttcttaaacaatatatattaattcaagcacaaaaaaaaaataataataaatatatatatttaaattattacttttgggtaaataattgaaatattcacatataatattaactcacttcatggaatgtcaactaacatatgttattactagctttgggcaagtaattacttatatagtcagccaaaaaaaataattttttttacaacatataaaatttggtgataaaacaattattaaaaatttaataattttcagctaaattataaaaagagatatattaattgcttgtaatatattgataatcaaaaataaaatgtctaccataatatattatttttgcatcaaacaatcaagtttcacaaatttagagcaaaacctaatagaaagatgtgaaagtaagaatattggtagagactatataataaaaaaaatcaaattaagtgagtgattatgtcaaacagaaggagaaaaaacccaatttttttctatgatttacagatttaaaaaaaaaaattcaaaaattatttttagtaatgtttttaacttccttattattattaaaataataataattattaaacggagttaaaaaaattaatgaaaaatcataaatgaaattctaagtatgttggaaaaaaaattgtcgaaaaatgatgctgggaggagctgcacgtgccctcacgcgccacgactgcaagtgggcttcactaggaaaggttgttttcaaccttgatctgggtcgataggcaagtcacgtgacttgatatcaggtcgatcaggtctgatgaaaatttaaactaaaaaattgcacaaaaaccttggcaaattaaggggtgtttctcggaattagagttctaatcaatctattgtattaattttgggtaaaaacttttaaaactttgttaatctgactatgcattgttattccgaattttttcacttgacgttgcatgtccacataagccaagactgaggacacgtggaatacagccttgtcaatagcaggacaaatttcatgcaaggcatggcaaaacaatcaagcgacaagcgagaggagttaagaaagtagtcaaagagctacacaacaaccaacaaaaggttgtacacaggttggccaggaggagcttgtatggtcggccagggtttgagcacaagctggccggccaaaagggtgattgtccaaccaaagagggcccattcaactaaggtaacatgaccttttcaaggaaagttgttcaaatgcttgacaacacctactaaggctggccaacacatacaaaggctggccaacatttgggaaagctgcgaggaacatgacctcccaaaccttggtaggaacttggctagccaaaccctcgaatgaaaatatccggtaaaaccatggcaggaacatggccggtaagaccctggcgggacatggccagccagaccttggtaggcacctggcctgccagacctcagcctgtagacattgtgtggccggcaagcctacacctagcaagtgcatggccaacaaacctttacctagtaggcctttggtgcacaaccttcatccgtgaacagcaagctaagctgggagttgggccttgacaacccatgataatatgggaaaaatatgaacaacttccccatttttgagggataattaacttatttaaagtttattatttaattacataaatacagctttatttacctatctttatgggataatatggatgtaagctctattatataaagagcattagtcaaatcctaaagctctcaagctctaagtctaaaactcaaaatcccccttctcttctgtctcacacgccctaggtactctctctcacttgagatttgccaacttgtttcttatatagtaatcttaagatcagagttggtattatgtttggtattaatacaaccaaaaggggagtaggttattaccctttaactaaggggtccaaacctttataaaatcttttatctcatttacttttttattcttattgtttaacacatgaaaacattagtattaaatatgactctatgatcggttggccgaattcgaagttaataattttgcactttctttgagagcgagttgtgaatttatctgatcaaacattattgttaacacaaggagaaccctaacttcaatgtttgcctctcaggtcttcctcaagaccctatggcaattgatcttgatgtctgtgttctagccacaactggaaataccacaaactcaatggatgtgtccaaccctgccatctcagcaggaatcaaaaacctagccacgaagactcgtccggtggatactaccaaccctgttggtcttaatcgccagcgtttgttgcctaagagggatcctccactggcgtcgcatactgaaggaatgaccaacatagagcaacccctaggcaccacgacaagatctggccccctgtattatgctggagagatggggccctaaataggtaagccaa

SEQ ID NO: 22218 - DNA, 4467 bp, Cannabis sativa
gaagttaactttcacttggaacatgatgaactagtatttgctttcgcatcaccttgtcccgaacatagtgaagattaatttcaatgtgtttggtgtgagcatgcaaaacaggattagctgaaagatgaacagcacttaaattgtcacaccaaatcttaggaggagtagaagttagttgaggtcagaaagcaatgattgaatctaactgaccttagtaacaacagcagcaaggctgcaatatttagccttagtggaagaccttgaaattgttgtttgcttctttgattgccaaccaattagatttcaacctaggaatatgcaagaacttgttgtggatttatgatcatcaggatcaattgcccaatctacatcacaaaaggcttcaagttgcatagaagaaagacaattcagatacaagctatagtcaagtgtaccagccaaatacctttttaacaaaaacaagataagattatgatcagggttgatgcattgagtggcacactttattaatactaaagtggaaaatttctcaaactaggctctaggagcttgtttgagaccatagatagccttatgtagtttgcaagctttggtggagtttttaggattaataaaccctaaaggttgaaccatgtaagttggtaacaaataaatcaaagaactctaataatataattagcttaaaatttaaccatctcgggaattagatcaatttatctaagatcaactaagtgatattgaattgaaaaatatataacggtaagttataatatctttttcactgccaatatcggtccaatttgatgtaaaccctatacccttgaatctagtttgttttgataataccttagaaaagatattccacttagccaactgtgagtaaaccatttagttgattattacgtcaatgtaaatctaatgtactgataaattaaacatttgaatcatatgatcacaattattttttactgtagtaacaacactataattaggaaaagctatatgttcggtattttgcaaaatttgtttattaaataattaatcataaaataaatatttgaaccatgtaatagacattagtcaaaaataatctttgactttttattaatagataaataaaattacattgaaataaagttttatttaggtgttgacacaatttttgtcaacaaatagatattaagagatcgtaaacaagcaagataaacacaagtgaatgtcgatcagaagtaaactaatttatggaatgcaatttgacaatgatgaacaacgaatttttatattggtgcaccccctttcagttgtaatatgtatagtccacttacagtattattaatctcaatgctttatgtcctctaagagatcaaccattaagtgagtttttagagtgaaaatgatgtaagttcgagagagatcgactcccccccctctcaccctttacaatgacttcagataacctttatataagtttacattgtatggtttaaggtttcttaaccaattttttcctaattatagttgagataagtttaaaatataaaataataaaaaaaataatattccaaaataaatatctccaaaaaatgataattgttgttgataattttagactaactctgatggcacatgcctagtacgaaatgtctcttcacgtagactcaagttcgtacgagttaactgaaggttgttggtcacgtgccttcacaactagctttgaaggtcgttgttcatgtgccctcatgactctagcaaatcgttggtcacgtgtcctcacgactctagctttgaaagttgttggtcacgtatgctcacaactcgagctctgaaggtcgttggtcatgtgtcctcacgactctagctttgaaggttattggtcacgggtcctcgcatgtcctcacaactctggtcatgaatatataacctccactttggatgtaattccactttggccatgagtatacttgagtggacttttcatggtactcggtgaacttggtcatatgggtactcagcgaacttcgtcatagtacctggaaaacttcttcatgacacttgggaaattttgtcatggtacccgaggaatataatattaaaataatattataatattattatttaatatatattaaatgataattttatttttattttatgataaaataataattaaaaaaaatagtgaagatgtcattttaagcttcattgtttgatattatttttcactttaataataagcatttatttaaaaataccaaaaatatatctatatcgaattctttaaagcattctcatgggggttactcttagtaccctgcatacacactagacaaaccgactagtccaacacagagaatcttcaagtcactcccacggatcatagagacatctaagtaccctaaacaaaatcatgtatataacacttaaaacattttcttcattattttttttctttctcaaaggacctaaatcaagtattttttttctcttttgcctagcctttgaaagctatatgtgttgttcaagtcacccccacggattaatggacatctaaagtctaaacaaaaccatgtatataacacctaaaacatttttttcattaatttttcttctttctcaaaggacctaaatcaagtatttttttttttttcttttgcctagcctttgaaaactatatgtgttgttcaagtcacccctacggattaatggacatctaaactctaaacaaaaccatgtatataacacctaaaacattttttttttcattaatttcttttttttgaataagttgaaaaatacttttcttatataacacctaaaacattttaatattatatttcattacaatgctcctacttttgttattaaattgtcaaatatactcttattcttcacttaagtctaacacataattttcattaacttaaaagagtataatagtgacatcatttataaaaatatgtatatcttaaagaatatagaaataaaataaaaaataaaataaatatacaatgtaatttcctcactttttttctttctgaaaggacctaaatcaagtattcttttacttttggctagcctttgaaaactatatgtgttgttgagtattttattttattttttatttttgtaaagtaacggatattccatttcaagtattaaatttgataaacatagtgcctctaaattaacttatactgcatgtgttctttctcacttttttttttaatgaaaaaattgattttgttaattattatgcttttttttttatattggggagagagaatttggattaactgagatttaaaaaagaagtgtgaaactattaaaatatatataattacaattattattattattataatattatttgttttaatttttcaatttgagaaaattttagatatggttttatgaaaatcaattaggcaaaaacataacattttagaaaagttaagaatataattaaaccatattttcatatatatatattaattattaaatgttatatttttaaactgggatataattaactaaataataataggaaaagaaaataatgaggttgttgcaagggttgggttgggttggcaaagtgggaaaaattgcaccggcctaggaaaccgggtgtgaggccgccatgtctgggattgtagcgaaccacatatcaactgccactgaaatgtgatgtggggccatacaaattaaatatattaaggagtaaggacaaaacaagcatgcatggttattattaagtgtatcatatacaaaacaagattcttaattctaaaaacaattcaaacctaaactcctttacaccgtccagtccaactaaatcaaattcatttctagatatctaattttcatgcatgtctctccgattgggacaccctcattcaaatttcatttttgagtcatcattagttttgaacttagaatcaattccatgttttatttctcagttacatggagatatttttaaaaattatttaacaatcaacaatgtctgaattcgtgcctttttaatatctagtaaaaaatttatccaaaaatattttatttaagaaaaaatatattgtaataaactatatatatagattagtttataaatttataggtagaattaatagttttattttaaattataatatatgtgtaaatattatatttacttaaaaataattttattatgatataatattaattgattgtttattgttattattgttatatttgatataaaaatgtgttttgatttttttttttacctctatttagttataacctctcaattaaaatataattttcttagttctaattataggtagacactactaaaaaaaaatcggctattacagttggttcctataactgacacctatactactgatgcaaaatccaatttcattagtgtcagttcttaatcgtcaatcggtaccaaaagctagtgtctgattaaaatagttgcta

SEQ ID NO: 22219 - DNA, 1247 bp, Cannabis sativa
cacgcatcaacattaagttacagcgacacacccaccatttgaagaacctaacctgtattcccaataaagacatgcataaatcaaaaggctaacaaaaaccctaaatcctaaatagaggttgaaggggctaattctcaaatttgatgaaagaaatacatatgcgagtattcaggatgttcatcccaatactcacaagtattcaaggcatttaacaaaaatagatgtgaatactcgatgtgttcttcttgaaactagcagttacgcaattttcaggcctatttttataaaaaattacccagcctttatagaaaaacaaagttctatgtatacccatacaatgtcatacatattctactccctaaaaacactgaatgcggattgtttcttaaaattagaacaaaaatttgcaaataatttcgaaaactaaccttgagattgtcgattcctccttcatcgtttccgtttgcctcagaaactaataaggttcgagtttctagaggaaagaggagagaaatctagaagaggtttggagtttttgaaatttcagagaaaaaggggaagagaaaaatgaaaatgagagggaaaatattaagttggttcgtattagagagcttaaataccatcatccctcattaattgagattatgacatgtggcaaaaggaatgcctaaggtcatcccatctaacggttatccatgggcacgcctaaatgaattccgaagagtttcgtgacgtggcaccctaaatggatcaaatataataattacagctgtcattttgaagccctcaatgggaaaaccaaaggtcaccatctcatgacatctcttcgcctgcctctcgattatagtttccctcatgaccgcatctgtcagtcgcgaaaccaggggcatgtgttatactgagattttttcacctagaaacttgagaccggactcctattaaaaagacacatatattcactttcctcgaggaaagctgagacatagataagagacccctcgaatacgaacatcgcctgaataagattcagcaagatgatgcaaacatgaccaggtttaatcgcattcatatagctcgcattatgtaggaccaaggaacggttttaagctcgcatgtaccaaggtatatacgagcatccccgatatcctcttacgaaatcatagatatcgattctctattctgtgagccggttccgttgacccaacagccttgataaatcaatacagactcgcatgtcttattttatc

SEQ ID NO: 22220 - DNA, 2669 bp, Cannabis sativa
aggaagcatccatacctttgtctttggacgtaggtggtggctggacaagcctagcaaactcttatctttcaggcctaatcaacatgggggcatcctcaactgtgcctccccgtgccaaacactgctgaaaggctcatccctcctggctactattcaggcaatcttggccagagggatgtcctcgtcagacttaccattttcctgcttgggcacaggtcttttcttttggataacctccttcaccgcaagagtatcgtctggatctttaggagggcttctaacaccctcggtattttgtccaggaaggtacaagccatacttcttaaaattttgctcacaagctaacttgcagatgttacaccttttagtagggagagatagaatatgattggttctatccctcagcctgagagtggggattggatgaaggtatgtcaggaccctttaaaaaagatgatggacgtacctaacatcctaagcaatgaagtagctcttggcgtacttcccagttttagacatggcccttgtcattggtacctccaagccattgattgcccagctggctaaagtaaaagtatccagacttgccctgcttcggagtggattttagctcaaaatagtaactaacctcctaaggtgagggatgcggccagcttaactctgcacagagaatgaagagtgccgaaaggtacttaatgccttttgaagtaatctgagtcagacacaacctaaagaagttggttatgtccctaaaatagggatgcaagggcaagaccgccccttgcttggcatggggccttgaccatgccatctagttggatggaagacaatgtgccaattgaaccctagtgggcctatcacattagactcttcccacgagtccctttcccttgatttagtagagcttgccaacctacaaggaagatggaggagatatacagtgctacttatctccgtacttgaggaaccaaggctcgagagtctcatcctcaacataattaactccaacctttgacagttaacccctagcatttaaaggttgttcaaactcatcataagtatctagaggattacattggatcacgacaaaagtcttatactgcctcctagcagtttggcatggaagcagattcgagctacttagcctctaacttgtcatcttgaccagccaagggttcctcatcctggctggcctcaagttgcccggccaaaggctcctcagcctggccagcctcaagctgttcaacttgaggttgtttagcctcctcaacatgtcaaacccttcctcttgccatcagcttggaaatatgagggtcctcaagaggtgtcctacgacatatttacttcgtcctagccatggtgggatatggctaaaagtatctagctatgataacaatagcctcaacagtggaaagacctctaactataagagttgcccgtccagtgggcaacgtgtcaggcacaccttcttagacaatataagtccacgacttggggaggaactgcctccacccctggttcagttcccagatgatccgaccataaagctcactgcctactcgcttagaatagtggtggtgctaaatctcaagttctggagaaccactactgaccttgaaatcacaagaggaactatccaaagaacccctcggaagaagaactagttgtctgaactagacaataatctttgtaaagaagactgagcaagtcttcttcaatctagttgtcaactccccaaaagttatgcaggttcatctgtccaaaaaggcagagggagatgaacaaccggatgaaataaaaagacttagacaaagcacaggtcaactggccaaaacctaagggtagtaacaagacaaccctgatgtacaaagttgtaaattggcaaagtatagacttcaagttcaaaaaattaaataaacattgagttttaggccattaattggctaggatagattctacctaagacaacctgtagagagttcctatggaatcgagtactagacaagggtgaaataggctcaaaaagccatacagagtttttacaaagaccaagtattagccagaactaggcaaacttgcgatgcaaaactgcgtaccagccaggtttttgggtctaaaatcatgaactggccaaggtctctgtctgaaaccactaattggctagggttacatgtaaagaccacaaactggccagggtcacaaacagaccctatgtgctgaccagaagctaaaaaaaatcaaaatcttatttttctaaaattcaaacaatgttcttcgtgactcaaagagtcaagaatcaaaatagagttcaaaatttaatctttttaatcagaaattcatacattatacatcctaaaactatcaaacgaattataatgtaaaaatgactacactacagcgtgagaataaaaaattttaaaaagcttaaagttatcaattgcaaattcaagaatacaatgaaaaagtaagatttgaagacttatccactgaggaagaccattgtggacactcgagcaacaatcggatcgtcgaaaaaattaaaaaccacaaggaatggaggtgcttggggcgtcaattttgaaaaaggaaacgaaaagttttttttttctctttttcttacagagagaatacaaaggagagagagggggtgaagtaaaatgaggaaaaat

SEQ ID NO: 22221 - DNA, 6381 bp, Cannabis sativa
cgcccgatgttcagccctagttctatttatagtttatcgtttttttttttatttatttaaacaacactattcattcttctatcattttttcatcttttatcatttttaatagattgatttagtttgatttgattttaaatttttaaaaatcctaatattaatttgatttgaaaaagttaaattcggaccaaacaaataaacacctaggctacatttacatgtataggctacaaagtcttaattttgttattagacactgtagcgaccagcacccagataaggtcctatttataatttatcatttttttttttatttaaacaacattgttcattcttctatcattattttatctttaaatcagtaaatagaataaaaagtgtaatatttaaatttagaacaatttgcggcgaaattcttttatgttttaatttttatacacttaaccttcttttttttgtgacaaaactcccttaaatttatttttctttgtaaatttaatacgtcggttaaatattaccgttaaatattaactgaatgaccactgtatacatctgtatatatgtaagtaaaatctcaaagttaatacagtagtaatccaattaaaaatttatcagtaatagctaactgataccttaaatttataaagaaaaataaacttaaaaaaaatttgccactaaaaaataataaaagagttaagtgtataaaaattaaaccataaaggaatttcgccgcactcttaaattaaagtacttcaggaaaagaagcaagacttcagtttttgagtaaataacacaactttgtttcttcttgttttaactgggacattgtttttgttttcttgataatagttcaaaatacaattgaaacaaaagatagactgtagaataaaagacccgcctagagtctgctttctcattaatgcacaacacagagctgaagccactttaaccccaaaaatttatgtacaaactatacaaaaaggttgatacaacaataatttacaagaggaactaccaatttaatatacagctgcaaattttttctttttttaatatatagatggaacaacaaaaggaatagcagacataagtgatttaagactacataaaatccctagattcaatgcctgcttcagcatcagttaagctttcatcattctcattcagaatgtagtcacaaagctccaaaagctgatctgccaatggaggtatacctggattacgcccatcgttgtattgatgagcattgaaagctatttgccacacatcatgcctgaattgttctctgcttttatactccaacttcctaaccttttcctttatggtagaaagatccatcggccgctctattatgtcaaggtagtcaggagcctcttttttcgatacaggttttaagaaaagataagacacttcaattcgttctttaagtgtctccacaatctgctccaagatgtttgccaaaccaacctgtacagtaattaattgtgatgaaatgaatgccatctcaagatatgcaaaccctaaacagtgacccggtagataaaaaaatattcaaggagcaagttggatattttgttactagtgttactactactaagctactactattggttgcaagttaatttccgaaataatttcataattgtctaacaaccattctatggataaggagggacacacatgaatacagcacacatatcctataccaacagcgatcgacattagatctaatacatgcagttgcttgttatcttactatgacatcactttcaaagaaaaacatgcattgagagaggaagcaagcatggtagattacctctcctcctcttcttcgctttgttgttgcagcagattcagcaccataccttcccaactcagcaacagatcttcgttttgtactccgttccctatctggcaatctcttgtcaaatcttcttgctctggagtcttctatataatcatcttctatctcaggcattttcctctttttcttcttcttggctttctggcgctcttcttcttccctctctcttctgatggatacttcatatcttctaatctcagcaactctttcttgttcttccagcatcttcatttcctcttcacgaatccttctagccctctcttctcgaagcatctcttcatttctacgcctctcctgctcttcccaccgtttccttttgtctctagctttctttttagctgcctcagccaaataaacattctcctgatttctatgcatttcaaaactggacaattccacaattcttttagtcttcctgtgatcaatactactgccaccatcctgagcgatctgatccacatcaataatttcttttggcctcctaattataattttcttgtgagagtgttctctatctttttctgttcgtggccgttttgatattttatgagatgcaaacctgtccctctctatgttagctggtggcctaataacaatagttggtttctgtggttcaacttggcctctgtccatgtcagttggtggccgaatcacaatggggggcttatgagattcaacttgcacatcttcaggtttcgctttatttgaaattattattttgttaactttaactgcagacctcccagtttcagtatcagatgtcattggttgatcaatgctctgagtcactccaacagaaaatctatcaggaaccttgtctgctgaactacatttaaacttcactggtacttttgttcctggagtaatgttctctccctcagaagcctcaaccagagctattttggttgcacttttaggtataagcttctttgttgtagtttttgtctgggaaggagcagattgagtcaatgtagcggattttccaactgctttctctggttccggagtatcaacatttgtgtcgacctctctatattttgggcagtttttgtttgtcctcatgtgtccaagctagtacaccgaaagaattaaccgtcacaaccaataaaattatttaccagaacatgacaaaataataacttagctgtttcagttttaaggactaaaatatattaagaagaatatacacctgaccgcatgctccacagacgaaactttcccttgcgttctttttttccttaaacatctggttgagagaagtaaattaaaaatatataaattgcataatcgaaagccagaaactggtcttaaaacatttatctataattctatatatcaaccacctaatgcaggcttttctttacaataaactaaagggaaaggaaattgcaatggcaatctatgcctaaaacattacacaaagcaaaacacaatccaatcctttcaaacctactagtatcaaaataatactaccctataataaaacagttgaaaaaaaaaaaaaagtccaaaaaagaatctaagaagaatgagctcaattaccttgacagtagtatctcctgctattttgatttttttattggttaaatttatgtttacagtatcatcattctttttcttttgttttagttttccaattttgttccttttcagaagaagattctccacctgcaaccacaacatgaagaactaccctcagttctaccttcctataatagtggaagaataatgtacatgtctacatgataagtcttcaattccatttgaaatctcagaaaaagaggtggaactaagagaataaaaaaaaattatgcacatgaaaagaaaaaaatttaaagagactcattcctagatcctaccactttggcctctgcaatagtattttcttttgatgagtatggtccatcatgttggtttgtgctagtacttagcttgacacgatctgcattctcaacaccataatttattcggggggctggagtcaatccagcttcctctcccatcaatctcaccttcttcttcttcttacccgcagcttcatcatctgcagcatagttaccatggtcaattgtggagggttccttaagaaacggaaaaagaaaggaatctactaggctgctagaatatcatagggtccaatatgtctgtaagtctagctattttagatatttgcagacagtaaatccttaaatcaggcaagatatcagtccactaaccacaagatttattgaaagtttgtacttttctttttttctcttaccgatttgaattcagacaaaagtaagatccacaatattcttatgtattcaacagctttgttaaagccaagaataataataaaattcctagggcaatgtataataagatccacagtggttaaatgaaaaagggttgaagccaaaaagaatatgtctaagaaaattcacaatgttgaaaaaaaaaagaggagggcggtgaagggatatgcttttgtaagcaaatactacttaccgtccataagcaacctgcataattcagctgcttcagctgcttcatcttcaatttcttcttctgcctgagctaatgaaggacgtcctctcattttgaggcctttaacaccatctgctttatcattcttggactcctctaccccttcttcacactcttccgcatcaagcagattctctaaatccccagcaaatgaatccagatcactattattttcttcagagtcgctttcattttcatcaccatcaaaggctgaaagactctgaacttgccggtcccaaatttcctgacacttctctctggtctgttgctgcagctgaagaaaggacattctctgcccacgtgcatatttactaattgtagtggggtcaacttttacccctaatgcagcttgttcacttgacagcttgcgtatcatggcaatcctatgccaccttgtttgctttgcaatcacttcatcaggaacatcaaatttgagaagaacctgtaaatagaaacatagtgaagagaacacagaatatgtgaaataaaattcatgagttatagtcagtggtgttgtttcagtagtggacaatttgtccttctagctacagactagagtattatatatataagatgtgtgcgggcatatagctcttgaggttgtgcatgagtacaatgcttcactagttcttctaagatatggagcacaaataatttaattcacagggtaaaaaagcaaactcgcatgccattaaaagctaacgaacctcacgtgcagcctccatgctcaatctacgtagatcagcatctgttccagtaacagtggtacctcctcgaccagcagcagattttttcttcaccacagcacttggcactggtgttttttgagcagcacggacatagctaaatcctagaccacgaccagatggatcgccaacaccagtaatctccatacgctcaatattttcttttccctgccaagagaacaaatatgatataataaaaacatataagaggaaaactgaactccgatgatttaatattgcctctctccagtcattgcaatttaaaaaatggtgaatctttggaaatgagagaaacatgaaagttaaacaaaattcatattggccaataagattgaggattatgtaaatgagcatgatttaagttggagaaaccaacccttaaaatcaactagatactttacctgtgtagaagcgacaaaattgctactcaagttccaaggagtaatttgcaattccctttcaatgtgtgatgccgcagccagagctatagcttcatcaggcagacgactcatagcagatgatatggcatttggatgggtttcagtaatccctaaatgtttaagccgatataaaccggcttgcatgctttcataggcacagacctacacctccaaggggaaaaaaaagattaacccaagaagaattacataaaacattaagcaatagcagctatatctctttggtcaaagttattatctactaatcaatcaaacgtcagacttcagagtattaacccatgagatattcatctacatcgtcaaggaaaaacattctttattttacaaaatcatgttgaaatacaattgcaaaattatgtcagcaccaaatctgtcactgggccaatttaaacatatttccggtgtggagcacattaaagatgtctcttcaatgaacacacaaaatgcaatacaaattttgtaaatgttaaaccttttggccattccttcacttcagtataaattcagatcaaacgtaatattccttcattatttgaagatatagttatgtaagtatttttagctcttcaatttatcaaactgagcttgtacaagaattaagatatgtgaaaaagtgaaggtagactcacctcctcaggcttcaccatatttctcagttcatcctccgagaaaatgcgaaagttgtttttcttaacccaaattgattgtgcaattgaccctctctggaatgtgacacagtaacaaatgagtggatttcaaataaataaatcagaatattgaaatt

SEQ ID NO: 22222 - DNA, 3815 bp, Cannabis sativa
  modified_base (337)..(348): a, c, t, g, unknown or other
ttatgttatgacatgttgagagttatgaatatatgttgtttttttgtaggttgtggaagatggatatgagttctttgcaaaccgaaaacttgtgacgctattctcagcgcctaattactgtggcgaattcgacaatgccggtgccatgatgagtgttgatgagagcttaatgtgttcttttcagattttaaaaccagctgataagaaaccaaagtttggatttggtactattaagccaggtcctcctagtaaagttaaggtacattttatttatggattattacacaaatatacaaaaataacaaaaatactgttttacagaattttaaatattttnnnnnnnnnnnngattttatttacagaaaatacgacatttttatgctgtactcttgttaatttgttgttgattttttattatatgtatattattttttgctattatttagatattattttcatgatacttttatgtagttttcttattattttcatattgtatctataaaaactataaaaatgtaaaaaaaattctttaaacgtaaaaatatatttgtttttacaaaaagagtaccttgtgtaattattctttttatctactgtatttttagagtgattaatgttaagattttgactaattgttaagattttcatatctgaatatttgtactcttttttcaattacagtcattgcttgctgcaaagggatattctttttgagcaaaatacatctgtctttagaagcaaaaacagaaattgaagaaccaaattaaaaatatttggtgtttaagaggctgcaattttttataatcatactttcttttttggttctatatatgtatttgtaatagaaatattgggcgaaatagattattttttaatgtcactttacatagtgatattcttgtaattctttacaaaatagtattttcgactcttgcaatattttgtcgaaaaatattattttataaagaattatgggaagaatattactttttgtaaagtgatattaaaaatatatttatttttaattattactcttatgtataatattactcaaatgatcaaattctctttgtaatatataattgtaactgtaaactaattatgatttgaggtttggtgggatattattaataggtatacaggtttcaccttctttatgaaaccatcaaaactcaatttcaattgagacctaatccattgttaaggctatctatacgttgtcgttttatattgttctattgtcgttttgaattacatatgtcattttgcatcagattgttttttcaccccgtaatgattttatttacttatttactaaaggacttatttccttttacatttttttttcctttgaaacaagtccttcattcaaataaacattacataggattagacaagtcttgttaaagcgcaaactttacacaagggtgattaaccccaatctacatagtactcattttgttaatcaaagcgtgattagtttatacatgagctgcctcacttacctccccgtaaaagagatcccaacaaccatataatgtaacattaaattcctaatattagaaatatagcatatctgccagcacaaaatagggtattagattatattaaattcctaatataatctaatattctatcttccttgttatagattaattggacgacctcttggtaattagattcaataataaaacgatgtaaaagttgttgaattctagtttgcaacctttgggattttcctctcatgcttagtattattcctaatataccatatctgctgcacaaaggcattggttgccaaagacacttttaaatttctttggcaagtaaggcttggttgaacaactcgagatctcgaaaatccaaaccaccatcttctttcaatttacataagcgtttccatttgtaccgatgagtttgcttcttttttgcagataaacctcaccagaagctccctggcattttatgaatactatttagagtgctttttagaagtcaaaaacaactcatagtataagtgggaatgacttgaataattgccttgataagtacctcctttatggccattgaaaacatagtgctcttccaccctctcaacctattccaaaccctatacttattccttcaaacaaaagacagcaaatcaaggcattttccatgattatccacctttttcacagtccttttcagacagctcaagctttgtctctgcatccatcatcttcccaaaacacattttagatttataaaagttaacaacttgatctgatgctattgagtactttttcaacagcttttggaacctttggcaatcaatcatcgtctcattgaagaaaaatctgctatcatctgtaaagaaaaggtgggacacagagaggcctcgtctaccaaatcaaatactctttagattaccctcttcctctgcttgttgaatcatactaaaaaaagcttcaacacaaaacaagaagagaaaaagtgaaagcaaatccctttatcgtatcccccattgtggcactacctttccttggatctcacaattaattagaaaggagaatgtcattgatgtaacacatttcataactttcgctaccccttcttcctaatatcccagttgcaacatcatgttctataaagtaaatcttttagcaatcctctactgttatccaaaagcaaagttgcagattttgactttgtggtagagaaagttaatcagagacttcaagggtggagcaccaaacttctttctcaagtagaacgtgttactcttttgcaaaatgtgatacagtctatcactgtgtatagtgtgcctaattttctcctccctacaaatttttggtgggttgagaatgaagacaagaattatcttttggctttatcttcttgggactcgcattacaaacccaaattatgtggtgattgtggtttagaagaagttaaatgtcatgatatcctctttacaaacccttattggttcgggtaattcagtagaagtttggaatgccccttggcttctatggaataagtgggatctcactcgagtttcctttaatccaatcattcctccgttaaatgtcatgatatcctctttactcgatgacaatggtgcttggaacaaagaacttattataggttggttgcattcctattttgttgacttgcttttaaagatgccaaacttcctcctcatttggataatgctcttatttggagaggctttaaagatgggagtttctccacaaaagtggcttgttgatctttgaataaaaggttttctattgtggatagcagtttggaaagtccttatcttggaacgacaaaacctatttctttggaaaatcacatccaagtttttccctacggggatagactaggagagtttactggtaattccgttaaccactacctttgtaatgatgctactgattctccccttcatctctttgtgttatgccctttggccaaggcgatttggttctttagtaagtggggtattagagcaggtaattcttcttttaagttagttgattggtttttcatattgatttcctttctcatcaggataaatccatgagacttgattttttgttctttgtattttctgcctacgagactctctggtgggtctgcaataagaggttccatgaaggcctctttccctccccctccttccttgtgtgtgacattgtttgtagatcataggaactcgactccatcaatgggggtctaatttttgagcaacctactacttcgattgacagagagagtgttaggttatttttagtattaattttagattaagtttagtatatttt

SEQ ID NO: 22223 - DNA, 5964 bp, Cannabis sativa
gaggattgccactgaaatggtatagctaatttattgcatttatatacaaatatatatatatatatatatgtgtgtgtgcattatagtacacattttaccactttggaacgtcaataatggaatacatcacagagatgaatcattgcaaataattattacaatagcagaaagagattacaggctggtgagtgaccaagaattagaaagcgaaaagagattacatagtttgactttgtttaatctagacagaagcaattactatcaatattcttccaagagaaatctgatgaaaccctacattagcatgctaagtttcatttggaaaaattgaataagaaatttttttgatgatatgccattttcttttttggaaaggttgtctgctgttgtgatgtgcccgagatttctgtactggtttaagtattaatgaacagccttcattgctgagtagctagttccttaaccctctttaagggttaataagctcataaatgtttcatgaatcgagtcaagaaagatttggcaatagcagaaaaccatttcgtttatcatattttccattctcttgtctgctgtcccatgcttgttacaactctattaacaaaatacactttgtgttcttagatgcttgaggttattttttatttgttcaggtatgtaccaacaggggttctatttgatcttctgtgtgcagaaccagagagaccttggaatttgacggtacaaatttggtcttttttttttttctatttataactgacaatattcattatttttcttttatttaaaaatttgcagaggaactattgtaagtaaagattgatactgtaccttttatttattacctataattagataacttttggctttgaatgatgtgaaatttgtagtataacttacctgcatgtaggcaacaagttggcaaactactatattaagttttggacttcctatgtgcaggtgcattttagagggtatccaggaactatattattaccctgtgaaggtgaagatagtataaagtggaactttattaactcactgaaggaggtaggtatatgattttgtccgtctatttgataaacgagcaatcctcctgtttttcaccaaagagaatttcacttcatttctcgaaattccttaacagagatatgatgtagacaaaacacatacagataatttcattgtttttaatggtttctggtataatacaggcagcatatataattaatggaaactgcaagaatgtaatgaacatgtctcaagctgatcaagtggaactctggcgttctgttttgaatggtatgtcttcaaattgatcacatttttgcataatcactgtgtattgtcctttcctaaacataaaaacttattaaggtttggcctttttcctgaagagaatggagttagtaattgatgaaacgtcattatacaataagtaatgcaaagtataccacagacagtatatatatatatatatatatatatgtatcgatatatatgataatccacttattttgctaggtggtgttgtttgtgacattgtaccatgaaaaacagaattgagaagggtacaagagagaatgtgcaagaaaactgtgaatcgagttcataaagtatcaatgttaaccattttcaaatcttataaataatatattatagttcccaactaatataatcacttagttaatcaaatcacaacaaaaataaggaatcattatcactacgccccacacttatttctatcattttatcccttgtagttaagtgactagttattgttttaaacagtagtccaagcatttgtgagttatctactttttcatagatggatacaattgatttgtgatattatggtattgcctagcattctagtattttggagtgattatttaaggtttgctatagggtatatcagtctcatcctgctatcaaaagttctagttattgaatattacttatgctatgaatgaattgaaaacttttcactgcctcatcaagctttgttgtgtctgaactaatatttattgttttttgtaggtaatttggaagtctttgtacgtgtgtcatccaaacttaagcttggaattgtttcagatgaatacactgtgacatcaaattcactaggatcaggactatgtgtcgatgaaactgatcatgctggacgggataaggcaggtgagccagtttactgatacttgtgtaggttgtaatttttgtgacaggctcgtgaagtgcacacaatagaattgtagataaatattctggaaaatttgatttatatttccagaaaagctagatatttgaatgtctatttttgaggctgaagccaaaagctattcatggctccaagattttgggtctaaaagtaaatgtataaaacaaggatattgtttattctaatttatatttgacttgtactaaagctaggtgacggtcaaagttattttgtgaatttttcaaccatggttcatgttaagtatttcattgtcatattaatattcccgttagaagttagatttataatttacctcttttggtacttccttcctgttcacctgaaatcctcaatagagaaatgggtggattttttatcttttttattttttgttaggcgagattgtacctagagatgtgttgtctatgagagtgtcctttggagtcttttattcttttagaagagatgaaaggttatgtgtctgactggcctcctcctaaatttattagggagcctcagttgtgccggaggaaaaccgtggtaaccaacaattataaacatttgaaaaactacaaactaatacacaaaacctgcatttctcaatacataaaagcaagaactattagaagcataggtatcgagacagaataagaggatcttggtgcagaaagcttccccaatctttgctaagatcttggaaagaataagaggatcttatatcttttctttgatagtttagtaagcaatttcttacattactccttgatttagttggaagctttgggcctttggcaactttcaaatgggatttatgttcagtactaagagccagtataacatatactgcaaaccgtagcaacatatagtacaatccaacataagatcaatccaaaccagccttaatcaactagaccaccctaaactcactagcaccctttttcctctacactgcctaggtggcctatttaaagctacacctttgcgtttttctcaatctcatttcccttctctaatttttctttctccattcattattaaatatcgatgataatatttaagggttttgtgtctgctaaggttgtttaggttagaagtgggcgttacaccatgttactttatataaaatagtgatccagcctcttgggtctcctgttctgcagtgacatttcttcatattacttaagtctaatgctactgttttatcatatctggatattttcctatcttaacaagatttggtagatttgaaaattacatgtttttcagttcattattcttttggtttatatttttttatcataactattgtgaaataagaagccctctttttttttttagtgtgtatttggaaaatgtttgggctaactttgttgcccttctttaatttgaatacatatcttaattatttgacattttggtggtaggccgagttccaattcgtctgtatgtttggagtgttagtgaagatgttaatgatttagaagacgcaccgcctattgatacttgggacaaaatcgcttatataaatcaacctgtcaactgtcaagagggtaagaaaaatcctatgttcatggaaatgcttatgtgaatgttgtattcttacctgtttactttcagtgcattaattgtagcagtgagagtgtctttcattttcgagggactaatttaagatgcatttgcatgaatttgagtattaatttaattgtcttacttctataaatgttgtcatcaaaaaaaggagattcacactcacccacccccaattatggagaagttataagaattttgttagtgtggtttatcatgggaaattccggcttttacatgcaatatgttttatcttggtctattttaatttgggactaggaatgaatggcttgacatttttttgcaataacttagtgaatttaagatttcattgaaattggaagggaatgatcacagaaacaaaatcttaagcattaattaggaaattaattgctctttgttttttttcttctaattttttaaaccaggtaaatgtctcaccttacatgatgctgtgaaaagccttctgccagagtatttcccagaaaattctttggcggatgaagaatcgtcaaaacagaaaggcgaagaagaagaggagacacaaacttcagtagaagatgatgcaagcatggctaaagatgtaggtgaggttttatgcaaacctacaaaatcttgcaacatatctgatgataatgttgaaattaagctcattcgaattcaaggtattgaaccgaaaccagagatacccttctcttgggtcgccaacagcttgatgaatcctgattattttcttcacatctgtgtctgcttgaaagttccaaggttaaagattcagtaatattcgcacgtgaaaatggccattacatctgcatgaaaatgtatagaaatgtttcttcttttaacctgtaaatatggtcttcattcattgtgatttctgtttatcattcttttttctaatacaagactcagcttcatgcacagcaactatttatcttaattcccggggtagttactagttaccagaaacaattaaataaaagcaatataatttagcattcattaggaacaatacagaactataaagtcgaagatttataaaacggacaaattaatacaaattagtattttagtattaaatgtagtataaaaaaaataacaataaaaatattgggttcaataattaagacactaaatataagttttattggtagaggttcaaaaagtaaaatacaaatactaaagtaaacatgttggaataaaaaatttatgacctccagtatatacataaaataattttgttattatactaaaacttgttttatgtttaacttttatttataaatatatgtagtaattagctaaaatgtatatgttatttttttttctgatttttttagggggccgagtgcgctccctcgcctttatgtgggtctgcccctatcatattatgaatgtcagtttattcgttttgagtgaagaaattcagtcattaaatagtagagaagggataacaccattaatattttggtatgcttacttggggacaatggaaaatgaataagattttatttttaggaagtgtttggtataaagcggagaatataattatttatattgtgactggttatgtatggtaatatctagttagattgctattaagtgaattacattgtttgagtggattaggaatttgatgtattatatttttggaaaattatgtagaacggatttaagatattctaatagaaaataatcttatttttactgtaataattttttcttaaaatgtaaaaaccctataacaaacagagtattggaatatctttacttctactattgttgtggaatggttacttcttcaaaaagtatgagaaagtcattcccttttaataaagaataaaaaaagatagatcatgttattacttttccattttcattcttttccttcattttttttttttttttggtttttattactgtaacatccaaacataaagcatatttggtagaagggaatgaaaattggaatggaaattggaatggactgaaaaaatgtattctataatttgctttgcattttaagccttggtaatgcaagtaataaaatgaaatagaatggaattccttcgtttgtttgcatattaaaataaataaataattttttcaacattttagtggaacgactattctatttaaaaatgaaaggaaaaactatt

SEQ ID NO: 22224 - DNA, 2819 bp, Cannabis sativa
tttttgtcttattcctaagatttaatatttattttcctatacgtcctcttaattttcaacttgatcaataggatgggagagttttgggctttattatttctgaggagcagagtactttcttatttggaagacttatatatgataatgttcttattagttttgagtgtcttaattctttaaaaaagattaagacatgtgataatggtttctagtgcactcctaagctattgatacatctaaatgtttgatttagtagaatgtaatagtaatagtaatggtaatagtaatgtaatggaataaaaatagtaatggaaattaattaagatgtttggtttattattggaataaatattagaataaatgataaattgacattattccttactttaatttttatatttatatatatatatataaaaaaaaaggatattagagtcattttagctttactttatttagtctttttaatgtaatcttcattacatagcttttctattgtaatagggattcctttatataatgtaattatgattataatgtaatctcattatatcaattttgaaaacaaagtaaacattgtaatggataatttgattacattacaattccctttacaacaaatcaaacatgcgtaaggtttatgactaagttaagttttcatgttgattggattcataaagtgatgaattatatttagcgtaaaaagatggcacatgtctctactctcacaacactaaataagacttgtccaaagagacttttgtactaatttttcacttttttcacaccatttttccagtttttggttctttggtttcggcctcaaagatagagagaaagaattgtttttttctgagaaatttttaaaaatatatttttctatatttatttacaattttacgacttaaattttttaattttaaaaatactcttgtaaaattttaaagttgcaaaaatacactttgttcaataaaaagtaaaaaacaatcaaaaaataacgaaaaatcaatttcatgacaactataaatcaactataaaataataaaaaaaaaaacaacttcattgaaataactataatataattataaataaactataaaatatcaacaaaatggttcattatgtttattgaaaacatatttttataaataaaaaagttcaaaaagtaaaaatgaattttttttttttgaatttttttgtctattatataaaattttcttaattttttcttataaaagagaaaagagaaataatccttgagtttgaaatctttggatagaattaaaaagaaataatcattttttaattaatttagtatttatatgtgttttaatataagttgttagattgagtttaatccaagggtctataataatttgtgttaaaaacttatgttaaaaattgtgttcattgaactcatccatatatatcatataaaacaataaatcttgtatgatcttgagaagtaattaataaaaatagaagtataaaccatgaatagcatgataagatttacttggggggtcatacaaaagttggaggtctaaatgagaagaacatgatacgaattaaatatgcaatattataatgtgtatatacatatatttatatatatttatatatatatatatttatgtgtgtgtgaattgaagggcaatccacaagtgatgaggcttgtgttgtgagacatttacaggtggtttcatgggtttcttccaattcaagacatgccatgcaatgcaatataatgttgtatcactcaacaatacattctaccattcaatttcacaatcttcaaatttaattccttataataaattaaataaaaaaaagttgtcaattactagccatttttgttattatcttaaatatcttttttcaaaagaaaataattaaagaattaaagacagtataattattttaggaaaaatctgctctacattttctatttattttaggaaaattcttttatttattgtaacttattttaaaaaattgattggtttattatgctgaaaataaaattaaaatattttattatttgtgtgattatctttttaataagtaaataattatttgaatttcatttttattctttaaaaaattataaataatcctatataccttaaaaatatatgatttaaaaaaaaattgaactgaaaaaattctctttaatagtgaaagagatagatgatatgtatttatgagcattactattgtgtatcagtggtgtccaacacttcttataggtggcaccctattattagttagcgatattttttaaaatctattttcttatattatatgggagcccgattgatatttaattatattaatatcggtatgacattgaaaagagtaatgacactaataatacctttaaacaattctcttattttatagtgatgaagttgcaccactatctcacttattcataattatatatatataaaaaaaaattgcgaacaataatattgtaaatttaatataaaaacactttcggttacttaccttagttaaaaagctttaaagttaaaagtgctttaccagtcttaaattatatatttgaagcataaggaaaaaagagagggactaaaataataatttctataaatatagcaaatcttcttctttttttcttagagcgttaaataataattcctataaatatgccataataattcctataaacatggcattaaatatgaaataaagttaaggattttataatacaaataacagtatcatattcacatctgatactaaaaggattacacagcttttattgaagaaaaagaaatatttttcaaaagaaaaaa

SEQ ID NO: 22225 - DNA, 2564 bp, Cannabis sativa
aatacaatacaatacaatacgatctaatacggcgttccaaacgagcccttaatgtattattttaaaaaatacggagtttaaattattatttaacaaaataaaaatttaattgataatttttataaaaacaatgatctaaaataatatatagtaaacaaaaaattatttaaaaaaaataataggaaaaataaaaaactcatgtaagtgcttttttaaagacatcaaaacagcatgatgtgtggcgttttagcatagaacaaatccaaagtgtactaatcaacggctgagaagtgtgaccgaccaaagttgtgagctcctttttttttctttcttgaaaagggaagggaaattcatgcaaatcgtgtgactcatatttataagcccaaaactcttcaacttaatcctttttgtacttttcacttctcagcaaaaccaaaagaaagtaaaataaaatctttttattttacttcaatattttgcctaatttttaatcttttaatagtttgctttacatctgttaattatagcacaaatatccaatttaaattattttaaattaaaaatacatgatgagattttatataatatttactaaatagttcaatgtttttatatataataccgtgagatcatgaacagtattttttgttcaaaaaaaaaagaataaaacgtactattgtgaaataataattattttctttagtataagcatcaagttcttagtaatttagttactttgtttgcattgggactaatcttatatataaattgtgatattttattttgaggacttctgtataacttggttggggtcatggtgacatagtttagccattcattaatatttcaccctcattgcaaatgaataaatgtttaaaaaatttataaaccaaaattagaaagaaaaaaattacaaaaatacgtttcagatttgttttttatttttacgctttaaatttttttatttacaaaaatatacttttagtaaaaataataaaataattttttagttgttttatcatagttgaattatagttgtcattagactgttttttagttgttttagattgttttatagtttaatttatagttgtcgtgagattgatttctcgttatttttttactttttgctacataaagtgtatttttataattttaaaattttacaaacgtttctttttatataaaaactttaaaccgtaaaattataaataaaacataaaaagtatattttttaaaattaccctaagctttacccttactcatttgcatcattttctaactaacattgaagagcttttgcgtcaatgacacactaacgcagtagactcatttgcgtcgatgatacaatatgaaagtagaaatatttaaacaaaaataataatactaataattcaaatttgcaaattccatattatccatttacataacacggattcgtattcatccagtgaagaaaaaaaaccacaaaaaaatagcttaactctagttttaaaataatataaactcatgaacacatatattaaataaaatcccctccaaaaaaaaacagccaaactattcatacacataaactcataagttaaaatacagaatgaattaatgaaaatgcaaaatgaaaatataatttaatgtagaagccaattgcacttagttgtccaacataccataaacctacaatgtcaacgaatttaattaagacattgactaacgtgaaatgttatttttgtattaatggcaattacacttcataatagagttttattaataatgttttgtatgagaaatttggcatcatgttaacttggattattatcgtccactcaaaatactcaatcatctctaatatgtaagatataaatattatattaaatttaacacagaaataaataatattatatttagcacaacatttataattgtgcttcaatacaaaataatattttaagatacaattagtctaaaaaataaaatatcattaataattaccaataaattagaaatcaccccatatactattttttaacctttttttttttttcattttacagtttgagttgttccggtggttgatgcatgagttgccccgttagtttttccgtataaaagcaaaaaaaaatgtaaaaatgaaaaaatccctaaattaaatattaaaaaacctattaaatatataaataaaatataaaaaagctattaattacaatgagtggaaaagagtaaataaaaaaataatatttattatggtgtaaaatttgatacatgctatatttttattttgagccgaatttagtacaatgtttaatgtatgtcaaatttacactatcattggaattaaactttataaacatgggctaaaaaatacatatacattatatttatagcactctatgatttatgacacaaaatttaaaactactgtaattttagtcaccaacaattatttagagtagatcaataactcaaatagggataaaaggttgcacctataagtcatctagaagagcaattgcccttacaactaaagaagaacccacggatgtaatattctaaaaatgagacatgga

SEQ ID NO: 22226 - DNA, 4654 bp, Cannabis sativa
  modified_base (330)..(331): a, c, t, g, unknown or other
tgcataaggatctggttgtacccaaaaaatgcatccatgaagctaaggagctcgtgcccagctgtagcatcaacaagcatgttagtgtgagggaacgggaatgaatctttggagcacgccttggtgaggtctgtgaaattgatacaaatcctccactttccattcttttttcgaacaacaactacattggccagccattcttgatagttgacctctctgagtgatcccatgtcgatgagcttttgaatttcttcattgatcactttgttgcattctggagcgaactttcttcttttctgcttgactggagggaaattggggtctacctgnnacttatgcataacaatgttagggtctatacctgtcatatctttgtgagaccaagcaaacctgtcatgatgcctaatgcgaaatgcgatcaactttgctcgaagtttcggtgtgagcttagcatacaatttgtactttgtgctctgggaattccttactaatgctcacttcgtctagttccttcatgttaggctcatctggatcaatcattgcatttgattactatagttgctataaggtagattgtttttcttttacggtgctctgataacactctcgcgctgctccttgtgcccttgatatctgctttattccccatggtgtaggaaatttcataactttgtggtatgtggatggcacaactttcatctcacagatccatgtcggccaaggatggcattttatgaagaaggacaatcaacaatgatgaacttggtttggagggttactccttctgcccaaacatgcaagttgacctctccaaacgagtgctttcgctcaccactgaacccaattaagactgtagatttgtaggtgattgttgactttcatatccctgagagcattgagaaataaaatgttagcagaactcccattatcgatcaatacacgtttaataaaatagtttgcaatgtataatgaaatgactaaggcatcatggtgagggtggagcaaatctgtggctttgtcaatgacaaagctgatggtctgtccaacgactgtctctggctttcttggctttccttgactgttgattggttctcgtgcatggcatttagctattgaatacgtaattccactaacttttgatcatcttgagatcacattcacggtcctcgcattctgagggggttcaggtggactctcttgtcttttatccccttctactatggttgctttgcctttatcaaaaaggaaatctcgtagttgtgctcgtcgaagtagccttgcaacttcaaacttgagtgatatacattatgttgtggtgtgtccgtgatcgctatgaaattcacactatttggtcatatctttcatagcttctagcttttgaatctccccaagccacttgactttatttcccatgcctttcattgcagcaaccacttcaacggggtctattgttagagtgtagttcggaattggtgctttatcttgatagcctctaaacttttgggatgattgtcccctttcttggtaatcacgtgaccgttggggcggagctcttccaccgccttgaaatgatctagatctgttggtggggtatggttcaacatgataagatgacttgtgctctactcatcttagcccccgattctcacgagaacttaagtagttggagataagtttcctattcgattcatcttcctcccatttggtttgagcccatgctttggcgagcacatcctccatagtcctgcaagggtatttagttaattctttatataggtcagattctaccagaaggccttttcggaaggctgtgacggcagtgtccacattgcaggccgtaattgacaccttctcgacattgaaccttgctacatagtctcttagcgatccgccccttctctgtctaattctatagaggtcatctgataatttctccaatttcatgctactagcaaatttctcaacaaaaatttcaattaattgagcaagataagcaatagaattattagaaaagcttgtataccattgaagggctcggccaactatactagacccaaaccctttacacatacacgccttgcccaactcgtgaggtattgcaatagtgaacatcctatgcttgtagctagctatgtggtcgttgggatcagtcgttccatcatacattttcatcagtggaaacacaaacttctttggcttttcgatcaaggcgatggcatctacaaagggtaaatttgcaaagctgctaggcaggctctttttgattggagttgggactcctgggattctttggatcatggcctccatgccttccagttttcgtgcaattatttgttcaatcaactactcttgggtaggtgcaacattcactcctgcattcacaatagaaggtgttaaatcaattattgcattgtttgctctagtaagggatttttggtgtagagagccttcagggacagtgaggttggtcaagatgactgctggagggatggttgaggaattgaatgctggaggaatggctggcgaattgactgctggaggaatggctgacgaattgactattgaaggaatggctgataaattgactgctgaacccatattctgattgactgtggttgtttgttgtccgaccgtgacattagttacccctattgttgatggttatccagtcacttggcttgatcctcctattggggtatcgtcaagtgattgcattggatcaattggaattcggaatcttcttcgactattattcggtgttgccatcaaagcaatcagtgactcaagttggacctttatggcacgtttattatacaatattcagaatcgaaataagttaatggagaaatgtaacggaataaatgaagaataatcggaatcaatatttgtaatatgttgtttactaaaattttttggaaatagaataatagtaatttatcttgtttactttatcagaaaacataatcgaaatgcttaaattgactaaattgtagttattttagttaaactatagtatatggtagttattttataagacatgttttaaaggataaaattgtcattatatatttaatattgaaaaataaaatagaaataaataaaatctattacccttaatgatattccttacaaacttggtggggaaaatattctctttcttttatcccttatttaatcaagttctctctttcttaattttaataatgcaagtaaacaaatgtaagagaatgattactttaccattgattctcattacttattagtaaacaggccattagtgcaacattctctttcttgaaggacgcattttctctttccactacttgtgtgtgctccaagttttctttcatttgagccatgatagtggcaagttgttcacggaagctggtctattcctcattgatctctccttcctccatgtgtttcgccattgcttcagtgtgggttgactaaatgataaaggttgaaacactttgctcaattgcagcttgtcagggccccacggtgggcgccaaattgtagatgctaaaatccacaatcaatcgaagatgatcatacgcaggcaccggcaacctgtagaacaaaagaagagagtaatcgagaaatcttgggagaccgggatggtgtcggccgaagggactccgacggtcaagtcaacaagattgttaacaatgtaatataaaagatgagaataaataatcgaactaagttaccacctatcttgattgcagaaataagtatgtagttttagagagaatgagagagtgaacgataagaagtattgagatgactgaaattgatcatcctctcttcatgactgagagtagctcttataggcgtccatagaaagacgttactcatgactgctcgccccccttgtgaagcgctcctctcccacttaatcaggagatcgttattttcgtggttagtttgactaatcactttagaaattgttagatgagtgataagactcagtctcgtatacgggtcggatcattgtgagcacaatgttgggtaatgggtaatgtctgacttgcctgtattgttttgggcctgttgggcttggtattgtgatcgtaccgtcaaatagtccaatccaatcttgtttgagcattctttgaaaacatcgcatatgacattgagcctgagcccaattttggcctctacaatatccactttactttatttgttttaatttttacttttatttttatattttttaaaatatatccacttttatagatgatgtcacccttataccccttaagttaaaataaattatataaaatgccactaaaacgccactaattgggaatagcttacattagaacctttggtgacattagaatagcttacatttttaaaaaatgccactaaaatatataatgtccctaaatattaataataatgacacttaaaaatgtcactaattgggaattttggtatagtatgtgttaaatttaagtagagagtgaagttatattggacaactcacttataaagtaggtattttttaatgaaatataatatgagaagattctaattaaggaataattacataagcactattttttgtaaaataattacatttttacattcaaataatgtttttttacacttttacagtttttaaaaataacacgaaaacaacata

SEQ ID NO: 22227 - DNA, 4038 bp, Cannabis sativa
tttttattttagaatgtcataggttaatttttgtgattttttagtatagaaaagaaataaaaaataaaaaaattatttttcttaactatatattatgattgataataaataaccttaaacatgatatatgaagggatatgttattgttgtgaaaataaaaattattagcaataagtatagtattgatatgatacatatatgacttttggtctacatatagaaaaatacaaaattattaaaatattaaaaacaaaaataaaaaaaaaaataggaatggaaggtaataagaatcttagacatgccacatcaatttcctaaaacctttccatataaatatttattgattgatgatttacttattttgtacataagtgaaaattatcctatataattattatgatggttaataaaataaataaaaaaagaactagagagtttaggaaaggtctctataagatggcataagaaatgaattgcctatatcacgccgaactctagagttttacctaacacaaagaaagcaaatcataatattaataagtgtagtatctaatctaactatatattatgatctcagcaaaaaaaaaaagaaaaagaaaaagaaaaactaaagtcaaagcaacattgctcattcatttggtgagattcacacttcatagtagaggtatagaaattgaattaagatcttcagttaaaagattgtatttcatagtgtattaaaccaattttattgtgacacattaattaatttgaacattttaagggaaaaaaaatactatataaatagttaattttttattgatgtgtcaaacataaattagtttaatacaatatgacacacaactttttaaggggagatcttgattcatagaaatttagtatatgattaaagagagcactattaaattgtactcaaattattcatcgaaaaatcatttttatattaacgtagtcttttattcacattttattcaattatattacaaaattaatgaagtggtgaatagtattagttaataaatacatgcaaattaagttattttaattatcttttttaatgttaataataatagaatatatttttatttttataataatttatatttttatttttaacttttagtcattaaagtgaaaagggtaaaacatattaaatttgtatttatttataaagtatcatctactgcgttgctcatttcacaataaatttgcatagaatataataaaatgaccatattactgtaaaaattaaattcaagagatattcttaacgagctgtatattataggagatacaacttgttattgtaaaatgttcaaacaaaatactaattatttttattttttttatctaagagtactcacattagatactttagaatagagaatcactaaaatatttaaaaaatcaaattaaaattactaaatgctctaaattcattacatattttaaaatttctttaaaattcactattcatattttacatttatagaatactatttattaatctaaatatattttattaattatttgatattttaattttactttttctacgagaatatgtatgaatattatattatatatttgaaataaataaaatatattaaaatataaaaaaattagaattttgttggtatattttaaagaagttgatatatagtgtaatgtaaaactttaaggtaaaataaaaatttattgtgcacttaaaaagatggctaattagaatttttgtctcctaaactttaacatatactaaatcatgctcactgaacttttctgaccgttaaaaattctctctgaactattgagattattaaatttaagtacttttatctaatttcatttaattttactgttcatatactaaatcatgctcttcagactttgatatctatcaaattatacctctagaattttgacatatactaaattatgtcgcataaattttcatctatgttatattttttttattaaaattaaacaaaagtctttaaatctaacaatcttaatagtttaagaaaatttttaatgatcttaaaaatttaaaggacataatttgatacatgataatttttttttttttaaaaaaaattcttaattaatctgaaaaaaaaaatagaaaaaagaaactaataatagtgattgctcaaatttttattttattttatttatttatttataagggacccaaaattaattaagaaggagaaagaaaagaaaagggtttattgaaagaaagaaaaaaaaaaggatggaaagccagctcataaattgaaagagtgatagggccccacgtggaagaggagctgcctgccagttcacggggtgtggtattgaaataaaaagaaagatggatatgatgctttagctgtcctcacctcctctctactgccaacaaaggtagacatgtacatggaccataatacattccacaatatttatagttgtcaacaatatatattatcttaaaatattattttttttttaattttttttttatttacataacattgacgtcttttttttataaaaattattttaaatattgtcaactctaaaagttacccactataattctacataatattgtaagctcgtgcgtgtcgtgctaacccgactcatatttattcgtgtttttcgaaaaacaggtcgtgtcatgctgtatcataaaaaaatataagttgtgtcgcgtcgtaccaacatttttaaaggattggtccagcacggcccgtaagtccaatatttcgtatcgtactttgctcgtgccgatctattttttttaaacaagtcagcccatttttatatatgggcttaaattcgtgcccattttcattatatgtttcaaaaactttaattatgtttatataattttgaataatattttacaaatgattatataaaaaaattattaacattattagaatttgagtatttactaataaatactcaaatttttatattacactctataaataaagtaagattatattaatcttaatttatcatgttttaatagttattatatttagtattatatttaagttttattattattttaatttatttataattaataaatttatattttattattattattattaaattataaagttttttaatatatcgtgccgtattttttggttcgttgtgttttttattttttgagctagtctattcgtgtttacgtatcgtgtctttcgtacttctcgtgccgtattatgcttaaagatatatttttcgtgtcgtgtcgtaacaatttataacattgcaatgtatcgtatttaaatctgtattttttcgtgtctagtcgtactttaccaattttatgtcttgttaaaaaaccagcctcatacaacactagtctcacataccattttggtgataaagtaaccttttttttttgaaaaaaaaagttaaataatgctacgtagccattgtttattttggacaataatgtttataaaattaattttaaatgttgagcaaaatacacatgtggcaaagaccaatatagatgctctaactgttctgctctctgctgctatcttttctttttttatcatcaccactccactttgtgtgcgtgcggactactacaactactgtacgtacacacatcacatgtgtttttcaaaagtttacttaattaattaattttaataattaatgctttcctatcatattccttaatttttagaagttattacttactttatagtttagggtttacattgtaattttaaaatattgttttggtagatttttttttaggctaattaggatttttattcttatgtattaaatcataccctttaaaattttttagccattaaaaatttctcatgaaatattgagattgttagatttaaggatatttatccagtttcactcaattttactaattctataattgtctatgtaataaatcatgatccctagactttaatatataccaaatcatgctcttcgaactttgacatgtaccaaatcaaatcccttgaattttcatccatgttagactttccttactaa

SEQ ID NO: 22228 - DNA, 3278 bp, Cannabis sativa
tattattggtgcacttaattaaatactaagtttcataaacataaatagaaacatttaacgaatatcattaatcaatcactaaatcatgttaaattttgttggtatccaaaataataatgttcatatataatatatgtagttttgtttcgtattataaaaagcgtttttagaaaccaagctgtatggtacgacaagaatgttgtctcaaacatctgggtgtcttaattaaccatcgattttcttgaaaattaatatatatttgtatattcagtttggcaatatatacatattcaatactttaattttaatttgatcatgacagtgtactcaaatgaaaaagtcaataggtgtttgcaaaatgatagttttcgttagatgatgcattattttagtcgatatcttataatcattaatttgagcattaaatatatagacttataattaataagatctttaagagatagatgacaatctattaatttggataaaagaacacattaccatagtataataaatgtatataagtatatttatttttggtttggtaagatatgaatgacattcatatttcatttgtgaagaagtattaatatactatatagtaaatatatgtacaaaactgaactatatataaaatataacttaatataaatatatatatattcttaatttatatggtttatgtaattaaaatagggtcgtattaggaaactccgaagagcaaatattaattaaaaggcaatgaatatgaatataattaagaatttggtgcagaaagataataaattccctggcatatatagctagccatatttccagtaataattactatatttgtgaattaaaacaagtggtgggatatatttatcaattttatattaattattgtacatgcaagtgtggtcctacgtaatataaaaaatggaggttaatataaaaataaattaacgataatagaatgaccataacggtcagttgtatgtccgacgaaataaaacgcagccttttagtggcagatgatcacagaaaaagaggtggatatattgcccacttttcaagattccttctcttaatttctatattcttcataattcagatcatccaagcctcacttctaccttgttttcattatcatctcaaacaaaacatcatgatgtggttcaccaaaatatgaattagtggatttatatatatatatatatattaaaataagcatagggatatattaaataaagtatttagactttgcggtcattacataaaaagttctccaataaggagtagatcggaatagatcgatacaattggtgggtgaatgcccattttgccacattatgggcagcatagttaccattcctactaatactcgaaaaattacaattaataaaagaaagagataacttagcacaaaaggagagacatagttctcaaggcccaatggacgccttcccattgatagcattgatagctagtctcgagtcactctccacaataacatacttagaccctaactccagcgccacagaaacagccaaacagcaagccgcagcttctccacaaagcaagccagataagccgatttacatgagaatcacccattactcttcaagatccaaacccacctatccttcccctgacacgaggggttgccaccttttaaaattgcagaaaatagtctcttggtcaaaaagactctttagtttacggacatccatcccaatcaccacccactagttaacaagagatcagccacactgttgttatcagttacaacatcaccaattggtttcagaatgaaacctttacaatgaggaatccagaggtccctccaaatgctagtatccctaccattcgccaccattttacaggtcatttttcttagaattgcattggtttttacaatatttttctaaaaccaggaatcagagtctttataactacagctgaggaagtcatttccttttagatacttcgccttcaggatcttgcaacataaagattgacaaccattcaagattttccacccccacttggccataaaggcaagattcatttccttggttttcctagtccccctaaggacttagggagacagagtttgtcccaagctcttagatgaagaccatgattccctttcttgaagccccaccaaaaatcccaaaccaagccatcgatcctattaacaaggcgattagagagttttgtggtttacatagcatagataggcatcgacagacccacagacttaataagggtagcttgacccgccttggataacgtttttgccttccagccctgcaatttagaagtgagattgtcaaggatgaaattaaagtcaacatctttttgtcttgatctaaagaggggcagtcccaagtatttaataacaccttcaggagcatcaatacccaaagcttcctaaattcatcttctcatcccatttagggtatttttgctaaaaaaatattgatgttttgagcttattaactttttggccagactaagcgcaaaacctctcaaggcgattctagtaacacttagcttcgtttaaattggcccgaccaaccagagaggtttgagtacaacacacccattagatgaaactaagcactgagtttgagtaaaacttacagagaggttgttgtcacacagttgaccgatgctgatgagatttgctttgagcccttttacatacaggaaatctgttaactgatctacttcatttagatttacatctcctttgccaacaatctgccctttgttgccatcaccatgtgtcacgactccctccttttcctctttgtaattaactagcaattttttatttccagtcatgtggcgagaacatccactgtcaaaataccactgcccttcaacaaaggcagacagagacagcttcgccaccaatccaacatttggacttggtttagactttattttccattctcgacgaggtttgcgcccttgagatttgtttggttgaggaaaaatatttggtcaattaatcattgctttcaagtagttctgcagtttatagcacttaggacgaatgtgaccttccctgttgcaaaaatgacatgttggaatgaatttgtcattttgtggcagatttcctacatcaatccttcttccttcaaactttagtttagtgggtgcagatggaacttgtctcttgttagaggaatctaattcgttaatggtggttgggatgtctggtaacccatcttcctttttggtcagatcgacatttgaggggagtgaattctcaactgacaggt

SEQ ID NO: 22229 - DNA, 2472 bp, Cannabis sativa
aactgaatcacaaatacaacaagccttctcacagcttaacttaaaagagacatgaaaagccagccactacactaactttttcccttcttaagagatatgtttattcagaacaatgatactttaaagtaagttgtcaaaaaaataacaaacaaattagctgaaaataagctgcctgtcttgtctttatttgacttttatgaatgtaaactttacaatctgtccaggtgatggaaacattttgcgtataagaaacacatcaaatgtagcagtcaaataaaaagaatgggaacgccaaaaacatagtcagtgcatgctagtctggtcatgtttgtcattattttatattcactaagaaacaagaccatttgtctctttgaagacgttcaacaacctcacaagaaagaatttaatgaacacatcaactacataggagtctatcccaagcaaaaaataaggctgtgcaataaaatatgcaaacaccaaaaggaaacgggggaccttatgaatattcacataccttaacatttaggtaatcacaaatggcatccagaataaattgaatctcatcttcatgtggttcaggaagcaaagtaatggaagtgttagaatctgtggtgccagcaatagttcggcccagccatggcagcataaaaacaacacgaccatctttggtcttaggaacaatcaaacccattccttcaggtgaataataatcagggagaacaatatgcacaccgctacttggacagatcataggccgtgcctctttgtcagccaaatttctgacagagtcacaaaatggtccggcagcattcacaatgactttagcatatgtatcaaactcttgacctggttcactcaagaaagtaagaacttttaacaggagtaatggaaacagaaattaattctaaaatgtggaaaatatatgtgatgatgtacttcaatatgagacctattcaagtaccacttttcaaatgggcagtcactgtacctgttagattgtttctaattcttgcaccaactatccggttgctaacttcatccttcaaaaacgacactacttctgcatggttgagcacagctcccccagccaatgcagcagtacaggccaaaccaacattgagccgagagtcattcatttgtccatcataatacaccactgtgcccttcaagcttttatctttgcctttccttgcaagtgtggggaatagctcaacagactcttgtgcagaataatacctagacaaatgtaaaagtcgtgccccagcgaccaaatcatacaatttcaatccactccagaagtacactacctcaaaccagtcaaaacagggtgtcatgcagggcaaagcatgacaaaggtgtggtgcattctcaataacctgtttacgctcctcaagagcatgaaaaaccagcttcagctgcccatagtcaaaattaaaaacagctttctctaagtatcgaactcctgaaagaaaaaaaatgtgttagtttgcagtctacaaagagaaaaaagatacagaatgaacaaaagtaaaaaaaaaataggacaattacacaatttggaaaagatctacactttaaagctcttcgaaaaaccatccttttgcatagtcaagtatggtgttcaatgaggtcgagcattgttaacatatttgctttatgtgcttttcaaaccccttgtactatatattcactacaagtttcgtttcggaaaaaatacatataatgccttttcactgaaaacaattttcaaaatgttaacaaaataaacgaaaaacaaaggcacaaacgctgaaagcctgaaaggatgaagagaaaactaacatgactaaatcatataactatgacatttcgtctgaaaccccggtaatcgccgactatttaaaagcaatggtatcaatgattatgcccagtaaaatctaaaccatgataaaaaaacggtgatattttccattccattattttacgagtccaatttccaccctgtaatcattatagtgtcaaaaattctagacactcgcaaataatctatcaacagtaaataataaagttattcttttgaaacaaataagagagccaggaaagaaaaacaacgcaattccccccaccccacaaaaaaaaaatacacagagtcaactgatcaattagatgaaacaaagatataaccgtaagtactatacctccgtgtataagcttagtagagcgcgaagaagttccagaagcgaaatcctcgcgctcgacgaggccgacgcggaggcccctggtgacagcatccaatgcgacacccgaacctgtggcaccacccccaatcaccagaacgtccaaaggattggcagagctggctccgattagagccgactcctgaaccgacctcggaggaacgacagcattcgaatcggcgatcttctgtctgacagtggcgagtgccggaccaccaccacgatcgttaacggcgaacgaaggctgattgaa

SEQ ID NO: 22230 - DNA, 3026 bp, Cannabis sativa
gggatggctcctaataacctgcaacataaagtgaaaaatgtcaggagtatagaagactcatctaacaaagagaaccacaataatcaaaacatttgctggattaatgcaaagagcacaagaattaagaattaatataaggaaaaaaaatgcacacatggaaacgggaacaaaaaaaacaaaggcttcccaaatgttttccacttaagtaactatatcaagctagaccaaacaggagcgaaggacaaacctggtacattttgggctgagtgaaagacggctcatcaatctcattatgcccaaacctcctgtaacagactaaatcaacaacaacatcagaatggaaagtctggcgccactctgctgcaagctcgcaaacatgaacaactgcttccatgtcatcaccatttacatgaaatataggagcatccagggcttttgcaacatcagtgcagtactgcgaagatctcccagacattggatcggttgtaaaggcaacttggttgtttattacaagatgaatggtcccaccagtggtgtagttcggaagggcgctaagatgaagagtttcgtagacaacaccttgtccagcaaaactaccatctccatgaatcaacacacccatgttcttagttctgtcaacatcatttgagtaatattgttttgctctagtttttccaacaacaactgggtccgcagcttccaaatgacttggatttgcaaccaaagacaaatgaattcttttcccacctcttgtaggccgatcataagaagttcccaagtggtacttaacatcaccagtacctgtgtaaagcccaacctcgtcgacaggctttatgccaccactaaattcactaaatatttgacgaagaggctttcgaacgacattacccaatacattaagtcttcctctatgagacattcccataacaatgctctcaaccccaagatctgctgccctgtcaaacatctccttcataccaggaatcaaagtctctgcaccttcaagcccaaatctcttggctgttgtccacttagtggccaagaaattctcaaactgtgtactccatataagtctatcaagaataacttcccgccgctgcctattgtattgcatctgggttggagtttcaatcttatctctcaaccagttacacttttcgcgatcagcaatgtgcatgtactcaaatccaatagtcccacaataagcctgctcaaggcgggtcaaaattgatctaagtgtttgtactggacgattctcagacaaaaacccagccatcttccacacccctaaaaagaactccctatcaagatcagcttctgagaaaccataaagggcagggtccaaatcacttgggatttctcgttgttctagagccaaaggatccaacttggctttcatgtgcccatttacttgataagctctcacaagtaacagcaatcgcatactctcttgaattgtttggcctgaaattccaggggaggtagaagcctgacccacaaaatttttaaagaagttgtcccaagactcatcgacgctattcgggtcagcttcccaagccctttgaagctcttccaaatacacactgctagttccatctaagaagctatcggttaacctagacagcggcacaggacgaggcacgggtgcagcctgagccttagacttaaacactgtggtatgaaaataacgattctgggagggaacaactcgtgctcttgcgacatatgaaccaccctgcaatatagttcttctaatggcaagctttgccaaactagtcccagctctaaaccacgccattatgtatatcgatgatcagctacaaaaacatctatgtaatattccttctgctagaaacatatcctattcaaaaatcaaacaaactaataaggagtcaaactcgaaagaaatatacacatacatagattagattagataagataaaagctagattaaaaatgttgtaaatgagactaaaaatggaatacctaaaagcgagattagataagataaaggcttcaattatttgctgcgagatatagggtttgagatttggaatgagacatgggagggatgagagagtccattagcgggaggagagtggctggaattggaaggtcgggaaaggcttattactctcagattttgaagcaaagtgggttcgatcaaggggtcaacaatatcggacggtgcccagccaagttcaatgcggttagtatgttcgattgtggctttgttgggggtttagagttctgtagagtttgcaggtttgatcgtgggagagagatcgtgagacagagcctactattcatattctttaacggaagagttaacttccgttagcttttacaaagagaaaaataaaacgttaaagtatcaccgttaaaccaacaaaatgtgttagatataaagatattattatttttggtacgtaacagtggtctcttagcattagcaaaccataatccaatgttgtattttacatgtttcctattttggtagggtgtggatgaaacagaatccaatgatgtattttacatgtttcccattttgttttatcctttaaataatttattttgttttgaaaagaaattttattattttaatttagggacttacatggtgcttcaatttagttgcattttattgtaattggagttatcccccaataaatttgattttcattttttttgtttcttcgctatcgaataacttatattatagaaagatttgtagaaagtctttaaaatatcccataaaaaaataggggcttcaaaacttatagtttaggggtgcgcatgtttggaaccctatacaagagcacgcaatttctcagggctcgtttcgtcaagctccgcttgctacttttcattttgttaggagtaggtgcttgctgctagggttgttcattggaccacattcaatgttttagacacatccaggtccaatccaattatatattggatattggatttctccaaccgatccaatccaatgctatatactcaaccgaaccgatccaataaat

SEQ ID NO: 22231 - DNA, 3657 bp, Cannabis sativa
gtattggggccaaagatcattgttcaagatagttgggcagattgggaagccaattatgttagataatgttacaaaggaaagagaaaggttgagatatgctagagtgctcattgaggttttgatggatcagcccttgcccgatatggtagaatttgagaatgaatttggttggattacttcagttgggattagatatgaatggaaaccggtattgtgctcacattgtcaaggtgttgggcatcttgctgttgactgcaagaaaaaaactgctggtgtacaacagtgggtaataaagaaagacaataggagacaagagaagcaggtagatagtgaaggctttacaaaagttgttagcaacaggaaaaagaatgataacaacacttcagtaccagcagaatcaacagtgacatccgtgcaaaatgtttttcaggttcttgatgaacaagatgaggctgctaaaataggggagatttatgcagatttggttgaaacaggaggggggaggtcctctctctctaatggatagacttctatgttggaatgtgagaggagccaacaatcaacacaaacaacaattaataaagcaatttattaattcccaaaaggttgattttgttgggcttcttgagactagagtcaaggctccaaaacttggtaccttgtactcgaatgtatttcaaaattggtgttttccttctaatattgcttggcatgaaggtggtaagattgctattgcttggaacccttggaggttcactgtggacatcctcaaatgcactagccaacttatgcatttaaagttgtcaacagttgaaggtttttgcagttttttaacccttgtttatgcttaaaataacaggggtgagagaaggatgttatggaaagatttgatgggcttgaacactactgataactggtttctaatgggggatttcaatgacatcctctcaaaggaagaaagagtggggcacagagtcaaattttaccccgataatgagttcttgcattgtgtaaactcatgtcagttggaggacattaagactagtggaaacttcttcacttggtctaataaacaacatggtgatgagaggattttttccaagattgatcgagtacttgccaaccaaacttggattgacaaatataatcgagcagaggcagtttttctaagcgaagggctctttgatcatactcctgtgatcttatctcttcatctagaagtagtaagtggaaggaagccattcaaatactttgagatgcggaaatcacatccaaagtatgagagtggtttgaaagaggtttgggatagacctattgctggcacaaaaatgtttcaagttgtctctaagatgaaacaactcaaacacaagctgaaagagattaacaaggagggctttcatgatttgcaggctgctgtaactagaaacaagctggatttagatactttgcagcaccagattcatcaaaatccttctgattttcagctgcattcccgagagaaagaagccagagagaagttaagtaagtctcaaagggattatgcatccttcctccaacagaaagctaaagctgcttggttacagagtggagattgtaatacagccctatttcatgcatgtataaaacaaagacagcggcaaaatagaattttatccattgaaaagcttgatgggagcaagattcatgaaccttctaagagagcagatgctttcctggaattttataatagcttacttggcaccagaatggaaaatagaaggaaaattgagaaaagcatattggctagaggccccatactcactgctgatcatggcagaatgcttactcaacaattcacaagtgatgatgtgaagaaagctattttcagtatacctgggaacaagtcacgtggacctgacggatactcaagcaacttctttcaagataattaggagtatattggtgaggatatcagtgcggctgtgctttcatttttggaatcaggtaatattcttaaagaaatcaactcaactataattaccttggttcctaaatgtaaatgtcctaactctgttaaggattttagaccaattgtttgctgcaatgttatctataagattgcaacaaagctcttgagttctagaatcagtaacattcttcctattataatatgtcacttccaaggaggttttataaaaggaagatgtatagggcataacattatgatttgccaagatctggtaagacattatggaaggaaagcgaacaaacccagttgcatgatcaagtttgatcttcaaaaagcatatgacactattgaatgggaatttattgaggaagtgttaacaggcttgaatttccctcaaagcttcatcagattagttatgagctgcatatctacccctaagttctctcttatgttcaatggagcattgcatggtttctttgaatttaagagagggcttagacaaggggaccccatgtcccctttgttgtttgtcctaggtatggaatatctgtctcgattaatggggaagattggagacaaagaggatttttattttcatgacagatgtgctagtctcaaattgaaccatctggcctttgcggatgatgttcttttgttttgccatggtgatctcaaaagtgtgatgtatatgttacaggctttgaagcttttctctatcacatctggccttcatcctaatccaagtaaaactgcaatttattgtagcaacatggatcaaagatgtgtaaacaagatcttgcagctttcaggatacatgaggcagaatcttcctttcacttatctgggtattcccatttgtgcaaagaagatatcagggaaggaatgtgaaattctagcagagaaaatgacggctagaatcaggagctggagttctaggaatctctcctttgtagggcgaatcacattgatcaactcagttcttatagccatccaagcctattggagtcaaatagtgattttgccaaagaaagttctgaaggcaattgaatccatttgtagagcattcgtatagaaagggcaagccatgtttcacggtgcaggagctgtagcttgggacagagtgtgccaaccaaaagctgaagggggattaggtatcaaaaagttggaagaatggaacaaggcagccatgagtaagtatgtgtgggctatctcgagccaccaagagagtctttggcttagatgggttcatagtgtctacatcaaagatcaaaattggcggagttacaatgcttctatccatgcgagttggtattggaagaagcttgtaaccatcaagaatcaacttaccaacttaaccgactgtgactcattttagcaaggaagatatacaatagtattcggctataatctgtttactaccccacagccaagagtgaaatggtgtaaggaggtttgggcacggttgaacacaccaaaacatagtgtgattctttggttagcaatgcttaaccggctgaaaacaaaatagaggttgaaaaagtatggcatcttatcacaagaccactgcagtttatgtgtctctaacatggaaaataagcagcatttattttttgattgttgtttatcttcttactgctttgatgaaatcaaacattggcttgattgaaaggcaaaaaccaggtctcttcctcaactggttcggtggattg

SEQ ID NO: 22232 - DNA, 1628 bp, Cannabis sativa
catgatttaataatagtaaaaattcaattagaagatattctaaattaaaagcctaaaaataaaataaaaatctttacaaacacacaatatataatattagtgtaatgattctctaataagagaataacaatcactatattttttaaagtggtgggattatacatattagtatgatagaatcaaatcatgtttaatgatagtgttattacatgattaaataatttaagaatctaatgcttattttcacacaatttcacctaaaaaaaatcacccaatataaaagaattagataattagtgcttttctgatcatataattctctgcacccaactaattaacttttttttttcttctaattcattttccaacttcatgggaaaatgaaaagaaccctttagaaggaacatatatagagtatagtatcctaatgaaatagggttctttttaccttaatatgattttctttttgtgtaattaatagagctttataggaaattcataatcgatacttttgaaccatatagataagcattttttgtgaataatggcaggcccaagactaaaattgagaagcgagtattttttttctcttaagagagaggtaacatgtcttcttcgagacatgaaaaatctccaaaatgcactatttgtggcaatgtcaatcttctattgaattaaagttttattttttcatttcatattcattaatcaattacatattaatttataagttgtacacaccacttacaattactaataaatttctaataagtccttacattatttttttcatagtgtaacagaggcgtgtttattttctacataatataatattccaaaaattaatataattttatatttttataatattaaatatttttgaagtagaaaaaaaaaagaaaaataaaggatttgacatttcaatgcttaaatactaactgcatgttttattgttaggagtaatacattttttaaaagtaaactttaaatattaaaaacaaaaatatttagttggaatttaaaccttgttctctctagtatataaaaatgtatggtaatttaactactagaatttcaagagagaaaaaaggctaaaattatgttaataaataggaaaattataaattttttaacatttttttgttgttcaaatttacggtttgagtttttaaatagcaataaggatttctatacgattttttgttgcaatttaggttgcagcgctagatgtaataaaggtttctaaatagttgcagcgctagttgcaataaggatttctatacgattttttgttgcaatttattagattgcagcgctagttgtaataagggtttttacgtaaaattttgtaaaaatgcaaaaaaaaaatgttttaaaattgtaaaaatgaaaaagcctctaataaatatatgttactacaaataactaaaaaaaatatatttctaatttttttaagagaataatcgtgtgggtcagcccatagttgtaaacatgcaaattgtccccaattaggtttgattagtaatttttttgaacaaatatgaattaccatataatatatatacaaaacctttttttatccttaattaatgttaatattaaggctaattagtaattttctccccgaa

SEQ ID NO: 22233 - DNA, 2059 bp, Cannabis sativa
atatatataggcaaatatgagtgttgctggcaagaagttagttaggacaggcaaaagttagttgtaatttaggagaagtagggtctatttggctgagcttctgccttttgcttttagcttctcaggaagttcttcttgagttcccgagaaagttgcataaaactgactttttttaaaagagctttttagaattaaaagttgaaactcattggttactcaatcagcagcagaagtatttttggagcttcagaagttcaaaagtaatttttaaaagctcagccaaccagtgtcgtaattccaacactttggattgtgaaaagtgctcaaatatccaatcttattcaatctgatggggttcatgtaaattatagggtagaagtagtaaagttttgatctgtgcaatattaactagtttgagttacctttgttccttcaaattataataattattttcttacaagtggctgtgtttgtttcttgttttcgacagtgacatacctatggcacaattcataatcaatatgaatgctgccttgcctgcatcgcagaagtttataatacatgttttggacaatactcatctgtttgtgcaaccccatgcagctgaaatgattagaagtgctgttcaagagtttagggaccagaactcatacgagaagcctaactaaaacattgtttagtaatccaaagcaagcattagtctcttttcttagtactgtatggttcaactttttttttaagcaatgaatgtatcattgaataactaaatcatgttcgacaacctaatatcatctaaaaatttaagaatcccaaatccaatatgaaaagtccccaaatcacacaacttgttcatccattcaaagattatacgctgttaatgcagtcacattggtcgtccgacaaacatgaaaatctagacaacataattgcaacacaataatcaaagatcattaaaaaaggtatgtttcttataaaaagatcgttgctaggttatgtttcaactacttgagtagaaagtcttaaagaaagaatcttagaaagtcttaaagaaagaatctaatccaatgctaacaagagtcacgcattccgcttgaatcacagtaaagctaagtataaaacacaaatatgtcaatattagtaagaaactaagagcactcccaagagatacaaatttatcaaaagtatggcatgtaatagatgttcttacataaatttttagagcaataaatagtattgttatatgtgtagaatagtactattcattgttctaaacttatttatataaaagttcgttgtaaaataaataaagtagattttagtgatatattttaaaagatagagaaaagaatattgaaaatgcttatgaaatacaatttagtttatataataaaccatgtgtggtgtagtggtagggatgtctttattgacattattttttgcttgggtaaatggttcaaatcctaccatagtccctcagtgggaggaattatgtttggctctttgagagactagcttgttgtgaaagtgtcatccttaatggaatgagaaccctcgagaggtacacgacccggactaggaccccagactcgacacagaccttggactcaaccccgaccccagttcggactcggaccctgcctcgaactcgaaccgctcctagtctcgaccttagactcaaatctagactcggacctcggcccaaaatccgacttaaataaaattaacaaataaaaataaaaataaaatttacaaatcacatttttatatttacttttaaaattagaaaaaacaaaaattattataaaatacatttctattttttacaaataaaattttaaaaacaaaaatttcacttttatattgccagtccgtggagaagatacgaaatgatatgcctttgaattaatctttctatcaaatcccaaaccgtaacagagcagaggagactagcgctaaacatagtgccgctttcattccattctatctcattccttcatttctgctccgacactgacagtcctctcttctccgacctcatcttcaatctcaattgggggag

SEQ ID NO: 22234 - DNA, 6110 bp, Cannabis sativa
aaaatagaaaagaaaaaacatatagtcgaaaaagtttggagagagtaataatgagggaaaagagaaggttcgctttctttgcagaaaaagaaacagtggactgtgttagtcttcaacttcaattcttatgacttctgttctcttatcaactccattaactttgtacaacatacatattttatatgcatgttatttactatattttgtcctcacactccttaaaaagatgatactacatgtgaatgatattcataatttatcctttctttcttaaccccaccagcacaaatatagtctaagtaattacaatatcgttactaaccaaaaactatacataggagtttaatcagtaaatatgttgtataattatttttggccataagaatacttttttgtctccctcaaggttggttcgggctggcctttgtaattgaattttcgtaataatgtaaagctctctctatcattactcctaaaacaataaaaacaaaaagctagagcctagctatcacctcttatatttttccttttacttttcatcttttagaatataaatgttcaatgcgtttgcataactcagtacaactctaataataaatattggtattaaatcaacacaaaattaatagaattttaatattaattttttttattccaatcacaacattaaaattatattttttttattattatattattttattaaattataaataaatgcaaataatatatatataaaaaatttacttataaatattaaaaaccaataaaaatatatttgatgtaatttatagtgtcatacttatattaaaggacactataaataatgttatgtataggataagttttaaaatgttgttagaatgaaatcttaacaaatttaacattttaatgtttgattggagttgagcgagcatctatatgcataaattaatttttatttatactatttcattaccctcaatttactttttattccttttccattttataatattacaaccaaactttatgagattaaatattaccttatgccatttcaagaaacattaccttatgtcacgactaattttttatgtattaatgaaaaatatataaatgggtaaatattattttggactttgtattttacaaaagttattgattggaatttctattttgttaaatgataaaatagacattgtattttacaaaattataaaaaaaggaccttaagtttaatttttgataatttttttttaatataactaacttaaagataattcttaacacaaacagatatacaaaatataaatagtttttccagttcatggtcctattcgtattattttaaaaaatacaaagtttattttatcatttaataaaacagatgggatatatataaaaatatataaagagatagattaaaaaattatttttaagaagtaaaatataaaatatctaaaaatttatatacaaaatgtgtgtattataaaacgttatggggggacaaaagtaaggcatcatcgttgctgtagtcaagccattttcttgagaggtttctgttgaaagattaaattgagacccactttgttagtactgagcatccccagaccactcctactgaaagttgcccaatattactataaagaagatgccttgcgagttaataatatatcataattaatagtaactataatcggaagacaaagtaagcgcaatgaactattcctccttttgatttttatttccgtataaaagaaagaatttgctcctcctatttcatgctctggttttgttcctctttattttttttttatttttttttttttaaattggtatatgatatttaattaaacttataatataaatactcatagtcctcatatttctgtaacttttttaatatatagtttttgtacatatatcattattaatttttattggaaacttgaataatcatacttatatcttttaaattttaattgggtcatggtggtggcaatcctcgatgaatggtctcttggccgatggtcgtaggttgtgggtggaacgggtggtgcgagaatgggaggagacgcgggtttgggcggcaacaagagagaggaaaagacagagcaagagagagataagagtagtcttgccacatgtataatgtgatctaattttcaagaccaattttatatagagtgttgcttttgctcaatataaatatcgactatatgacaatttttttgagaaaaagttactttttaccaaaacaatcgtttatttaatgtaatgtgagactatgttatgctagacagattttagagttgttaattattagattatttttgtaaaagtatgtgacaaatcttatgtggatgaaagaaaaaaaaatatttttaaattatgtgtgtactttttgcaattataaattgtgagttattagtatatgttttaatattaaatgttctacattttaatttaataaataatataaatattacatcagtttagcaccattgcaccttaacaatgctcgtttttatgtgaaatattgtcatggggcatcaatatgcttacattgtggttttttataaaattaaaataagtgtaacttaatattaaattatatcaataataatattataccttataatataaattattattgtccttttataatttatcttttatgtgataatcatcaccaattagtcattttttaattgtaatttattattcacaattaaaattttagatccatgtacttcaagacaatatatttattaaattttatggtgttaaatttatttatatcattatatggtcgagcataaaagtaccttactcagactcagtcagcttttcttgaaccacatacacgttgccgttggtttatcctcagagacagaatttaattaccttttacgtactaaagcaactgcctccgactgattgcttatatatatatacggacaacggtacaagatcataaagatcatgcctcatactaacaaattaacagaaaaaaaaaaaaaaaaaagaactagattaagactttgttatatatatataagctaagtcaactcctataatcaaatcttattataccctaggactgtatagttatgatccaaacccaaaggccaaaactaattattttttgtaacttgttttataatatttatagtggtgctgtgctgattacatgaaccatataattaaatggtatatagagataatagtatatgtatatatatagaataatttggcatatatatcatctgtttccaaacggcatatttgctgaattcttttgattacccttttactctccagcatagtaaaacattttaaatattctgaacgacataaagaacactaactgcaatgatatatatcatacatgcgatcttcacaatgaatcaaattcagaaatcattgaaatcaagaatccatggctaaaaatgaaagagcgaaaaggtctatatatatgcaatatgaaaaatatttagaaagttctaatatacaattaaaaaaggtctaattaaacaaaccttacccaaaaaaaggcttatacatgacacgattatatagaaaccaagtaataaaacaaaccaattaattaattgtagccaaatgcgagtgtatataaagaaatatttaagtttttgaaacttcatgatcaacgaatttaactatatgtaactaattcgaaaataattaagggttgtttaaaaacttgtataataatgtaagattaaaatatacatatattgataaaagcttactgtcaacaaaaaaaaaactatatatatttaataatatctaagcaggctattaattgtaggctagctttatactttttcttttttttttttttgaaagcactgcctggtagcttttacccatacacataactaaaaaaacgtagggattatggtgaagttaggtagagacagttgtggtatgcattcttcctttggtccgagataagtgccggtcgaaataacgatatcgctaaatccatacatattgctaaaatcaataacaatatcccttgctccatctagctgtctctccctctcttttatttatgtttattgtacgtatttgtatataattaacatacctatcacacgcgttttggttttttcttctcaacagattatacatacatattcacacgcctacactactcattccatattgtagttctacatagactaggtttccagtgcgcatgactacatgcacccatcaattatgtctagatatctatatttaacaatattctctaccaaaagataaatttcaacaaaaactacaagtaacaaattatgcaaaattttagttgtgctagaggttcaaaaaattatcaaaaacgtcaatgagagtcgattcttccttctattgggctttttaattataggatttatagatataagtatataacatttggcacgtagtttaacattttggaaagggatcggaaatgaaagtgacttgacatcaaaagcaccattatatttaaattccaagaaattgaaaatctttctgtgccaaattaattaaaagttacgtacgttagtgctggggacatttcagtctcttgccactcgatcgagattaataacacgcatcatgtgactcacgtttaattaggcacaacatgccaacacaaacagatgtataaactaattaagtgctatataataatccttaatttaattttatttttgtggtttgcatgccattataattttagttgttgtaattatacttattattaattagtcaataatttatattgagagaggttcatagaaatttgtgacctccggccccgtgttaaaccccaccactaaaattgggtctgatgaccagactggctcatagaaatttctcatttaaacaaaggcaatgacttttattttcgtttaaaggagcgcgcgcgcggtagctttcttttataaggaagtgtctagtaatagacatgagttactgttatcataaatgaagacgaagcagcacgtccgtactatctgatttttccttttccttattaattcatcactacatatgtgtgtgaattttactaattatccaaatgggccccctatagctagtttctgattacacgaagttaaaaacaaattaaaaccaaaaccttatctttgaaaaattagatcgttataattcacacacagctctgattaaaaacaaactatagtcatgataatttgttagggaattagtataaatattatatatataaaaaaaaaattaacataattttacagaaagttttattagcaaaatagtcttgcatagtcgtagaaacgaccatatgcgaccataaaggattataaatttatattatgcgtgatcactatagtcacatataataaattaagtgaagtcatttcataaattttcttaagttattatattttttaataagcgcgcgccaatagctacctacctatatttccttatatattgttttatccaatagttgattcacaccgatatggtccaatacatgtatacgtgtatatacatataaacacacatagatccaaaggttgtggaatatccgtacagaaactgtggtagatcgatccgatgagaggtacaaattaatttatgtaataagctaactgcggctgtacgtacataaattttgtttcatcctttttgatcaatcaataatgtacactaaaattagtgagcatgtgaagaatattactgaaaagaaccaagcaatactacgacgctctcgctaggtgctctcacaacgacaagtaaattataatataaaagtaaatgcatggaagcagtactatcatatacataatttatatatattatgaaccattactaatatttcatgaagccacatttattttttgatgtatatatgcatgtgttctagaaaaagatcctaaacacactataaaataataaatgtatatatcccaatttgaatatattacaaaaaattgccagcgcatgtgcggtagaaaaaggttaaaattttatcaatgaataaatggaattttttcaaacgcaactgatcacatttgtattggcaaaacaaatatttacaagctagttatttatatatacaagaaatttgt

SEQ ID NO: 22235 - DNA, 7344 bp, Cannabis sativa
  modified_base (6018)..(6019): a, c, t, g, unknown or other
agggcataaaacccaacatatggcacctttgtcatatccactaacacaagacttgagagtacagtgtcactgagatcgaatccatgttgcttgcctctgaatcaagaattgagaagactgacaaggaaacagatctcagtgctaatgtgaccctccatggagtttaattcaccaaaagccaatcttactaacttcggttgcaactctgtaatttcaaatcctctaattttttgaggttctcaaactctccttttcctcagaggaggttttcgaggaggccacactcgtggaggttacaacagctcttagtttcctccccatagattctatgatagagcaactgctactcattttggttgtggacaagcaagagctcttgttacaactagcaaaccacagtgtcaacgatgcctcaagattggtcatacttagaagcttcaaatgagtatttccttatctgacaagctcatctggatcaacttagaatggcatagctcaggctaatctcattgccactcaaaacatacaaatccaaactggcatcccaattcaggagctacaaatcattgtactcctgatgcctatcatatgtccacaggtgctgagtatgattgtctagcgaagatatttgtagaaaatgaacacatttgtcaataaagcatgttggtcagtccttcttttccactcccaactcttcctaatctttcttacttaataatattttaaatgtccctaaaattaataaaaatttgctaagtgtttccaaatttgctaaagataacagtgaatttttttaatttcacgatgatatttgctttgtcaaggacaaggagacccattctactctgctgatggggacacatcaaaatggcctatattattcaattgatgcctctcagatctagttcttgtcccaacgctgttagtacccatgttgctcaagctgaagctaacacttgctcaaactgctatacgagtaaattctatgattttgtaatctagcacaatagactaggccacccctttgtcagggttgttcaatctgttctctctcgttgtaacatgcatatttgagagaataataacaacaaagtttgctcaacttgttgccttggtaaaattcataaattacctttcccaaaagcttctctcactgagtacagtgcactcttacagttagttgtctctgatttataggatcattcccatactctttcctcaaatggatataaatactatgtttattttgtagatgtgtattctaggttcacttggttgtatctatttaagaataagttaaatgttgataggatttcctatcattttgggtacaacaagtagcaagatagaagaaaatagagccaaacagtgtcaacaatggaaaatagctagtatattgatactagagtgacaaagagaacaagttgctgggtattcgagagacccagctctctcccaagagctataagctcacttaactaaatcattcacacccttaccctccctactcactcatatatatataacatcaatccctctcattacaattacccaattaccctctctatttattaccctaaggtctaacagatgccttaaaagtgtttcaagattttaaagcttttaggacaattgtgtaccttcacaatgcctacacctcttttaagcaacaaatcacctctacaggttatcttttataaaaaaccagattatcaatctcttagaacctttggttgtgcttgttttcccaatataagaccctataacaaacatgagcttgaatttaggtcatcttcttgtacctttctgagtatagtttgaatcataaggggtataaatgtcttgactcaaatggaaggttgtacatatctcgatatataatcttttgatgaaacctcttttccagatgctacaactatttctaacaattctcctccaataaattacaatttagattctcttacctctattgtcatccccaaatctgctagtcacactcatactcccacttttagctttgatagtttgccacaacactccgagtcttctcactccaacacccttatcatcttcttctaatcaacatgcttcacttaacaattcagagtaaattcacatgccttatgcaacaattgaaactaatgaaactgtgaatgttggtgtttctcagaattttaatcccacatgtattgttgtacatggtttggtggatgttgttctagagcaggactttgatacaactacaattgctactcccacacctattcatgttgcaacattagtgcaaaatgtgaattgcccaacctcaaacaatgtgttgaaacttgttcaacaagttatacagggtgttgagacatcctttcatcatcacgagaatgttgcttccacatctaaagtgcacaatttttactctatgtagacaaggggcaattcaggtatctctaaactaagattgtttatggcatctagagttcttgatactcatactgaagctcttctcaatgcccactggaactcaacaatgcaagatgaaatacttaccttgatcaaaaatgctacatggacactggtcaaattaccccattcaaagcaaggcttgtcgtaaaagatttcaaccaacagtcaggctttgattttactgaaacttttagtccagtggtcaagccaataacaattcaagtagtgctaattatggccttagctaaaggatggatggtaagacaactagatatgaataatgtttttctcaatggaacactgtaggaagaagtgtacatgacacaaccctcaggatttgaagttgccactgctcttgattctgtgagcaaattgcacaaagctttgtatggtctcaaacaagccccaaggacctggtttgaaaagttgcatgattgtttgctggatctttctttcacttcttataaatcaaatcagtctctttttaattatcacactaaacagtccattacaatccttgtatatgttgatgccattctggttacaggtagtgattccacaattgtttcttaacttatcaattaccttaatgctaagttctctctaaaagacctaagagaattgaagtattttctaggcatctaggtcaagtacactactaatggaatgcatttctctcaagaaaaatatgcaaaggatcttctctgtaaagctaaaacgcagagtgctaagccttcctcaactcccatgataagaggcttgagattgtctacatatggaagtgatccagttgaagatgtgcaactgtacatgtctatttttggaggtctgcaatatcttactataactagacctgagactgcttatagtgtgaacaaactttgtcaatgcaacatcctcttcagtcacattggattgcaattaaaaggattctcaaatgcattgggggtacattggagtttggattgcacctgacaaaaccttcctcaacaaatcttgtacccttatgtgatgttgattgggctgcagactcagatgatagaaggtccacatctaattttgcaatcttctttggtcgaaacttgattagttggcaatgtaagaaacaacacactgtctccaagtctagcacagaggcagagtaaaggtccttggcaaatgtggtagctgaattaacatggttaaacaacttattttctaagctaagcattgtcttacctagaattctcactgtatggtgtgacaatatgaacataattttgctcactgcaaatcctgttctgtatgctaaaactaaacatttgaacttgatctttacttgttagagagaaagttcagaatagaattgcccaagtgaaacacataccaactgaagaccaaatagcagatggccttacaaaggccatttcaagccaaagatttcattctttcagagacaaacttaaaattgaggatgcctcaattctaagtttgagggggactattgagttagttggtagtggtttgtatgcctgttaaagtttgttagtgaattggttggttacagcctcttccaactgatttagctagctagttatcttccttctttcttgtttcatctttgtataaataagacgatactatttcagtatcaattaatgaagaattcctttttttctctgtctttcttttctttgattcttgattttgttcatcaatggctagaagatttaatagatgataagcccattagctataaatccctaataacacggtaaataactatcaaagcaactcaagtttttataaaaccaataaaaatgataatgtatgcccaaataaaaaaatctaatattcaatgcatagagtaatttcaaattcaaggctagcaagctttatcaaaattagcaggtgagttgtgtcaaggttatttagtgcatgtagattcaatacgcctaagcatagattcattatgtggcaagcagtgaatgaatatttacttactatagataaaatgttgacttgccatatctaattgaattcggctttatgccctatttgtgagcagatggtaattctcacttattcttttattgtagtttttacaactttaaaaccttatccaccttattctctatttttacaactttacgggtcaccttctctgctaaacatacatgacacagttactccgattacttggagttgtcacatttcatcgctttacgagggctatggtagcgtgatcgcacgtgctttctgcattacgtggttacactttgtcaattagtggagctgcttgtaaaaatgagcttatatgtaatagttacccggtgagttacaattaacacaattcatcactttacaatgccaattaattgtgttggtacattttctactcttctaatttggtaaattcttctataatctaataccttttgcgacctatatgatctttcccataagacatcttagacatgttatggccactagtatcccaaaagtccacataaaaccttaacgacctgattgatatctctcataagacctaataaaatatcgatcgaagatcgttactttattaaaccgcagctaaaaacattgatggtttcaaaatattacattttatgggaaagtgaaatagctattccaacaatgtaatatatattcatagttataaaatgggcaatcgacccaaccacaataatctaagtgttgtgcctcattttttggtcttctaatttgataaaaccttctataatctgagtttcgtgcctcatttatttcccaagtaccacccacttgcaatttaataaatccagacatttatactgaattaaagtggctatgtaaaataactagattttgattttattcaatattcatagaaatccaggcatttataccaaatcggagtgactagataattttaaaaataattaaattttgattatatttaatattcataaaaatccaagtatttataccaaatcagagtagctaggtaatttaataggcagataaattttaattttattcaatattcataaaaattcaattgtttataccaaaacgtaatggctagataatttaaaaaacaatcagattttgaatttttatagttttaacattaaatcgaaattaggatcaactgcatataatacgaatgagcaaaacataaaatattgcttctgaattcaataaaaaaaaagacgatggaaaagagataatagaataatagaaaaaaagtaaatgagagacgatgacaaagatggtgaaaaaattgcatgacgttattttatatatataatttatttatccgactcaattgatatattctaactcaactgacagaccgaagtgatcatttttatcgtttaaagaaaacaaaagaagcttatggtataggaagccatactatataatgtcgctttgtgatttgtcatgtgtagccaatcgcaaactgcaccaatacaacacgaaatatgtgccctactatagaattttcctatatacatataaagagtgacatattccttatttcatctcaccttgagaattatatacaaatatatatatatnnatatatatataatatgtatatatgtgcatgtccctctcactactcaatcttttatattatataaagacatgcacccaaaaaaaaagttataattgattcccatctcataaatatatatcatgctcacttttattatatatacttagttatgatcgttattattaaatcttaaaagtcaagaagaacttttattaggagatatatatgatatcaaccttgtccaaaatacttcaattttataattaatgagacatttcatcaaagccaaaagcaagaaaattacttcacacatgaaataattaaggttgcttactttttagtgatcatatatttttaaattaattttattataacattattggaaatttatgtagtacttacagttgttctggtagactctgtaaaaattcttacttttagtccgaataatttgtgattaaaattaaaaaatattataattaattataaataataatttataaattatgattaaaaaatatataattaaatgtattagtcacaaaaattataatttgttgtgactttataatatgtttttagtcacaagacttgttgtgactaaaattaaattagtaataacttgtatttaaatattatgttttagttacaagtaattttttactgtgactaaaagtcatatgtagtcacaaaaaatttacgttgtgactaaaaagttgtcactaaagatagctttttagtgctctatctgtttcgccatccaagagagttttttaatccaatttatttttatgatcgcataagttgtaactatttaagattactcgtaaatttttaaaggattatgaatagtttacaatgtcaaaaataagctttaaacaattacttactatgcttataagaaaaatagttgcatgtgcaacaaaatatgtaattttattttcagtattgtaaattactcaaaaaatttcgaaaatttacaatttgaaaatttacaagtaatcttaaatgactataactacataattataaaaaaaaattaaactaaaatattttgtcgaaacagataaaagatctaccattggttcctaaagggatgtacggtagacttttattattatataatctttttcttttatattttaaaagttacccttcataaaagttcatggtttttttttcttttctttttcagaatgtgtctactttagaaatattcatgtttgaatttcatcaatatagaattattcctttcctatcataatcgattcaagttacatagaatatagtgtatatataataataataaaacatatatattaatatcactatagattcctttgatc

SEQ ID NO: 22236 - DNA, 1559 bp, Cannabis sativa
  modified_base (797)..(803): a, c, t, g, unknown or other
atctaacaaacaatcataataattcatatacaattcttaacgacctaaaaaattagtgcatatatataatttagtacatattaaatactaattagccatatttattttagggttacattctagaatttcctaacagagtattagtgtacctgggattaagaatgaatcatattagaataatataagtcaataattatttttttttaaaaaaaaatggtaggtagtttttttttttttttttttttttgaattcaatggtaggtagtttgaagaaaggtttgtatagatttatgtccaatcaattcattatatcgttggtaaaaggaaaaaaaattataaaacatcagacacgtgatgattttgatggagaggaattgtaggtataataacaaaattccatttaagatttcttaattaattatttgactctatattatttttattatgtgaaggattccaaagatattaaaaacaaaactacatattcttttttatcactgtgagaactatataatctttttatatgagaatttcatatttcgtttcataatcatagaatcatagttttttatattcatgtttcatattaatttctttattctatcattacaaatatattataattttctattttacatcaaacttttacaacaaactatatataagtttcattttttttttctctctatcttctccatattatttaaataatatattatttaatatatatatataatacatataaataaaagaataataagcatttcaaaaaaattattttaaaaattataatattnnnnnnnttctgaaaaaattaataaaaattattaaaaaacttaattaaaatattaagtttacttaaaaaatataaactattcctaaaaaaaatatttttaaaatttattttatttataaacacgtaatttaagaaatcaaacgaaaattattaaaaatccaataaataatttaaacaaactaaatttttttgaagaaacaaatcaagcttatttatatttataaactcatatctcaaaatataaagaaaaataattaaaaattcaataaaaatatagaattatttcaaaaataagttagaaattaaactaaaaaaaagttatgtttacttaaacaaatctagattttttaagagataaaaaaaaaaaaaaagattcaaatttgttcccataaaatttagtttttacaaaaattgaatttttaatatattttttttgtatctaaatggatttttaatttaataaaatataaataatctcttaaatcgtttaattagtattaaagttttaaaattttttaattttcttaatcattcaaaataactttttaagatccaaactaattttttaagatttattaaaaaaaatattgaatatttcttatttttattttaaggggatacgatttgatagttgttaatatttaggtggcaaagtttgtaaattactaatttacaaaaacaagttatcatttaataaaaattaatgagatgaaacctaacaaaaggaaatatgtttctgtaaatgtaaaagttcagggagaat

SEQ ID NO: 22237 - DNA, 3088 bp, Cannabis sativa
aaattaattaataattataatttattgagtttaaaataattagaaaaatcaaaactctaaaatattaatttattttttctgtgttattaagaattaaaaaataaaatttcaaatagatactcactattaaaaaaattacacaaaattattaaaatttaatataattttataattaaattattattaaataagcatgtagttttaaatgtaacaaacggatcatatcatgtgatttctgtattttagaaatatactctcaaatttaaaatcttcttaatattaaaaacaagtgtaataatgctaaatacactcaaattgcagacacttatcactttaatttaaatacttctttacaaataactgtatataactattattctagcaaaaaaaaaaaatatataaataactattaactgccagctataaatgaagtgttgcttcatgaaaacaagtagtaacattcataaggggccagcaattggagttttttcccagtactattatccagaactcaagtatgaagtaatataacatccaatggtacgcacaccatctgaatttttttttactttaccattctagaatccaagatgtggattgttattgacaaacaaacaaaatttagacaatcagacgagctactgccttgacatctagatgtaagaatgattattgcaaaacaagtaaaaactgcctcagaaaaatattctgctcccacaatatttggggagcttttgagccgttaaagcggaaaatccctagtctgaactacctaaggaaggccatgctacaaagagtaaaacagattacagaccccgaaaaattagctccatcttctcctgtcttcctcttcatcaacaggagtgtaccattctggccgacgcttcaagttgcttaacctgtagttcaaaagtacttcctcgttggaaagagctctcgtagccaccaagacaagagttctcagaaagggaacatcagatccagtatttattgaactcccatatttgaaccaaaagctgccaaacctcttcatatttgttgtgtcttctgaacttccaaaaacaacattgggaatataaacccgcatgtccttttcagtcaatgggaagtcataagggcaaatcataacatttggggccacacccttggcagggtggttggcataatgagcaaaagctaatggatttctcctatctacaacatcaccaccataatccactcgttttccttccaaaggcttacttagtagtttccacaacctatccgaacctttctcatcactttgcacattggcgctgatttttggaatggttaaggcattccaaacttcacaggtttcatcccccaaaccccaaggttgagcattgatcacattcccatcatatcttgtgattagatatgggtttttcgcgtcaacccttgggtacccaggaatgtagcggtaataagcaggagagtagactacaccagggtagatggcaaccacattaccaacatcagcttcaccattcaaaaataaaccttgtcctgcttccttgtgaggtatctgggaaggtttgatttcaagtgtgtagcccaaaagatctctgattttctgagacacttcagctcgtcttaatggcttagttttaggtacatctgcactgaaaaatcattatcaacaaccattcaaatatactacaataactagagtaaagagtgccatgttctcgcactgattaattaattggcgctcaccaaaaactttcaatttaattaagtggcctagcctcaattaataatgtccccaaaattcctggaaccaaaataactacgtgcaaaaaatagtagtcctacaagttttataagggctttggtatcatataattggaaaaattgccaataggaacatacctggatgattaattgatgaggtgttcctcccgatagccaaactaaggccactacggccagaagccacatctgaccgttgacgtgattcacttggctcatttctcttatccatgtcaacaagaattttatccattttctcgcaaaagcttttaatttgagaatgaacagtttcttggacaagcttctcctgatcaggaaaagagaatttacttgccatgtctatgatctcatctacatctgcctcttcagcattctttcccaaacgattgaaactgaataaaataaaagatttctggtaaggaaaagtttaagaaaatctaaaatgaacgcaatagaattagaaacatacgaacagtggcattaatttcgtggcaacaaactcagacggacatgatcaaaattaaaacaaacagttacagagcctgaactattaccatatttgtagagagagagagagagagagagttactaaaacaagataattactatagttcagggaagtatttagccacttatcctaaaaataaagcaaaagtacaaacagaaaaggacatccacttgttaaactccttgtcaacaaactaatttatttcctaaaaatcaaatgcttataaattctaaatcacatgatagtacaatagtatacacgcctggcaatgaagacattaatggaaggtaatagctgagaacattgttaacactatatggagtcagatcatggatagagggaattagaaacaaagaaaaaaaaggactaatttaaaagaaattaaattagtagtgaggacagagaactggtggtgaaagtgagtatgtttatggtgagatgcatatataccacggcatatacccatcgtcatttgtttaggcattgaaaggaaggctattgctaatgagtgctgtagtaagatagcccatttttgctggaattttcctgttgtggttgtaaactacataatttgcagatttttttttgttttgttcaatagtgaaaaatattgttcaattacaaaagcaaccaattagttgtgtcttgtgactgggttgaaaatacaactcttaactacaaaacgggttcatatagatagatttcagtacagacgaatcaaagcactaatcacagtaagatgagagtattaattacaaaagatgtttccaccatttaaccatgacagaaacactagtactctaacat

SEQ ID NO: 22238 - DNA, 6294 bp, Cannabis sativa
taatattggaacagccaactcgagctcaacaaatcttggtgttcctcctgggttttctgctgcagatcgaaacagaacaaaaatttatgatacttcaccagttcatttcaatcacactttgtctatcagattgaatgatcacaacttcctattattgaagcaataggtgttggctgccattcgtggaaacagacttctgaagttcatccaagacagtgcaccaccgcctcaatatctcagtgatgcagatcaggctgcacagatccagaaccctgaatttgtggagtgggaggatcaagatcaattgcttgtttcatggctactctcctccatgacttagagtctgctaacgcaatggtaggatgtaatactgcaagacagatatggagtgccctggagaaatatttcacattgcaggtatcatcatatatcttagaattcaggactgagctataaaatctcaagaaagcctcacagtctctcaatgattacctgcttaaagtgaaacaacatgttgatcttcttgcctcagtgggtgaaatgctttcagctcaagatcacatagctgtaatattcaaggggttgccaagtgaatatgatacgttcattatctcctcgaataccagaattgaaggctattcaactgcagaaattgaagccttattacttgcctctcaatcgaggatcgagaagacagatcaagaagttgatctgaatgtgaatcttgcagctactaacactaatttggaaaatcaactctcctatgaagcttttcttgcacattacaatcaaaatttcagtggttcaaatacttctcgagatcagtttccttttaatcctcctccatattcaacaatcaattttcctagttattactataatagagcatctaacactgcattcaactctcaaggtggatcaaataacactaatgctgaatgtgaaagctttagtactcaatcaggggggaggtttccaacaaatcaagccaaacttcagtgctaaatctatcataaaactggacatttggctcttgagtgcttctattggtttgataagagctatacttgtgttcttctcacccttgatggaaccaaatacatgcaagcccacactgctcaaacatctcgaggaactgatcacatgaaatcgtaccctgactcgggtgctaccaatcattgcacatttgatgtgaataacttggtgcagagtactgattacaatggtcaagacaggatatatgttggaaatggatcaggtttggcaattcaacatactggttttactttgtttaagtctccaaattcagataaacctttaattcttaagaatttgctgcacataccagaaattactaagaatctattaagtgtttccaagtttgctatggataatgatgttttctttgaatttcatcctcttgtttgctatgctagaccaaagctataatcctgactaggaccttccacaatggcctatatacttttgatcctgaccaatttcaggtgctccctcagtctccctcatcctgttcagctcccagtcttaaagatcagaaacatgcttgctttgttacctctaatgacagtagtcttaaatctaataacaacatgtatacttagtgtaataagccatgtatgtctaattttgatttgtggaacaataggttaggccatcctagtcaaagaattgttcaatctgtcatgaattcttgtaatatttctgatagtaataaaaactttggctctgtttgtgaagcttgttgtttaggcaaaattcacaaaatgccctttcccaaagtgtctcaaactgtctacacttagccattacaattaattgtatctgatatttggggaccttcacacaccatttcccacaaaggttacaaatactatatgagtttttttttatgcctacactaggttcacttggatatacctactcaaaaataagtctgaagccttaagaacctttcaacattttaaagttgagacagaacttcaaataggtaaaaagattaaaactcagcagacagattgggggggagagtttagatccttcacaaaaccattaagacaaataggcatacttgtcctaccactcatgaacaaaatagccttgttgagagaaaatataggcaaattgttgaacatggcctaagtctccttgctcatgcctcaatgcctttgaaattctgggatgaggctttcagagttgctgtttatctccataatagattaccaacacctgtcttacaacaacaatctcccattgagttgttgttcaatataaaacttgaatacaccaatctgagaacctttggatgcctatgctatcccaagatcaggccttataatagacataagcttgattttagattagctccatgtacctttgttgggtataactaaaatctcaaaggttatacgtgtttagatgcttctggtagactgtacatctctaaggatgtaatttttgatgagtctaagtttccttacaagactactatctccaatacctcatctgcaccaattcacagtcatgaatctttaccttctgccaccattcccaaatcaacccccatatacatagctaagtttctattccctgatgataactcagatgcttctacacgactcctatgttttatcctgctgcaacagctattcaacctacccctgtcccaaatcctatcatctcaacacaagagccaaatagcccatctgtttccacctctgatgaacatatggcaccaattcctagcatacctgtcaccactcccacttcaacattgcctctgcctcaaccatctgttcctactcatgatcctacaacaaacaagtattcaatcaaaacaagagccaaatctgccatctacaaaccaaaagtttatctggccattcaagaaccaactagtgtcaaaatgactatgaaataagaaaaatcgctaaatgcaatgaatgatgaaatgggagctttaaaaaggaatgtcacctgaacatatgttcctctacctgatggtaggacccctattgggtgcaagtgggttacaagattaaactaaaccctgatggggctgttaataagcttaaagctcgacttgttgccaagggatttcatcagcaaccaggtttcaatttcacagagactttaagccctgttgtcaaaccagtgacaatcagaattattctgtctctttctttggcaaagggttggtgcattcaacagctagatattaataatgcatttttaaatggtgatttgaaggaagaggtttacatgtcacagcccctggctttgaattgcctgatgctcctcatctggtacgcaaactaaataaggctatatacggattgaaacaggctccaaaagcatggttcaagaaattgcagcactgtttattgtcctttggatttgtttcctctaaatctgattacagtctctttattcaacatacatccaagtctgtgattctcatcttggtgtatgttgatgattatatcatcactggtagtgatgctgaacaggtttcttcactgattcaggctctagacaacaaattttctctaaaaaatcttggcaacctccattatttccttggtatagaagttcaacacactgattctggcctacatctttcttaaggaaagtacattaaagatttattatgcagagctcaaatgcaagatgccaaaccagctcctacatcaatgacaagtggtttgaaactttcagcatatcaaggtgatcctattgacaatccacaacactacaggtctattgttggtgctcttcaatatctcaccattactaaacctgaaatatcatatagtgtgaataaagtctgtcaattcatggccaatcctcttcatcatcactggaatgcaatgaaaagaattctcagatatctaagtggaaatgtgtctcatggtttaacacttcaaaagcccactaaacttgatgttactgcattctgtgttgcagactaggctagtaaccccgatgatcgaaggtccacttttggtttttcaatatttctgggatcaaatcgtgtggcatgacagtgcaagaaacaacatacagtttccaaatcaagcacaaaagctgaatacaggagtcttgctcaagttgtctctgaaattacatggatgcactctctgtttactgagctcacaattcagcttccaagaactcatgttatctggtgtgataacttaagcaccattcttttaacagttaatcctgtacttcatgcccgtactaagcatattgagctgaacctgtattttgttcgagagaagcttactaaaaaaatggttagtattcaacatgtccctgcagctgatcaagttgctgattggctcacaaaggccacctccactgctcgattttctctgtttaagaacaaacttggtattagtcccagcaccaattccaagcttgagggggagtgtcaagacagttagttataactatttcggttataactattttggttgtttgttattgttgttggcttttctgttttccaactgccttggcctttacttgtatataaactcttgtagctctctcgttcaaagtaatgcaatagcaatctttctcagcttcttcttcttctcttttctctcttctttcagctcaattctttctctcttactttcagtcttttctttcttgtttctttagtgttcttcaacaatggctagaaagagttctaaccttaacacatataatatattacagattttataattaaattttagagtccttcttctataggaccattaaaaattacctcataaatagagttatttttcaaccaatatcttagtgccctattttagttggcttcgcaaatgaaaatataggggttgttagagagtttcacattgataatctatgaaaactaaatatcatacataaaatgcatagactactcatttaattaccaattggttttgagatggaacaccacacaccttaccatacactcacctaatcctactttctaaaccacacacatcgattgatccactttttttttcaattgtgattaccattagttcttgttcttctcatctccatcagcttcaaaatttttttaagcttcttaatcttctatttcagtttttttttgtgcgtgttcaatctcagatatcaattttttaattttgttcatcactccctaattttgttaaatatatgtattgttcttctgtacatgctattcggtgtttagtattatatacttgatttttatgcgttaacgattagttttggttgttctgaattgttttttattttaatgtaattatggtaaggggaaattttccaaggtgaaggttctctctcgtgatgttatgatagtttccattggcaaaaagagttattgatgtatagttttttttttattattattttatttagttattttattttgcagttttacagttgttttagtaattttttcatgttattgtttcagagttgaaattttaaatacttacgttctaactggaaaatagttattttccaatagttctagacttctagtgttgctctggtagttcggtccgtaggtgtttagatggaggcttcgtatgtattttggggtgtgtacagtataaatgaaaaaaatttaaagtatgaatagtatttttgtaaaaaaatttatgtaacagtaaaaatgtaaaagtgcctccaaaatctagcattcttataaaattacattgtatacccactttactttcatgttttaatttttacctttatttttatattctttaaaatatacccacttttatagatgatgtccccattatatccttatgttaatgtaaattatgtgttagacttaaaaagagggtgagggtgtaccaacccactcataaaagtggatatattttaatgaaatatattttaaaagtatttttgattaatagatataaaaaaaggtatttatcaacttatctcaatttttttccctgaatatccatatttcttatgggctaattagaataataacgcaacactggactactcatagttttgtaaacaaaaaagcctagcccaaatgactagattagttagaagcttgtataagcaaattagaaacaacgtactgccagttatttgatttgtttttcaaaattcatgcaaaacaaaaaaataaataaggaataattacagtacagttttgtaaatcttttttcaattttttgtttaaagatttttttttatatatatttttacagtttttttataaaaacaataaaaaaaatatatatatat

SEQ ID NO: 22239 - DNA, 3686 bp, Cannabis sativa
cttcgtgcatattttgattccaagtggaggttccttctaatctgtctaataccctcaaccttccttccagcgcgttctttgtgatcttattttgtccaaatgtggatttactccactccttcaccttcccttgagttattttcaattttttcatgaactttgtacctggccacccagttgtaacttcctgcttccaccaactttcaaaacacttagagaacatattgtgttcgagccaatgattatcaaaccggaacggaccaggtccccacttgggaggatttgaatcaattaccacaggactatgatctgaaactaacctaaccaacatttcttgtctcacaaacggataatagacgttccatttgtttgtgaaaagaaatctatccaatctgcaacaaataggatttgctctgaagttcgaccacgtgaagcacccgttttccatcttgggatcaattagctgtagctctcgtatcaggccatcaaaaagcttcatactcttagtacacgagctgctgtttagtttctcccccactcttctggttacattaaagtctccccctacacaccatgactctccacatattgcgcttaaccctgctagttcatcccaaaattcaggtcgaagattgtatgaacacgggccataaacccccgagaaccaccaaggatctttaccttctgcatttatcaaaactgagatcgaaaaatcaccaactagagaatctgtgaccgaaatggtcctagtatcccatattagtaacgttccccctgacctccctatggctgggataagtatccaagctttaaatctggatctccatatactaccaatgaaccttctgtccaccattgctctcttgacttcctgcagtattaccatatctggattagctttgcaaatagtagctttgatagccgatcttttccctttattcccactgcctcttatgttccatgaaagaatcttcataaggacccttttgttacccccaatttattggaacttttctcataattcacattgaaggtcagcttgttcagttctctgcatttcttcctcaaccttttgacctcttctgacttctgatcatcctcttcattcttttgcgtaacttccattcccatctccgccatagagtcgactatttttgaccaagaaagtgcaacattcgtgatcttattatcaatacttaatttctccttctctaatggctgacttgaaaaatcttcctcccttccattccacaattctttaatgttgcatacgatatcatcctgttcttcgatatcttcttggtctgttacttcttccccttctgaatcctcttcctctgaactcccatctaaaaactcaatttcctttggatcatcaaaaaattcctcgagctcaagttgcagattttcatcgctgtaatggtatatactttcattaacatctgcttttcttttcctgttatacaccttttttatttctggcctaaatttcttttcaggctccactttctcttcaacttgtagtactgagtcccgagcctctcttttttccatcacaacctcttcccaaaatgaaataatcgcccttttgaactgctctcgagctttggggtggattgaacgaagtctaccttggaaaaagtcatgcaatatttgttgggggtttttctttctgtacagagcgttcagctcttgtctagtcccagtgaaattatttaaggcctgccttttctttagaaaaccttgaggatcatcatttttcctgtccagaataatattgaaagggcccttgcgaagataacgaagccccccaagatgaatgacaaaggccggcccactccatggtaatacctccctacccgatcttctctcagaattgaaaacattaactccctgcccatgattgtactggcccaaactcataacaggggcaatatcagttcggcccacaacacccaggcccaaaagacttgattttttaaaaaaaggatggtatttctcaccataaatgatgaccatattatcattagggtttttacatacacgtggctcccaaaggctcttccacagtcgattgaagattaaatagagactgaccacattcctttggtcgtgcgatttgggaaacgtacattcccttgattcgagacaagacaggcggctttcatcctcaatcgccgcatcacctacagtactcattaaagtttgtttcggactctgcgctgtaaattgctcctcaaccacctccgccgccctatccccaacaatactcaccctctccggcaccggtgataccatctcggacggacccagctcccttgattgctcttctcccttgttaatcacctcttctaaatcatcgtttttcttttttcctttttctgctgctactgtagttgtcacttcttcctctgttccatctctttcatttgtttcatctatccttccttccttcccaagcccttcctcatcaccagccattctcccatggtcaaaatcttgataccaacaagtgttaaagctgccatggaatctgtaacttaagtcattaagtttaaaaagcttgagttcgaaactcatattatcatgacataaggttacagattcaggaacgaaaccaaaagtatcacccatcagttgtagtcttaagtgagataagacacaagcctcagccgtgtccttgtccacatccagcagtccaccacataaatccccaatcttcctgaatatcctcatgttccaaagatgcaggggcaagccttgaaccccaatccaagaacctctgcattccacctttggattatccttttggttttcccagctccacgaaagaaaggtaacaaaggattgagcccctgggactctcatacgtcgtatctttgtgagttcatccctttccatctcattcttgcaccaaataatgcatttgtcatcgtacaattggctaaccacccacttcctcttcaattctctagacagattatagaagatagtgcaccaatccgcatgagtgttatcccgtgtgagaataattgccaagctccagtctctaggaagagctttagaacgcatatattcaaagaattttggttgtttgaatctcttcaaagggtaatggttctttggtttgaagccaggattaatttctggatacaagtctttccattcgattattccttcatcacgggacaaaggtattgctttagctgacccctggttatgatggctgctcctccctggtttcgccgctggtttcactgtttgtttcacgatattggcccaagattggatagttgtggactcccgcgccttctgctcttctctttgactgctactccggtccgaggttactgtcacccgcctctttacaatcccactgagacactcctttaactctaaccagcccttcgcaccctcttcttcaggcacaatgattgtcttaagtttgttgtctttcagcacagaaattttcagaaaagaacctttgttattagcgtagcactccaagaggcagcttgcaacactattccggaaggatcgtttaaggttgactctttgtgcccctggtttctgttgaatctcctccaaagtgtcaataatccagtctgctgcgtcaatggttacggtaacttcgtatccaaacaatcttgttctttcgcaaatacgaactgctcccccatcgtacg

SEQ ID NO: 22240 - DNA, 4266 bp, Cannabis sativa
  modified_base (3900)..(3908): a, c, t, g, unknown or other
cctccctttcccaaaccctttcctccttttcctcttcctgacattttcggtttctttctttctctgcaaattggcgtgtaaattagtgcggttgagattggtgatgacgataagactatttgtagatgtagatgatatgaggcttcaccgttggattagagagcgatccgcgtatacatgaagtttgacttgtcagccgttcgatttaatataagagcatttgattggtggaaatcgttataagcggattcggaaatatttgaaatctatggctggcgggaacttacatttttagtggtttttttttagcacttttggttgttctacatatttattttcctgatattttttgttttattttattacatggtatttttgttgttttagatgagtattaaatttttctttttgagaaaagttctgttatcattaattggaagcgtcatttacaacaatagaaaaaagagtaggagagcaatcctcataccacgtacaatcattatccaatactaatgcttgttttgccaagccatgagcagcttgatttgtatctcttcgaacgtgagacacacaaacattagggaaataggacaattgatttctaacatcagaaataagatcagaaaaacctaaatttctagatgctaaactttttaaactagtaactaacagtaggcaatactccacaaaatctagattaacatgcaaagagtgagcccattggagaccataatagagagctttagcctccatttcatgaggtttcaaagatccaggcattggcttagataaagcagctttaacatgcccccaagaatcccttataattgctccaaaccccattgtattttttttatagttttaagttaatattaaaagttaggtgtgtaattagatatttaattaaaaaattaatccaatctaattagtaattagattagattttgaggtttaattggattggatcggatcatgatttttcaaatctaattaccaaatgaatttgatcaaataagtaaaaaaatattagaatgaatcggatgtccaaccctacttagggcactcacaataacttctctaaatagagaagttttaaaaatgagattctttcacaaaaacaacaaaaaaattacaaaaatacgatttcacaaaattttaaacatttttacgattttcttgattttatttacaaaaaatatggtcttcttatgttgtaatcttgttaatttgttgttgattttttattatctgtatgttattatttgttgttattttgatgttacttttatgtagttttcttgttaattttatgttattttttagaaaaccataaaaatgtaaaaaaaaataaaaaaatcattcttttaacgtaaaaatgtaaatattttacaaaaaattgtgccttatgtaattattcctttaaaaatttaaagaactgtattaaaaatatgctatagtgaatgctttaaacttcttcttcattttaaaatttctttaaaatatattattcatgctctacataataatattatttattgctctaaacatattttattgattattttttattttaataattatttttgtatggatatatgtgtacatattaatattatatatttgaacagaataaaatataataaaactttaaaaattaaatttttgtgatgtattttaaagaagctgatttatgatgtaatataaaagtgtgttataaaatagagaaaataaagtttggctaaacgagttcaaatggaagagtactcatttcagtgggagcactaatcatagatataaaatctataacttttataatcacgtagaagtgaaacaataatttctttagagtttggctaaactagtttaaatagtggagtattcatttgagtgattatattagtttactgaaatatcatttataagtaactaagtattttaatgataaaatacattgaatagtaaaacggtttgtttctccctacttgatgtaaatcatccatatagtatcattgattgtttagcttgtaacaatagataatttatattatatctatactacttggtataaaatattttatgtaatcaatagtgcaattttgaatctatagtggagtcatgaggaattgataagataaagaatttactcagtaaattctaaaactacttgttgggagctttacttgagataatattgtcttgtaaactcaattaattgattttattaatcgattagaattctgaataagactatgtcttatctatgagtttcactaagaaaggaaatttgagaacaaaaaaaaaaaagaatttagagtttgtttattaattaagactctgaaatgtctaattattaaataaattaaatgataattttgattgtcaattaattataattattaaatagataaaattgacatttataacgttagaattaaaataatggtgtttgtgaaaagaaagatatgttttaaataaaatggtaaaattaaaactcattaggcccatatgatatgagaattcaacaaacatgataaagctatttttatcatttttttcattttaattctaaacataaccctaaagttatcatataaataaaatatgatagctcttattttcataacattatttgactgaaacacttgcatatcatacttggtacttaataccagaagatagtaaggtcatccactgaaaatgggtgtacaaatagaaggaaggcattttgggagtacaagaggcacggtataaaagaagggttggtcaagggttctctcaacggaaggggttgactacagtgaggtattttctccagttgttaagcacaaatcgatttaaattctgttggcacttgcagcgtgccaaaatcttgagctagaatagttagatgtcaaaaatgccttctggtatggacatctataagaaagaatgctaatgaaacaatgtgaagtatttgaggagttttgaaaggaacacatggtgtgcttgttaagaaagtctatgtacggtgaatatgagattggatgattatatgaccaagataggtttgaagataagtaggtttgatctctgcatatatttgagagaaaggaatagagatgcattgtatgtgttgttgtatgtagatgacattcgaattgctagcaagagtatgcaatagatcaaacacttgaaacttcaggtgaagaaggagtttgaaatgaaggatttgggtccatcaagtataatcgtaggcatgtacataagagggaaaggggaaagaggctactatacttgaataagaagagctacttcagaaagatactagatacctttgaaatgagtaactcaaaggcagtaagcactctacttgtgcaacacttcaaactgagtgttactaagatgcctaaagatgaaattgagaggtatgagatgtcaaaggctccgtatgctagtgaagttggctctgtcatgtatgtcatggtttgtactagaccagacatagcatacgcacttagcatggtgagtaaatttatgagaaaccccgaaaatgagcattgagagtcccttaagtggatcttgagatacttaaagggatgtgttaacaaatgattggtatttggcatgaacaaacaaagtgaagacttggatgttatcaatggctatgtggactctaattatgcatggtgtattaatacaaggaagtcattaactggctatgtgtttaactgttggaattaattttattaagatctagattactaacatgtatattgattataagtctataatctaacaccctaaatatgaattttctaatacaatgaaataaacacataagagattaagaaattcttacattgatggcagcagaataataatgactcattccattcaaatctctagcctttgattcctttnnnnnnnnnagcattatcaagatctaaacttggatcttctctccttcattttggttggattcttcacaattccacactatgattgagtacttgacttgacattagtaggcatgtactcttcactagagatcgaattgaatgaagaagaagaaggaattcgaaattaccatagaaagaggctctcaatttttagttgtctgacaaagaatgaaaactagattagagatggatgagaatgagagtcatcttattcctttttcagtatttcaactagggtttaggatttaaattacatggattaaaaaaagaataactggcaaaaatcaccttaagtgaccggccacttagtgtggaccccatcggacca

SEQ ID NO: 22241 - DNA, 3679 bp, Cannabis sativa
agattcttatatgacaatatgacacgttgaattagtacatgttgattcttgtgaaagtagtctgaattcctagtaccaacaatattatatcatttggtgtgctgattgattgtctagattttgaaacagtttaggagctccacatgtatggaattggtacattgaaccaaaattctgtcttgactttattaataattatatatgtaaattgttgtttatgactttaaaatttgggtgggtctctggtcattcatctggtttgaacttaaatttcagcatttgcaattcttaatataacttggacttgtgtataatagctgtgaagtctgctattcctgaaagcttttcacttgaactaggacatcacaaccctgccttgtattcttggggtgttgtcatacactccattttacaattcctatactaacatttgctggtgatgaacaaggtcgattgactgcaaagtgcgatgtctatagctttggggttgtgctactggagctgctatctggacgacatgctgttgacaaaacaaaagtgggtgtggagcagaatctagtggattgggccagaccctatttgggtgacaggcgaaagttattccgcattatggacaccaaattagagggtcagtatcctcaaaaaggagctttcatggttgcaatcctcgctttacagtgcattggtgaggccaaacttcggccacaaatgtcagaggttctgcatgctctggaacagctctcaactaccaaacagtcacaaagtccatctcattcccggctgtcaactggcagccatagtccggtacctccgcgcctgtcatccagcaaccacagtccagtacctaagtccccactgaaacacaatttcccttcacctatgaacaagagtcctagaggatccccagtgccacaccaactgaaatcaccacggggactgtgagctgagtggagttctgttaagtcctccttaactagtactttgaagttttgtggattatgtttttgatggcatttaggtgtacactgttttgacaaatacaacatgaatgcatgattaattacaactactaccaggtacaacatttcatgttccctatcctatgggctcatgtgaatgaaaataatcacgctctcctatataaataaagaaataaacatatgtatataaagtaaaaatcctgtggggacatctttttttttgtctctacaggtagaggtagagacgtttttacttttagcgcttataaatctttatatgactaaattataactatagtaggcattcaactctgtaaaaataaacaaaaaaataaataagcaccaactagattttcaaactctacatgtaaaaataattttattcttaataagtatgttaaattattaagaattttttaatatacttattataattagggaaatttgctgtaaaagtctttaacaagttcagtttgatacagataagttctcaatctcaaaaaatagcggtaatagttttcaaggtcatgcttttaatttattcgttaatcttaattttaattgagtcgttcactttttaaaattgctgcgtgttgaaatattattggtccaaacagtaaccgaagtcaccaacaacagccaagaagatttctttcctaaaatcctaaaaatttccccaaacacaacaaacccagaaatgtcggtgacggcagtggcagcgatggcagcgatcgtgattttctcttctcatcatttccatggttcggctaaatgtggaagcaaaatctcaaattgagctcggagaattctcgattttcgtcagctcttcaaggattatgtactctttatcgaagaggaaccagagcaatgtcagatctcaccgtcggccatatctttattgaagaagaagaagaagacgatggttgtgctgatttggggttggggttggtgattgattgtttatggcaatgagaagaagaaaagaaagaaaaagaaaaataaaagataaaagaaattatttttaaataatttatttatttatttttatttttaaaattaaaataataataattttgaccaataatattttgacacatggcaattttaaaaaagtaaacgattcagttaaaattatgactaacggacaaataaaaagtatgaccttgatgactattaacgctatttttttgagcttggggacttatctatatcaaactgaactttttgaagacttttgctgcaaatttcctttataattataatataaattgttatataaaaaaataaaattataatatcttgaaatgccaaatgaagagatgctcttacatagggaaatatataaatataactatgtatgtaaatataaatggtctatttatatttatataaaaatgtcaggtagggatatttacttttatggcatgtttacttaaagggaatggaaatgaatgatatggtattaattctcatataattgtctactaaattttagaaagagagaaagtagtgggattcacacaaattaaggagtaaacaaagcgaaaggttctccctctatttttatacgaaatacttccatttcctaacttaatttatttttatttttattttattaattaaaaataaaaaagacaaatatgctttttaaaaatatataaacagaaaataattacatgttctaataatggtaattttgtcaaattaaaatattctgattacctttcctagttatgtaaacaaaataatataattctagttttctttctaaaaagtttaataaacagcataataaaatattattttcgattattttctattttaaactgattcatttctcccattgattattctgataccaattaccgtttaataaacgtgccattagtattttcagtacacgtataacgcacatttttttgtagttactagttcactaatttatgctaatattaaataattaataaaggtatttataatactacttaaatatatgaattataaaacagtaatattttagatagaaatttataattttagaaaattaaataagtaatgaaatatatatgtgtctagatattaaataagaaaaatcctaatattttaaatatatatataaatatttatattgtaatttaagtgaataattattcttatttatttcactaaccaatgagcttatataggttacaacaaaagctaacaaaatatatatatcaacccataaaaatagaaacagattaaaactaattcttaagcatgatgaaacaagttaaggatgatgaaataagctaggctgattcctcttttccatttaaacgttaagttaactcacactccaacttgtatacaagtaaatcaaatgtaggtttaaatactcttttttgtaagaatgtctgtaatttgatctttagactttacaaataatatataaattattcctacttccatgttctcttttataacgtgtctattaatttctatatgtttggtgtcgtgctgaacatgattatgtgcagtacttatggcagcctttctgtcacaaaaaaaaagcttcataggcataccaatttgtagcttcagctctttaagcacaccgtttatccacaaaatctcacataccctgttagccatagctctatattctacttcagcactacgccttgtaactacactttgttttttgcttctccaagtca

SEQ ID NO: 22242 - DNA, 2031 bp, Cannabis sativa
tatttataactggcccaaattgggacttgatttttttataacaaattagaggttattcttgaatagagtattcttaagtagaggttctaatgtatatataacatattctctccctcaatataaattagctgaagaaaaacaattatatatagcatagtcaataacctaatccttcattaaaatctgtaattctatttctttggttcccatgtgatgtgcattacctaatgctttactcaacaaaatcaaactccttaaactaaaaaatttaaggctacaacaaatagagtttcctctctttttagcttgaaacaaacaaagctcttctgcttttaaaagatctgtaatgcaagcccagatgtgtaaaaggctttattgttctttcttatggtatgaccattattcacaattagaaacatgttgacattacaatgatctagttgatgaaagaatagtacttacttttctttgttcaacttggatttctctagtaacttgttgagaaggggggatgatttgaatcttgcatcattctcagcatactttttctggttttcttctgcaaaagaaaccaacttgtatttcatatcaatcgtaaactgattatcttgttaaaaagaaaaatacataaatcatatcacttttttttgttctttctttctaaagttggtaccattgaagcgctcaagaaattcaatttggggtaacttaggaccaggaacagactctatcccagaggacccagatagaaacccagctttagctgcaaaattatgaaaaagcatacattaaaaaaaaaaaaaaaaaaaaaaaaaaaaacctgcccaattgaaacacaacaaaaaaacgaagaaccccccaaacatcatatcactacataaagcattgataattagaaccatgtagtttcttttctggtcatgtcatgtgatcaaacataacaacttacaaaagaactgaagaacaaaaaagacatttacccggatttgaagagagaagaatgagagctgaagcagccagaggaagagacttgtgaaaaagtgagggagatgaagaatcatccgtagaagaaacaagagtgagtggcgtttttctagttttagaagtgttagtatggaaagtgttgagtgggttttgtggagagggggcaaagtgaaaggaaggaagtgagagagcgaagactgaagaggagcccatgattaattggtcttgcttgcttcctcctctcccttccactttaccactccaattttggtatggataaactgcttgtgctattcttttaataacatttatatatttaaaataaataaataaataaaatgctatggatttttattttgtaggcgttagcttagcccaaacacaagtttatttacacaactagccactaggcaacgcgcggggtaattgtttaaaaactttttatttatgttgtgaaaaaataaaatttatatataatatatttaaaaaaatattaattaattaatatattaatgtactattaaaaaaatattaaaaattttaatcataatatgttgaaatattagatcacattatttaatcttatagtaaaaatatgagaataaataagtaataaaatttaggggagtaacttattaatgaataaaaataatgtaatgtgttatagaagagaagagattgacatgattcagcttaaatacccttgtatacacgtgtgcaacagaaatttaaaaaacgaatgctatatctgagaataatataaaggctagcaattctgtaatttgtttcaaattttcattgcgggtcgtaaatttcacttattgaaatatgtcataaacttggacacttagcctcataataaaattgagagaaaattacactgtgggacgatttttgaaatttattactgtatataccgaatattttttttatttggtaaaagtagctatttttttaaattaatttgacatgtgtacacggtaactgttttgagagtggtttgagtgttaaacacgataccatttctcattttctctgtcaagccat

SEQ ID NO: 22243 - DNA, 2755 bp, Cannabis sativa
  modified_base (2274)..(2280): a, c, t, g, unknown or other
cagccgccatcagccattataaagagtcctttcattattaaacccaaaaaccccaaaatagaagtcgtttctgagacacgacccgaagagaatcatcgcaagagaaaaattgggaattcggtcactgaatcgtctgattttggttcggataatgataatttgaagaagagggaacgagtggaagtaccagaaattacgaaagttagggttgatcacaaggttattaagaaacgaaatagaaagacgtttcttattgatttgatagaaaccggtgtccttccattaggaaccgaagtccattaccgtggaacacaatgtagaggtgtgattcttcgtgaagggattaagtgcagatgttgtgaacagattttcttcctcactgcattcgaaaaccacgctggcagcaccaaacaccgtcccgctgccaatattttgctggaagatggaaagactactttactcgattgtcaaaacctgatcaataataataataacaacaatcccaagagtagtggtacccacaataataatgacaatcccaagagtagtggtaccgataataataataacaccaataatcatcaaaatgatgatgtgtgtggcctttgccaatacggcggagagttgctctgttgcgacggctgtccggcatcttttcacgccgcctgtttgggtataagtgtccctcctccatccgaagactggttctgtcaactctgccgttgtgggaactgcaccactgtcaatttcaagaacactccagtggtctgccatcagtgcgagaggaaattccactattcttgttgcggcgtagtgctttccatgccagaaggattaacattctgcagcgagaattgcaaaagggtttgtttgggtctcaggaaaatagttggcaaacagattcgagtaaacagtgatctcacctggactttggttaaagcttccaaaaacaaaatgtcctccaaatatttggagaaagctttgagtattatgcacgaaagtttcgagccagcgataaattactacacaggaagagacataactgaagatgtaatatttggaagagaatcaaacgtgaaacgtcacagcttcaatggtttctacgtggctgttttggagagaaacgaggcgatggtatgtgcggctgctttaagagtttttggtgatgaggttgcggaggttcctcttgtggcgactcagtttcggtttcgaaaacagggaatgtgtgcaattatgatgagggagattgagaagcagctgaggattttgggtgtggagaaactgatactgcctgcggctgtggaagttttgccaatgtggactagttccaagtttgggttcatagtaatgactccgcaagagaagttgaaggttttggagtataacattctggattttggtaagagctttatgtgcatgaagtctattagcactgagcagcagttcatcactcacgatgaagatgatttagttctgaataatgttaaaggtctatcgtggaatacactatataattgactgtgtacaaaactacattaatttcttttgttaattttacccattctttttccattcatgtaactattgttttgactatgatttataattagtactttcctgttacttgcatactcaaaaaatttactctatcttacatgcacaatcatgcaaaatttattattgatgggcaactattcatcacgatgttaatttctatatgcaataaccaattataataaaacacaagtatcgtattagccaccttaagctaactaatgaaaatgctaatttaatactaaaatgttgtggtatctaaatgtgttattatgactattaatataatttagtatgagatttcacattaatttaattgagtaatgatacacataattcacacacaaatttaattattacttatgttgcaagtaactactgtgtgttatatttatatataaattatgtgtgtacatatcattatttaatttaatttaataagtataatgtaatattcttaatcatttattatactacctcttggagatatagctatattttatagaaaaagtagttttgtgactattgtgcttcaatgcataagagcattactattatatgcgacctgatgagatatttaattcgaccaatagtcataatcacataagacggtgctgggcactaagtctacgagtgtttttttagcatttctcaatgcataattgtagatcttgatgtaaaatttaatatgttatattcaatgctcacttaataatttannnnnnnatataaaataataataatacaaaattaaatgtaaattttaataaattaaataataataatgtaatcatttaatgcacaggagtatgttagctaaaatttaataataaaatattaaaaatgacataatagtaaatataaaaatatatcgtgatgtaaattttgtattatgttatattgtgatataaatttggattacttttgattatgtgagatttttgtatcataatttagtatactattagagtagacttttaataaagagcattgttattaggcagcagtggtgcctagcatcttctcgacatgtcgtgttgcgattcgatacttagttgaactaatagtgatattgatacatagaaaggtgttaggcaccactggtgtcctttaatatttctctttaataaaatggactatattttacatttatatcagttattggagatgctcttacagctatttttacatagtgttagta

SEQ ID NO: 22244 - DNA, 2114 bp, Cannabis sativa
  modified_base (2037)..(2040): a, c, t, g, unknown or other
aaacacttttattgttgaattttattttcttgttaatctttatttttattgccaacaaaattattgatttgccaaatagaattataagtctaatttagtggtaatcaattcaattctctgtgagatcgacctcacctgtgtgagtactacttgattacgtgcacttgcgagctattcatatttttcgtaacacgaccatactcagtcgacaccaatcctcaaacacaattgatacacacctttttccacaaattattgatttaatgttcccaataactttacagcctttaatttagatcagttttatgaataccaagtctcccatgagtcttatattcataaatttcgattaagatttcacctagaaatcatttgttgtacttttatccacacactcttaagaatataactctggcgtgttggatctaatcaataaaactacaaatagacgtagtctcatttatcgtcgcgacatgggggtaaactactataaatccatgatgtccatttaattttctgcagtttttttaattagattaattcatcgtggccctcttttattttatgatcttcttagatcagttgatgaaaaactgtgtcaacacttacatatataacacactatcatctgaaaaaaaaaaaataattatagttatagttttatattgtatttttatatatgtgacaccatagattaagggataattaataatgtcgaaaataaaaattaaatttatctcccgtaagcgtgtttattttattttacacagaaatgatacaagtatgattatttagacaaagaaaaatgatggaatgtattgatgaattcttaaaagctctgtcatttgtagtcaagttagaactcatctctcctctcacctgatcttatccatctatgatgttttggattatagtttcaagagcatatatacaatatgtttttgttaatttttttctcttatatataagaaactaggtttatctgttggcttaattaattgagttcatttgatttaataacaacctaattatataaacaagtttatctttattaaggttctaaaaagctttaacactttactcatgatatttatcatacggttttccttcttggagctatatgaatgtgaataattgctatgattttgatcaatagaacaaaactttgtgatcataatcaacgtcgtcgttttggtttgttgctgtgttatgtcattttggtgatggcattgtcgtttcactataaatataatcacaataaaatgatttgggatttgaatccactcacaaataaaatggattaagaaacgataatagtatcccactaatatatctaatcctcttttcatttttttcattttttttttgaaggactttttacataaaaatcaacaaaaatatcgatttttatgttttatattttaagaaacgtatagtacgtagagcttcaaattatatatgagcccatttaaaaataaaaaaaaatattaatattagcggtttatttatttattttttaagacttattagctctatattaaacttacaaatatatatatttattgtaatgatgttttattaattttgtttttcaaaattaatattgaagatttttacattgtttaaaattttcagaaacctatacagactttattttttaaatccaaatatttcctactgctattaggagaaggattttttttttactgtgtaatatatatatatatatatatatatatatttgtatatatttgaataatttttattttaattttaagtttttgctactactactactaggactaggatattggtattacgttactatataaatcgagcaaaccagtagagcacttctaaatataatttcatttccattttcaattatttgttgtaaagaagagaattagtgagaaataaagagatcgagagaagatgatgatcatcatcatcatcgtgatgataacaccaaaaatgatactctactgcctctcaccaacacattcttaccgcaaatagtaataataataataatannnntaataataataacaataatagttcaactcatgatcaaaaacgccctagattcaaaataaagattcttataggga

SEQ ID NO: 22245 - DNA, 3198 bp, Cannabis sativa
aacatgttccttgctgtcttagtgtatgtggatgacattattttagctagcaataatgatcatgccatctcccactttaaaatttcacttgacatcaagttcaaaattaaagatataggctcgctttgagtttttctcggccttgaaattggtcgcacaagcaagggaatatcaatttcccaatgccctttcacatttcagctgttgaaagacacatgatacttaggagccaaaccaacatccttagcaatggaatacaatctcaaactcagcaaagataaaggggctctcctccctaaccctactacataacaaagcttaattggtaaatttatatacctcaccattacaaggccaaatatctcttatgcagtaaaccatttaagccaatttttacatgcacctcaagtacctcaccttcaagctactaataggctattgtagtacctgaagagcaccttggtcagggtctgttttaccctgccaacacctctccaataatctcggcatatgcagaaactagtctctctccttcaaatgttcaagtttcttttttttttttttttgctgatgctaattggggaagttgtcaagacaccagacactccatttcagagtactatgtttaccttggctactcactcgtttcctagaaatctaaaaaataacaagttgtttctttctcatctgctgaaaccgaatatggagcaatggaaaacactacatcagaggtgacttggatccttgctcttgtccaaaattttggcatatctcccaaaattcttgcattactctattgtgacaacactgttgcaatgcacatcagtgagaatcctatctactattaacgaacaaaacatgtcgagatagattgtcactttatttgagaaaaagttcagtaagactactcaattgctcctccatgtgtttcctctcaacaaaatctagcagacatcttcactaaaacattactaactttttcttctaatattatatccaagttaagtgtaattaatatttaccctctaccttgagagggggttattaggatcaattagttattagctttagctttagttttcttttttatgttagagtcaatttgttgtttttttgttatttgatcagctgactcagattagttaaattttaactaactacgttctcttttcactacctatatataggcatataccttgtaaaagcattttaattcaattgagatgataaaaattttctttctctctcgaattctctggatagattcccaaacatagagatgatatatatcatagcattatattgaaaaagaaattaaattagagattttttttgataaagcatgtgttctatttaatggtttttgtttttcttcttttaatttttaaagtatgtttattttacattccatctctatattacggacaactctatatttatttttagaagaaactagttgagctacgtgctagctcataatttaaatatatttttaaaaatttatagtatatatgttaattttgtgttttggtcttcaattttttttctttagagctaaataatagtttaatcaatactaaattcaaaatctgttagaaatttataagtaaatattaatgtctagcatcactcaaaagtgttatattactattgataaaattaagtatcgagttccatacaatttaatataataaatgttatagaataccgctactcatttttaaggtatctagtagtgttagacaatattagtgcctaatagcaatacttttttttaatgtaacaaacaatgaatacaagtaaagttttcattttagattcaaccctggaccattattagctaagttttctttaagaagagctcttttgttgtatttttatttattctaaacaaaagaaacattacacattagcatgttttacttgaaagagtaaatatgagtagacaaaagtactctcgattaatataaaataccaacaagctagtatatataagtaacaaactaaattagaagtagaaaaagaagtaaaatataaaccctacattattatactgttattactaaaattctgaattttgttatttttcttttaaaaaaacgaaatttgttttatttaaaatatagaagtactataaaaataattaatgcataaaatacaaaattaatttcataaaataattattacacagtgttaaagtaaaattaaatttatatatatacaaaatttaagattaacaagttaataattactatttgtcaaaggatatttgtgtaaactaatatgaaaagattaaaattattgacatttttattataattattgatgattaattttttatatgattattagctaatatataattattaataggaagtgattaaaaatttaaaaataatgtaatttatattaaattacaaaaaaatttaatggaaaaataaaataaaattaaagaaataatatagcatgtaaaagtcaaaaaattattgactgatttatatatagttatagataactctatagcatttacttagaaaaataactatcatagagtcatttgtcgtgagtgggccatctaagatcgtccaatgataattgtagatagtgtcttttagtgaatcaattctaaattggaatatataagcgatgttgaaagttaagccaattatagtttagggtagtaccaaatgatcccctgaaaaatggaccattcttgctaacatttatggagaagttggggtaatactattttggattcgattaaattatttgttttattaaatgataaattgaatgttgtattttttaaaatggtatataaaataataccttaagatgattttttattaaaataaaacttaataataatccgatctaaaagtattacgataatagtattggttacattttctgtatctattaatgctagaaattatatttttcaagttaaatatattaaaaagaaaaattgtcaacaattgagctcaagatactactttgtaccattttaaaaaatagagagttcaaattgtcatttcataaaataaaagttcaactaataatttttataaaatataaagtccaaaatagtattaactcgaaaaattatattattatttataataaaactaataatataaaatgtacttacaaatatcgagagattttaaaatatttattattaaaaacatgattaaa

SEQ ID NO: 22246 - DNA, 2848 bp, Cannabis sativa
atgttcataaaattgaactctaataatggtgtattatggtctaaatttgacacatgttaaaaattgtgtcaaatttaacgcaaaatataatatggatcaaattttacaccataataaatatcactttgttatttattctgttaccactcactaatgcaattaatattttttatatttttatttatatatatttaatatatttttctatatacttacaataaaaatttaataatatttttcttgactttttttacacatttttatcaaatagtttgttttacccttagtgtatttgagcataaatataaaatttagaccaaatataatattgacttatcttttgagccaactttaatacaaaatttataccatgcattggagatggtctaatgaatggtgtaagcttttgtgcaaaatttaactcaataaatgagtcaacatgactactagaaaattttaattttccattttcaagtagctttatcttcagttaaataaaatattgctactgaagataattgaagcgaagacgcaagtcttgaaaataccaaatacgtatgggggacgaggcatatcgatttatttatatagaaaagaaaataataaaaaaaatcgataattatttcctaaatggaagccaacatttaatatcatcgtccccgagccctaaacccacaaaatcctaaaatcaaaatcattaaacaacattgtttttcaatcatcaccgtttacaccaccaaatgttcgagctccgcgtgtcgtcttcgaaaaccatggtgcattttctgacaaccactgcgatatccaaatcttatatcacacacacactaaaaaaaatacaatgtatgataaaaggcatatttaaaagtaatttttacctcaatgcaaactaaaaggcaacattaaaactctgaaaatcgctgtcaatagctgattagaactgttctctaaaaatcgaacaaaatcattaacttaaactctgacatctactctcatatcctagaataaattaatttttatagtgtagatgtgttttaggttagaaaactagatgatttaaaaaaaaatgatggtgtatggaggaaatggaggatgggaacgatgtttttgtgttgagagaaatatggagtagaaagaagaaaatgagagtttcaattctgaaattagggtttatagacttatgtcttcggttattttaaaataaccgaagacataggtgtccacgtgtatctaatatcgtgttagggtagatgagacctatgtcgttggttattttaaaataattaaagacatatataggcctccacgtgtattagggtagtggagacctatgtcttttattattttcaaataaccgaagacgtaagctttctatagtggatatctatagtttcagtaatttttgaaataatcgaagatatatgtttacaatttttttctttctttctctccttacttttatatcagattatatattttgaacagtaaaaatctgaggatgtacatcatatttctagtagtgcaatcttatatttgacctaaattttataattatgctacaatcactataaaaaagggcttatctcggcgggcccaaccccttgttattaatccatcttggcaagcccagaccgttgtgaatttcaatgccgagattgaatatgactctatttcagcggtccatgcccttcgttattattggcaatcttgatggtctaggcccgtcattattggttatgcaatctcaatgggttgggcccatcttgatatgaatatttgtttcctaatttagcactttttgacacctatttcagtgggcccgactcccacgagattggtcaatctcaatggccttttagcagcccggggaaatagtctactactgggaaaaatatatttttttttttatagattctctcaactattatattgatgatatatagtgttaattcaaatatcatttgcaaagtaattttttatatgcatctcttaatacaacaatgtcttatatcataatacatattgtaattagtgaaaacaaaattgataataattaagtataattagtcttatagttaataaatttttgtctaaatcatggcatatacttatgtaagtaggagatctattcttcacgcatttctataatctaatccattaagtatatttttgatcatataccactacaatataaaaagtcaatgtcaaaaattatattagtttctttatgatttaaagtttaaattttattataaaaatacgattgttgagatacttacattttttgcaagataatgtcttgaatttttcgacatatatataattattttttgtattattaattttttaaagtgtagtaactattgcatatatgcttattagtttacatttaatttcattcattttttttaacaattcgccatgattcatttttgtgtcaataggattttatagattaaataaaaacgttttaatcaagggatatttaattttatacactaattagtataaatatatgtgagacataatattcatttcttattatatttttttttactgttttggtaatttaaattggtagatgcaataataattagtactattaacaagtaacaaataataaataagattgcatatatatactaattgttatatatgaaaagcgataattattattaacaagtaacaagtaatacatactattaggtatcactacaacaaatcactctattaccgacggttttattgccggcggaactcacccgccggtattaataggggtattaccggcggaaatagccatccgccggtaataactatataattaatattatattaaataaataaa

SEQ ID NO: 22247 - DNA, 2199 bp, Cannabis sativa
cagtatttttcataaaaataaaataaaaaaatttactttttagtgacacttcacatttttttgtgacctacattatgagagactaaaacctaacatttagagtctaattatacatgtcactaaacataactcataactatttagtgacccacacttttgtgcgtgtcactaaataatgtcactaaaaggtaaaattatagtagtgaatactcaacttacaacagcgagtattcaaaagagactgtccagacaatagaacaaaatgaaaaaataatgaacacgagaaaatatagtggttctatgagatcacggtctgcttagtccactgttgcaaatgatttctatctagtttatttatattgtatccctcatttatatacaaagcaagtgtccttttagttgcacataatttggctggttgtagaaccatttataattaatattaacattaaattagaataaacgtaaaagaattaatgaagaacagtttaaattcattttaatgagtatagcaacgtatgcgacttatagggtgcgagtttcctgttcatgttcttgcacaaactagcaggctttggggtgcgttctatctttctaaggagggctagtgagcctcgtgctaacgggtctgtgttctgtagcgtatatggacacctaatatgcgtcaacaacatgagacactcgagtccctatcgagttatcaaatacgctttgtcgtttggactagttaattatataaagaagctacctttacttagtcgtaagagagggctacctagtgaacgcatatgtttcggtatatgcacgacttgtataaacccctcttggtcatgcttgttttatactatgcaaggtacagtatatgattagattctgtcaaggtcgtatcatctcgcgagtttgggtcaagcgagatcaactctcagatagtcattaattgacagctcattcatcctttaagaattagatctacgtgttaatttcataagagactgatcttgagcttctaagccaaaaattggcactataacatatactatttaaaaaatattgattcaatttattatttaacaaaacaaatttctaattatcttaaatataatgtaaagatactaacattacagtagtgtaagttaaacatgttataccctgcatgtatgccacgtgtacagaaagctcatgtgacaggtttccgaataaattgaaacttaatatacatgagctattatttgatttgtagttgtatatctctatctttagtggataatagatataacatttaataaccatcacaatgtttgacgtgtagtttattcagctgatctcatcaataactagtataaaaagattcagatagattgtaacagggaaggtgtggtggatttatttataaccacaagtacaaatctcttacaaccccacttttgactttgacctactttatcgtgattttgtctcctgccaaccccatatgcgcgttatttggatagtgtttatatatatttttatttatattatacagtattaataaaaaataatatatgattatcaaaatttaatccctttcggcaggtgggaggtttttattttaattaatcttatttaaaaaactagctaatctattgtgattagctaaagaatgatgtgattgtacgccatttagtttgcaattgcatgcgtctttttttttttaatgcatgtgtttttattaaatttactaaataaacttgggattatttcttaaactaggaaacaaaccgctcaatattctatttagtgataattaaactataaaattatattaaattataaattttaacatttttatataatttttttttaatagtgagtagctatcaaaaaatttatttttttaactcttaataacaaaaaaaaaaaattaatattttagagtcttaatttttttaattatttttaactcaataaatgataattattaattaatttaatacatatatttctataaagttagttttcaaaatatatatcctttacataaattaaattgttggataaatattatttttgtgtgattaaacttatataaaaaaaagaattagaaaaaaaatataacaattgcaaatctataagaaattcatcaaatttaaaataattgtcatcaccgtatcttacttgtcactaaatttaaaattattgtcatcaccgtatctcacttgt

SEQ ID NO: 22248 - DNA, 1209 bp, Cannabis sativa
atgtgtatatacacaagacaaaaagaagaagcgaaacgacttcgtttttggattgtattaattatgagaggacatgaaaacattattttgtttttttgttgttgttttgctattaatcaacaaaaatccaaagtggaaaaccataaaaatgataatgaggtgtttggaagaaaagaaaagaaaaaaaaaattgaaaaagaaagagaaagtcccaaaacaaaaagaacccaaaacaggaaaaagaaaaagaaagaaagaaaagaaaagagaaagaaagaaagaaagcgaaatgagagagagaaaggctttctctctctaactcccattgtgatggcgtgatttacttttgcttttctctctctcgacaggaatctttgaaaatccaaagcacaaattagattaataaaaagaaaaacaagattaataaattttattttcaaaataataactaattttctttttctttttttcccaataaatattcacttttcttttctcatgttagcctagcctactctgtctcttaccctctcaattaaaaacaaattatatatagtattaataataaatgataggtaagcaaaaaaagaataaatgataaatttccagctacagaaatgataagataaaacttaaataaatttatatatggtatggtagactggtagtgaaaaaaaaaaagtttttttcttttaaaaaaacaataaataactatgacaaccgtgtaataattttcataattaaaaaaaaaatgaattatgatatttatttttattacaaaaattcagtaataaagaaaaaaaaaaaagttgcgaaacaggtgatatatgtatggtagataacttagtagagtgatagggctaaaattgtcttttcacagaaagacggtgagtgggccatactagttcagtaattcttaaaaactcaaataaattaataataataattaattaaaatttgttgatatgtttttgtatcttattttcctcttcactttctcacactttctcactacggtccgttggagccaaacagtatctcacacgcagtctctctcactcaatctttctttctcattcactttctctctctaaagttgttttctttctctctcatcactgaaccggaacatgagagtgggtattacagaccaccaccataaccggtaatgaatccgagcactgaacaaccaccattaccacctcaacc

SEQ ID NO: 22249 - DNA, 4338 bp, Cannabis sativa
aaccaattttgcagtgtgaaccttatgaactcaactagcaggttactaacaagtaaaaattctttttttaaatttaaattaattataattaactagtttttaaaaataattaatttgaatatttgaatatttaataagactatttttagcaattaatatcaataattttatttttatatttaagtctctattttaatttttttaacaattaagcgtttaattataatatttacaataaaattattattttataaaaattaaacttccaccccttttaaaataaatttttgaataattaatcactaagtctgagaatagtgtagaatactaaaatatgggaattcatggtttatagatcatatctaaacccccatttcatctgtatatcttcaaattatatattttagagacaacttgaaaataacaacaacttcatatatgtatattttatcagtaacacatattcgagattttttttttttttttgatgaatcaggaagttttatattgctcacaacaaattttacaaacaaatagcaccctaaataagggcctaaaaattaaagaaatatgtacaattatatatctattccttgaactctatattttccatccacttcatatatctttacaacctttgaaaccattcagtgtcctctacaccacactacattgattctatatttgacttcttgtttcactcctgctattatcttctctacatccggttttgatttttcccacaagcttaggttccgagctctccatattgcatacaccaggcaacttatagcagcagcaagaacatttttcttgaacttgctgacctttgatctcccaatccacctggtcaaagcatacaaagaacctgctgctatattccaagacagccaagtttttattccttgtaagcaggctgttgtgaacctgcaagtaaagaacagatggtctgcatttttaggatgaatctcacacatttcgcaatgttctgctatttccattcccattgctttcaatctgtctttggttctaacctcccccatacatgttgagaccagaagactttgttttagattggacagagcactttgtagcctttttcaatctgatattgctgagtgaaagttgttgtccagctatttctttaaagtgatccttcaagttaacaaggcttctccaataccaactacattgagctgaagctttgtaactccactaatctaatattcgagattaataaccaataaatgatgtctaagtttgttgacaatacatagtcaaaatcaataaccaataataatcaataacatcggttgctttatcaagaacacatgttcaagattcataaccaaaacaattaataacttttaaatttttaataatacatattcaagatcaataaccaataataattattaactttcaaactttttcaataacacgtattcaagatcaataaccgataacaattagtaacttttaaactttttaataatatatacttaagatcaataaccaataatgattaatgattttttaaacttttgaatttttttctttttctttttgatgatttcacttcgattaactgatacatatacactatatttagaactacaaagtaaaaaaataaagcgacttcgtctctctgagaaaatcgaattacatgacacagggtggaatgaagtacaaatgtgccgagtgcggcaaaaaaaaagttatctttaattttataattgttattagcttttaatgttttatttcttttttttttttttgaaaaaaaaaaaaaactaaatcacttgaatcaatcctggactaacacacttatttagcacttaaagtattgatgataagattgagtgtagaattacgtctaattagagatcgttcttactatttttttattaattaaagttatgtgtgtaataattttaaattttaaggagttttgttacaaatatttcaatagtttaagtgtaagaaaattaattgctaaaagattcttatttagtaataaattacaaaaaattaattaataattattaataatttaattttaaatataaataattttaattaagattttataaagaaataaagtatcaggtttctatcaggttataagttctttatttatttatttattttaatttctaaattaatcacaaccattgaatagtgatccaatgacaaaaaatagatataactatgatgattatatatttgatgtaaccactgaaaccccttccatatttatatgtattttgatagagttttctatttaaatattttttttttgttgatatgtgtcttcgtctctcacaatagcatttgtttcatatttttttattcttttttgagaattttatttaataaatattctttataaatataatatttaaatacaataaaagaagatatagagaattatagtgtaatataaaagtgtgaggtaaaataaagaaagaaagattttagtgaggtattttgaaagataaagtagagaaattgatgggagtgctcttagaagaagagaatacagaacattaaataaataataaaaaaaaaagataaaaagtgctacattagtagctctattataaagaaacaaataaaaaagacactattcattctctatacatatttaatattatatataatatttaattcacttaaataatattttaataatatgatagtgttattcacgtttccaaattgataatttttatgcttccatggctcaaatctaactaagatgggcctattttggggcctaatcaagttaataaatcagcccacaggagagagggtgagagggacatagggggagagagaggggagagggagaggggggaagagaggagaagggggagagagagaatgagagagggagggaggtctcggacacgtattcatatattttcactcaaaataacaattattgttgtacaagttttagtctctataccaatacagtcctttctctctctttttaactacatgataatataacttgacgaaaacttagatcacgtttcattcaaatactttgagtgaataatatggttggtatattctaaacatgatataatacatgtcccatgtaacaacaagcttaaacttgtgagagcctatctaacattcaagtcggtacgtacagtcggtggttggatgatacactctgattggaagatgattcaacttgggttaagaatgttaagcaggcttagacaggtcaacacatgtcatttgaaagactaggttaaacttctacataagacactctaattgacatttgactcaattctaactgactttgcaaataccgctttttattcaagttttctttcttcttttcttttttgtttgtgtattttcattaattttttaaatgtcacctaacttaacattggtattgtccacttaaacctaaaaagcttcctacctcatatcgaaagcagtcctagaagtatcatattctcttatcctcaattagtgataactagatcgaaaatctatcttaaagaagacaatttttccttgtaattaatcaaacaaatcattaatcattcataaataattactctcaatagccaacttgatcagctctctgtcattaatacacattcgtcataaataactttggtgcacctcaaagggaaaattttggtctagtgaatcctaaatcaaatatctcttgtaattgaatcttcagttcttttagttatgttgatgtcattctttacaatgcttgaaaattgattttgtcccgggtgacaattcaataacaaatttggtttctaaatatggagacaatctcgtaactcctcggtaaacacatccaaaaactcccaaactaatcttgtatgttctgatccaataaattgttactatctcggtacgtagtatctactacggtagttaaaaatctcatacgaacttcttgtaataggtctctagctttaaatgtcaaaatcagaggtacacaaatggtgcaattcgaaagtcactattttcttcttaagtttatggtgaaattgtgcatagccaactaatttattcccaaaaatatatcaaaatcatccatatttaactcatttagatcaacaaatagttctctactctcaataagatctaacccacctcctaggaattaccaactttctagaaggtacatttttaccaaaactccaaataatacatcacatggtctactaaaattatgtatagttctacttacacataaaaagtgtgcagcaccaaaataagtcaatgcagaatacatagagtcatcaatagaattttgacttctataaataattctgctatgaa

SEQ ID NO: 22250 - DNA, 5814 bp, Cannabis sativa
ggaggtgttgttattaagcatatgctgtgtaatgatgatacagctgaggcagccatgaaaattgtttcaccttaattgattttgcagattaaagaaaatatgtgaaaaaattatgattgtaatgagtaaaaccctaaaattatttatagggaaaatgaagttaaatggctgatttttggaaggattttcttcaggatggtttggtgttttgttgaagctgaaaaagaaactgaattttttatattttgaaaaaaactgtaaataaactctcttaattcaaaaattaaaataaataaaaattaaaaaaaaaattaaggacatttcttggcctcacaatgagagtgagaaaagggcccacataagactgtttcatcagcaagccaaagtgagaaagaaaattgggtctctttctatttcaagtttggaacagtttttctttatcaaaaaagtttggtacagctcttttgtttttttgataagtggaatgaatgccattaaaaacaggcaaaatctcattcatatatacctaaaacatttggagtcctaaactgcgtatgaagatgcaagaggcaacatcaatctcaaacaaaacgtttttcaggagagcattactattagacaccaataatgtctaatttcacttagagatggtgcattacgattgattattctttaaaaattattatattaaattatatgtgattcgaaacaattgtattgatagcaatatgacactactggtgcgttttaatattttcttcaacaaccaattttcatgtagtactaagcccctgaaaatagttacaagtacaaatttggtataattggtttatttaggagtagtttgaccttaaattcaatgctatgaaactcagagtttagggaggaaaaagagaatttcaatttttttttttttgaatattacaagaaaataagagaatatattttaagaaaaagcttgtgtaaaaatgaaaatttatactagtctaattaggagttttgtctcattaactttgatatgtaccaatttgtaccctcgaattttttcagactaaaaatttcagccgaactcttgagattgttggattcaacaatttcgatcctcatcctagtcctagctctctcatcctcacccttgttctctcacccctcctagttctcgccactcttgctcctatttccctagctttctcgctctcgtccatgctcattctcccctcttgcccttgccattgcttggtctctcgccctagatttttcttgctcgcccttgctctatcaccttcactctctcccacccacaccctagtctctttcacccttattctctttccctagatttgccataaagatttgtatttataaaaagaattcgaagaaagtgacttgacttcatcccacaatgacagactgcattaagatagaaaaagagagcaagcaaacaaaggctaatgagaaatctaacaagacttgtgttaagtgaaatgagcaagaaactacaattacaagaggaagcagaagctggcgattggcgattggccaatagccagcttgatagtttctgcttaccaaaaaaaatatcaaagagttaaaataataataataatacacagaaagatccaatagaagaccaggtgaattggttgagattttgaggtgattgaaataatcactcttttgttatctaataaatgtttatacagcttctgcaaacaataaagtttttgcactttcttatggcttcataactcagttctcttcatcattttctatcctaggacttaaattcctgtacttgttctttgtatcaactattctctgaagttactatacagtcagttgaggtggctcttctcattcccttcttttcttcacttcttcccatgccaacctcttaggagtatctcacctgacattcagtattggttagctgttattgatatgttaatttaaatagtattcttctaaccattaaagaaatatataagcttgcctaatggaaacagtgctacatatgattcaccttacttgacatacttcttttgttataaattcactgaaaaagtattctctaatcataatgccatctttattctccaaagatcagtttatattcaccgatatacactcaaaaatccaaaattctaacatgaagaacaaacactctttttctttgtaaatttacacgtattagcagtataactcgaaatgaaatattcaacataccagcacaaacaaatctgtcgacatgaaagacttgagagcaaagagtgaaacagtcaaagccaactattgccattgtagatactgttgctagtgatcttggtaccaaagcctaatgaaataaacataacttgaaaatgttaccgaactttgtattgcaactgcaagtgagataaagagaagcaagtttgattagagctacacaaacctcaaatcgaattcccaaagaaaactcgctggtactaaattggttccagcctcaactcagttcacaaccttccatgccgtttgaagaactaattacatgatttgacaaagtagtagttagctataaaagtttaaccttaatgccgaacagtaaacattatgccagtaccattagtgggactagcagcaaaagaacttgacctataaggatttaactgaatcaaactaaaattttgacatataaaagcttatatctcataaaagcaacacaaattcaaatacagtgatattcaatttcccattacattatatcttttactatcttaccccattaccgttttatgcaacatatgaaatgcagtgcctaaaaatctttggtttgttgctttttagtgatttttgtccaaacttgctttcctcatacctaacaacaagtgcatggcaactagttataaccattgctagaataaatgtttctacatattagttcctgctgagaaggaccatgtgattctatttagtcattttcttctccaaaaacacagcctaatttacctatacaaatgcgattctcgcggtagcactatatcattgttcacaagctaatgagattaactcacagagaaacatcagttttactttatgaaaacaaaatatgaagtacaagttgcagaaattctaaaatttccacaaagatatttcacatataaagttgaactatttatcattttctttaccaagtgatagccataccttaatggtgtcccaggtagaacctcaccatcttctctgcataagcataaacactttgagcgagtcctgcagcttcccgagtgaaatttacaggtctcaactctaccagtaatttccacaagaacattcaccatttgtaaaatggtgaaatctcttgctatccctaactattatttcccttttcaccaccttagatatgatcttgaatgcattatggcaatcaccacagatcctaagatttttaaataccctgattgttgctcctagagggagcttcatgagcccaaatccaactgcaatcttctcactgtgagtggacagtgcatgctccttaagttcagattccatatcatgtaaaacatacttagtctcaggaacatatcccaattttctcatttcaagtcccagtttatttagatacttgtttattgcttcaatttcagggtgcatagtctcatcaaccaagaaaacatggaccttgttgtcaacctcaatccaactacaaccaggttctttcttcactcctctcttcctcatcaatttccgcaccttggctacttcttcccaccgacctacattggcgtacatgttggacaagataatgtaggttacatcatgctctggtttaagttcaaggagtcgttctgcagcttttatacccaagtctatattcccatgaatccaggaaccaccaagaacagactcccaaatgtgggcacctggatcaaaaggcatcgactttatcaaattatcggcttctaagaacttcccagaccgacaaaataaatcaatcatgatggcatagtgatcttcatctggagatatgccatggggacaactcattgaattgaaataatgacatccttcttttactagaccagcatgactacaagctgagaggattgttaagaatgctaccctattcggttggatacctgcatttaacatctgttcaaaaagtttaactgcttggagacctcgtccatgttgagctagagccgcaatcatagaaatccaagacactgaatccacatgtaacattatgaggaatacgcgtttggcatcctcaacaacaccacatcttgcatacattgttataagtgcatttccagcagagacacttgcatcatgtcccaaggaaatcaatagagcatgtagttggcgtccatgttccaatgctccaagcacagcactggaagtaattgctcccgaaaatatgaagtcacacggttccaaaccttctgacctcatttgcctaaacaacttcacagcctcttctccaaatccattttgagctaaccctgatatcatcacagtccatgttcgaatgttcttatctgggattttactaaaaaacgatttggcttcctcaagacgccgtgcatccacataccccgataaaatggcagtccaagaaatagtgtctcttacagacatcttatcaaaaattgagcgtgcctcatttacatgaccacatctataataaaatgtaaccaatgcattattaacaaacaaccagaactttgatttaggttcaactgtcatttttaaaacgcgagcatgaatctgctttccaactcgaaagaatccaccattagcacaagcactaagaacacttgtgtaggtgaactcatccggtgatattcccattgaatacatctctctaaataattccaatgcttcttggaaatatccatgttgcacataaccagaaagcattgcattccaacatgccccagaatctttattagtcatctcaccaagcaaatttctagctgtgacaaaatccttactcttcacatacccagtaatcattgtagtacaagtatactcatctctctcaggcatttcattaaacaatttcctagctgaagccatcaacaaaaacgacaaagatgtcgatagtgaagatgcacagttaacataaaccgatatcagtgcattcaacaccgaagtaaccaactccgtccccgacttcaccactgcacaatgcatttgctgacagtgtgtgtcatcatcaacaacaagtgccaaagcactaagcacactagtgaatgtaaaattatcaggtttgacattttctctcctcatatcacaaaagagtttaatagcaccatgactatcattgttacgtgaatagcctgtgatcatagcattataacaaacaacatcacgtttacataatggggttccattaaatatctctctagccaactttagattcccattggcagagtatgccgaaaccaaagttgttctagcaacaatatccggttcaggaattttatcaaacagttggcgggcataactgatttttgatgatttgcagtaaatggaaatgagaaggttgaatatgtgatgcttgggtcttaaaccagaggttatgatgtgggcatgaagggttcgagcaagggagtatgagggtggattctgacgacagcagaaccggagttgggctgcgtatcgatcggccaatacacgagcttccatgccactttgtagttttgccatgttgaaaacatcataagcttttgtgtccaaatattagctagctaagcattaggactagagaagttgtcaagaactatggaaccaaactaaaatatgaaacccatactttttttttttttt

SEQ ID NO: 22251 - DNA, 2767 bp, Cannabis sativa
ttacattatttatttaactaagaaagttttcttcttaaattatatgatatttaatacaatagtctattttttttagttttcaaataattatagaaaattgaaagacttattttcttaaaaaaaaatataaagctcgatttaaaccgatcaaaccgtagattaaaacagtcattttttttttacatttatataatggtcggtcagttttggattataaccatgaaaactgaaaaccgaattttgaattttttttttatgtgtaaaaaactgaccaaaccgactgttgctcacccctagtgacgagatgaaatgtaggggcattatagtccttcctctacctccaaagtttatggaaatgtggaaatcccaatgattattccatccagctgtcctttatacccatagcatagatttcattaatgatttctcttttagaaaatatctttgctacgtgtaagcttcttaatgattgtatcccctgctataaatcttgatttccaagtataaatatagcaccatttcattagtctcaatttgagctgatttcattcattcaatactatccatttatatatcttttgactatgatcatgaccaaagcaatctttccatctcaattcaattttttattgtccaacataagtttcatcaatctctacacctcatcttgacgaggagtattacagtcttcttgacaattagttattgttagttggttatactgttagtctaattgcgttaggcttagctggaatcgtaacaacctcatggttcttaagctttgtatatatatacatatattctgttttcatcagttaataacaatatactttcgatcactaataaggatcccaaatgatatagtaaatatgattaatggaaaataagattaaaatatatttattttaataaaccaaaatattaaaggggccatggccccgcaaaggaggaatgtatatagctagttcagctcctggtttagtggagcagaccttcctttcgttctgcctatgaatgcttgtagaatcttgttgctttcatattcatatctctatacataaatggcacaaatataccgttttctccagaatgagaaacatattaaagaatgtgttttgtattgtatattttctcttaaaatatgtggtcaaaataatcacagctatggcttggataacagctagtccaactcaatataaatggcgttcatttcaaatcatagctcttttaaaaggctttattaaggaaaaaacaagacgttacttctgacaacataaatagaagacataagtgtaagaaaaaaaattagaagagaaatgtaagctaggtaattagtccaaaacaccctcttttggaaagaggcttcatataaatggtgatataattatcaagcgttacacacgtgaagtgataagaaaataaaaacaaaataaaataaaatcacattatggaacatgagaaaggattttcatcattaaacatgttagtgatgcaaaggcattgagcagaggagtgtggataacactgttgtgatgagtttaaccttattggacttatattgcaacaataataggctgcttttacttcttcagtttcttgtttcaagatctcagcatttcttccaagtcttttctttatgtattcaactaattttgatgcatcaacaattccccttactgtcaccaatgagttctccatatctggaaccactgttaaaactcctgtgaagacaaaaattagatcctaattatcttagaaaagaaagaaatttcaaatgtccaaattatttatatttatatacctacctctcatcctctccaaatctctcttaatatcatctacacagccttgacaatgcatattcatttttagcaatatcaccttcaacttgggctattagaaaatcaagataatattaattaacaaataaacaaattcagcgaggtttaaaaaattataaaatttcaaaattataaacaaaaatgagaaatatgtaaatgggccatacctgatcttctacaatttcttgattgttttcattgttctcaggttttggtattggagagataagcttaacattttgactatatttctttctaagtttttccaaaacttgaattgggttagccctttttccccttactattactatatgtttctcactatcaagcacaacatcttcaactcctaaattcaagttatagtgtaaattaaacacatataataacaaattaaacgactgtgttttgatagaagagttaaaagctatttgatggatgaaagaacttttattgcgtaccttctaaacatctcaaacatttgtatactttgtctttgcaaccaggacaatgcatatatactttcaaaacaatttcttcacacattgtttctgattatatatttcaataacaatgttataaattagtactcatttgttgtaatatatatagctatatgacagtgttgatttttagttaatacaattttttcaatggatttggaatcggttctcatatgtgtgtacatgcttatgtttaatatatccacctaattagaatgaaaatagtattaattttttttgaccaaacagtgaattcttaaccatgttaccaattgtgaatatatatatataatagagctgtcgaatattataacataaattatatcctaaatacacaaatataccaagtattgcatgctatttcaaaaatttaaaataaaatattgagtaataatgaagtttccaaccatgatgagattctagaat

SEQ ID NO: 22252 - DNA, 2545 bp, Cannabis sativa
tttggttgcatattaaaaaattacaatgtgattccaatagatctagaacgatctttctaccattttaattaaatgactatttcatatgaaaaaactatttcaatgcataataattttttgattagatttttttatgcatttcaaattttatttcattctactccatttctattcctatttctattctcattttcattcacattcttatatttttatatctaccaactaaacaaaacaaataatagaaattgcaatggtgattctattaagattatgccaagccaaacaagactacagcgttttaacaaaaaacaggtcctaaaataattaagttatgtacatgtaaatatatgtttgtcttatgtagatgtaaatatatatacctatgcgtataagggatattaacggctaaaatagtttaagttattacaattcacttaaataactctatttttcaaaaaaaattatagttgatagattcaagcaattaaatacctagtttttttttctttttttttattaattaatgtaaattaataccaaatttagctaagatatattaattcttaattttcattttcaatttgtaaatacttttataattttgttttatggggcaataattttacaattttaaaataacaaattattatattgttgatgttaggtcttatttttattgtaaaatatattattgaagtatttttaagtacaatcgtgtaataacattaatattttatataaatgttatgtggtgtgatttttatatgagaaaaaaaataagtattaaagtgcatgaattgggtccactttaatatttgacaagtcaatatccttacataatccaactattctacaccatattttgaaaagttatcaatatgatttagggtatcgcagaaagtatttcataaataattagttctacgcatgcatgcgtgaatttatatatataagagtttttatgaatcataattttgatactaaataattagttctacgaaaacatatatagtttatattccttcaatgaagaaaaaaacaacataatttataccttcaataaataaaaattacacctttattatttaaaaatctcactatatatataaatagaattattataaaaggaaagggagagttgtttgggcatgcatgatccataaaattccataatcgatcagtcagaatctgaatgtgtcgtgtgtgtttcatgaaaagttttggtcataattcattctactttatataatttagaagaattaatgcatgaaacatataaggatcgacttactttttccgtccatatactgtaaatctgaacaaaattgacatgatgtgtggaccaataatggaccatacgtaagacatatacatacacattattacaatctagccaagcacatccaatactttggacaacatggttattattaaattagtcaaagtgatttcgaagttgtcagtcaaagcttcttgtatttgattaaaaatgagtattattattgaatactagccgcgtctattatgtttcacgagtaatattttttaaaaattatttttttaagttatatgatactcaatatttaaatattctaataataatataacacgagaataaattgaaataatcccatatacaattttttttaccttttttttaaaaaaaaaaaaaaaaattatagtttgaatttttaaagtaatttctccgatggtttctatatgagttgttatacggattttgattgtgaattaagttgttccgttagttgcaataagagtttttatgtaaaattcgataaaaatattaaatgaccgttttgaagtgtaaaaatataaaaaaaaaattaattttatatatgagagactgatactagttaatagtaataccttttaacaagagaaatgctaaaaggtaccagtagtgtgtatcgctattggtccaactaagtattgagtctcatatattttaatataataacttttaagaagtattgctagccagtcgcaacgtgacatatcgaaaaagtgttaaacaccgtggtaaataataggaatgctcttttaacaattctaattaaaaaatcattaatgttagaaactgtagtttggttttgccgtcattttagatatgagatgaagacgtatgcttatttgcagcttttttgttgggaaaggttgtaaatttcgttggaaaagtcaaattattcattcgaacatgcacatgcagtttcgtaattttcaggaactttgggtaaggcaaatatatttgagatattttatttgtttactaataggaaaattttaaagttatacttaatcagaaaatgtttttcgcggttgattgtattttttagtaataataaattattaaatttttaataattttttatataactttttaaaaataatatggctaattattattacacgcaataaaaaaatattctaaaaattaaaaattcttcacacaaaataaagattttataaaaaaaaatcactgataaacttataaaaaaaaattattatatgattttaaaattat

SEQ ID NO: 22253 - DNA, 5996 bp, Cannabis sativa
  modified_base (42)..(55): a, c, t, g, unknown or other
  modified_base (4538)..(4538): a, c, t, g, unknown or other
tagaattcatattaggattttaatcaaacatacttgttagtnnnnnnnnnnnnnngtaaaatatttccaacagtttttaggtttaatttaagtttgtttaagtgtggatttgattattctttggctgctaggtcttgatttgagtgaattgagttcaaaaactcaaatttcactcaactatggtgaatttgttatcttgatgtattactgagttttaaaggcttgaatatgttatttttatattgttggtatgttctggaaagtttcattaggactggaggagatttggaaaaattggagttttccatttctacagcaagaaccggttaaccagttctacagggcactgtggaaccggtcaacaggttgaccaacgggggaaaacctaattttttgtaatcaatttcctgtttggggtgtttctccagaacctagattagggtgttttatcgatgtttaggatgtttctaaacccgtattgattatggtttttccggttttgagttttgggcctattttgggatttggttaagttgtcgtggcataggatccgagatcaacaagcatcattccattcaagtcagcccgcacaactgactattggattaagataagaaaagtcaattgcattgcttagcatgtcaaataagatacgattattatcgtttgtgatccgattataattgaggtaaagatacggtaattatcgttgtttggaatgagttattactcacttttggaagtcgtaaagaggtttcttacttgtcggttacttaattaagtaatgatagtgacattgatgctcgttggtatcgagtggtaagaatgctttataaagcatcaaggtcggtttgtcttgtaagacaactaattgattatctttactgcattacacttgaatgattgtttagtctatatggtgcattgttttaagatcatgctttatgtgttgattatgttttatctgcttttcttgcttggtctttgtgactcatgggtgctctgtggtgcaggtaagggaaaagggaaattggaccaaccatgagtcagaggtctcccagtaatgtacatatccactgtcgtgtcttagctttcagtggacgagatccatcttttgttctcttttgaaaatgtgacagcattttgtaaaaaattgctttgtagtaatttgtaaaagtttataattaagaggatcctcgaatattgttggtattttgaatgaaaagttaggttatgttttaaatagttttactaaaagttttaattaaaccacacttttcttaaattattagtttattattataaactaattaataaagtacatacgtggcgcccttacaggttagggcgttacatcttcttctcttttatttttgaaaattcagaggctattttctcttagatttcttcatgaaatttcacgctcattggtgttgagaatatgccaactcatattaaagcaatactcaacatagtaaggaagactgtgatgaacaaggaacacaatcgaaggaagaaaagatccaggttcagatcttgatgataccctgcaacaaaaaagatcaagggttagagatctaaatggaaggagtcatattattctgctgccatcactgtaaggatttcttaatccctaatgtgtttatttatcgttttggaaatttcatatttagggtgttagattatagaattataatcagcatacatgttagtaaatctagatcttggtaaaataatttgcaacagattcttcatgatggtgttgaaatgggctgaaggatgtccaactagtacctaatctcaaaagaaatttgatctctattgatatgttagatgattaaggatttcttgttaaaattaagaaaggaatcatgaaactttgtagaggtttgatggtggtgatgagaagaagaaaatcaaatgggatttatcctctggaaggtattacggtgaaaaacaagaaggcatgtgtttcaaacaagcacgttaatgaaactgaagaatggcacaagagacttggccatgttagtgaaagagggttgcatgaactgaataagtagggattacttggaaaagtaaagcttgagcagttagaattctgtgagtactggttcttggtaaagcttgtagagtcaagtttggaactggaaaaagggataccaagggagccctggtttacgttcacagtgacttatgggaatcctcgaaggcactatcacatttcgggagcaggtattttctttcaatagatgattactcaagaaagttatgggtatttattttgaagaataggatggaagttcttgagaaatttaagcactagaagataatgattgagaactaaaccttgaaggaaagtgaaacaactaagaactgataatggtctggagtactgttcagatgagtttgatgtgttctgtaagaaagaaggaataacaaggcacaaaccgtgaggaagactcctcatcaaaatggactctcagagaggttcaacaggaccatcctggaaaaagttaggtgcatgctattgagtgctggattgcccaaagtgttctgggcagagctatgtccactacaacttatttgataaacaaatgtccatcaacaacactggatttcaagacactggatgaggtgtggtgagggaagccaacgagttatgaacacttgaaggtattcaaatgtatcagttatgcacacatcaggcaagacaaacttgaggcaagggccttaaagtgtattttcttggggtatccagaaggagtcaaaggatatagactgggtgtcttgatcccggaatgaaaaaatgtataattagtagggatgtgacttttaatgaatctgttatgggatttattgacaaacctgctagaagtcaagccaatactgaccgagatgaaattaaagctccaggaactgagcatgaggtggagcctcctagaaagatggagactgaagcacctatagatcacaaaagtgatgactcgaaagatgattccaaaagtcataatctgaaaagttataaactggctagagacagaacacaaagagaagtaaaggctccaaataggtacgaacatgctgatttaattgctttcacatttcatgttgctaatcagattgtacatgaagagcctactagctatgcacaagaaatgaaaaacaaagatcaaaagaaatggaatggagctatgtcagaagagatgcactccttgaagaagaaccagacttaggatgtaataccaatgctggaagatggtaaattcatcgaatgcaaatggctgtacaaatggaaagaaggcattccaggtgtgcaagagttacgatgtaaaacaaggttggttacgaatggattctctcaaactgaaggagtcgattatgatgaggtattttctctgattgttaagcacaaatcgattagaattctgttggcacttgttgcatgtcaagacctcgaactagaacaattagatgttaagacttccttcttgtatgtacatctttatgaaagaattctaatgaaacagcctgaaggatttgaagaggctggaaaggaacactgggtgtgcttgttgcggaagtctctgatggtttaaaacaatcttcgagacaatggaacaggagatttgatgatcatgtgaccaaaatattggtctgaagagaagtaagtttgatccttgtatatatttctgagagagaaatagagatactttgtatctgttgctgtacgtagatgagattctgatcgccagcaagagtgtacaagagatcaagcacttgaagctccagctaaagacggagcttaaaataaaggatttaggtccacctagtaagatcttaggcatgcatataagaagggaaagacgaaaaagactactgtaattgaatcagacgagctacatcaaaaaagttctagataccttcaaaatgataactttaagggagtaaatactccacttgcacaacacttcaaactgagtgctactcagatgccaaaagatgaaactaaaaagttagaaatgtcgagagttctatatgctagtgcagttggctcactgatgtatgtcatggtctgtacgagaccaaacatagtatatgtactgagcatggtgagtagattcataggaaatcctagaaaggagcattaggaagccttgcaatagattctaagttatttgaagggaactgctaagaagggattgatattttgcatgaataaccggtcagaagacttagatgttatcaatggttatgtggactatgattatgcagagtgtattgatacccagaagtctttgaccggatatgtgtttactatgtttggaacaactattagttagaaagtgaacattcaaaaggttgtggcgctaacgacaactaaagctgaatatatggctttgacggaagcgatcaaggaagccctatggttaactgggttgatggaggagctgaagctcgatcaaaaagttattactgtttattgtgacactcaaagtgcaattcaattaaccaagaattgtgtgcaccatgaacgtacnaagcacattgatatcaagcttcatttcatacgagaggttgtggagaaagaagttgtgaagattgccaatgttccaactgaagacaagccttctgatatgataaccaaggtagtgccaagtaataagtttgagcattgcctgaagttgattggagtcagctgagcttggagaggctgaggggacgacaacatttaaataataatttatcaagcgacttcaacttgaaaccaaggtggagatttgttggttatggttaaaagttttttcatccgggattggaagctgtaaatctagagagcagataccagaagcttagtatgtatccgaaaagccctatgtggaatgtcttgtagaatctagaaagtactttcagataagcttgttctgtgtatggaatatctctctctcggatatattgttattaatatccaaaggtacactcccggacaacttattgttagtcttgaaggtccatccaagtaggaagccatgtacgtatccggaaggcttgtgtgtttgcaatactcttccagattgtccgtgttgaaagcgcattttttaagatgacatggattaatgttgttggtgataagttggatcatttaaggcagtgtaaatgtgccacaatgatttaggagatattttttgcaagaatgtaaatctataaatagctgtaaatctttgtaatttgggtgtgaatcagaccatatttgcttgagtgaaaatcgtgatagtgtaaggtagagtctaaactagagagataaacttcttcttgtaatctctaggaagtttgtgaagattcttgtaatcttgtaaacactaatatcaataaagatatggttgttgctgttccaactgatatgtagagcattgcgcatggctcgaactcgttaaatctagtgttgctcttttctgttttattgcttaattcattatattgaattctcgagatctcttggtatattattttttgattgtgttgcgtgtttgctggtttagtaaactaaatcgtaagttattaattgtttccgtttcactcaatagtattcttctggcgtctactcaaagcacactaatagaatcacctagagttcttatctctcagcttaagccaatattattggaccacctcttagtctaattttttatcgctcagctcaacagtattttggtagatgttgtaaaaaattgtatacgcaagtgcacgcaatcgttaacaagtaataaagtgataaatcgagtatcgtctccacatggattgaaaattggaaattaatttataaaactgattactcacaaattagttttaataaaaataaaataaagtgttgagaatatgttaaagttaacaaacgcaaactatgagaaaaataagctagaactattaaattggcctaaaaatgcaaagttgatataatggtgcaaatgaatattgttgtaaattgatgatgtcaacta

SEQ ID NO: 22254 - DNA, 3419 bp, Cannabis sativa
tgcatcaatgtatccattttaaaggggtgctttgtagaattttcctatgcgatttatttataatgtgtgatttgctcataattttatttttaaaaataactatttttttattaattataagaatgttgcaaggagaaatcaaatgttcgactaaaatgatgaggaaactaattattaattatatatatcactcagctaacaaataatgaggaatataaaaattgaatcctttctaaaaaataaaataaattaaaaattattatcaatttaattttatgtttttattatttaaatacggaagcaatataatattgtattttttttaatatagaatgtatcaaatttaaaatataataatatatacaaattaaaattctatgtctaatcaaataaaagtacagtaaattataattcatatatgcattaactcagtttcacttaatagttacctatattaatgagataaaaaaattaataacctatatattagttttcccagtatttaaatatagcaacacccccaataaaaggaaaaaaaaaaaccaatattatttagaatttaaaatccaaacttatatttcgtcaaaaaaaaaaatctaccctttaaaaaaaaataatatacaaagattacgataaatcttctttctcaaaaaaaaaaaaaaaaaaagattacgataaatctttttcattttttatttttatgaatatgaaatcttttatttatttattttgaacagttagttaccctttatttgaaatgaagattttactttcctttttttaacataaataaaataaaaatctagggatggtattttctagtgttttcgactataattaatcctataaatatataataaccttcaaagtatcaaaccctaacaagtcacataacttcaaattaaagttccaaagtccaaaatcattcaactatggccggtatgcaatattattttttcccaactgatttctactaccctcgaccaccaccaccatcaccgccatcacaaccaacgccaccactcgtgacggtggatcatcccccgtgtgatcaaaatccggagtcaaaagttatggtccataacaacaacaataggatgatgaagatcatgagtaatgttagtacaagtgagacgaacaagattttaaagagtactaatgtgccctattcatgtttcgagttatgtcgtcctcgattcgcctatagagaagagaagatttcttctcctccttctactcttgctttgtgttatgctcttaatgtttataattctaaagcacacaacaaatactaagttatacctataattattaggttattattctataggccataattatttgtttatttttgttgttgttgttgttaattaggccagttttgattcataatgagtttaataatttgtacttttttttggttttgttttggttactaatatcgttcataatgaattttgaatgttaatctatagttgtatttattgtaaaagaagatttaacaatcaatattcaattcataaaagaaggttgtgtgactgtgtgtgagaaaacaaaattcattattctttatggcaacacaatttaaattaagagttagcacaaatacaaatttattagagattgataaaattttaatatactattattttaaaaaattaacattaaaaatatttttttatgactcattaaattttaggatcagcaaaattatagagaacaccaaattttatgtgtttttgacatccaattttaacatttttttttatatataatagtgtgcaatgtagttggtgtggacttgcgatgccactaagctttacaaatatggttaccaatttgtaactaaaaattagtaaccaactattgtcataattcaaagttaataaatgtaatacctaactcctaaagattcaatcttcactttgttatcaaaaaaaaaaaaaaaaaactttcaaaatggtataaattacaaattaacctcaattcttgtatttgaatcaataaaatgaagatggattttgtgtcaaaattgtaaatatataaataaaaaaatcgcaaggatgttcttgatcggatttgtagtttttaaaatggtaatttagatttcttaaaataagaaaaagtaatcaaagattcaaatcttataaaaatttccttgaattaagatctcataagaatttccctttcctagtttccttctttgaaaaaaaaaaaggaaatttctctagtgtaatattcttacttactagaatgttagtggaagaatagaaaaggcacacaactaataataataataaaaaataataataaaaataaaaactagtcaaacaaaggcacacaataaactcactcaaaaaaaaaaaaaattaaatcaaaaaaaaaaaaaatctataaaaaagaagcacatagtaaaatatgggaaactactaaagtgcaccttaaaaaaatgtatcatatacccttatttttttagtacttggtgtcccaaaactcaaattttgtcaataaattttacttttagttatatgtaattaaatttaaaattcttataattgaagatagtaataattatgatttttgttcttgatctttgtaaattttttcctgttaaacttttttttattgcaaaaattctttttaaattatgtaaattattgcaaatatctccttttgcttatttattttttttttttaaatagtttgcttatgtgactataagtataaatacagtcaaatgacctatttaacaattttaatctacttaaaatctaatttattgacattaaaatatgtttaaaagatgaatagtacttctctacatgttcaaaaatattttaaaaaaatagagatgttttgaaatagagaaggaatttacataagttgttggaaggtgtataatctaagtgcccctattctttttggcttttttaggattatttcataaatacataaaaataataaaaaaaactacaaaaatttaattgtatagaattttaaatatacttttacgatttttaaaaaaatacgatctatatttttatattactttttagggttgttgtaatgttatttttttgttattttggtatcttttttataaaacattacaacaatataaaaaattcatcaaaaacataattttttttaaaaaaaaagtaatttatataattttgtattatcattattttgtgtacaatagaagcacacgataaaaatatatttaattaattaattgaaaagccactccaggccacgcgccttaacaaccacaacgatcaagctacacctataacctatttcactaataaataaaaataactttttaaataaaaacagatttttttcgttttattttttctttttattttttttttttaaaaaaaaacttaaacctctttggtctctataaatacccc

SEQ ID NO: 22255 - DNA, 2295 bp, Cannabis sativa
  modified_base (1850)..(1855): a, c, t, g, unknown or other
aaattttttacatttatacttttcttaatttttttttttttactgttttttacttattaaagctttagaaagtttttttttttgtcttttttatacatatattttagtcaattttaataaaaataaactccaatagtggttgataactcttgaatttatttgatattgtataatttatttgtcttttgtatttaatttttaatcattttatctcttcatttataatttttggtgttttattcttagttgagtattcaccacaaataaaaaaaaaggctataggcatgactaaattagtgccaatcaatacagttattagtgtcaatatagatatgtaggcacatcaagtcatgccctttttgtggtgcttaaaaatttcaacgggtacaataaatagcgtcgtgccaattaactgatcaaatggcacgacacacatgattcctaattagaataaaaaattctttcagtcatacgtttaggcacgacaaagtcatgcccaatgggtttaatgtaattatccaaaattaataaaaattaatttataaaagtgtcctaccatataaattagcaattacaataaaaacatttgaataactaaatacaacaactaaaaataagtgttcaaataaataatacttatatcatcacattcgtaaaattataaataacaatactataatctcaattgtgtggactcttcctcctcattatcattatcaccatcaccattctctccagactactattgtggaatttgcgatatttgcagatagtatggctattgtgatacttctgacatttgcgggtagtgcggctgtgatgtacgtgtggcatctgctgcattagtgtcatcagagacagctagtgcatcattacaataattttaaataaagaagattattaaatttgtttaactcatatttaaatttttaattttaaaaaacttatacacttgttatgatgaattatcttttattattatgaactcattaattttttttaaaatgccatgtgttaatctataattgatttactttaaaaaagctatataaaaatttttttagaaaattaattttaaaaaatacataaaataaagactttatttttttaaatttctttctcttgtactctcgttctctgttatcatcatataaaaaatataatttattttatatatataatttaaaaaaatttaatcacggctaaacgcgaattatttattggtattataattaacatatacaatgtatatattatttaaattatgtatgaaatttgtcattattctgtgtggaagaaaacatttatatatatatttataaaatgataaatgataaattattgccattagataggagtgaagatagactttagcaaaaacaacttcaacacaatacatacatgcatacatatacaaataaagcttaattataatttatatatataatgtctaaagagattgtcccttctttttgttgtctaatgatgatgatgagttattttcccaaaacttgtaatgcaaactcctcatctccaacatcttctcaatttcttcaatgggaagtcctttagtttcaggcacacaaacaagaacaaagattagggtcacaacaaaagatgaccccaactatgaaaaagctccataaggtaccaatgcagtgtgttgatctcatctatatctattgtaccaacaccaaaacatgatggtataaactcaaaatgatatgttaaagtacttattacattagaaaaatattttttatataggtggtgtttggttggtaagtaatcaaatagaatagaatagaaaggaaaaagttttcactccattcttttgtttggttgcattnnnnnntattagaatgtcattccaatagaatatctttttcactattttgatggaatgactatttcattttgaatggaaggaaagattattctaaagtaacatgagaaaaaatttaatggttttttttatcaatctttttatgtattttaaattttattccattctatattctcattcttatttttatttttatatttccatttctctcaaccaaatgccacctgtctagttccgccataattatgtctcgacgattattggtggtcacgtcgaaaatgaaccttcaaaacaaatacctaacttggttgtttttattgagtccgtcaagattgcgctctatctcagcaaatacacacggaccacgaaaattaaggtgctagataaatgtttctttttctttcttgagtttgctgaacaactttcataataattaatacattcaacaa

SEQ ID NO: 22256 - DNA, 3498 bp, Cannabis sativa
caaacaaacaatgtaacaatatctcgaaagttggttaatatatttctattttaaaataaaatatttaaaaaaattcttaactttaattcaaattaagttgttagaaaatatttaaaaaatattaaaatctaacgaattcctaaaatatcgtaaattcaaatatccaactaatttttaaatatctagtttattcaaatttaatttaaattaatgagataactaataagatgatataacatcatatcttaatttaaaaattgaggtaattctaatattatatttcaaatcttataatttaataaattaagtttaacaaaatgaacaaaattaaaaataggatatttttgtagttatgatattattaattttatttaataaataaataaaatatcttaaatttaaaaattttatggttagaaaaccctaaaatatctattcaaacaaaattaaccaattattcaaaaattgcatgtcattttaacaaaaacatataattttttattaacataaatgtcaattaattaacacttatctaatcttataatttaaattaataaaatatattttgaaaatattttttttttaaaaaaaatgatatggttagcaatttgaaatttatctagattatctttaaattttattaatattttaatgtcaaaataagatgatttcaaattttattaataaaatatgtaaaaactgatcttatacttaaaattaataaaccaaaataaaataataaatttcaaaaataaccataatggcaagtttgtgagaaattaatttttcaaatttaaagcctactaatatctaaaattaattcaaaataattaaaaaataataaaaattatctttaatctgataattagatttttaattgaaaaataagattatacataaatttctactaaaatataaattttacttaattgaaaaatgatttttaaaagttgaaaaatggtcaaaatagtaaaatcaggggagtatggtagtatgcaatgcatactccccacgcgcgtgtttagggtgtttggctgagaatttaggctgcacgcagcctccattggcgtgaaaactcggtcaggtggggggtaatttggacatgcccttatctgaaggaattttgtccgagtgaggcacagacgacatgcagggccggccctaggcataggcgcccatgcgtagggcccacactttttgtggcccaaaataaaaaaaataaaaaaattattaggcttttatttaactaaaatttaattatattataagcaacaaatattcatagcttagttggttgaggtggatgacataatgtccaaggttatgggttcaaatcccataacacttttcttttgatatttttgagggccccaaaatttaattcatcttgagcccatatattttcagggtcggccctgacgacatgggtcgtgtcccctcatccgcgcgcgtatgatagaaaaccctagcctagatattttcaagcttcaaaaaattataactaattcaatttaaattcaaattgagttctgtaaaagtctaaattaataaattttttatctactttctagaaaaaaatacttccagtacgaaaataaaaatattttttgtgaaaaatttgtaactagcaaacaattattaattaagtacataaaccaacatgaacacatccaaatcaaacaaacatcgttttaaatccatattttatgaaaataaaacattaccatggctctgagaccagtagttggagcttattttatcaagcaacttgcgcgaagtgttagcgcatgtcgttttcttgtagagcatttactaggctttactaataacatagatagaaagggctttctcaaccgcttgtagacctattagtcaagctttgatttgacgtcagctaaaatctagatttactaacatgtatgtttgattataattttataatttaacatcctaaatataaatttcctaaaacaataaaataaacacataagagattaataaattcttatattgatggtaataatgtctcattctatttagatctctagccctttattcctatctgtagcagagcattatcaagatctgaatttgaattttctcttctttaatatgattagacacagtcttccttactatgctagggattgctatgacatgagtgggcatactctcaattctctatatcttcaaaatattcaaaagaagaagaagagaaattcgaattggatagtggctctcttctataattattttctgtttgacaaaggaaactagaatcttctaaaaataagagctatacttatctatttataaggtgatacttggattaggtttagaatttaaatggaattaaaaaagataaaaaaaaatagcttcattaatagtttatttacatctacacagataaaatataaattaattacttatttgtcataaaaagtttaatatacccaaatttttgtaataaattacataaatagcacatatttataattttgctatttataatttattctctatcttactaatacccatgctattttaattaaatacgttttttatgtatattaaatactgtgtattatctttttgtatttacttatatttctaaaataattattaaacaaaaaaaagtgtaaatttgaagtttttttataattagaagtattctttaagttatatagtgatatataattaaattattcaaaatattgtttaataatatatatctttttatattttaactacttattagttttatgttatgatatttattgatattatatatatttgtatatataatttgatattaattcttatctaaaataatttatgatatgtagtgtttttcttgttcttatttattatgaaagatatacaatttgttattatatactttattacaggcaatatttaaaaaaaactactaattagtaatttgtaataaagtactatttgtatctaaatctttagtttaactattaattatatattattatcctttaaaaactacttattattatcgaaacatctaatttaactactaatcattattcaaaaagtattagttagtatccaaattaatgttgatttaactacttattgttattaaaaaaaaatactattaattaatatcaaatttcttatattcaattgagggagagctaatatattattagtaaaattatatataaaggaataatgtattattgattaaatattgtaggatattttattagccaaattatatacataaaaaaaatattgtgctgttagttagtacattacatgtataattttattttatttaataacttcagtcatacataataataaattttaagataatgcttgagtagatatattaaaaacgactttatgcacagtcattttttttttaatatgtgtcattattttattttatgtccattgaatattatttccttatttaatttttttcatatataattctttgttaaaaatactatcattttc

SEQ ID NO: 22257 - DNA, 4123 bp, Cannabis sativa
  modified_base (40)..(68): a, c, t, g, unknown or other
aacattaaatgttatttcttatctatattaataagtaaannnnnnnnnnnnnnnnnnnnnnnnnnnnngggcataaaacccaacagatggcacattggactgtgctcccgagtctaagtcctttcagatgctcacttgtagtttgcatccctttggggatcctcaatgcctactacacatttagaagtacgactaccaagaatggtagaagtacctcacgcattaagggtttccccttgagcacttgtttccacatggtcagttggcacacgagggttgtttctagctctagtcgaagtaactctcagagtagttgttttattgtcagatctacatactttttagattcgttaagaaagattttctctttgctgctctttttcagcacgtcgattttcaacgttcctgtagtgttctatgagccaagtttggaaatgttcatgttacttattaagagactctcacagttgttgctacaagttagccactgattggctaagttgtgctactcgaggatcaactttcttggggtcttaaactccatgtgttgttctccaggtggaattcggttgttgacattagtaccagcagttggtggccttggagaacgagttgaggagttgaatctgagacttccatgtgacatcttggatgtaggtgttgtcccaaccccaactctagcaactggcatgcctctaatgggttggcaagttgtgatgcttctttcaacacttgttgatcttgttttaaccatcttgattaggatcttgagttatggctctcaattaaagtaccaaaatattatcgtagaaatctagccaatcctcgctcgctagattggcgagagaagaaataagtttaagtgttaaatagagagacacaggcaatttatagtagttcactccccgtatcgtgatggtaatggagctacgtctactttgattttttattgctcacgagaattacaagaaaactacctaaggaaagacctctaatttctagagagataaagtagagagatatgctatgaccttatggggacttagaagaatatgaaaaatgagctcgaggagctctcctattataaggaatgaggtcctattaaaatattaataaaataataaaaaaaaatgaaaaattcactttgggctgaccttatgatgatcaaacggtaaaaattgactcttgatgaaaattgtcaatttttggagtttgaatctcatccgtcagatcatttttgggcaatctatggcaaaaattaaacttgtcttgggcacaaattttggacttgaaatctttagaattgcaatatgagtgtgatatatgacttgatagatcttttaaatagcttagaaatgaaaaatgaattgcgttgatcggataaatattgagggagctatggttgttttattgaaggttgttcagcacccagtgtccaaatagaatcagattctaataagtagaacccagtgcaccagttcacacgtcaacctgggtgttgggtgcttcccaagtgacttcccgaggctcattttgatacttctaaggcattctagattgcaaatgaggtctcctacccagtttttgaccaaaataagaagaatgcctagagaaaattttatgtttgaggagtggaaacatgtgaacaaggttgtatgtcaactgggcgttggggccctattttggctcccaaaggatctcgtttgctccttgagatcacttgtatcttcattatttttaaaaaatgaaaaagatgccctgaacacttttcgtgaaaaatgactagaaatagcccaggttgacatgagtgctagtttcagcttttttccagtggatggttctgcttgattccaggaaacacttatatcttagttatttgtgaaaatggagaatatgctcggaagagacctcaaaaaattgattagaaatagcccaggttgaaaaaaatgtcaatctggatgttggcccaacacttaggtcaacttggatgctggcccatcacctaggtcaacctgggcgctgggtcccaggtctggcttccaaatggctctatttgttccccaaaagcaccccaaatcttaattattaacgaatacagagaatatgactggaacagttcttctaaactgatgttggaaatggctcaggttaacaaagtatcaacctgggcgctagacccagcgcctaggtcaatctgggcgttgggtctccatcttgtcctcaaagtcgatctatttctttcccgaaagcacttgattctttgttttagatggagacgaataaaatgctcgggatacttcttcaatattttgattggaagcaccccatgttaataatatgtcaacctgcgggctgggtgcagtaggctcagggggcgcctagtgcctctggtgctcaaaaatgaaagtgttccgattctgattcaagtgcctcaaatatgttcgtgacaggtcttattcatgtcgaagtacaaagtttgaaccatttgcactaagacaaactcgaaaattaaaaccctagttggaatgttaacttgggtgcggggtgaaaaccctaggtgcccgggttgacatccaaggtgttgtttcgtctcttttcaatttctaagccttggaattgattcttcttgtcttcttgatttagaatactgaaaggtggtgagttataaataacttagtgtgatccaaactctcattccagagttgccgaagtcaacctgggggcaggactagggacccctcccaggtcgactgctatgactcgagactattcaactctgagatgttttctttcttgccacatgtcgagcattgatgtccacgtcaccagggtcaatttacgagtaaacattttcattaaaaaaaactaaaacatctttatataataatgtccaaatgataaaagtaagtcaaaacttatcttatacttacagcaatattataaacaaaagtaatgattatcttatacttataagtttcaaaagttgacattacttagaaaataaaaatacaatataattcaagagtaaaagcctattcaagaagaaaaagttatttgccccttttggctaataaagcagtactcttgctcaactaattatctctctcgagttatcttgtatttggtggccacatctttctagttgtcttgagtagtgattatctatgtgtgaaatatttcattggctatatgccttataatatttgaaggaattccttaaaaaaaaaaaaaaacaaattatttgccccttttataagtactcacgtaagatttgtcaatgaaaaattatttattatactttgttcttgtattgtttacaaagggggaaacgatcatataatgtattacgattaacttatgaaaaagagaaaaaaaaaataattgaactttttccctttaaacaaaaatttaattgaagttttattccatcaaacacatgcaaatgcaaaaggagaactattccaacttgagggcaaaagcttgacaactagtatacctaccatgtgcttccctctaattcctatttatgatcatactaaataaaaaaaatattttccacatctttttttttattatttttattttttgcaatgatttccaaatcattaataccacatgccaatctcttcgattcctttagcagttatctccttgtacatctaactaattcacaagagcctcctcattcataattttcaataaaaccacctaatcttagtgataattttgtcgtttccattattatgtttggcatcaatgaacattttttaaaaaaaaaaaaggcaaaccttgttttttataaatatattaattgcatggattatattaggcatacctacaaaattgtgtcatatagtcaatgaaaatcaatcaaggttggccactctttcaggataacatgctttaaccaaaatttgtctcccaaattaaattaaagtctaccctcaggtcaacatggactgaatcagaaacctatgtacttgcgaaacacaaatcttccatgcataagaaccttacgcaataatggcatatgataatattatatatgaatgttacacatataaaattgttgatgttgtttttggtcgtttgccgatctcatgcactgatactttttaaattt

SEQ ID NO: 22258 - DNA, 2816 bp, Cannabis sativa
  modified_base (191)..(191): a, c, t, g, unknown or other
  modified_base (365)..(367): a, c, t, g, unknown or other
aaaatcaaaaaaatcgtaaaaaagtttaaaattccgtgaaaccgtatttttgttgtttttttttgttttttttgtgcatttgtgaaattaaccctattacaaaggtctaaaaataaaagcaaacaatgtaatggtaaactcattgccaattgattttgagatgaaatcccatgattctcaacatggtatcngagccatatcccttgcgggcaagcgatcctaccctatacatatagtgaccatgtccattctgatacggttcaagattgatgagcaaaaaatagccatcattttgagggagaatgttgtggacattatccacataaaataaatagtaaagaattgagccatatataagaacatgnnntactccactcattgccaattagttttgagatataaccccataattctcaatagataataataattccattacaattcccattacactaaaccaccgttagtttaaaaaaacaagtcggtgggtccgctactccgcttagagtgttttgcctgtttggcagaggggaaactcagaagaatacgcaaggaaattccgcttcgggaagaaagggagaactaggatttcaattcacagtgaggaaaagctatggacgaccacgaatttcggcgtatcttggatctcttccccctcgtccgatcccgagattttgttgtaatgactacttccacactctatatctctgttttttttttctttaataaatacctgagacaagagattgattgaatttagtggtctgtatgtaggtatatacaaaaaatctaagaaatttatagacctatacttacccttaggagttaactaccaatcgaaaatgaaagtgcattacttttgataaagaactttgttagatgtagaatgagctgcagctagtggattatactgacttattaggtttacccaaataggggtttaagtatttgtgttggttcctgaattttaagtaggttgtccaagttagatttaaatttatgttacaatgcattgtataaacattactaggtttttaccttgtaatggcttgtatatgaatgaactcttgttatttatttttgaattaaaaataagaacgatgtacatgattggactatgcatttcttaactgaatgcagtttcaggctgaatcagaatcatcaagtagacaatcatcttctaagccgtcgcagaatgaagaggtactgccatgtaatgttgttttgttttaagtacaattctattttcttgtattatgaactgtattaatacaagtagcgttgtttttgtttcaacattgttgtggcaaaagttttgacataatgttaatatttctgtgacagctaaaagattggcaagacgcatgggaagaaggaagtagcaaagaagttgaaatcaaaggacctgatcataatggtatgctttcacttgtacaacttctatctaaagaaatatatatgcttactctctaatttaactagcataatgagacttatatggactttgcaaatcccggatattttttttattgcttttgcctattcattagcctttgcaccacttctgtgtattagctagcttattgcatatttatcattagctaagagcctgggtttgcatttgggatgtgggttcattgttcaatgtgataacctcttattagcctttttattcagcatactagccgtgtactctttacacaaatagattgagaagtaaatatttcatttacctggactttctgggtatccattttcaaaagtttctctttttggggcttcttgtattctttgtttgaaaagaaaaaaaaaaagcaatgtttcagataattgattcccttgtgtgacaatatatttttcatttccttttcatgagcctcagtttcaaaagtcttgtcgtcctcaggttatatactgtttcttatgaagtaagaactacgatgaactggggctttaagttagtaaataaaatgatcaagcatactcctcacgattctaatctactttctttcataaattactacttattattattattttcgaactgtgtgtttcatttttctttttaactagctacataaaagtaacattaatacattataaataagaaacgttcttcacttgttaattcacaatctccagtacataattgatttctatatgcttgtggatgtgaaatttaacagatgcattttggaagaagctcaagtcagctgttgagggaaaggtatgttcagcttcggcttttaagcatattattatgtatattttaaaaattaggctccctgcaatcttataataataataaattaattttaaaagtactgcattgtacattctgctaattgttggaacttggtccaaaatatttgtcgtgttcttttcttttaaaccacatttcttcataaaattttataatctactctatcacctttggaaaatgaaactattttagtctatattataacttgtgctagataatctaaattctaaacatttaagatataacatatatcattgttgacagtcttagtttagtatctgtacttaaggtatatataacaaatgttttgaaaagagaaattggtgaaaaaaaaccccttaaatattacattttaagagactgaaccctctatatttaattcttgatggtaaactaccaaaccaccgttataataacaaatccacagttccatccatttttctcagttatctagcagcatagactgtccatgtcaatttcaaattaaatataatgaaaatatattttaattaataaaatatgatgtaataaaaattaagttagaaactcaaaa

SEQ ID NO: 22259 - DNA, 3999 bp, Cannabis sativa
agatataaagtgcctaactaaaattaataaaatatattattttccacttaaccattaccctaatattaatattatgttattatactaattaaaatacatatttatttattttttcctaatattttttctaacactcacctttataaatagtaatactctaaaaaaaaaaaacaataaagagaaatatgaatagagtttttgaaacttcccattattatattactacttataccattccttcttcaaggcttcaacattccaagtcttggactactaactaactagtctctacacaactctctcctcatttcaaccttagtccttatatatactctcatctcttctccattttaataatcctcctttatcataatattctctcctttaattatttgatcctaaacatgagtgaatccaactcaaaaatcttagaaaaagctgtgaattgcttaggcaaaggattcgatttaacctcagatttccgccatcaatactgcaaaggcaaacacacgctaattctcttcaacgacactcataacagacgactcgccgttcccggcttcggcgccgtcgaaaatgtctcctccgatgtaaaatgcgataaaggcgatcgcgttcgataccaatccgatattctcgacttcaatcaggtccgtccgattgataaacgcgtaaattaataacaaataattaattgttaataatgaattaataattacagatgtcggagttttttaatcggaaaacatcggtgccggggaagataccgtcgggacagttcaattcgatgtttggatttcagagtgggtcttgggctatggacgctgcaaatgtgaagaagcttggtttagatggttacttcataattctgttcaatctccatatcgatcgatacccactttttctctctcctgaagttcgtgactctgttccttcttcgtgggacccacgcgctcttgcaaggtaattaattatataactaaactaaccacgattaaaatatcataattagtctcataactatacttaagtttcggtttataatctaatgatccttttaccggaagtatgtgtaatttttctaccacatgttttgtggtgtagagatagaattatttttattgtcatctttttttggttgtgtggggattatatttgattttttgggagattatttttctatgacggtattatcattaatagaatgagaatccactaagtgtataacctaattaaagcaagtataagactcttataactaacacataattttgataattattaaaactatcgaaaaagtagagaaataatctacacaacgtgattctatttttagttatatatataaaaaagtaattttcctttcaaaacttaaatattaagttattaggatctgaacgaaaatatttagtatgaattgctcccaaattttattttaataaatttaaaatgaaatttatattaacgaaattggataaaaattacagctaaatataattattaagttgatgacagttacaaacattttttttgtttaaaaaaaataagcatttactgataaataaaattagactataggtacttattttccaaacatcaaattataggtacttattttccaattattttattaaattatgataacatatattctttttcaccgttattattagttaatttgtcatatattgtatggttgcttgggttattggattttggttttggttttggttttggctgacttttttctttgggttcacatggtttgattgagtataactaggcgttagagtattggatgattggaattgaaactcgtttatttgagatgattagtgttttacataataatattgggctataatatgattgataatttgatatacaaacatatatagagaatacttttattattattattgtgatattaaataaagtcagatatgccttttattttattaatatactttaatgtgtcaatgtccaatttatgatcccattttgagttcacactttgaaggtagaaatagtgcatgaacatgtcggccccctaatcctattatgatcatatggtgttgaattggtttacttcattttaagcctctgactggataaggcttgatcttttcttattcaatctaaagatctgtaattttgtcattttctcacctttttcgtttctttttttttttttcttttttcttttaatgtctaactttagatcaagttccttaaaaagaaaagaaaagaagaaaactttagatttttaagaataataatacgagtattaattgagacactttaattgcttaccttatttattttaattatataattaataataatttgattctcgatcaaaatttgtttgaggtaattaaaaattaaaaatgggttgtgtaacttattttattttatttttgtggcaaattggcaatgaccaataacttcatcaaatgtgtgtaacttttatgcatgtattgtgaaaaaacaagaaactcttatttttagatttttttttattattattatttttatatatacatttgtttttttttttcaaatatggctagcttgttaagtttaatttatttattttaaaagggcttgcaaataattgatacaagtgtcacatggtgtacgtaacacacgttatgtaataaacagtattaatttaatagattaataatttgtagtaattgagtgatagagaatcagtccaatgtgtttgtttattcacaagtcacctttttcatcacattcacatgatctatgtccacctctgccatttttacatctttattcatctttatttgctcaccttttttttttgaagttttttttggtattttttttttaatttaggatattatatatatggacatcgtccaaatttatagtgtcactggattaagtttcctaaattactcttatagaaattatatgacacacctagctaccacaatgtccattagcatttttctactttaaaatagtcaaaatgttattagtaaattaaataacaataggaggaattttttttaattgactaaaaaaagtttatttattaattttaggtaaaaaaatattataattaattattttggttaggggaatactacgaccaattatctaactttgtgacttttgaatctccacattgaacccactgttttaaagtgttttttttttttttcttaataattgattttgggtatttgggtgaaagtagacatgtcatttttagtagctggaacctggaaacgtctatggctgctctgtttgacttttatgtcgatttttttaatgcacataatattaaaatgcttgttaaatagtttagtagccaatttatgttatttttgctgtgtcaaaattgttaaatttggtcaattactaggaaatttgaaactaggttgttctaaaatattaggtgcacacaagatgtttgtggaaatgtctatttttttagttgtcaattggagactaatcatacaacaaataggacatttaatacaaacattgaagtttaaactatatattatacttcctttggtcaagtttttgattattgatgtacacaagattcttttcaaattatcttgtaatatttagctgtcattgtcagttgagattttgtcaaatttgccaatattaaggagtaattattttagagtggataaaaaatgttgctattatttttttttttttaaaaaaatgttactattataattcaagacattgattaattttaaatattttatacagattcatagagaagtatgggactcacatagtagtgggattaagcgttggaggtcaagatgttgtgctggttaagcaagacacgtcttctaacatagaaccctctgagctcaaaaaacacttggatgagcttggagatcagctctttactgggacatgtaatttctcaccaatgctctccaaaactaaagataacaaactgaaggttcataaaatctttaccatgtttcttta

SEQ ID NO: 22260 - DNA, 2623 bp, Cannabis sativa
aatataaatattttacaaaaaataataccttatgtaattattgcataaaaatattaataatggtaaatagatggacttgtgttgaattgtaactttattaaaaatgcttaagaaggtgtgtggtgtgtgcactcgcgtcacctgtccttgtttaacacaaatgagtggtttttctttacacaaatgatttaatgtgtaaaatttattattcagtctttcccaacaaaaaaataaaacaaaaataaaaacaagagcatcagcccaaaatggactaaaaggaccaaagtttcctttagaattcttattaggggtatattgatcggtttaattagattatagtttatttttatcaatccaatataatatggaattgtaaatttttaattgtaattcatccaataaaaaataaaaaaagtgtaacccatctaataatttttattaatttagtcggattaacctgtttaaatcgatttttattttttttattattgttaatttttggtgttcaaataattaatttagaaaaaataaatgtatagtatacgtcttttaaaattaacataattataatttaaattaatgttaaaaaataaatataaattgaataaacattaaagtattaaacaacatatttcaaaaaataaaataaaaaaatatactcaactttattttttatttatttatcttcggagtttattgatgaaggaaaaagataataatttttaatttttatgtttttagcattgggagaaaactgataagaatgtatatacattaatttaaattaattattaattattataaaatatatttataaaaaatactataaaatatgtgtttaaattaaagaagcatttacagatttattattattattattttgctcttctatacctaattctttgaagagtcaatttttcaaagtgatgatttttgttaaaagaaatttgaaataaccatgtctcattattttcaaaaaaaaaaaagaaaaaaccatgtctcattagagattgcttatcagataaaaattaatgacacattgatgaataccattttcatggtgtaaattttatagtaaatttcgctcaaggttatatttgattcaaattttataattgtgttcctatatacaagttataatgttaaagagcatttatagtgtttagtattctttcgagatataatatgttattagtataatttaatattaaatctcacttatatattttaatttaataataattttaaaaaaacagtaattaattataaaatgtcatgtcatacaggtattaaacacaaaaatgaaccctaaaaattaatataatcatcaaattcattatttaaatgaataaatatatataatgttaaaaagtttattttaattaataaaattattaattaataagtcatgttatattttgtgtttaatttagtccaactttatgtgtcaaacttgacatatcttttacactattattgaagctatatttttttttaaaatgagctaatagaggtgatgtgggaccatttcatatatgagagagagagagagagagaaatggcccaaaaccatggagattaactagcaaaaagtaaaactattcccaatccctattcccaaataaggttagttttcatatatgtgaaaagggaagaagagtttcttttcttggaaaaaggtattctatgtctatatatataatataatcattacatgatttagacaagaggagaaagaggaggacccattacccaatgctattaattagagaatgaagaaatataagtgggtccatctcaatggatatcacaagtaatatactagacaaaaaaacacatgaagtgaagtgaaggatgggaatagtactacttgatgagttttgttttggataaattaaggagagagggcatgcaaattgcaattaaacccttcttcgtattcccactcacttcatttatattctctcctcaaactcttcttcttcttcttactcttttacataaaaactacaaaagaattcagaatatgaaagtatccaaactaaatcccaatgcagcttccttcgtaccaagggagagtattaataccaacccttctccaccaccgtccgatcatgatcaccaccgtaggcgatcaaggccaaggccaaggccaagaaacaacaatgatgatgcagttgttgttgctgttggaccaagaaaaaatagtggaaaagtatggagacccaaaacaatgcttcataataataatattattactattggatctacatctacacaacctgcttcttcatcttcatttacaactctcatgattaaaaatgtcccaagtagatatacgtaagtattaatatatacatatttagtcttttttttttatatatatatatatatatttacttaagtattaataatatttaggtcgagtttggttggaggtaatgaaatagaatggaaaggaaataattttcattccattcctttttttagttgcattttaaagtattggaatgacattccaatggaatgttctttccaccattttaatgaaatggctattccatattttaaaaagaaaagaatgaccatttcaatgaaacaagaaaaaaaatttaattatttt

SEQ ID NO: 22261 - DNA, 14283 bp, Cannabis sativa
catgcaccacatcatgcgccaccatttgaccaccacttagccaacttgtgggcatcacttagcttgtaacgtgccatcttggactgcacgtaacactgattataagatctctaagaatggcaaaataaggggagttaacatacattgtactattttccccctaattgagtttttgacctaccatgttttctggtaaacatcaaaaagggagtgtaaacgttttcaagttgagtaatttgtggcataaatacttaagtttaactctcggctacaaataagtattaaattttattttttagcgataataatatttaaattatatttttacaattttcataaatactacatattattatttattcgtttattaaaataattattttgaataaaaatttaataaactaaatcaattaaaaattattacgtctaatttacttaacacttaataatcaaagaaataaacgttttaaacatagattggcgaatgagaatacgccagcactaacttcttcataagttgtggattttaattggaatttcaaacaacccaaaatattgacggcagcgtccaacttctcacgtacgccgttgcttttcagatattttctttatttattatttattttcattacaaaaaattattttctttcattctttttctctccatctctcgtttggttaaggagaaaaaaataaaaaggtaaaaggaaaatatacactttgtgaagagaaaatttcaataatctcagatagagagagaaaaaggaaattacgaagatctagttgtggtaggtcaaaccgatttctactctgcgtgtccgatccagcttctccttctttctgaaaaaaagataggcttttgctgaattttagggtttttaatcttccatttatcttgctacgctcacggattttattttatctcaaggttttgcctctatctttctctaaactagggtttgaagcatgtttataatgctttgcatttcttttaaacgccgatttcaatgcatgctcgatatacgtacatctccaatccaatctagtttatggaactgagtaccttttatttatttattttgcgttgcttgatttttaattttctgaattattttattataggatttgctgtacttttgtgcatgattttgttttggtggttaaatcaacaagttctaggttttggcggaatatgtttaagatctttggttgatttttctttaagagtttgcatgtactgtactatttttcttcccttttctttattgattgattgcaatcttgtaatgtttgaatcagggttttgatcgactgaagttattgagcataggaacaagataattttcctttgaagattcgatttttgctttcgggtgtttagtgcattaggatttttcatttacattgttcgagcatatcgttttggagaagaaggggtatttgtagcgatgagcacttcatgggctgattctgttgctaactctcaatctgagagtgcagctgctggttcatttgataacagtgctccctctcgtccttcaagatcatcatatgttccaccacatcttcgtaacagaccagcctcatctgatgcacctgctgtctcaaattctgctccatcgcaagccggcactggctatggtgtaccatcgactgggtctcgctggaacggtggtccgcggcaggatgttgggcgccctggatatagttccggtggtggctggaacagcaatagaggcagaggagggtccgggtgggaccgtggaagggagcgtgaggtaaatccatttggaaccgaagatgatgcagcagaaccttcttttaccgagcaagagaacacaggaatcaactttgatgcttatgaggatattccagtggagacaagtgggggtaatgtgccaccgcctgtgaatacttttgccgaaatagatttgggggatgcattgaataataatattcggaggtgcaagtatgtgaagccaactcctgttcaacgacatgcaattcccatttctctagctgggcgagacttaatggcatgtgctcagaccggatctggaaagacggctgcattttgtttcccaatcattagtggaatcatgcgggagtctaatattcagaggcctcgtggaactcgtactgcttttccttttgctcttattctctcccctacaagggagttatctagccaggtgagattcagaattgatactttaggctgtattgtgtaaaatggttttcctataagagctgtctttctttcgctgcttaatatagttgctatttttgttgtatctgtcttgcagatacatgacgaagctaaaaagttttcatatcaaactggtgtcagggttgttgttgcttatggaggagcaccaataaatcaacaggttcttaattttctgataactttattagtctttttagatgtttttaaatttgactccaggtgcatgataaatttattattgttaacgtctcagtcattttattcatatgggagtttataccactgcttccctcttcttcctctgttgtggatttaatagtcagaaaaatggaataaaaccctcattatgttataacaaaagtggcattttccacttattatggtttgttttcattatatagatgtattttgggtgtgggctgttttggctgactgatcagtctttgcatcacttattgttaattctgttaatttttccagttgcgagagcttgagagaggagttgatattcttgttgcaactcctggaagattggtagatttgcttgagagagctagagtgtcacttcagatgatcaaatatttggctcttgatgaggcagatcggatgttagacatgggttttgaacctcagattagaaagattgtagagcagatggacatgcctccacctggcatgcgtcaaacaatgctattcagtgctacatttcctaaagagatacaggtttgtctttattttacaattaaaaaatttggtttttagtactgtaatctattcttgtgactggatgatacttgtggtgttagcattctcgtctgctttatatgtgtgtgatcaggtgctaccttttaaaggatacgtactcagagtttgatcaaacaaacattgatagtagtactactagtacttctgttttgaggaatttcaaacatctaactttacaatatttcaacattgcttgttttatagagaatggcagctgactttctttcaaattatatatttttggctgttggaagagttggttcaagtactgatttaattgtccaaagagttgaatttgttcatgaagctgataagagaagtcatttgatggaccttctgcatgctcagaaggaaaatggaacccatggcaaggtaatttcagagacatagtttacatgtttaaatcatgaattgcttattgtttataattttttgtgtggctaaattagcttttattattgataattgtgccttgaaatgcagaactctttgactttagtttttgttgagacaaagaagggagctgacgcattagaatactggttgactggctctgggtttcctgctacaagtattcatggtgatagatctcaacaggttagttaaagttggtcctctcaaatctaacagtttttttagttcttcttggaggtgtttgtgataatgtgtgcattgcttgataattgtttttgtcatttgtcattttttatacgctagttttaagtagtgctctgagaatataatatatgtttttatatatatattttttaatttaacctatccaatttcgggaatagaatgtgaatattgtgaaatacatacttaaaagattgcttaaggatgaatcagtttgacatttcaattttcttcaactcatatgatataaaatgttatatggtgaagtgagtcaaatcagcaaggttgatgactttttattatggtgttagtaaaaaaaacgagattggttaggttgtagtagatgacagaattaagattgtattaagtaggtcatttggtgttttgaggaacatttacattgaaacaccttaaaataagatttagaaaagaactggattgcaaacatttacttgctgcaaaaaagaaaaagagaaaaaaaataatctttggaaatggaagaaacacatctggaaagataaccaatttttggaaaagaaggatccatgaaagatctcaaaatttcctttttttccggatgaaaggaggatctgtaaaaaattgatggaatggaagaataagattgtatggaaccaaaagaaaaaagtaacattgttttgattggaacttgggtaggtgcaaatgtgaacacatttaacacaacacaaaattgcacataaaaggaggcttgtggagtttctaacttagtttgccgtgctccccactcataatgcccgtctttctttataaactgaaaatgatatacgcttccacctataactcagtttgccgtgctccccactcataatgcctgtctttctttataaattgaaaatggtatatgcttccacctataatatatatattgtatgcatccaacgtctgcaataatggagtgactgcaattttttaccataaaactttattatgatcatttaaccacatgtttatatgcaggaaagagaatatgcattgaagtcttttaagagtgggaaaacaccaatattagtggcgacagatgtggcagcgcgtggtcttgatattcctcatgtttctcatgtataaactttgatcttcctaacgacattgatgactatgttcatcggatagggcgaacaggccgagctggcaaatcaggtctagcaactgcttttttcaacgagaacaatgcatcattggcaaggcctcttgctgatttgatgcaagaagcaaaccaagaagtgcctgattggcttactcgttatgcatcaagggcttatggtggtggtggtggtagaaatcgccgtggtggaggtcgctttggtggtcgtgatttcaggagggacagttcttacaataggggtcaggattactatggtggaggtaatagtggtggcggtggagctggcggtggttatggtgggggtggaggttatggaggtccaggagtgagcagtgcttgggattagtctcctgcaacagggtttctctaattttgtctcaagagaatatatattttttcttctttcagattcaatggaaatttctttttgtttttctttttgtcaacctgtttattgttgtgatcttcttgattctgatgtggggaatgctatatcgaatctgtgggaaggaccatagggaaggccttgcctgtaaccagaggtgtcatagtagggccaggttgatggtgaagaactactaacaattttggttatgggatggtttttgcgtgttttgtccttgtgaacatacatgtctgggagagaccgataaatatcttgtcacttactaacccgggcaacttagcagaaaagctcagttagagttaggtacaatacattctacatatatagtttgtagatgaggctgacgctttttttttataaatttcttatagttttcccatacccaaaccctcccctaaaagcataagttaaatgtattctgttctgtcctggattatgttacaactcaagtttagttggaaaacatcattttcatatgttttttttttacttctatttttgctcggagatttatccgttatggttcgtttggtcattttatgtttgtacaagttactttaaaaaattttccagttaatttatgatgttgtttgatgcgagtacttttgaacttatcttgatctcttgttttgtcaaatgtttttatgtaaatatggtcttggcggaagaaagttcaggtatttgcacgtaatggttgaattgtcagagcaaatttggctaaaatatgtgcctcaatattcagtatatctgtatagatacaacattttgaatatcaaataatgatgtgcggaacttgttttgcttctgaattacttctgtagcttccataagttcaaatttaaagcatcctatgataggattggacatagaagcaaccacatcaccactagagttgcaaagaatagctccaacaccataaccataaaagttatacattttattacacttccacaaagacgaatgtagcgggtttctttggacaagagacatgaacatatttcaactttggactaatggagttcaatttcttcaacttccatgtaggtcatcaatatgagaagacttgaaattgggacctgtacaagcctccttcactcacactagttctaaaacataaattacaattgggagaagagagaaagggagagagaattctagacagagagagagagagactaaacttggtgttgagatcgttttggtgtagagatgttatgtctatttatacgctttgaaagttgtggtagttggattggaattgaaggccaactaacttaactgacatttaagtacagagggatgccgtagaatttttctattaactgattttgtgagctaattctcaacataaacaactaaattagtaaaacaaactagtgatgaatgtatgattcaagttttatcttgaatgcttagtaggttcagatagtgatgaaacttgtctctgcaaacacactttgtgaatatgtctgcagggttgtcacgagtacatatcttcctcacttgaacctactttgagagaactacatctctgatgaagtgtaatttgatatcaatgtactttgaccttttatgaaaaatatgaggtacaaagcatttgattatcacaatgagctaatatgtcttctgaattgaaccccaactcactgctcaaaccctttagccatagtgcctccttgatgacttcatttgcagtcatatactcagcctctatagaggataggaccacaattttctgtaggttagattttcaactaacacactctcctagaactgtaaaaacataccatgtacaactccttgtgtcaatgttggatgtaaaatctgagtcaacaaagccaataacttcttctttgtgttggctttcattgttgaacatcagaccagtgttcaaagttcatttgatgtacctcatgatccacttcaaagcttcctaatgttcagatcttggatttgagatatatctgctaaccacactcatggcattaactagattaggtctagtgcataccattgagtacatcaagcttcccatacaacttgcataaggtattttactcatcttgtacctctctacttcagtggttagggactgggatgcagtgagcatgaaatgttgtgcaagtggagtggagacttccttgcatttgttcatgccaaatttgcacaacatcttctataagtaacctttatgagacaaggttattatgtttggtttggaccttttgatgtcaattccaagaattctcttggcagcctctggtctttcatctcaaactcattactcagtctcaccttcagcttatttctttttgatctttcttttccaatgatcaaaataccatctacatacaacaacaagtaaatatgattgttgaaataaacacatcaatcatgatcacttttgttgaatccaattttgatcatatgatagtaaaatctcatgttccattgccttaaagcttgctttaggccatatagtgatttcttgagcatgcacacctcatctggatttccactcttaaaccctttaagtaattccatgtacaccttctgttctagttcctcatgtaagaaagcagttcttacatccatttggtctattacgaaatcaaacttttgcaaccttagccaccattgcccttattgaagtttgcttgaccattggttaacaaatttcattgaaatccacgccttctttatgtgtgaatcccttggcaactagtcttgccttgtaccttgctccctcaattccaagaatgccttccttttgtctgaaaatccatttgtaggatatcaacttctgtccatctggtctcttaaccctgatccatgtcttgttctttaacaaggaaactttctcttcttctattgcttgcagccatgctgcaacattttttccacttattattttttttttgatagcaggctggctctgagctattaatgtcttcattagcagctagtgcataagtaataaaatcagcatagccaaatcttgttgggggtctgatctccctcctttctctgtctctagctaactgatagttgttgaggatgtcttgtgcctcatcttcctcagctgactcattttcatttaattctctacgcattgacacttctgcttgatccaccttaaacttaacattctctttctaattagattcattgtctccagatgtggtttttgttttcataggcatctcatcttccttaaaagtcacatctctgctaatcatgcattttctgtgtccttcaagacatcagaccttgtgatccttgacccctttaaggtatccaagaaacatgcatttatgttccctaggctgtagtttatcttgtcagatatgcacataagtagcgcattcaaaaactctcaaatggtcaaattttggaggcttacctatccaaagttcccgaggtgtcatgaattgatttgcaacagaaggacatctgttgatcaagtaacatgatgtgttaagtgcttctccccagatttttcttatcaaatcagcacatacgagcaagcatctcactctctcaagtagtgttttgttcattctttcagccaagccattttgttggggagtcttaatcactgtcttatgtctcaaaagtccttctttggcacaaaatagtttgaattcatctaaacagaattcaagcccattgtctgttcttagaactttgagcttgttccctgtttgattctccaacagcttcctccattctagaaaagtgttgacagcttggttcttatttttcaacagatgcacccataccttccctctaaaatcatcctctatgctcatgaaatagtaggctctacccatagtgggaattctagatggaccacatagatataagtgaacataggctagtctttttgtggtagtatgttctcctttgctaaatttaatcctacaggccttccctaagacacattccttacaaaattctagattttgtttctacttatccttgaacaacccctgtttgttaagttcttcaagccctctttagcttgcatgagctaatcttaactgccatagtcttgtttgatttgcacttactgtgttaatagctggtgcaacagatccaactactgtgtctccatccaagaagtacaaaccaatactcgactttccttgcatcaagacctgtgacccttctcttcttctcatcacaccatcatccacatatactttgtatccaagtttgtaaacatgcctatggataacaaatttctcttaagttctaggacaaatcagacctggtgtagggttctgatttgtccatcatgagtcttaatcctgacagtaccaatccctttgatgatgcacattttgttgttgcctagtaacacagtactattgtgttcttctgtaagagaactcaacaaattcttatttggtgtcatatgaaatgagcaccctaaattcatgatccattttctacttgagtgtctgaactggatgcaataagaactcctgtagattcataaccatgtgcaacataaacctcaccttggttcttgttcttgccttgattgttgtctcttctcaacttagccttcaatgccaaacattcatctttaaagttcccttctttcttgtagtaataatatttttttcctgaatttcctttggaatttgaacccctgtagagttcctagtgtttggcttagattgattcttgtacccatttgaatttttgtttcccttgtattctttcttgtggtactttcctttgataatcaataatccttctccattgctctcccctctttcatcacctttcttttaaatctttgccatacagaattgtgtccacaaaatgctcatacatctttagcaaagagctgagcaacatgattacttggtcttcatcctcaatcttgactccaagattattgagatcaaggatgattcttttaaactcatcaagatgttttttgagttctctggtttcatccatccgaagtgtgtatagacttttcttgacatacaacttgtttactagagacttcttcatgtagattgatgacaactttttccacatatcaatttccttttcgacattagaaacctctctcaacacttcatcatcaagacttagaagaataacactgtgtgcctttgtcttatcccagttttcttcttcttgtcctctatgagattcatcatagcttcattatctaatgcctctgagatccctgaatgaaccaaaaaagatttcatctttattctccacaagttaaagtcattcgagccattgaatttgtctacctcaaattttatagtagccattacaaacttggttcttggaagttgaatctaattcttgaaagtttgaatgtagtttttgaagactttgaaagcagatcttgaagccttcaactagaacctgtgctttgataccatttgatgtgaactagattcacattaaactagttgttatgattaataacagctcataagaataaaaaattcaaactttagatcagaattaaaactttacaccagaaaatgaataaaaacagaagagcttgtctgaaaatgcaatggcagcaagaatgaattctttattgattattagcacattacaaccagagttcttggaactcttttacactcatcaatggtgcatcacaccagttacaatagccttacctagggtatccttgatccgatacacaaggaacccgtacaacccccctttactcacactagttctacgacagaaattacaattaggagaagagagaaagggagagagaaactaaacttggtgctgagatgattttgatgtagagctgttatgtctatttttaggctttgagagtgctgatagttgaattggaattggaggctaactaacttaattgtcatttaagtaagagagtagattgaaagctgaaaaagggatgctgcaacattttgctattaattggttttgtgagctaattatcaacaaaaatatgtgtggaaaaattacgactaatagtgcagaatcaaatcaatgaaacttaaacaatcaaacaattagcgaaaacacaattaacaaatcaaagacaataatcggataaaaaacaaaagcaaacagagtagataaaacaagaaacaatatatacaaaaaaaaaaaagaaatcaataccaaaatatatactagttcacgtccgataaatcggtgtgatctatggctctactcaagttctgaaacactctgaaccttctttattgattgagcaagaacaactacattacagtacaaacatattctctattgagttctctcaaagtgtttcaactctcacactcttactcaagaatcttcttcatctatagaagattcttcttacaaaatccatacccaaactctttcttttctcagtacctctgtctctacctctcagtctctttctctctctaactctcaatctcaatctgaatcctctgttgaaaaagacaagtcaaggtggcacttatagacttaggataaagatcttaaagtttgtggctgcaacaatggaagttgttaagttagttagacaataactaacttaacaaactctcttatgagcaagatctccatgtcatcatccgtcttagtgcatctgggaacatatacgagctttcaggatcacagaccaaagacactcgctgaagaggcttccgaataggatagaaccagctagagtcgactatccggaactatcttccaggaagaataactagctgtccaaaactcttctggaggagggctaactattctgaagactgaacccgaagtggacatgatagtcatccaggaacttccttctagactcaactatcattctataaaactccttctgggatagacaagttagctgtccgggaacaacatctggaaaacacctaactttctaagaacaacttttgaaaactttttcatttggagaaactataccacaatatgagtaacacaaaagccccaagagaaaattgatttcctatatctaaatcctaacgaaaaattgagggatgatcccaaaataaagaaacaaagaaatgaactcccttccccataacgagatcaaatgaaatcttagaagcaacaaccgaaataaataaagataaagaattctacaaattgacatgtggtcttgatagattgagtggttggtttccacttgtaaaaatatagatggtcatttaaatgctgaaaaatgcatgttgtgtaacaatttaccgcatattttcaaggtagtctctttttcacgcataaataaagttgccgtttccatcttgaaatttccatagaagcaccagaaacgattccaaaatcattaatggttaaaatgagtgatataagcgaccgaaatagaagtgaactcatgaaacagatcttccacaagaaattctgtcaaaacggggcctctttaccaaatcgagcatgaaacttggcaataaaagacgatcattgttgtaagctcgtacaaatctaacaatattcactgtatgtggaaaggaaagcttgagctgaatcatcagcaagattgcctgtaagaacaaaactaagttttttgaggtcttatacttaaattgatagaaacaacctagtgtcacttctttttataggaaaaattatctgggaaagttgatgattatgaagaggaaaaaactttcttggtatccctgaaagaagtactaaacttcgtcagagtcttcaaagtcagaaatgtcctcagaaccttcaccttcaccatcaacatcaacatcttcctcttcttcagattcttctagctcactttcagtctccccattgtcaagcataatacccacttttggtagaaggatttcacctttgcctctataaagcaaacctgttctcataacatgataaaatttctctctaacacgagtcaagggatgtttgttcaccagtttccctctttggtacccttctctaagagaaactgttgttgttttgcacttcaaggacaagtagaaaatcccagggtacctagtgaagattcttgtaaacttatgaggaagatttaactcctctctcatgcttctcaaatagttcctctttgtctttttgtgaagagtcacgctcaaaatctcatgtagaagcccaacaactcttttctccattaaatcactattgggatcaatattcttggaatcctcataaggagaaatgtatggtaatttctgaaactcctccatccactctctaaccttcttctgagctccataaccccttggaaaactcatgggaaacgacaatgtcgtttgacccctcttaaattgcctatactcatcccccacttcactattctccttactcatttccaatgctgaaacagctaaatcatcacgccattgcaaaagcctcaagcaattcaacccatttgaggccttaatgaaccgaaaaagatctgggtacttaggaaccattaacttctcaaaattatcaggcaaacccagatcccatttgatcggatacaaagatttaagcggtaaagttctagttttggtcatcataagcagtctacaaagcctctcaacggcgtcgttttcatgagcttggtgtatactctgttcttgtgagtctaacaacagtgaagtgtccgctaacttaaaacaaggcaaatttgagtattgggcgtgtggaaattcatgaaagattgttgggtaccttcgcatgaaccggagaacaggtacggtgaggcctagaagcttctgccaatcggtaaaggacttggcggtgaggaagccggtgggggaccttttaatggcatctttgagaagacaagcggctttgagttcggtatccttgtcgattatgtggtcaaggcttctgttcttgacccatttgaggcgaactttggatatgcctcgccattgatggaaatagggaggaagaagataaagcttggtgggttcgtacgaggggtttgagattaggaacgaaagtaaagggtttctcggtttgaggttcatcaatttagattgagtattgggattttgggttcagagacagtagaaagaatgacaatttaaccctaatatcaggtaaccaacgttaaaaatataattcttttcttaaaaagat

SEQ ID NO: 22262 - DNA, 2667 bp, Cannabis sativa
  modified_base (2141)..(2153): a, c, t, g, unknown or other
  modified_base (2344)..(2363): a, c, t, g, unknown or other
tttattgagaacaaatcagattagattgaaatgggttctatttagggcataaaatcccacagtctacccttggaggcaatggcctggaacttggatccaacggggtactcgtatcagtttcgccagctgtagttgccaggcttgtggtgacaggattcaccacatctacagtactcatcaggatcccagttataattagaatctgagtgcctagatctgcaatctaggggtctttagggagacccgaagatgcagatgatgcaacaatagttattcttctgttcaccatggcatttgatcagattactatatccacgctctcataaaaagttgacctcaaaaagtgatcaactgacagcgaggttgtatggatcagatgctagccatgtgtttgcacaattaagaatgaaaagtaataaacaacaaatttgatatagatgtttggccctcttatgacagaaggtaatcacctactccccatttagttttatcaataccgagggtaatactatctagatgaatatagatgggatattttgtagcactcttaggaatacaaggtatgaatcaataattgaaaaactaaagtgtttagattatgatagtgtaggtgtgtgagtgaggaagtgaggaagagagagtttgtcaaacgcttagagcttggaggcaggtttccggcttaaatgcaacttagatttttaggcaaaggttaacgcctttatataggaggcctaaaaccctagattacagttaaaatccctaaatactttcatagtttgttagatctttacaaaagactaaattgcccttgaatctagctattattcatccattttgttgggcttttagggcccaattcgcagcccatgacttgttgttgacgtgttgaagtgcacaggtaactgtgcagagaacctcctggccagtcacgaccctgcggaggccaagctagccggccatggtgtagtcacaagggtggccgaccaactccttagtgggagctggtctgttactgatacccgtttgagtgtcggggtctctgttttttcatgtgttaactcggctttcctattggtgagtagtgctgccacatgccattgattttgtaataacaatgaaatgaagtcacacttcaggaggacaaaaattaggataaaaatatcgataaatgaagttacaacaatgaaataagaaaaagaagaaatgcttgtgactagtaacttacaaatagaggaaaattgagtagctgtagattctgttgcaattcctcggtatgattgagcttggcaatgatgacaaaatagtaaaagaaaatctaggctatttggaattttgtctggcttagagttctaagaattgtgagagtaaaagtcttgaagaagaagattgtttacacatttaatatggcatggggaagaaaatccatccccttacgctgaacaaacgtgcttaagggtttagacccattattctctaatttcacgagaccccatacatcaatcgatggctaataaatgagttgtcaagtcataactaaagatgagccaaatccaatcaaacacctgtagacaacctaaatacatcatcaaagtagataatcatgatctaagattaattagatttgggaaattgtacaaagtctcgttcaaacaaacacgacgattgtttctttttacaaccataatgagtctataaatactgcattgatgtatatataaggagatcggtcagaaaattttctataataaatactctcataaatacagtgactagtagaaaaaaaactcattcattacttcacacaactctaattattggttaccaaaaatcttagtcaacatatatgttattttgcaccagtagtgcctaaaacctctaaacatgttaccttacaattggctagcgatactccttaaaagttattatattatactatgtgggatctgaaacttagttggacagatagcaatattaataaatagaaaggtgctaggcactactggtgtcttatagcatttctcaacatttatatattaaggaacgaattgttggaatatcttttacgaggatctagatttgcgaacaagtatattttttaacatcttaactatggatatctaaaacgatgaaaataaacacannnnnnnnnnnnnaaaccttacattggttgcagaaaaattaaatgactagagatcttgataatgctctggtacagaaaggaatcatgggctagagatcttgaacgaaaggagtcatattattcgagtgcaaccaatataaggttttcttaaacacttatgtgtttatttcattgttttagagatttcatatttaggatgttaannnnnnnnnnnnnnnnnnnnatctagatcctcgtaaaatattcccaacagcatgcactcaatcactaaggctagaatttgatagtgaagaatgctataggacttcgaattagagaagaaaagaagaagaagaagtctaaaactctctatttgtctgacaagatgtaaactaggttaagagtcattagttggattatgagactattcttttctttttatactaattcacttagggttaggattgatttatttggaataaaaaatgataaaatattagcaaaaatgacacctaatggccagtcatgaagagggcccatcactagtt

SEQ ID NO: 22263 - DNA, 1493 bp, Cannabis sativa
cacgagaagaaccatttggccgactttaacgaacagatttaagagcacaaataatacaactgaactagaacttaaccatctcaggattgagatcacttgatctaggataaactaggtgatattttttttgataaatcactgaattgtattgcacaaacaatctttacatcctactagcaccccatcaagggcctaaaaatctatacaagatcaaatacttctttctatacatttcatctataaagcataaaaccaatctttatctacattcaggattttctttggcaaaaaaatagaaatttgaagctttagactccattttgtgtcctcgattagtctgttggagtttaacgagttctcttgccatattacagcatttcttgtcctccaaatgctgtaaaccagagcagcaattgctgcagcatacacctgtttcttgaattttgagattttagccttaccgatccatctcaccaattggggaaggctcttggctcgtgcattccatttcagccaactctcgatctccaacaagcactgactagcaacactacattcaaagaataagtgttgtccattttcattttgaacatcacaaaggctacatctctcattcacttgaataccatatctgaccaactgatccttggtttttaatctatttagcattgccaaccacaatatgacactatgttttggtgtgttcagtctagcccatacttcattactccatagcagtctattttgaggatgagtgaacaacttgtatccagctgcaatggtgtatctttacctctgaaattcagcactgtctgctatatttttgatatgatcttttagagctaccatcttcttccagtaaaaactgaaatggacagaagcagagaagctccaccactcctgcttcttgatatatacactatgcacccatctgagccataaactttcctgcttatttgaaatagcccaaatatacttacatatggctgccttgttccattcctcaagctttttgattcctaagcctcctgcagattttggttgacagacattttcccaagctactaccccagctccatgaaataaagcttggcctttccatagaaaagatctacagattgcttctaaggatttcaacactttttttggcatgatcatcatctgactccaataagcctgaatagtaactagaaccgagttaattagtgtaattcttccagcaaatgaaagattccttgagctccaactcttgatcctggctgtcattcttttagcgaacaattcacattcttttctagaaattttctttccacagattgggatccccatgtatgtgaaaggcagggcatgccacatgaatccatataactgcaatatttgattcgcacaatcttacttgcattaggttgcagtccagatgtgagagaaaataactttagagcctgcaacatatatacagtacttttgaaatctccatgatagaatagtagcac

SEQ ID NO: 22264 - DNA, 3005 bp, Cannabis sativa
  modified_base (283)..(295): a, c, t, g, unknown or other
aaaacttaataaaataatatatatatatatgtataacgattggtttcagttttttcggtcggtttattacccaaaaaaacaccaaccattcaatagcggttataaccgttagtgatttttttggtttttggtttcgtctccaacggtgttcggtaggtcgatttgaacagttttctcggttttctgaattttatgctcacccctaattagaataaacaactgagaaattctcattcaatttctctttctctctttttctttttttcttcttatatattttatnnnnnnnnnnnnnacgttatcagcacgagtctctacccaagcctcaaggtaaatattttgttaaagttcttgaatattattttaaggtcacgatacactaaatgtatatttatatatacccatctgactgaaacgattttaagaaccattttttcttcttcttttttatttaatatctatatattatatgtgtatgtatatattcttattcttatatgtttattattgatttcatatatatattatattcttattatttataatatttataatacatgcgtgtttatgatatgatagagaaaatttatataaattatacatatatcaagaagattatgtatactcgataaaatcttgcatatatcctgaagattatgcgtcttcaattaaaacttacatatatcttgaagattatacaaatataatattcatcatataactgactgaaatataataaagggagtttaaggtctcgacacttcagaaattagattagaagaatcggttacaacagttgcaacaaattcaaaaagggagtcgttatttgtataagtcaatttggttttgtaaacacttgtgattcatctaataaatttctttctctgggtgtggccccgtggactaggagaaattcgaaagagttactaataccacgtataaaatgttgttagtcattttaattttctacattttactttctgcagtgtatttctattctgtcagattttgtgtctgatagaatagagacaaattctattcaaacaattttactacagttttgcattatttaaattaattgataatttcacttggtaacaattaaaaacaaaatttcaattggtatcagagcagttcactaaactcttagtgagatcttgtgtttaatttctatttaatttgttccttgtatgaaatgtctttctttgtagaaggaagttcggtatcttgttgttatacccgaaatttgggtggtacttcagagggtgacacgtgtcaaccttggggaatatgaatcaacgaatatattgataattatatcaataaatataatatggaataactcattcaatgcagaattaataaaagtatatttgtaactcactgactgcacggtcttaagcgagataaggatgtgcaaactattggttcgcgtattgacgagaaattatttcacgttcgaaggcataatcttaaggaagacataaataatggatagcgagacatccatctcgctataggaaggcacactcatggtaagctccagctcgctgccagagttattgtttctattgagaacccccaagaaatgattgtccagcctgcaaggccttatggtcaaagtgcatttcttaagttttctcagtacactggtgctcatacaacattttaagtatgcaaaaaagtgatctcaagacagagaaagaggatttggtggctccttctactgttgcatcttacaaggcttctactccaattcctgatactgttgaagccttatcatctaagaaatccaagccttaatctctggtgttttcttcggatgacctttctgtagaagctcctgttccaactgcttcaacatctatctctgtaaaactctctgatgttggagcttccctcgattccttgactaatcgtgtagtgactcttgagggactccaacgttcagttttggatgttgtcaaagccttgtctaaggtcccagaagcttagtttttcttgtccctttattttttgtctccattcctaagagcattgatactttctttagtcttaggtttggcatatttgtttcttttttgcttttagtactttagctactttgaaagacacaaaaggggagagtagactcaaaaacctgttatattttgatttgtgtaactctggaccttcttattttgagggggagttaagttttagtttcattttcatatttgttatgagttatgcaagcttgcaggggagttcttctcttttcttatttctaattgtatgttgcaggttttttgttttatttttgtctatcaaattgccaaaaggggagattgtaaaaccctttattggcatatttgataaaatatataaaaatattatttgtggtattttcgaaattgtctttatttgtttattcattattttcaaaaatctagtttccttctcttgtgtgaaaagacttccaaatcagatcttatattttttttgacttattgtgtattaaatatgatttctttttataaattatttgattttatactttgctttttcaggaaagtcttattcatattttatttcttttgatctgatttcttgaccaagaaaccgtacacaactatgagtattaatgtagtcaaagttgccttatttattcatggaaactttgctaaaaactgtccaagttcattgtatctatttgtacagactgactgtttgtttaaatagattttgactttcctttttgggaagattttcatttgatgacctgatcatttcttggttgtttgaccacgatctagagggtttttaaagtgtataatatacacccttaagtcgctggtattggttagctctcttggtgtatcaattctatattacttttcaaagttagagagtgttttttttgttgtatgaagaacttgagtccaacaagttcttagtattttattattgtgttactctatattgtttcttgttgaaattatgcaggttgaacaccttggatgttg

SEQ ID NO: 22265 - DNA, 3432 bp, Cannabis sativa
ttttgagaaccagtgtcacaaacaccatgaaatctggatttagagccagaaagagtgaaccgtgtgacagattcattttagcattatctgatttttatcccttctcttactgctttaaaatccttctgaattttggatttaccgttgtcctttgttgtttgttagtaccatttgtaatattttgcttccttattcattatcctttttgctattatttagcggtttgatctgaaaaaatcacatgtttttcttaatagggcttttctggattgcaaagaagtcaaagcagttgttagcataggttgctgttacaacctattatctgaagaaggttttgaccatgtaaattctgagtatggttttccaatgagccgtggagttaaatcagctggcttgccacttggaaagagtttgcgtgatcttgcttgtcaggtagaggtgtatcctttgtcactctaatccgtaccaaaatgtgtgtgcattttacacgagatattatataatttcttaaataatttatgttctagacttcaacatctttcttatgaggtcctttcccttataatattttctttcactgtggattttataatttaaaatgttttgctgtgtagatattttgctttaatacatttgtagtatgcactcatgtaagcattgtttgtctattgaagaaaaacttaactaatattattttgtcttactagagtgcagagaggtggagatgtctggaaactgatgctggagctcacaactttgagatgcatgcttttcgtgctgcttttcagatggtatcccatttgttttccttctttgcatttattcttctcattgtaatgctgctataatttgtaactgttagcttaagttttgacaacatatatgcagttgaaatccattttattgccaactttaattgggtacaaccttcttagaaaaaaagtttgatacctgtttttccaatttctcttctttcaatttaaactttattgtggttgacacgtgtcctgttaaaaggttcttaataaatactatccagaagtcatgacaacaagtccatcaattgggcgtcaaggaaaagccttgcgtcgtctacagaaaagggctacctttgactccccgctgaaccacaaagatagcacttgtgcatcttcacatcagatgcaatctaagctgaaagaaagtacagagccagaaagaggtaaagattttgcttagcataatttaacatggttatgcctacttggtttttattctattatgttgtattgatggtgggctgaaacatgtctacgcctactaactcattctgaagcatataacagtgtgaaaatgtaatgcaggtgatatctttagctcggtatctgagacaacatctttatctggtagagattctctcagtggctctgaatgtgagaacgtcaattgcgccgccaataatgattttcttttcctgagatacagccagtctggattgtgccacctaggtctcaagtctttgcaggatattgaattacatagaatatggaaggaagttgagcccttttctgtaagttaccttttactatttaaaagacagcaggctttttttttttcttttcttggtaggacagcaggctgttttgtcaaaacttgatggatttgttggaccatattattttatgcttcatggatgaaatatttgcacctttgaactcatcctttgtcgttgttggaattggaaccattgtgattctacttgaatatcaactttcaaggtaatattgatgtgataacatttttattctttcctgtaaatacaataaagtctaagcctaactaataaagtagacgaaaaatctactagttagtttagcaaaaggaaacaataatccctaatagccagccagatgaaagacaggaaaagtcttgtctctgttggacatttctatcaaggctggatgcttcaagaagggtcctaggcttatgcatctgaatgttatacatgagggttaagtcctttcctgtgtgcacttctctgaggctttagtttagtcttgagttgctgaggctaatacatttgtaagcccaatgagattaattcagcttatgtttgctgatgttggaggaacaagagactatcaatctttttgtaaatgatctctccatattgcaaaaggactaaattaaaggtgaagacaattaaaccaaaggccaagaaattggtagctgatcagctatttaataaataacctgttatgagaattgctgcttgatgaatttaatatgggagaatgaatttacattcatatgaccatgctttgtgattacatacaggaatttattggactttattggtctcttcgagctgctttggggcctctcttagaaacatatattttgctcgatagactgttgttccttcaagagcaaggaaataccattgaagcactgatgttatcaatttttgaccctgcattatcaccaagaaatgtagcaattattgcaaaaaggaagtgacaaaaggtgatggtaatattctgcaccttatttttgttcatatgatttgcaatgatcattaattcttagaaatttttaagccatttgataataggctcgaaaggaaacctgcagttgcttgtgattgtgctaggattagacactttagatatcctgggttggtaggtttgcagttaattgtaaaactgttaaattcagatgactcttgaggataaactgttagaaaggcaaagaagagagttgtttaagaaaattttgcggaattaaatagatgattaccgattaggaatgttggagtgtgtttgctgtagttgggggtacatggtaggaagagatgtattagtggctgacaaaacttataatgaaatagaaagtcggtgttgaagaagacaaggaaagattgcattgaggattaagctcataaacaataattctgatattgcttattaataattttgtttaattgaatattttattttattttatcaatattatattttcattattatattgtgcagttggacttggatgtgtcctttgttggacaattattttcctgttcttttagctcgttgtggtcacttatttctcagtgattgcaatttgcatgtgcctgtgctaaagcattttggttctatcgtagattttttgagaaatgatgaatgatcagctttttactaaaaattatatgatcatgaatccaatcacactataatgctatcatcctatcataattaggaatctcatttaactgtataatttcagaaccactaaccaagaaacatgtaaatgttcgggtcccatgacattcctattctcttaaaagaaaagtaaaaagttatagaccaagtgcatcgtattttttgggacctaacacaacaaatatatttctgtactataatagtttcatgcaggatgtcaaaggaaagaaat

SEQ ID NO: 22266 - DNA, 1328 bp, Cannabis sativa
  modified_base (1273)..(1274): a, c, t, g, unknown or other
tatatatagattataagcctccttagtctaacggctagaattacaaaaattgaattttgataagagaagactaaatttcttgtgtttaaaaaggaaactttagataatgaatgtaaatggcaaaatgattagcaaaaaaaaatgagatgtcatttttgtttcaaatgacaacaaataatcatatttataaataaattaaattttgaagaagaaaaaaacaaagtcagagattatagacaatgacattcaaaacaagtcaatcttttttcaattgtaataatcaaacatgagaaaaatgcccatgaaaaaaaatatataaacttgaactttttttcaatcttattccactatagcagaccatttcttcaaccaaaaggagaaagaactactcacaaaatcttaagggtatagaatttggccgcccggagcataatcgccaagcttgatcggtcaccgccatcgcttccaatgtatcatacataagattacaataaggatgagttttatcttcaacagagaaaacataaactctgctgtttaactcaatccaactacaaccgggaccctttttcgcttcgattctccttagtctcttccttactttcatcttctcctcccactttcctagcacatcataaatgttggacaagataatgtaagtgtataattgtaacgcccgtacttttataaaaaaaattcattttatttacaagcgttaaacgcaaaaaatcataatgtcgtatttttatttaatacttgaaaattcataactggccaatttttgtacaaaagacataataaataataactaaaaataattacgacataaatttaatagcgttaataaataagcaaagcgccctagatcgcccacagttatatggcccacagcgagcgttcacacacacaagcatctaaagttccactcgccaccggcattttagactttcacttaccttggtctgtacatggttatttgataagggtgagccactaaactcagtatggaaatgtgtgtcaggtagtcacataaataaaaaataaataaataaataaaacacaactaaaatgcacatatttagacaaataacaattcataaacttaatttgatcactagtaactaataactagtttctgagctaagtcacataataatgattaatccccagtccgactttagcaaataaactcgaactatactggactaaatggcggagggctggaatctaccaaatagactcaacagacaagtatttaaccattatcttatcnntcaaaccatgtcacataaactataatctacctaatttaaataatgacaaactac

SEQ ID NO: 22267 - DNA, 3460 bp, Cannabis sativa
  modified_base (867)..(875): a, c, t, g, unknown or other
ttctgtaattctaaggtagagttagctctagacattttttgtaagtatagtatcacccatggtatttggtttaaaagcaagtggggctgcacatgaatacttaaaactggatagatactatggcatttggaaaatggtggattgatttaaaggatgaagacatcaagttgtttgcaatctacatttgtgatgttctatgattttggagaaatgacattgtacataactacaggatctgggacttcttagctatttttaatgattgcatgaggagatttgctaaattttcagcagttacatctcctgctgaagcttctgtcccttctactcttgtgctctctggttcagaacctgtgtggtgttatttagttactgatttggattctcgtgaagtgtttcaagtagatgcctctgttgtggatgaagatgcaggtcttgttgttgtgcaaaggggttgctcgagcatggaagaggctaggatagctgtggacttttcaattgtttgtaatgtcttagaagctgaactgagagccattatgttagctcagtagctgactaaggttcttggcttgcctagcatcatcattgaatctgattctgaggtggctgtcaagggtctcaagcttggttctcttccttttggttggggatcttaccctttgttgattgtgccaatttgtgtaaggactttaagtttatggacgttatttttatttctcgttgtgtgaatgttgcgactgatatgctcacccattgggcttgagttgttaagatcaagtctcgtggctgcttaagggaagtggccccttttgtggtcactgctttgacttagtttgttttcaataaattacctcatatactattttnnnnnnnnnttttttttttttataaatttacgatttgggttacttcggtagtttttctagtgatttctatgtttgttgctatacgtattttagttgcgatttacttgcttcgtttgttattatagggatttctgtgtagaattatgtaaaaaaaaaaactttttcaaagtcagttgaaacccctccacacccgttttagttgccagcgagttgactcagttgaacccatggagaaaacccccaccaagcttgattacttcgaaaacatgtcgaagctcaactcagaggcttcgatcatctcctcttttaaagtaagccacttacttctcttctcttatcattacaaaactttttatcacttcttgggggtttagtagttcagtgggacaacctctgtttggctcccaagaaaatggggaaatctttttattttgtgttttcttacaatatagaatgatatatgtatataaaatcttaccaaaaatgaaaaaactacaaattcgtatgttaatacatttacatttataattttctgaagggcgatgatggtcggctcgccttgatattggatcgtactgtgtttcatccccaaggtggaggtcagcctgcggatacaggattcatcactgttaatggtgattctgaattaaagttcgttgtacaagatgtacggtccaaagatggaatagtaagtcaaatcaaaatgatccaactcaaaatatctcatgccctctaaattttccttattaagtgtgtattttattttgcataggtatttcattatggggttttcgaaaattttgctttggactcagaatctaagcttgagaaagggaaaaaagttgtcttatatgttgatgaatctagacgcaagctaaattccaggttcatgatattcatataacttaaaatggcattttcatttgacaattttgaaatggtgttcttctatatttggaagcttaatcttatactgaattactgatattgtaactttcttattttggtcaggcttcactcagcaggacatttgttggatgtgtgtatgcaaaatgtgggattgggtcatctagagcctggaaaaggttaccatttccctgatgggtatgattttattgcaaattttgagtattttattgatggggggtttctttagttgattcatgtaggaaataaagaaagatttctgagttcgaaaacctctaatgaatctcagaatgtcagagatgaaactaagaacacaattcagcaaaactaattattaaacaataagtaaatcaaacataaaagaaagcataaaacaacacactaattatgctggttcggacacaggataaatgtaatcttgttcttacatccagttttaggaaccattatctctactttattgaatcaatgaaacgattatgaaacttcaatcgaacaatcgatcaaatactcaagcgctcaatttcacatgtgtttctctcgaaatctcctgagcaagcactttcacaatagttgtgcttctcaatacagtttcccaaaccctgctctcataccctctctatactcgaatcttgatcttccaactagactctcacagttgtgtcttcatgttatatcttgtgttatgcaacaaagggaatgaagtgtccttatataggccaaacttaacacttaagtcagatgggattcttataatagttgaaatcctaaaagccaactaactgaattagttggatttggaggaactaatcccacaatgaatacacttacaaagaagagaatcactcacaagcctttcttttgggtaatataaattaatatttatgtccccattctgatgagtgatgacttataacttctaagctgtattaataggagctaaccacaagttggtttgattttaatatcctaaattatctggggtattttctcttattacaaagagatgggttattcgagcttcctatcacactcaagcattaacggaatttcaccccgtttctgagtataataactagaattgcctataacggacaatgttgatagttacaacttgtttgatatgatggattaaaagatagattgaatacggaatgtggaaaaggctatacatttgtagtttatttttgtttggtaagaaggggaccaagggaaagaaatggctatggattgcaaatccatgcacctacaaaagatagtccttcatatatggatggatcatagaccaaaaagtgagatttttcttttaataaccaaaacgagtaaacttttttaaattattttttatttattaatagttcaaaatattacttttccttttccctcttattataccaaacaactttagggaaatatataatccatcatcccatttcattttcccacacctcacattaaatctatcattagctctttccattattattaccaaactaaaccttagttatgatgtgatagcatattgaaaggtcagaagatgaaaggagaagaaaatatcagcaaacttgatgcttgattggtcatttggtgtacccagaccatttagttagattctttttttgaagttacatatgctctatagtcttgctgtgcaaaacaagttctat

SEQ ID NO: 22268 - DNA, 3082 bp, Cannabis sativa
taataataataataataatagaacacaagatattttacgtggttttgtagtttaaatctacatactccacgagtccgtcttattctaaatatttatctagatacagagtacaattctcttaataaatgtaaataattatttctctattaaatttgccgttcttttttccctggattctgcccttatttataagtgtataggatggcagttatttctgttgggatctattcatttacaactatacatgaaacgtggacattcctcacgtttctattttatgcacatggaataatatctaataactaccaaactgctctttgtctttatccttaaacagaaatgctgactaagaaggttatttctcgctaaatatgagttgtccttcttatccatcttaatatgataaaacgttaagtataaatatgcttctcatcatagtgttcttcatatcgtaaagatatttgctaggcggttactctgtcgcataaagggcgaggtggatgaatgcagttattttctccatacaccaatatgtgagtcaatgagttacaaaattttactcccaaatatgtgggtcaatgtgctgtaatgtaatatcccagaaatttaattatgaataattagtatttattatatattatggtttaattaggttgtaatgattagaattatgatcctgctaatctaatttagcataaattataaattttgctaagagtagataattacggagatttatttgaaatatgtgaatataatatgaattatttgttaaataaaaatatttttatgattggcaaccctatagaaccaattggaggctaaaaatatcacaacagttttaattagtaatattaatgggaatattgagataagttaattttagaaatatcagggtattttaaggtactcgaaattgaccaaatacctaaaaattaaagattttttagtggctaagaaataataagataactattaataataaaaaaaataattttttttattattatattattattattaaggtattctaatcaatttaaaatatattatgtttttaaaaaaaacgtatcaactaagtaatatatatatatatattagtttataaattgaagaaacgaaactctcctctctctttgtgggacgaaatcttcttttaccttgatctattttcttcgatttttaacccaaaatctagtaattcaagctccagtactagcgggatattaaatcattgaaaatgagagcttaaggtaaggattagttttgttttaagttaaaaatgattggttatacataatggctttgtgatttaaagtggttatggaaattctgacttcatagaattgttctggggtagctatggaattagtttcgatgtttacttgttgaatttgaggtgattttgagttagaaattgagtttggaactttttgaagcttaagttcgagctttaatggcgttttccgtttaagagctcgattttaatttttgttacgtaaaaagtgttgtatatatggtatatatgtgccctgtgaagtttgaaatgatttggataggtttcagaggtgtttcggtgagtgagaaatttgagattttcgtgcaagatcgtttttggaaattcttaggagatcggaaatcgtatttttatcataacttttcactcaggtgtccgttttagacattctatgtactgttttgaagtatgcaacaagctctacaatatggtgtatgttttacaactaaaatataagttttattttagtatttatactacaaggtttagtagaaaacccttaattgtcttatgtcaatattaaataatattttgggataaatacttattggtatactgctgttgtgacataggaccgagttcatcgaggaggtttctccatttgggttggccgatgtgcatgaatctagattaaagataagaaaagtatattgtactacatagaaggatctaaaagggaaggtgatactgagaagagttcttaatgatggactctaccgagtcgaagcctcatcagataacaccagccatgatatacacagcccaaaaccagcaagtttgtttattgctcaaactcaaccatccaaaaagaaaagtttgttttccctaaaggatacctggcatcgaaggctaggacatccatctttgtctactttaaatcaagttcttaagttgtctaatgtaaaagtttcaatgaatgaaaaatcgtgtttttgtgatgcttgtcagtttgggaagtctcatgtcaaattctaatagatgttgttcacacggatctttggggtccagcacatgttacctcacacacaaattatacatactacattaacttcattgatgatcacactaggtatacatggatatttcctttgaaacaaaagaatgatgctcttcctgccttcaaacagtttaaggcacctgttgagaataaatttgaaagaaaaattaaactgttaaggtccgattcaggtggagaataccaagccttctctgacttggtcaatgagtgtggaattgaatttcaacactcatgtccacacacatttgtccaaaatggaatagcagaaagaaaacatcgacatattgtcgaaatgggtataaccttacttgcacaagcacacatgccacttaagtactggtctgaagcttttcaaacctcagtctatttgataaatagattgcctacagcagtgttagagggtcggtcaccttatgaacttgttaattctaagcaacctgattataaactactcaaagtctttggagcaacctgttttccatgtattagaccttatcaacaacataaattccaattccactccattaaatgtgtaaatttaggttatagtgaagtgtttaaaggttacaaatgtctaagccctcatggaagaatctatatcacaaggaatgtcatcttcaatgaagatgaattcccatttcaaaagggttttctaaataaccatcaacctgaacaggttctcataatgaaagcccctcactcgtggtttactatacctactgttgctacttctcactcaaactagtccctgccttctggtgattcat

SEQ ID NO: 22269 - DNA, 2533 bp, Cannabis sativa
ttttagaaattcatgctaggatgttaatgaaacatacttgctagtaaatctagatcctggtaaaacaaattcaaacacccatatctttttctcttgtgcaatgaagtattctcccgtttgttattccatgaacaaagcaaggggctgctccatggtatcaaagtggctcggaatgtacgtgacatatcccaccttatgttcgcggatgacaccatcattttttctagagtgaatcttaaggacgttgaatctctgaattgttgtatccaaaggttcgaagattggtcgagccaagtgtgtagtaaacagaaatcaggaattctcttttcgagtaactgttgtagcaccatgaggaagtccattgagaatagtttgagaatcgggtgcattcatgatacggagaaacacttgggtaatccatttctttttggacaaaataagaggaatgaatttaattttctcaaaacaaagcttttgtgaaagacttgatgggtggagacttaggtctctttcaaaggttggcagaatggtgtatattaattcggtggccttggctatgctgacttattctatgtctgcttttaaattcccccttatgtccggtcgtgaacttgatgcggtggttaggaggttttggtggaatggttcgctggagtctaagaagttttgggttgccaagtcgtggaatgccctgtgctaacccaagttgatgggtggcctgggttttcgtcgctttgaagacataaatcatgcccttttagctaaacttgcatggtagttggcgagtaaggttaacaggtgttcaaaggcaagtactttcctagagattctttctggagtatacaagagaaaggttccgatagcttcatttggagaggccttttaagtgtcaggaaaataattaatgctgggactagcactattatagcatcaggggaggatggggatgtttggtggcagtcgtggataccctggttggattacgatcaatttcgcaaattgatggaaagcattagacccaaagctcccagtatgagatgcgtggctgacttgatgtatcgtagaacaagaagttggaatttgggttacctttgtttcctatttggtactgatatgggtgatcggattagtaaaatacaaattgttatgaatgttgattgtgatactctcatttggaaagactctttggttggaaagttcaatgtaaagggtgcttattgggttgatcagaaagctagatttggaaacagtaatgtgctttggagatggatttgggattcggaggttcatccaaggttgagtttgatgatttggagagtctgttccaattcactctccacgggcgacaagttcctttccctggaggaaaattcttgccttgtgtgtcactctgctcctgaaacttcttttcatctgttagcaaggtgcggctttgtgtctgcactctggttcactagtcctattcccgttaggatcgacacaattcccggtaacaatatttgatgaggtcattcgcaatctttgctcctccttagatcctcctttgagggtcaaaatgctttactgtattggggtgatcattgactgtttatggaaaactaggaataggattactcattcctctaattctaatccctgtgtgaattctgttaggaaggagattagtagcaaatttttcaaactatgcaaggatgtggatggtgatacactgatgaattctgtccaattgtcgaccaccaaccctcctaggctctcgatggacaaatgcattctggtggacagatcctttcaggatgggaggtttttggtgcgctatgttgtcactgattaagggctcttcagagtggtggaggtgttcttccactagtttgtgtgactcggctttggaagctgagatgcaggcggtgatgcttggtcttcagtgggcgtcattgaatcattggaataatttgtcaatcatctcggattctatggttttgatggaggctatacgtgcgaaaaagagcgccgaattggaagttaactgctttatttcctctcattttacatttgttgtcgacttttacttgttgctgtgttgtttttgccaaaagagattgtattacttttgtggatagcttggccaagtctgctcgaatttgtcatgttgagtggcagaactttaaagggaaagaatttctccctgtgaatctcgattctttttggctttaatctagtccgaactgaagttctttaaaaaaaaaaaaaaactatttaaaattttttaaaatttagaaagaagtactataattataataaataccattatgaaaataaaattttaaaaaatattctacatctaaattcaaacttaaattaatgaaaaagttataataaaaatttgtaattaacactaaaacaaacaaaatcatctcccaggctccctttcatatgtgctaaagctataaactttgggtcaaccttaaattttgcatataatacttcgtgttcggcgcgtgtaaataacgcatcaatggcttcccacctgctgagg

SEQ ID NO: 22270 - DNA, 6505 bp, Cannabis sativa
  modified_base (58)..(60): a, c, t, g, unknown or other
  modified_base (6206)..(6209): a, c, t, g, unknown or other
  modified_base (6239)..(6242): a, c, t, g, unknown or other
  modified_base (6279)..(6282): a, c, t, g, unknown or other
tcaatcacttcaaatttcttatgttgataactgatcagattgtaaagagttttatttnnngcataaaacccaacacaaaggactatcctttgttaaccggtttattctgtctaggctaatatggcctaaacatagatgccatacacaagtttcctcattgttacaaacattttgcctcttattttgttaaggcaaagctactttgaacaattcatcatttaaaaataattgctcacttggtctgaacacgtatattctatttccttattttgtagaataaattggtgttctaaatttaaaaataataatctcattattaataaactcaatgttaaaatattgttcatgcaaaagcgataaagaaataatattcctggtacattcaagtatgaaataaacattgtttaacaataaaaacttatttttaaagttcaaccggacttggtcaacacatttagcaatacttatgctccgttaccaacccgcatggtcacctctccatcagtcagctcccttgataaatcaagtatctgcatagaagaacaaatgtgattagtgactccaaaatcaataatccataaatatttatcatcttccactaagttagcgttaaaaacaaataaatcatatatatctttcttaagctcgaagatatacttattacagtttcacttccagtgtcccattacaccacaataaaaacacttgcatttaaccttcttgtccttaaatttactttaaattatcggcaagagctaaacaaaatgcaaaaaaccgagggtagatgaagattcaaggtggatgggagaacttcccagtgctgtgaacacttttccaaagttccattgtaaggacaacaaatggcacgatgaacacacacaacaattgcatgtaagtaactttatatatttaataaactcgttttatattttaatttctatccaactctaatagtttgttcaatttttttgtaggccaaaatggttgagactcgtgaaattcaaccagcaccgaccaatgtcccccagcagtacaatgtcgacccacccaattttctgtagacatgcctattatgacacatgtgctgggtgagctgtcacgccacttgagagggatgggctagttgccgagaattaggacgggggcaaagaggacaactctcagggcaggtccttccggacaacccactgccacctaggaggaatatgaggtccttaagcaaagggtagaagaataggaagtacgaaacgagttgcaacaacaaaagatgcagacttagaatcaaatcatgagtgtgtttcagcaacaaatgatacaattggctagtgccattcttggattcaacatgccctcgatgcctctaattcgaccaattctaccattttggcctcctggtgctgggtcttcttcacagactacccctcccggtgatgacggtgacgacgacaatgtaacaacttctagtttttttttagtttgtagtgtaaataatattaatgtttataaattaaaaatacttttatttaattttagacaattcttatagttttgtaattacaatataaattttaattttataatatattttgaattattttttatttattattatcttaattttaattttattgtaaatctatttttttaaaaaaaaaacagttttgttgatgaactatatagcaccggcaaaactaaaataattttttattggccaagttttgtcggcaaattaattcactagaaaaacttctacgagtaaatgaaaattaggcgtgaattggcgccaatgttttgccaacgcaatatctcactggcaatatattgtcagagaccctatctatttcttgttttatagttattttcatgttgttgtttaggtgttctataattgttttaaagttatttttctattatttatatatttttttgttgtatagttattttttagtttacgtgccttggtgatgtgttatatttttagtttatttcagataatttttttgttatatatgtgtatttattttgttatttttatgctgtgttttagttgtttttaagtagttttcaaaaaaaaaaatttgttacacaattattttttagtttttttttttattcatgtgtattttttatggtatatgtttttaatttacttgaatttttttttattgtatgtgtgttgctttgtagatataaatacatatatttggtttatttttttgatacattttttctaaaatacaattataagttttttcgtttttttaattgatataatttgtacaagtagatgtttatattaaaattatagttttatctagttaattttttgttgttttaattatatattacccattatattatgtacgctattttgaaatcataaaattttattatttctataattaatgtatctatttttttaacttctataaaataacttattattttaattgtcaataactcaaaaaggaagagaggaaaaaaaaaaagagttgaaagtataaaattgtaacaataaatttcatgaaaaaaaataatgtagtagtgcaaaaaaaagataaatcaagttgtcaaaattaagtaaaaaaaaaaaaattcgtaatacaaaaacatgttgaggagttgatattgttttacatattataacgagctcaatgtcttgttatctttttgttaatttgtagttgtttttttgttgttttataattgttttcatgttattattaatatattctagagttatttttttttttgttttacagaaaaataatatttttataattttgaaactttaagacagtatttttgaaattttaattagtatagtaaaaatgtaaaaacagaagtacaacagaaaaattataaaattagaaaaaaaaaaaaagtattttttgtaagaaatgtaaaagcatttaaatcttctaggcttcaatcaaacccacttcttctaatacatataggtcctatttggcttagtttctagaagttattttttagcttttagaattaaaaatccttctatataaaaaaataaaaagccctaagctaagatttataacttctcctaaaatgattttttattttaattttttataatattttaaatataatttatttttatttgatagatatatttttaaaaaatataaattaaaaaaaaaagctaaaaaaaattcagtacaattacatatataaatttatataaaataaaaatccacataaagagaaagagtgaattattttagcgaaatctatattcattaataaaacatgttcagaaagagggagagagagtgaaaagcgtgtgcttattattcgttgctcaacaaatattccacgccatatttaccgaccatctacacatttatggcatggcgctgtctatagagagaaagaaagagatggaggtgacctgatctaatgaaacacgcatcacataaagcagaaagcatacaagacctctccactttattataattaattaagaacaacatacacagatagaggtatacagtacaactaaccatacaatatcattgacaagcagtggtagtagtaataataataagaagtttaaaatgatagattagttaattaagggcatttgggatgtcccttggagttcttgagatcccggtagcaagggcattcgtccttgtttccgtacgtcccagacggaacgcagtgacatttttcacaacagatattgcagtacttaaggcacctgtcctgcactcctgcctttgaacacctcactttgcacttcgagtcacaaaactctgtcctccaaaacaatctcaacattaatcaaaacaaaatcatcatgcaattaagatttaagatagaccccctccctgaatacatcatgaattaatcatcaattgcttttatttttcaaactaaagctctgcaaaagagaaatcaagacaatacctgaaccagccatggatgcctcaaaaaaagaggagcttagaacaagacaaacgagtagaaaagttgcaaaaatgagcttcattttttttttagagataggaaatgatgggttattgaaggcaaatgtttgatttgttgatcaagttaataatgagttattaagtttgtgggccgaatatatgtaatggtactacaagctatatatagcctatgagtattggttgtcaaagacgtaaccaaagttgggggggtggtatattgtagtcgttcgttgtgatgcagggtaggtggaacttgagacgtaattatggggactagttctctctcgtactttctatcacttttatggcttggcttcattagtcgcatcacagactgtgaaaaagtgtagctcgttttggtaattttacaagttgaagctgagacagattgatgtggagtttggtttcaatgtaatggaatagctagcattctagcaataataataacttgaataataatggtaatagaattatgatatttgattgattttcaaaatcataatggagtaaatggtttattgacataaatatttttactttaaattcttttggcaaaagaataatataaagaaaatatattaatagtaattgtgtttttatatgaatagtagaaggttgattaatataggtacaaagatgcaaagataattatattgtgactgaaaacattacaaagctttaaaattaaaccaaataataaaattataagaggaactccaatagtaaatgttaaatttagtgttaaatcaacacaataatttattgatacaattttggcactcaatttttttctattttaattacaacactaaaagttatactaaaatgatattatttcttattatcttataaataaacacaaataataaatatacaaaaattgtaagtataaataatatcacactaataataatgtgactctatagacaatgctataaataggatatgttttagagtgtggctggaataaatttattgtaaaatcccatcaaatttaatattttagtgttccattagagttggcctaataatagtgatttcatcacatttactcacgattatactaagctaaacatgacctcttatattatgaaaacttgtccaataatatctagagaatcccgttaaaatattaacatttttataaatattttcttaaggtaaaagaaaagttacaattaaactaggaaacacatgttttttttcaattacaattgtggctcacgttaattatttattttatttaattttatttttggaataagaggaaaagaggaaatatacatatacatatatatatatttatagatatagatataaatagatttctcactaataaaatcatttttttcttataattagctcctgaagagcaaacaaagaacaacaacaactaaaaaaggaacccacagcagggatgcagagacagaaaattaactagctaccgagcaactaactcaacggacacccgaactaaaaacaaaacaaaacctgcaattaagaaacacaaggaacaaatactataaagtatggccatctacagaatacatatatgtaggaaatcgtcaaaaaaggctgaatcaaaataaccaaaagcgttgttacgattttcccaacgagccacggagtgggccacagtgttgcaagatctcggaatccagcaagcttcccaaaggttgagggaagcaactaaaaggagaaacttactgactaactcctgtatgttatgatgcagggtatggatttcatgagattttctatgcatagtgccaatagcattggaagaattactttggaagatcacgttattgtacccttgcctgatagcctcctcggccccctcgcacaagggcgagacttcacctgcaataggatcacacttgccaattttgaaagtaaaaatacctttgcaaagtccattttcatctctgaatattaccgcccctgccgattgggttttgccaatcgcaacgttcgttttacacatatccagccagcagggggtatccattcggtaggcaaagcagtggtagtgagatgattctcatagaggtcagaatgttagtgaattagttagttaggggtgtcagttggttgttagttcctgtaacggtattgtcttatttataacagttgttagttatttttcgttgttatctttttcctttactcttgatgtatatatactgagcttgtgctccattaatgtacagagttcatattcatcatttnnnngtacagagttcatattcatcatttactctnnnngagttcatattcatcatttactctctctctctctctnnnnctctctctctctctctctaccatggtatcagagcagtctttttttagcttccacgttcattgcttgtatctacttctctctcaaaatttaatctctgccttgttgcttttctctacattcgtggatatgatgactacttcatcttctctggccacgttcagtgttccaagtgctccgactacttctgtaatgaccgctttagtaatttggattagtaaaggca

SEQ ID NO: 22271 - DNA, 1029 bp, Cannabis sativa
tatatccgttggatagaatagattcaattaaacattcaatagatgttggatcgattggatgactgaaattatttggattggatcggatgataaaatctaacatccaatatataattagatcggatctggatatgcctaaaaatattagatgtagtccaataaacacccctacatgcgatcttcccactctccaacaagccctttcatctccaggtatcgctctctccattttgttagtctatttaatagttagaactttttatggatttagtacaacacctgattttttccatttttactctaaaaatgtgttcctcaagatgtctttttcaagccaaataaccccccacatcctaagccttattgacgagaaaaatctgattcttcgaccatgttttcttgaattcgtgtaactaacatgagtctttctacctggtggttaaaatcttttctaccaccgtggattgaaaaagaaatgaaggatgcttggacccttcgctttcctataagttttatagaataccactttgaattattcttagctacttttggctacgaagtagaccaccgccgtgtcctcaaagaatagccctggcatttgcattttcacaagtgcctcatgatatttgccaatccggagggttttgataccctcacccttgagcaactgcgttatgttcctttttgtctccaagctcataacatttcctttggcaaaaaaattcccccagttggcccatttcatctccaatgaggttggggaccttattgaaattcaccctatatctttgcttgatagttttggtccttatcaaaggataagaatcctgctggacataaccaaaccactgaaaagaggaatgaatgtccactttaggaatattgcggttaccaagtggttatatttagagtacgaaggcttgcaatattttttctatttctgtggcttgttggaacatacttacaataaatgtggtaagtacctgcaatgttgtgatgagtatgttattcctccactgtttagatatg

SEQ ID NO: 22272 - DNA, 1972 bp, Cannabis sativa
aaaattgttgttttcattttttagtttaaaactcaaaatcatattcaaatttagtttttgaaaacactaaaccaatcaagtattcttacgtggattcctactttttaaattttcaaaaacataaaattattttcaaatctcaaaccaatcaaattcatttttttcacttatttttttaaaaaaaaaatatgaaattttttaatttttttaaattgacacaatgtgtactattacatattaatatattaaaattatattgttatgtagtaattttttattattttaagtatataatacttattttaacaagtcttttatttaatcaataagttaatcaatttagatgttccatgctctgggtcctccattgtttaaagtagtgtcaacagaaccagtattaaatctacaaagcttcaatttcattacacaaacaatgtttactccattcataacaattcattttatatgtgaatactcacaattttatacgtgagtagtgagcattattcatgtttatctcgaatactaaccctttttaattttatctattttccttccacaacatagtgctaaaaataatatgaagttagtatgatctagagattacgggcaccaattttagcatcttgtaagcaaccgtttattttgtgattttttttaattaattattataccccaatttaatttgaaacagttttctccaaagaatgaaactcacatttttggggagtgttcaaaataatttgattagagagaaattatgaaggagaatatgattatagggaaatgtgtaaactctgtttggcagtgtagggtaatatgtaatcatattactgttaattaaattacactgtttggttgagtataaaaatcttatatattattttaaaaaattaaaataaaaaatatttttttattatatatatttaatgttaattatatataaaaataaaataatttattaaaggaaatatatttattaattattaaaaattaaattttcttgtattttttattaattaaaatgaacatttctatatattttatcaatatgttatttatttttgttcactcactaaatatatattgtaatattttatttataataaatgataatattattggtaattaaatttatttattaattcaaaaatattattcagaaagtaataattaaatcttacctttttttttttttaaggtatgaacattaccctcctgaagaataattattttacaggggaataacattccaaaacttaaccttcaaaaacaaataaataatatttcacgttaccattaccttattaatattaacctaaaagagttcctaacatttttttttggttaaacaatgcaaaacgtacatttatttccattaaatacaaaatataaaatcaccatgcttgaatgactctcatccaatcccatcaatcaaattctaagcatggataatgaaatagctcaagatctctctcctctaatcaaactctacaaaaatggccgacttgagcgtctcgtcggaacagccaccgtctccgcttccctcgaccccgaaaccggcgttaactcaaacgacgtcgttatctctcccgaaacaaccttatcagctcggctctacatacccaaatcggccggctcaattcaaaccaaactccctctcctcgtttactttcacggcggtggcttctgcgtcgaaaccgccttctctcccgtttaccacaaccacctcaactctctttcatctcaagtaaacatcgctattatctcagtaaattaccgattagcccccgagcaccctcttccagccgcttacgacgattcatgggccgttttcaaatgggccttagcccattccaacgctaaaggcccaaacgagtggctcaattccttagttgatttcagaagagtttttctcgcgggagatagcgccggcggtaacattgctcaccacgtggcactccgagcgggt

SEQ ID NO: 22273 - DNA, 3098 bp, Cannabis sativa
gaaaggataatacagaaaaggaaaacgatatatatatatatatatatatatatataggaatatgtctatataagaccatggatatgctacttatatataattgaaagctccttttttttaaatttatataggactaatttacggtataagtacttaagtttaatttccatttgcaaataaatatttaagtttaatttttaaataatagctaagttatataattttgaaacttctgaaagtacttggttaagtaaattgtcacgtacgtggcaatctctaattagtgcaagtcattaaatttttattattttttaaaaattttgttcagaagtaccaataaaaaaaatgacacgtggatttaatggcttaatatttaacggttaggtacctacagagttctagaattataacttaattattattactgtcaaaaattaaatttaaatatttatttacaactagaagttaaagttaagtatttatgccgtaaattattctttatatatatatatatacaaataattgaaagctatatatgccacttataattttgacaaccacacagacaatatctgcaagcatatatctttttcattctccttacagctcctattttcctcttctcatgcagctgaaatataatgaacaaaaatctctatattcttcgaccaaaagcttatgcggaatccaaccacgcactaaaagtacaaaataattaatggtaaagagataagtctatcaatagatataattcttgatctaagcatatgccatttcttcctaggtttattccatgatacatatctactgatgctagacttttattctatataaaggatccataatttgttgcattaaaaatacacagcaagtattggagatgaagatcatagagttggtaaaatctataagaaaaccagttatagggcttctctttcttggcacgtattttgtgatacgatctagcagtacatgtaaatgctagtaataataagtacttgccaaaggagagttgccctaccactgatttagcttaattaattaactagcttgtcgctcatgttttcgacgtactcatgtgccttcgaattgtcaggtaagtttcacaagaattatgttttcaagtttcacgtttatgtcaaatcttgtttgattagaatcaaattattgtcatgaatttttagcctcaataagcaatataaatgcgaaaactaaaataaaaaaaataatgacattgaaatacaccattagtataacgtaatccattattatataagttaagttattaagctcccctacatgacaaaagaaagaaaaagtagttctttcattcatcatcttgcatggtgagttaaaaatttgcaatttgcataataaagtaaaaaattgagtgccccaaagcagctcatcattttatgatagaaagagactaattaggttgtgtttggtctgactaaataaaattgaatgaaatatagaaagaaatcaattttcatttcattctaataaaatgaaatttgtttatcagttttttcttttttatatattaaaattttattttattctatttttatctctactctctttctctatctttttattcctccaaacctagtatatcttaaacaaactgtttttttaatggaaacacactacttttatttacctacatatattgaatagacaatagtaattatactttcacatataacattaagaaatatatttatcagctataattaattaatgcgacaatgttcttgaaatcggatagtctcgttttcttattatattaaaggcctaagcaaaggagagtgagattgtactattgaacccatgtgaatgtgattgtgttacctacacgagtgggtgagagagtgtgagagaaaggacctgacatggtgcgtactttattgcttttcctttgtattcacctaccaatcaagccttgctatgttgtagtttatttatttactgtgtctgttgtaggttatttttttattattattccttttgatgaatgttgatgaagtcattcaaacataatttttgtgtgagttggaggctagctactaaaatgacctaccaaaaaaaaaaaagtacttaaaatgactaaaatgaagatgaccttttttctttgaacaaaagcttgttaatggtgacattttctactcatttgctcattggcaatgatattattattagttctgcactagaagtgtacagtttttacttccaatatgaagaacaagaagaccaaaagaagttagacaaaacaaaatctatgccaaactcataaaatccaatattaattcttcacgtacttacttaaactaatcatatgaaattcacaaacaagaaaccaatctcaacattcaatttccctatttaataatgtcatatataaacattgcttttgtgcaccaaatagatattagatatatatatatatatatatatatgtatagacatcccaaatggaaatagaaatggaaactgcaaagcatgaagaagaccatgagattgaattgttttcacttgtactctctttcgggtggaactcatataaagttgtagacttcccttccaatggattcattttcaacaatagcttagtaggccaatataggatgcatagctatcacgctgaatgttcacagcccattcaaatcttttcaagtctgcatggtcagtaccaacgtatttatatagcttgtagatgttcaagctgagaattgatattgaacctatcactagcctgcatatttgggtctcggaggaagagggaacgagttggccgaaccgccaagctcagcatcctttcttcttcttaaaaaaaaaaaccaaatatttttcttgcctagtaatgattgaagtcaggagcagttagtcatcatcaaagaagagtgttatctctcaaaaaatccagaataattgtgcatgaatttttattctagatatggaggtccaacaaagaggagcacattcaccaaagagaagctcattggccaaagaggagcacattggcaaaagaggagctcattggccaaggaggagcacattggccaaagaggagctcattggccaagtaggagcac

SEQ ID NO: 22274 - DNA, 11615 bp, Cannabis sativa
ttgccaattggttttgcgatggaacccgtgattcttaacagaaggcaacatgattaaccactttatttgtgcataatttgcatcattcaatatggcttttaatactagcagcatgatttgcacttcatttgttcttaattgtacagaattattttctcaggttaacgcaccaattgcaagttgattggatgtgatgattttcttttttcattatagagaaagcataatagtattttgaattttaaagttgcatttaattgacctcattgtaatttactgacaatatgataatccatgtttccaatttgggacttatgcaattgtttcatatgataggtcaagttatggtgtgactgccctttttggcctgatgatggaatgtgtcgtctacgggactgtagtgtctgtgaatgcccagaaaatgaatttccagaaacttttaagaaaccctggaccaatgggctttcaccagatgatttagtgtgtcaagaaggaaaaccacaatcgactgtggatcgtactttagatagtagagctttcagagactggatagttgcagataacccatggacaaatgatgacgaaactgataatggtaattccgctatttttgtgtactagtcttagttgctaatctgttctaaaaatcgtgaatactaaaaaagctgctctgcaactaatagagaggtttagatgaaagaagagaattcatgtttaatttcaaaagttgtagtactgaagagttttcatcaatagatgataggacaataagctaattcctgatccaggagcttgaattcactaatacatacgctaaagattgttgaggttaatggctacagcgtggtgattcattcctggatgttagtattcccttacggattatatactatagtgtgctatagctatctttatcaaaaggattcaagaaattaattgctcactgtttgatctgcaggtgagatgacctatgttaaccttcaactaaaccctgaacgtttcacgggctatactgggccatcagctagaaggatatgggatgcagtatattctgaaaattgcccaagatgtaagttgaaccagttgatatctgcaaaccacttgacagaattggacattttttaatttttaacaaagtgaggattgcatagtagttaatgttttcactaatccaagcaagcattaatatatttattttgcataagaatatgcacgaatgtttgtataaaatatatcctgatctctctgcaattattatgccattaattttcctagtaatttttttatttttgctgttgtttgctgtaagcttgtaactcttgttgcataatatttttaaaccagaaattttacatttctaatatgtcaattgagacatagatggtatactttttgaaggaataaaatatgaaaattaaaaatgctggttttgatctagcgtatctttatcctaatgtgatatgtgaatgcacatgctgtgaaatgttgtctgttgttgttggtttaaccattagtgaatatcattcatgggtgggtggatggatgtcgtgtaccatttttatttgataaatacattggagaattcatatttttcttgttcttatttattaactttttggtaatttgacagattcatctggagaaatatgtccggaaaagaaagtactatacaaattaatatctggtcttcatacttcaataacaatccacatagcttctgattatcttttggatgaaactaccaatcaggttctcctgctgcctcataataattaatcatggtgttttagctatgctgacatcaactttagttgttgtgattatgttcggaagatataaagattgttgcaaaaataatgtcatcaattcatactccatgcattcagcaatttaatatgaggccttcttgttcaaactaaaaatggattgctcgttggttaggaagttaagcctcacctttttacactcaattttttttccagttactttttgcattttaaacacgatctttgtcactattttgcataacagaaaacatgatcaaagtgtgtgtgtttttttttctccagttacttttttgcattttaaacacgatcttctgtcaccattttgcataacagaaaacatgatcaaattgtgttttttttctccttcaattttatgatagcatataatattttaggtgcaagtataaattctgtttttcatagtaggagtcatgtacagaaacagtagaataaatccgtattatctcatggaatgatattatttattgatatggtttcagtggggtgaaaatgtggaaatactatatcaacgtgttctaaagtacccagatcgtgtccagaatttgtacttcacgttccttttcgttcttcgtgccgtgaccaaagtgagcacttgttggcccgtttcttataatccaaattcgtttcttgattctcttagtcagtttcttcttgataacatgttgcaggcagcagattatctggaactggctgagtatgatactggtaaccattcagaagacttgaaaacacagtctttaatgaagcagctactgtacagtcataaacttcaagctgcatgtcctcttccatttgatgaagcaaagttgtggcaaggccaaagtggacctcaactaaagcaacaaattcagaagcttcagaaatattaggtttgtctttgaacaattttatcttattactaccttgtgcttgcttctatgcttaatcatctaattagttatatactacaatctgcataaagttatccatgttcccacaattcacatgcaactaatttacctacaaattgcagtgcattgatggactgtgttggctgtgagaagtgtcgtctctggggaaagcttcaggttcttggtctcggtacagcattgaagattctcttttccattgacgggcataactctccagttcagcatgtgagcccctgaagcatttctataatgatcttgacaacttcattttgaaacaattccctcgcaagaattctgattttagcgaaagtatagttagtgtgccagttaatcctggtgattttgaatgtctgtctttcttagacgcgtgtttctctctttgcagctgcagctgcaacgaaatgaagtgattgccttgctaaatctgctcaaccgtctctctgaatcagtcaagtatgtccacgagaagggaccctcggtggaaaagatttttggacaggttactgaacctgctttatacgatgacagcgcatggcaaagaatgtggaagttgatcaatgggcttaggtacgttttataccgcatgcacatgctagtcgtcatttttgtacatgtctaatgtactctattaacataatggagctaaaaaaaactaatttgctgatatgccatttgcagatttaggaagcaattgtagccaggtcaactgcacatgtttgtatacataattacatacgcatttatgagtgaggaaatatggtgcagtcaaaattttggacaaaagagaccattttgaggttatagagcatacacaaatggagtcatcaggcttcaactgtacaatataagagcaatagtttaatgaaatccaaatcttacaaacatccttaaattcgccaaatatatttcttacatgaaattcaataatctcccagttctcagggttaacagatcgtttttcttttaatacagttcccttatctatggttggccttttccaagtgaagaaactgtgagctttccttcttttttccttttttgattaagttacaggactaaaacacaaactcaaaataatcttctgggattattgtgtgggacttcaatgctatatttaactatgatgactggtgtgggggcaggctagtgactcacttggatattttagatgctcaaaataactctagccttaggccaagttgatgttctaaaatgtaataaacatgatcttgggattcgtatttactcaaagttggacagggtgttcacaaatgagagttagttggatcttttcccctcaactgaagcttttttgcaatgggaagtttgctcatatcattgttattgctctgttaagtagttaaaaatagataaggttggcatcaaagtttttcgttttctcaattatttaatgggtcattcagattataagaaaactacgatacagaactggtgtaggttaattcatgggaggggtctgaatggtattgtcgataagttcaactggctaaagcattgtttgaagaaattcaacaggaaagagattaaggacatcttcttggcgtttcagagtgctaaggacaatttcattattgcccagtctaacttgacaggcaactccactaatgctagtttacaatttaccaaacgtgttgctcagattaattttaatttaccgaacgtcttccctttggtgatgaaaattcaaactactttcatgctagtataaagaaaaggaatgagcaaaatcatattacgtcatgcatggaaaatggttagattgttgatgattatatgcgagtcatttctcactattttgctcactaccagaaaaattaattcaaacttccttatgtatgctaccaagctcaatttgcaccagcaactccagctcataagacctttttctaataaggaagtgaaggatgcgctgtttagtatccactcaatcaatagtcctggtttggatgagtatggtgttggattcttcaaggagatatggaatgagtttggtaatgaaataactttttctatcttatcttttttcattgaggggcacattcctaatgagctaaacaagacagttatttccttgatccctaaaaccaatgctctgtcctcggatgtggattataaacctgttgcctattgtaacactttatacaagtgtatctcgaagatgatatgcgctagactgagtgaggtgcttctgtgccttattcatagcaaccaagaagcttttatcaaaaagagatttttagcgcacaacattcttatctttcaaaacttgcttaaaggctacactaggaagaacattttagctcggtgtttgatgaaaattgattttagtaaagcttatgatacacttaattaggattttgtggctgattcactcaaaggactttgctttccttccaagttcatcacttgaatcgtgatttgcttgcgaggtacttcttacactttaatgttgactgtatggttcttttaaaggtcaaaaagatcttcgtcaaggagatcctatcttatgccttttgtttgtcttggtgatggagtatctcactcgtttgcctagccatgcttcccattctaagggttccggtttcacccaatgtgcaaattgatgaagcttattaacctatgccttgttaatgacctggatatttccagtaagggcaatgtgaattcgattggtattattcaagaggcttttgttaagttttgtgccctcacgcaactctcagctaatagttcaaacttcaaagtctcaaatatattttggaagtataacagatgattgtaagcaacattttttacacgtagcttggatggaagagggttcattccctttgaaatatttaggggtgaatctaaggccaactaaatggaaagcttcatattgtgggggaataatagacaaggttcaaaggaagttgcacaattgggctagcaaaaacgtaatctcttatatgcctctccaaatattaagaacgtgaattgatgaacaatatttactttccatactattcaagatacattactaaatttacaaaataacaaaacccctttgaaattaaataatcatgaaactagatcaaaataagcagggcattggaattttttaacaatgatcttgtttgggaaagaatgaaatcgttctaatttaaagcatgtaactggacttgatttcagttcccatgcttggtagatctacctgtttagtcacgccttttcccaaagaagcacacaaaaaacctcttctcatagaaaaaatgtcaagcgtcaggaaaaaaatacacacaattgtcaaacttactagttctgtacattcatgagtcgtgactcatgcatataatatgagtcggatgattagctacatcctaataaattaacacatcactctacattacattgcagcatacccgctacaagaataatcaaccatcttttgtcagagtcgataaatatttttgtataaaaatcatatttatctatgtcatcctcttcctactgttcctatattccatcctctttccttttctttttccttctgagtctgcttttgcatccctttagatcccggtcttcgaccattgctgagcaatactctctgtgctagcctccctcgactaccaatagagagtctaaccttctccattccaacgtttacacctcttttcatgtgttgtgttggagattttggttgaattctcttgtggatgcttcgccttagtatgctgcttatcttcctactgccagccttagttatagttgcttttggactgtcacaaggtgtctgtctaggcaagcagttggcttcaggatcatctatatcatccttcttatcagcagaaaagggtgccaatggtaagaattgaagcgggagctgtgtggtgtttggagtgcttggaagcggtataagagagttgcgccttggagctggtaaggctggcattctccttgctatagggcatatagaagctcttccagttctgcttggcagaaaagactgttcaaccatatcagggttgttctctttttctgtagcatcaatatacttgacaaattcattcattggacgaaatggtacttgagtttgggctttgctgttgttcttttcaacaagaggctggattgaattatcttgatctttgacaggagcagtagttgggtcactgacattcttgagacttcccaatggccgacttccaagaggtggtctgattggtgctttaatatgttcttcttgatttttgatgtgctgctcagctatctttgtgtcaacatgctgacgtgctagctttctctcaattagaagttgagactccaattcttttacctaaaaaatagattttgatagcacacaaaatgcacattcaaagtagaaaggaattagtagtggattgtaattagatttaacatctattcaaaaatctggagaaaagcttaccgactacaaatatattaccttctcttgcaggcttttgtttctaaaatctctctcttttatcttcacttcttgtccctgtacagtttcttccaacttcttgatttgcaagtccttgctctttagctctagctttgctttttcagcctaagatgtaaaatactccaaaatgttaaagctagacattgcctagttaagtcaaccatttacaatgtagaaaaaatagagtaataacaagcaactcttaccaattgtttgtatctcaaatattcataagtgtccagttgtctctttgctggccccaactccactcctcttaccctacttgcaaagttgagtgagcagagagtctcacccaaatcactttcattagggctgatctgtacaaacataagtgtctttgaatctcctcctaaaaaatgtacagacatccatcaggaaattacattgtaaaatatagaacagaagtttactctttccaaattgcaaagtagaaaagtaaactaactcatgatacaattaagtttgtcagaaatttaagtcgttttgcttgaacttaaaaaattgtacctaaagagtcttgcagtaaatgtgtgagcttggaattcctacaaagtacagaaaaacaaaaataagcacagaatacagacacagagaaattccttattcagtttttaaagtaaataaacaagtgtcttatcaacaacctaaaaggaacgtgggggcttttggttgcaagtgcagatatgacatcaccaagcgcagaaagagatcgatttatgttctgtgtttccttgagacgctctccttgcacttcagtctttgctattcgctcacttcctgctaaatccaccaaccatagcttgcttcttatgcattccccattcatcaaattctctcccttcaccatcacgcagtggatgctgtatcaagcagacaaatcataatctaacatcatactgcttgcttgttatttgaaagtttcaatatatattaaacaagaaaaacggaccagtgggatcgactgctatgctcattggcattggttgagccaacagctcttgcattactgcctgttttaagaacttcccagacttcattcatgttgcttacattcgcctcaacaagccctggcacgtgatgaatcccttcacccacctgtcttatttcaagcctgggaggcattgtataacagtgaaacgtcatcttaaaatcccaaattttcaagtgaaaaaaatgagattgtatcaccaagaggcataatgccaagggaataatgtgaagaaatagcaaggaaagaaaagttatgaaaactggcttaagaaaacatcacgttattctcaactgacaaactttcattttatgagctgtcttgtcctttaaacagagtgatcgtcaagcaaaaaaaactggaaactaagatagagctgcaatgctaaattgctaagcatataatgccatacattataatgtattctagttggttctcattataaaatcaggttcatacctagaccttctaaatggaacatataaaacatagggatacaaatatttcctcttcttgtcccttgataaaatttacaatgctgtgaattatgcatacagtagtaacaaataacagagagccatgcctccacgttatttttgtatgatatttcttgattgataacttttcacctaaatgcatagaagattattgatctaaaaagtaaagagtgctatggaggaatgtaatagaagcaaaatgagtagagacatgggcctacctctttgcagttgctcctgcctgatttcctgaaccaagtaaatctcgtatttgctcattgtagacttctaagacacttacagatacactatatcgatacagcttttgacgctctctaattatgtgaaacagttcctcgagaatcctaaaatttactccccggtctttttctgtaccctccatggtaaacgttttaccagtcccagtctgtccataagcaaatatgcagacattgtatccatccagaactgaggttgcaaatggagctgtatccttgaagacatcagctgcgcaacacaaagacctagattaattttggaaaggacagcatagagtaggcaaacatattacaaaattcaaatagttttaaaatgcaagtaaataatttctcccatatcataatttctgtaccttggtctgtttgggggcagaatacagaatcatacttgaaggtctttttcacaaccccatttggctttacaatgagctcaccatctttagcagattcaaaatcaacaaccactgaagcacctgctgcaatttcttcagtgttgaggggtctacagcggcaaaagacccttatgtttcctaaaaacagcaaacttgattgtcaacaactcttcttcaactgcaacaaatctaaaacttagatttaaaatcaaatataagacttacctttcagctctaacaccttgttataaagttctttcctttctttggctccttcaacaaatttggccttaaggtgttcattcaaatctatttgctgattaactggcagataaatataagcaattaaagtttatacagaaacattttaatctgtgttgttttcactttccaattgagtttagcaacttaccagtaaagttaatagtagaactcatttctttcatatccaccaggcactttttataggcagatgcctcctccgcaagcttaatttgttccattttcataatctgttgaatggaaaattgtcagtagagtgcctattttgaaatttaatcacacatcgtctttttagttgcattacctttagctttctggtcaaatctcttaatgaagagaaccattttcccttctccttaacttgtccctctatggcaaaagctgtcaaaagaccaaaatcaacgcccaattatggatagctcgattgaagaggctctcttaagtaacaaaaaaataagtgataagtccatacccaaagatccgacatgcattgatttgcgcatgagctcattctggagttcctttaaagacttccaggcttcattgcattctccactctttgcacgattctccttcctaagctcctctaacagtatcctcatttcctctaattcctttctctgagagtgataatcttttagcagcttcttatagtctccttcaacctcggaatcacaaatatcctgaaacaaaatcataatggtaaaaacttctcaaccattctaatcttcctgatcaagtgaagccataccgcaaaaatgtgtaagcgaacctttaccattggtgactggatatcttctatttcaggtacaccaccatcacctatgtacgaagcctcgccatttctacatcccacaccagtgcttgtaacaggaaaacaatcttccagcgagttttcctcgaatttgggtgggggagggagctcaaaagaagcttcgggagataattcctgttcaaaagtttgacatattgtggaaaacttcacagatggggttttatgagtgttcttaacttgagattcatcaatgccgttctctaaagacaattctaccgaagctcccaacttctgatgccaattattgtccaaaaactcaggggaatccagataattcatttgtggttcatgaggtaactcaggtgattgttcgccaataatcaaatgaggagtagtgagagaaaatccagtctcagatcgccctgacactgaaagacaaaaacccaatcaaaattaataggtttattctacaaattttcggactttttttataataaaatcagaaaccttacctggagaatcaagatccgccattgctgaaaagattgggatggcggtggtgaaatgggtcaaggtcaaagcaagataaagcagattagagaagaagatgatgatgacccatgtgaagaaaaatcagtggagaaatgagaaaatgggtgtatttgaattgggtggtgtttgaatttgttgataaaaggaaaaagagataatggtaataaaaaaggaaaagaaagcaaaaaactggcgttgattttgttaatgtgtgcattcattcagtatgcaatgactcactcaaactgaccgttgctttttctttttttgaattttgaaattttaggaccgggctgccctgcctttgcctgccccgcctctttttttgttcttggattctttttttagaggaagacaacattattattttttatttgttaataatataataacacaagtcgtaagcattggcataactaattcttttttcacttgcatgtactaggtataaaatcttaccaactacttttcgaaaaagcaactaccaccaaaatattggatccacttttcataactataaataagattcgtacatttctttatgaattataaaagttattgtaattttaagggtaaattgcggcataaatatttaatattttagattttatacacttaaata

SEQ ID NO: 22275 - DNA, 2426 bp, Cannabis sativa
  modified_base (37)..(38): a, c, t, g, unknown or other
  modified_base (1144)..(1159): a, c, t, g, unknown or other
  modified_base (1257)..(1267): a, c, t, g, unknown or other
ttttgagaaaagtgtcatatttttgttagtttaaaannattggtttaagaataaaatattttagttttttaagtatagaaaattaaatttccttaataaaattataaagccacacactcacactctctctctctctcgctatgttacatacattcaaatcaaaggacaatatggaggttgtggttgccgatgtgtagtgttgatggtggtggtggtggcggaggtcatggtggagcttgtgtacgatggcagaagctggagctgtgtgcgttaaggagtttatggctgaaacatgaaggagacttgtgtggagagcatattgggtaatgtacttgtaaaattgggtatatttcaatcaaatttaaagtgtaggtatttttagttaattgatacttaaaaacagtattttttaacacaatccctaattttgtgtgaataggtgaggatccaatttagccaaaccaaactggctaacctagagagaaaatccttaaaacatcaaaatatatgagacattgagactatactaagagtgatgagtcacactcacaccacacatgatagtagcctcgattatagagtggagatgttaagaataaatttaataggtaattacaagttttgatgtaataaataaagtgagatcaatatgctttcactctgtaaaaattgaagttaacaattcttgtagccatataaagttgagttaataatagatgttaattattgagttctatactccagtggaatggagtttcttgttggactgcgaagatgtatacaaggccaaccctgagttaaaatgggctataggtaaaaataaagtttttggacccttactataaaaatatatagtatttttaaaaattattaaaaaaatatatatattttttaaaaagcaaaattttttatttgggcccctaaaatgagtgggccctaggcgcaggccaccctggatgtatacagaacaaagaattcaatgcatgctagtagtgttccctggcctaacgtgcacacacatatattttgattacgattaatttacggcataaatattgaaatttaactttcaattgtaaatacataattaagtttaatgttgaatgttaagtcataatctacatgttatttttttattggtatnnnnnnnnnnnnnnnnttaaaaaaaataaaaatttaagtactttaaataattaaaaattgacacgtgacaatttacttaaggaaatttataaaaatactggaatttgggttaannnnnnnnnnnatactgtcacacggaaaagttttcaaaaatactgtatttttataaaacacccgtagaacacaaaacataataactcaaaacaacggtagaacaactaaaaaattccagtagaacaccagtgaaaatttaaaacagtatactgcagtatgaaattatgaaaaagcacagtaaaaaagcaaaaaatactgtctagtagtatttttataaaaaaatagaaaaaattaatataccatgtaaatttacttaacatttaataagtaagtacctataaaaattaaatttatattaaatttaagtatttatacgcaaattaattttgttaaagcgaacattcaatgctgtcaagataaaggtccgaactttgaccatccatgacaatgtgagattatagtctctttcgaagaaaatggcattctttttctctggttacctttttgaattttgaattataaaaataatatgtcatgtattgttgagtgtgtaatattctaaaagattttagttttgtttggttattacatactcaaggccacactgatcaagtcaaacactaaaaaaaaagtagtgaagtgaagtaattagatgttttggcatgcagggtaggcgacgaccccaactaccaaaaattagaagaccatctagattctacagcagatttcttcttccaatattattgttattattaataattatcatattatatcttttttattttatttattttgtaaaaaggagagagaggaatgaaatttagaaagtgagatatagatatagagcgtcggtgcataatgcaattatatgagttgagttgagtaaagaatccgcgttgttaaggttagaactttttagaccaataaataaataaacaaaataaaagtaataataagtgtgagatattcttctactcttactcaaaattgcttgttacagctaagctagctccctctctgtctcctctctttctttcattttaaatatgtttaattcaaaccacttataattttttctgtagttttggtttccagctaagcttcgtaatggtcggtagtactcttgctacatatttttcatttctagatatgtttatgcctttatttacttcttttcgtttgtcttgagattgaataaaatttagtccaaatttcattattttctccct

SEQ ID NO: 22276 - DNA, 7538 bp, Cannabis sativa
catcacctcggcctcatcttctcaccaacgccatcatcacctcagcctcctcttattctcaacattatcacttcaacccatgccgaggtgctacttagcatcgtcacttcgacccatgtcagagtcatgtgttattatcatctttttttagatatttattttgaaaatatgattttattattattttgtattttaaacttatcggattatggttaggatgaggtgcatcttgggttaagagattttaaatctataatgtaaacctatataaagggtgtgaagtcacatgtaaatggacccccgattttgattctctcgagctcccactctcttattttaaaaactcacttgagaatttagctcttggagaacgtaattctggagaactctcctcaagcattgaaatcagtaacactccaagtggattagtctattaccattgacaggggtgaattactataaaaacctcgtgttcatcttcgttaaatttctttcgataaaccagtttactttggataacgattacttgtgttattcttgctcatttataatcttcttagattttgttgataaaaaactgtatcaacaattatttgttattatgccctaatatgcaaattatagaatatattaaagcttattatatattaaaaaaaaatacaaaactgttattttgtaactaaaaaaatatgttaaagcttattattgatgatgaatgacaaagctatgttaattgcatttattgtgtgtgaaatttaatataatgttatattttgtgttaaatttggttgatcttttaatgtgagtctaatttgggatataatttagagtatacactatactgatgtgacgtgttatgagtggttagcggttttttatattattaattaaattaaaatttgtgggacataatattaaattgcaccaatagcaatatgtcacctttttatggtggttggtaccttagggtgccctttaatatttttctaaagtttaacataccattaaaaaagttaatttccttaaaagtgctaatatatagcactataccactatttagtagtattgtaaatacgggtcagactttttgacactgcacgaaaccgatatgagcccgaagatatgaatacaagtagacacgaaaaaatacgaatttagacacaacacaatatgatgctacaaattaacacgacatgagacgaaaaatatatccttaagcacgacattatacgagtagcacgaataaactcgtctgaaggcatgacacgtgataagttcgaaaaatacaacacgacatattaaaaatcttataatttatttttttttttttgaaataaaaatcttataatttattaataataagaaaaaatgtatttatcaattataaataaataaaataataataaaatttaaatatagtattaaatattataattttataattaaaattattaaaacatgaaaaattaaaattatatactaatttatttatagcgtgtaatataaaaattaaagtatagattttggaaaacaaaagtccaaaatcttgcaactaaacccaacaaaattatacattttaaacttatagatggaattacaaggcctcaatagacaactaaaacaacattctcttctctaaaattctctctattttgttactctcttcttccaaatttgtgattatctctaacttgtccaataatgccttcactttattactaaaatttgcatagtaaaagttgccataaaataaataatccaagtcccaattttttcttctttgactgaattaatagagatagtcaatgaaattcataaacataattatgttttatgggaaaaagaataaccacatttataacctcaatttctgtatataattaacacaaagatacaaaataaacaaactttttcagttatgttttaccaaaataaataaaaaatggtctaactgctacttccaagaaaatgactacactagaactaggaatacaaacaacattgagccaaaaaagaattaaagtcttagcttttacaatctcaaaatccgatgatgattcagctacacaaacgcctctcgagtcaaacaaaaaccaaagcgagcaatgcggctggcattagaagctgaaagttcgatacttgaaggaacgaactccacgatcctggtgcaacttcaggtgaaaaagccgagggaggcatgaatccgccgtgagtgcttgaattagaactgtttcaaaagaacaaacatttcatgtttgtttagagattaaagatattgggtaacaataaataatgattttaaactatagtaaggtttggatttctcaccttcctgcaaatatacaatttccataacctgcaagaaatttcccacaaaataacagttaagagtgtttcaaggcttaaagatagttcctttctcttttctatgtcccaaacaactgaaaaatgagaagccttttcattcttaatctctgtttcaatcaatgtttcgatgtttgcaagttatgttgttaaactgtctcagctcaatctaaattgtatagtgaaagagagaatattagtcgaaaacttacttggatcgacattagttgttgtggcggtgccatcaaagtcgcatgttccaccagcactctgcattttttgatagtaatcattatatgcatacgaagcatgattttcgagagtattagggttataacacggccggccagattgtatggcgctgcaattagctcggccttgcccgcatgcccaattcaaaccgtcttgcaacttatcagaatctgcatcagatttcgctacacagaaaacagaagaactgtttccagtaatttggccagaagttcccaaagtcaaaggataaacagaagttccgttcgtaaacagcacaccccaattcttctcagaaataggtcccggtctattgtcttcgttaaacagttcgtaaatgtatgtatttataggcaaggtcgggtggctcggtggacctgaattgttaagaacacgtcggatcaagttattattgaatgtctcagcattttcaagattggcatccggttctttggcaccaccgagccatggccaaccagcttcggtaacaacaacaggaatccccgaaaaatttgcagcctccatagcgtaataggtagcatccaccattgcatcaaacatgctactatagtggaaaagagtgttgggatcaacaatctgcttgaccgagggaagtggtcggaaaatcgcataatcaattgggaaaatgccatccccttctgtgtatccataatacggatatgcatttaacatgtaataggaatttgtgtttttcaaaaactgaaggatttggtaaagagtagaattccacgaagagtcaaaggtcgcagtcgacggaggaaaagcctttggaataatgtccatggaatgtggagttgagactttgacttgaaaatttaggttagcagcaactagagctttatgaaggtaattcatagcagaaaccaaaaccgaagcagcattaggaaccacggtaagaacttcgctgccaacaccaatggcggttatattagttgaaggcatataagctgcgacgtttttattaacccacgctgcagctgttgcagctgattctccaatcccgagaacttcctcattcgtgacaccgaccattacttctattccactgcctgatagagccttcaacaattgagcatcggcattataaaggcgtacatgtgtaaactgatgtgcttttagaatcgcaacaatatctgtatctgatggaagattagaaacatcggtgcctatgtttaccccgacaaatgcacctacaaaatagataaaataagctaagcgattcatatcataactctttctgttccacaataggtcctttcgagttactatatgtcaatgagcttgttatgttacctagtacattggtgatgctgactaagaggaaaaacaggctgagaagccatctttcaagcaccatccgacctggtgaaataaaaatcgatccaacaccttaacttttggtctctttaacactgaagttctccaatgaagatatcaacctatacataagaactgcaatgagatctcccgagacagacaaaatttcaactgcattgtgtatgaagagaatttcaatatgttcttacagataccaaagtacttaaatttaaagagtaagaaatgtactacaaaagacaatttcaccattgatctatctcaaaatcattatcatctttaaaatgatgccttgcattgggtcaagctttataacaatacttggcccccatagtcttacgactttgtgaggacctatgtttttggtaaacacatttttaaaatattcaaccatttcatttagccaagttcaatattagctagattagtcaatattgtgtatgtttcggctagtttggtatgttggctacattgcatttgcaggtaaaagagttttctaagaaagctaggataaaaaaaaggaaccaaacaaatgagagaaagcaattatattttaaaagagtgctaagtactacgggtgcctttacaatattgcaggctaacatgcattattgtaatataactaaaaaaaattcccaatagttggggtattatatagtgaaactagcttaacaataaatttgttaagaattgatgaccaagggaaattagagaaagtaatggtttatttcttaactttatttaacaaaagtactctctaatactagaaaaagttacccaaaaagaaaaaggtccaaaaactatcattcaaatgatgataaattaggtaaatgatctaatacaagaccaaaacaagaaagttctaaatgaaaacaacagagttgggatcaatgacaataaacttcaagaaacagaagaataaaaatattgtcctaaaaatgccactaatacaagagaaaccgaaaacccatcaattaagaaaaatcaaactaactaatgaaagtactcagaactgtaacaaacaagcacagccatcaaatgcatacaacaacaaaagtagattacagattaggcatttataaataactgtgatcgaactcacctaaccgagagaagagatgatcaatctcaatccagtccaccacagtgagctgagcagagtagaaatggtaccaatgtcctctgacctgtgaaaatgtggaatagattacaattacaaacacagtagatataattttaaagttggaagctttacatacaaagtttttaacttttcttttttcaaaattggaagacaaaagagcattgtttaacccaagacccacctacagaatcaaatctcatagaccctcttcctcctacattaattaattatattgtactaaaaagaattacagatcaaatcaaatcttgtaacatgcaattaatcagattttctttttgcattatataatagtttactcccttcactttactcacctaaaatggttttaaaatgacttcataataaaaatagcacaataatccttagtactagaaaaaagatactaaaaagaaaaaagaaccaaaaccccattattctaatgatgctaaattaggtaaataatcccagaaaagaccaaaaccagtaaattctaaagcactagagtttgaattaatgacagtaaacttacaaaacataataaaagggtataattataactatcagaagctaagtttgaacaaaataaaagttaggtaatcatcaacaccaccaacaacaacttcttttaaaagctcattattacttatataacttttcaggggttttggaaaaaaaaaaatgctgaataaagaaaacccagatgccaaaatctctctttaaagaaatgatacctgatccagaattgctcagtagagaaatccaactccttgaagctcctaataatggttttttaagagaaatggcagaaaacccagataagtaaagtgaagtgtagtagcttagaaaagaactgagaatcttagaaaaaagatttttactcaaaaagaaagcttcacaaagtttgaacaaaaaaaggcaacttctttcaatgttggagtccagaacagctccttcaagacccaaacaaaccccaaaaaaaaaacatgactattcagatgaaaataatggaaattctgacaaaatataccccacattttattcagctcctgtattcaaattattaaataaatagttgacaaaaaattcaaaataaatagaaataaataaaggaaggtaatttctcaaaccttccaatggcagcttcactctctcactctctcactctctctagtctcacactaaactaaactatgtagtgagaaagcaaaggttgaaatgaaaaaccccttgttgttaaagtttgtgtctttttgcttcaagaaaaaaaaagtttgtgtctttttctttttttataaattatttttgaatttcattacacgaaaatacatgtaaatgggtacagaagggcatcgagatcgttgccctgtaaggctgtaattaatttactcaattttttttttcaaaaaaaaaataaaaatttgatttttatgagatgggagagagaaaaggtaatgaaaagacttgaaactgttaattttctcattaaatacttcttttcttttacttcaaaacattcaattatgggtcatagtgacactaaaattccaaatcttgtatgtatgtataatgtatgtagttaccaatattaaatgtatatttatttatttatatttatgttgaatggaatgggtcttttttttaataaagagaaaattttgggaccaaaaaggagaatctttgtgtgttattttcttttttgatttgaatattggtttttcagtgagaaaattcgaaattccttctgcaaaagaaattatgttaaaagggcttaatggagaaaagggttggatttgtgagtcatattgcaaatgggaatttattcttttattaagtttggaggttattagtaagtcctttatcaaagggggtattattttaagttattttgaaattttagtccaattttaatatttatttgcaaaatagcctctgaccgtgtagatagtaagtcgaaaaatttatctttgtgttaagtttgtcacaattgataaataaaataataacatatttatttagtcaattatcacattaacctctcacaatgtagataattagttaagggtcacaatctatatcagtcaaaataacacgactcgaaactaacatgaaataacaaacctatacacacataatatgtggtaatgctttttagcttaataagaccatcataaaacaatttgataagtttgaaaacattgtcattttttttttgtgtaggcatatcattgttcatattaaatactaaaattatttattatttattttatttttttttaaattaaattaatatatatcacatttggctatttgtaactgctagaaaaataataattttactagaatatatttgctgtcatcactagcataaaataaaatagtgaattattgatggaagcatgtcaaaatatttataaaaaatttataa

SEQ ID NO: 22277 - DNA, 2775 bp, Cannabis sativa
  modified_base (1802)..(1805): a, c, t, g, unknown or other
tgatacttaactaccacacaaagaatgatgacatcataatttaaagttccaacatctgaaacaaagaattacctgaaaaaaagcacctcgccattgtaggttgccaaagatatttctcttgaaccatccttgtcaatatcatacaggagaggactggcatgcacagttgactggtggaatgcaggccaaccttataaatcatttagcaagtagttaagtattttcctataacatactagcaaaaccagtacaaatcaccaaaacaaaaaaaaaaggaaaaagaaaagatttaaaactaataaagtactttcttcatacttcccaacaattcaaggaaatacttcaatttatctagtgtagtgacattaatggaaaacactcaaaccacttctgcatatatagagatgacaagtaaaatgtgaatgaaaaaataaacttccagccgttagcaaaacaactatatgtattatgtacctggcattttgtctccatctgagccttccagaacttccagataatgaacaaaagaaggcaccactatttcaagcttcccatcactgaaaagcaaaaacacgaaatcaaagccagcgaaattatcagacaatgcaaagacaaagtaatccactcaattcaatctatataaattaatgagccaaccaggtagtaataactagtctcatcaaagacaagacatgaagtaattaacagacgaatttcaacaaatcattcctgtattgaataacaacaaataaactcaaataggagattgacataaatttttcttttatacctgttaatatcagctattaagggtgtagcataaatactagaactaacttcagtttgccatcttagctccaaatgcttggaacatttcgaattcaccaaagcatcttcgtcactgatcacaaatacaaaagaaaacccatgaaaacaaatcatatgaatcaaacactttgtgaccagaattacacccaaaaatgcaattacataaagccccttacatgtttggataaccaagggaatcgtcactagcctctcgctctctaaacttattcgtcttcttaggctcctcgccataagagagattcaaaccaacagaaaaaatcaaacaaatcaagaaaaccctcaaccccgccgatttcatatgatcttcttcttcgtttctcacggatttaactccaactttattgaaattcagtatgtcgcaacgcaagccctagatgagtctgtttattataccagtaaatgctctaattgaattgggctgagatcaaaatggctaaggagaagaatagaagatatcttaaacaagaacaagagtcgagtcgaagaaaaagctatttgacaatggtggccccttccagaccagtcaacgaatcgagctcactgagtttatgcgagtttgttcttcatttatcgaaagatcaatttacaggtacattagtctcatcaaaccagaagagaaaagagagtagattccacgcgcgaatggtggagagtctgcaatcccgtctgttaaaagtctgcgtggattaaggtccaattcgtttatgggcttatgatgtttggcccaataaatggttaccaactttttttttttttttaataattagtaaggcactatttttttttataaaggaaattacttttttacgtttaacgatttctttttaatatttttacagtttttttataaaaataatatgaaaataataaaaaacaaagtaacataaaaataatatctaaataataaaacaacaacaaaaaataaaaataaataacaaaaaattaacaacaannnnacaagagtacaacataaaaagaccgtaatttttgtaaataaaattaaaaaaaatcgtaaaaatatttaaaattccgtgaaactgtatttttgtaaatttttttgttgtttttgtatttttgtgaaataatccgttttttttagctaagttcgaagtaccattattttgaaagatcatcgagatgggttggtttgggtttggcggcagagataacgttatctctgaggctccatgatcatcgggatgagttggtttgggtttggcggcaatgataacgttatctctctctcacccttataaaaaacaattaattttcataataatttttacatatactgcactagttcactcaattatactaatttaattttgcatctctttttattttttgaaacaagtagcatttagttttagatattaagaatattaaattaaaataaaataaataaatataatgtatctggaccctctacatgtccctatttatgagttaattaaagtgatagtaacggatgtaaaagaattataacattgagtattttttactctaaaaataaaaataaaatatttaagtgtataaaatctattaagtagttataccgcaatttaccattagtatattttgaaatccagtgaagatatggcaaaacaattttacaactaaaaattatagctgatttttggaattaaagagcaaaacaaaacaaacatcttaatatatacatgagaaaagaaaaaaaatggtgatagttcgatgataaacatgaaccttaaaatgccgtgatacttccacataatttccttgcaagagttttgataggtttagagaatatttttcgcaagctcccattttgccaaggaacccatatttaattatggatgttgaaccaaaaaaagataaagaaaacttgataaaaaaaaaattaaaaaaaatgatcaagagagcatagtaagttgttcacagtatttt

SEQ ID NO: 22278 - DNA, 1866 bp, Cannabis sativa
tatataattttaattctaaaggcttaaaaaaagtttaaagaagcttagctgttattttaaaaatttgataagatgacatggttaatgtttttaacacggtgcaagagattacaaggcggaaaattaagaaaaacatcacaatgttacacacccaacattgggcgcaacgttccatgaccgagcagtaagacttggggcattcccatccgcctagtgctaatctttcctccatcttctcaaatgcaattttgctataatcaacaaatgtccaaagggagcatttgctcaaaacatgacccgactaggagactgaagcgcacaacggtgcccacctatgcgccattaccaaaaaatctctccaattccccaaaggcagcttccagcatcaaaagtgaaaactggtgcactcacgcctagtgcaagggcacttcacacaaattaaggtaatttgtgggctgtaactaatttctattttacttttaaatttataattttgcgatttataatgtggctaaatgaatttatgcttagaatttgactagattgcttgaagcatcaacaattctaataaatattatatatacaatgaccgagaggtctaatattctttatctataaatgatattttttttaaaaatatgttaccgacttcagcttctctagttcaaacttaatttttttagaatagttcctcttggtaatgaaaattggaaaattttagtgagtagagctagaactattgctattgtgaaattcacaatctctttcaatttttttttaaaaatataactttatgtaaaaattgaaagcaaaaagcagtaaaaaattgtattaagttaaaatggaattatttgagtatataacatataaagtatgtatattttaaaataaactttccaaaataggaaaataaaatataaagttgaggggtgagtgagtagtggggacaggtggttacattagggagtagtggatggatagcaaaagatatatatataaaaacctgaaactgattccaaatcagaaaatggcaaaccaattaaaacattatttttcccaatgaccgacctcaccgtcacccctataaataacaatttctacctctttcttcaatttcttttttttttcctttttttaatttcttctcttttctttcaaaccgtcctctctctctctctgtacacaaaagtatcattcgttcgaggtacaatacaagaagaagaagagggtttcagctttggttgtttcaccttcagccgtttcagtcttcgatcttctctgcaatggcaatactctcctcccttccaccttgatcggatttttaatttcattttttgattattcttcatcatacgattcgcaaccatgtttgaagctcatgtaagctttctcttccgttttcgtgtctgattaatttaattactgtcgtttctttgattcgtcttatttgaatgaaattcaagtgtttccgaggccttttttttgtgaccgtgtaatgttatggaaatgcagtattattattattttcggttttgttctctgttttaatttaatcagtgttatgtattcatagctgttcatttgattaatttagaataacattcagttataatcattacttttattttaattctccaatttggtggttacttgaatgtcttggagggtttttgtggccatggattatggtgcaatagtcatcatatcatagtgtgtctcacaagaactaatattcgcaaaaaggctaacctgaaaaatccgtgctacttactaagaatggttcatatgcaatttatatggattgcttagtttccatgagaaatggcctattggttttatagctgacaggttgcttaaaatttgaag

SEQ ID NO: 22279 - DNA, 2694 bp, Cannabis sativa
tatgtatattagttgtaattgtatatcaattactatgtatgatttgtaaaaaataaaggggggccacggccactataaccccatgtgtacatctgcccctggcggttggggcccgaggcgcatgcctagctcgcctactctccggcccagttctcaaatttaatggctttggtataccagcttgtctctaattcttgactgttttgtatcaaacttttggtttttggttttttgccttttaatagaattctcatttgacatttggttcaaaaaataaaaaaaaaataaaaaaataaaaataaaaaatagaagagtagaagaatttactctcactcaaatttatgtatttttgtcacgtcaaaaaaaaaatgtatttttgttatttaaaaattgtgctattatattttaagaaaaaaatgtgttatttgtaatgttactatgttttcgagccatcgattttgaattcgagccatcaaccgaaatttggtttttttttccttaaaaaaaataaaagtcaatttagttagtccggctcggcctgcgaaaaatggaagtttgaacttgaatagtatcggattaaattatataatttattatttcaactctatcaaaaaaaaatattatttgaatagaattacattagtacccgcagtttagtgaagaaagtagaggatagaatgggaatttcactagtcacgggcttatcggctcgagaaacgaggataactgactccctcaccctcttccttccctcgtctgatcttttaaaattttgaattataacaaaaaagaaagaaggcgtgattgtgtacagtggggtacaggggaatctcgaagtccgacgatgagtattactataatatttacaactatgacacaattttcagtttctactttctgactgcccaatcatgggaccaactcttaaacgtgtcatcatattcttcttttatcattattattgtgaaaagttcaattttatacatttttcttttctttttctttttttctttaaatgaaatttcctaaactttccttgttatattattaattatttatttaaatgatattattcattatttatcatatagtgggtattttttttttgagtaaaaatacttattattataaatttagccagaagagagtcgtttacaattttaactaagtagtgaactgtcttattagcagtacgcttgacataagtaacattttatattaaggaaaaacgacaaaagactaataacatctacaatcaagtttaaaaaagaggaaattgaattcgagggagctctaatgcatttgaaactatcagtacgtctgtttccacatgcctaattggtcattgttgatgaagggcccaatttaagctaaagaaaagcgctttagcctctatttcgtgagacaaatagttgccaagtattggcattgagagagcagcaactacatgtccattcgcgtccctaacaacagcaccaacaccagtaatatttgtcgagacattaacaaccacatcaacattcagctttaaaaaaaccatcagcaggcggattccaagtgactagagctgtagcaccgaatgttggttgtggatgagcaacaggggcaacagcttgatatttctggtttgttgcacgatagttttgaagatatgcagcatcaaaagaggcgatagcttcaactggtttagcatgttgccatgtacaactttgtttctctcagtccaaattgaccaaagtgtgcaagaaaattgttccatctcaaccttagagtaaatagatggtagatggaataaatagccacatttttgcattgagaagcaagcttgccaatcaatgaccatatttaaagatctccaaactgtctttgcatatttacaactaaagaaagcatgaccaattgtttcccaagcttgtcaacaacagaacatgtcgaatcagtgatgattttccttcgaataagggaagtagcaacatgtaatgcatcatggatgactcgccaggcaaaaatcttcacttttagaggaagttgaaaggatcagaagaatgttcaccatgaggaggctgaagtagaactcgagctttgatcagattcttcaagagatgtagccaggtggtagccagtttgaatagtgtaaatccccaacgtatgatgatgccaaattagtgtgtcattattgctgaaataactaaggggtaatgttaagattctgtccacatcaagaagggaaaatacttgctacagcaaggtaagatcccattgcctttcttgtgttatgaaattagccacaacacaatttgacaaaccagagtaacaaatagctagaaaattagtgtgacctggaatccatggatcaaagttgcacctaattgatcttccctcacctaatttccatctcaaaccttccattaaaagctctttacaccaatgaattctttgccatgttaaagagggagaatgaccaatatttgcttcaaggaacgagttgtgaggaaagtatctgctcttaagcaacttcccaaggagggagttgagtttctcaacgagacgccaagcttattttgctaaaagggcttgattaaaatggataaaagaacgaaaacccatacatctttcacctttagttttacaaagtaagttccatgagcgccaatgaattttacagccatttttgtgttgggttttgtgtcctaa

SEQ ID NO: 22280 - DNA, 4843 bp, Cannabis sativa
acagtgtccaacactaccttataatgagtatcaaaaaatcatattaaattacactaatatatatataatacactcacacaatcaatcaaaccaaatagagattcctaattgtcatatgtatcgagcaagcaaaatttctgtgcattaccatttcaaacccctcttattttcaaaacgttgctttaccatggcccctcaacaacaacagctcacctttcaccacttttttttcctacacccttttgtttttattgtacccttatttatttctccattcaaaaaattttaatctcattatttttgtttttataattgtgtatgttatatttattaaaactaacctataatttcaaaaaattctaaataatttaccgtaataaaaataaattcaaaaattacttacacaaatataaaaaaaagaacagttaaacatgaaacaatatattttcatcttattttagacactaaactattttgaaattattttaaatttttcataaatttataaataattttaaataaaattgaacataaaatctctcttacatatcaaaatatatagttaacttaaacctatcttacctatgcaatgcgatccaattttaaaaacttattttatgtaaaatattactcaatataacaatataaataaaaaaaaaaaaacaaatatatattatatatataaatcaatttagttggtaagttaaatttaaattttgttgtcattgtacccaaatagttgagtaactaacacatgtgcccaaacagtaaaataaactaaaatagttggagaagaaagtgaccttacaaagcatcaatatctgacaatcccatttcattttcaacgttgtatcactctctctgttctgtaagcatttacaatcaatctgtcggcattaaacgaatcgttttatcaaatggaatttaactttttaccttactttgttactacttttggcagtactacagtaaataagtattgaacaaattgttattgtgtgtctcctctcattattagaaaaatcagaacaagatattacaaatggtacgagttctcaggcaactttgtacaacatttttttgggtaatttactagtaaatagtaatagatttgacttaaaataacaaaatgggaaacaaaagaaaaacaaaaataggtatcagtagagaatgaattagaattagaagtctacttacttccaagttccctctgtctgcagttttttcggtatatagaaagaaaaaaagaacttacaggacctgttcttctttggttgcgtgtcaatggtgtgtaattagtaagcttctttgattacgatcgcctttgtttcaggcttttgatggagctttttggtaaattaaaccttgaagctccaactgataatgaggctgtgaaagaagtttcaggcgcagcaggaatagcattgagaattacatatctaagcactctgaatgaaaaaaaattgggttcccgaaacaagctcctacgccatcaaatagactggcgagatttagggggtcttttggtcctcgggaacttctaatggggtaggcaagaggttcagaaaactcccttgtgttgatgattggtcacttgccggtgtatctgatgcttcagatgactccgagtcaccatctatccaagtgagccccaaaggaatgagaatgatgatacatgtgtatataaatatgtgtgtgtatatagagagagggaaatgaaacaggttttagcataccgaaaagggtttttatcgagggtcgctttggcttgttggttttcttcttcaactcagctacagggagaaagaataccatataatcaagttgtcgttaacatagtttcgtgctcatacaaacctatatacttctgtgattttatattgcaattctcatatatttaacatcacccgcccgaactgaagatatacttttcagattactaaaatactaacaagtgaaaataataatacgggagagaaaaatatacccatcccaggaacttgataatcgttgatgatttcaaagtttttatacgtgtatcccacaaaattgaggtccttggaggagagcatctgagaaaagaaaaagattaatgtttcccaaacaaaactaaaaaattgatatcagcagcgcccccaaaaaaaatgaatggacagatcatcatacaggcaggccactacttctccataaatagtatatattaattttcatcttaaaaagatcagatggtatggaacaatagtccctgcttaagacttgggtgaaaagagtgcatatacttcaaaataacaaacaccaatgacaatggaatgaatataccaatgcttgtataaattactagccaataagaagcatataagactgcgtacctttctccaaggaccagttttggatgaagtatttgtttgattttccgactgccaaatccaagaaagagcaccgtgactaacatgaaattgccatcatttagtttgacagaatcagtaagaaaatgaagcataagtacctcttcaaacttttcaaagttttgagtatccaattcatcattgacctcggggataaacgcagcttccatctgatagagtttgtcccattcaacacctctgaaccaattatgcgcctaatgaaagcatcagcaccaagatgattccaattatagaaaagttgtttagaggaaaaaattctaagaaatctagaataggacacaccataaaccacctttatttcgcctgcacctcttgatcctagcctctggttgacattacacaaaagtttagtaataagatcttttgcctcttgagttagctttgcctcttcagggaatttcaagtgagttctccaattaactatctgaaaaaaacaagcaagaagtaacaaataatcacacaaattaagattttcttattccttattcaatgaatggaatggtagttaaaaacaaacttaagcattacaaaacatattacatagttgaaaaattggatatgatataagtttaccttcctgcacgtcgacattggatcatcagaatagaacggtgggtacccaaccaacatttcaaacataatagcaccaagtgaccacctgcatatcaacataacgtatttatgtcaacccaataaaatttaaattgtagtccacaaattcgaaaccaacaaaactcatgctaaaatagtttcatgacaatgtaaatgggtactgaaaagctaaaacatctaaagtccataactacataccaatcacattccatcccataaccttttttcaacagaacctccggagcaatataatcgggtgtacccacagtagaataagcctgcagtaaccaaatatttcagttcaagagaacattttccaacaaatatgctttacaggcctacggtgacagaatggaaagaaagagaaaaaaaaggaaaccagtttgcctcattagcattttttgaaccatatttaaaaggggaaaaggagaatgtaatttgtgaatggaaagtaatttacaagcatcctcctattcttctgccaatgttgcagttgttcttgctgggagcgcgctggattctgatcattttgtgcaaccccagttggattgttcgctattgaaaagtcctcttggaggttactgcagtctaacggtttacacagtccaaaatcagacagcttcagatgtccatatcgttcaagtaacaaattgtcaggcttaatatccctgcaacattaaggactgataagatcagattagatcactctcctccggtcttgaatccaataaaaaaaaaaattaattatgtttaagccatatcacaatatcttgataaatcatgaaattttatacccacaaacctatgaatataattgtgtttatgaatagattcaatagccaaaatggtttctgcaatataaaatcgagcttcatcttctgtcaaagtgtcctttctcataagtaaagtcatcatatctcctccaggtaaatattccataataagataaagatattcatcatcttgaaatgaacagtatagcttcacgatatatatgctgtccacctcagcgagcagattcctttcagctttaacatgctcaacctaaaattatcgagatccaactaaaattaacacccataaaaagatagacatccgtttggatataacaacctaaaaagatagaaacccaattggaaataacaacccaaaaagatagaaacccatttggaaataagtatgatagaaacccaattggaaataccaaacgcagaccagttaactgaatacctgacccctacgaagcatttctgatttcttcagctttttcatagcatatacatgaccagttgtcttttccctacagacacgaacctggacattaaagccaagttaatattgataaacaaaatatttagaataaccccactactatactattacataagtgtagaagcaccagttgaacattcacacagaacaaaataaatatccttattaaaaaaaatattgtacctccccaaatgcacccttgccaatcattgtcaataactcaaaatcatcagcacccattttatgcctttgtagtcgcatgtattcagtctccttcttctccaaaaatttaagaaggttgttttggtcttcttcagatacatcagcatcagctaatttcttttccaaaatatttctccttcctgtataaaagggaaaaaaaaaaaggaaagaaagaaagaaatcaataaaaatgttatgtgaagaaacatttttgatgtttctatacattatgaaattttggctcaattattttacaaaattaaaaaagggaagtgaccaacatccaatgcaactatcatttacaacgaagc

SEQ ID NO: 22281 - DNA, 1440 bp, Cannabis sativa
ttttttttcagttttaatatattataataatgatctttggttgcaataaatatttatatgtagaaaagaaagacttttcaatttttacacggtacaaaattgttagcattaataatcaaataaaaacatttttattaaattgatagtaactcccattaatgtattaattaattacaattacactctcaaaatatagacatataagaaaagacctttcattttttgtaaatagtttagagtaattataaaatgagaagaaaaagaaaataccaacaatgagaaaagcatcactaagaaaacaatgcactaagaatttcctcatgatcacatgaagccctaaagtgtcattctctaaaacaagtcagtctactatctcatacatgcataactctttattttgttctcttcggtatcaatttttatataaaataatatgttatgtatgtttttttttttatagatattgttttaaaatattttattttaaagatcgaccaaattatataatattcttagtttaattcaaatgtcctatatgtgtgaattatttggctacagataatggataaggaacaataattttgagtaatattaaatagatgaattagaagaaaactccatctatttacttttctaaggtactatcatatatgtaaaaaaaaatatgtaaggaattttgaattggtggattttttatttgatgtgaaagtactattttagtattttttttttcatatatggatttgggtgttaaaaatatattattttttttattttatatataaatacgtttattaaaagtgatatttttatgtgtcaaaaatttaaatagtaaatatattaatattattcgcttatatatacatatctatccatatatttatatagtgtaggtaaattttgtttcgattttagataataatttttatatatttattccacttttatttaatttctaattagttatatcttaaactaaatttatataaataatagtattaatatattatccattattataaataattagttattatatatatactaaatgattcaaaattttataattaataaataattttataattatgttgttaagcttgatgatgtgacatctcactttcctttgttaaggatctattatatgactattggttttctttttatttaagtgtatttatttatttatttttgtacacattaaaagcgattattaatattatgtgatctatacatatactaatacacacatgattttgattttgagtaaatttacaaattgcatcacgtctaaaaaaatcattaattagttatatctaaaaaaattgttcattataatagatgatatatataagtttatatcattcataaaattcaaagaaatttttagtattatttaattaaagaaatttagtgacttttcatttttgaaaaaaaaaa

SEQ ID NO: 22282 - DNA, 4523 bp, Cannabis sativa
ataaattaataaaataatttctttcgtataatcaaaactatatttttaatgaaaaatctggctatacaaataccaaaactcatataaattttacatatttcttataagcttaaaagcttgatcatcaacccattactaaaactaatatcaacataatactaatattaaaaccagttacaaacatctcagaaattccaatactagaccatcaactcactaccaaaatattcactatccactaaagcataatattagccgcaaaagaagtagaaaatagaatgagagtatattcaatagagttgttgtctttattaaaaacaaaaaccagttacatataccaaaaattacatataaattttacatgtttgtattctagatactatatggaatattgaacaaattaaatacaataccaaaataaaactagttacaaacttcttaaaagctccaagacttgaccatcaacgcactacactactcaaaatagtcattgtccactaaaataaaatattagccgcaaaaaaaagtaaaaaatagaattagaatattcgtcgaagttgttatcgttgtcagaaaatcatcaaaaaatgcatcagagttgtcttcattacctaagtaagtaaaaaaagtgttgtgatcaatgcttgatcatgtacctcatacacaaaacaaaactaggaatcgatcaagaacaatgctaacagatttattcataactcaaattgattcaaaccagaaaataaatagtaaataaaccagcaactataaaccatatatgaacaatgatcaatgagcaattatagacaagaatatagggagaaagaatcaaacacaaccagattacgaaattcgaacaagtgatgatgaatcacttgcctactcctcggccagaatagccccaaaagcttgaatctttattgagctagaagagagattacaatgttgataatcaatgtgttcttgacacaatcactcaagaagcatagcttcaattacaatcaacttcactcaaaactctctttctcttgcacactaaactagctctcaaaaactcctgaaaaattctcctaagattgctactgtaatgatgcagcaaatggctatttatagccttgatgatataacccgatccgttggtggttataggtggttgagtaaaagatgtctatttcctctattagtgaccaatcacaacaattatccaccttgatcattaagagaggaaagggatgatgattgaggctgaaatggtcttgcatcctcatttagcaattgatgatgtttagcaaatctaggcaaagcctaaacttggctaaactcacatattttgtcatcatatctgcagggttctcttttgttccaatcttctttacactaactttcttttcagcattgatgtccctgatcagaactcccaaacaaaataataatgcttataagaatttcttttatatttattctactaataaatatatatttccaacatacttactattaacatataatcatggcattttacaaatatacttaactcattctttccaagtaagcacatatagcaggtaaacagtcacatatatagcaagtaaatatatatcacttaatataccatgagttgagcttgtcttcacagtaaatgtacatatccagccagtcttctggacctttaaaaccgtggctaatctgataccgtgttgtaatgccctaacccataggaacgctatttgtgtgcttttttaaaattagtttataataataaactaacaattttaaaaaaaacttgttatttaattaaaacttatttaattatttaatacataaaatttattttggtactaaacaataattaggatcggggatcccttttaagatgtttacaaaggtgccattaaagttttataaccaagcacatacttttcagagtttccataaactaaaattctgatgactcgatattactggtcggataagttgatatgtacattttttagggaagacctctcactcagagctgccctaatctaatcccctttcgttacctacacaccataaagtacccatgagtcacaaagactcaacaagagaagcgagaaaacaaactcataaacatcatataacaataaataacaatatgcatataatcggtcatatattcaaccctaattcaaaatagggaatgaagtataacacatcatatacaatctcaagtatttttctaataagatagactattcttgatacttcataaagtatccgccaactctcattttctaaataaaagaaccaatgtcactatcgttgcctaatgagacaaccgataagtaggaaacttaacagcaatgtcaattaaagtagtttctctttcacaatgctatctaatgagacaacccatttcacactgtttcctaatgagataacccaataaagtaataactcttttctcataaacggtaattatcgattcatacattgcatgctatatcgtacaattgacttttcttacctcaagtccaaatttaagcatgttggtcaactcaagtggaaaatgctcaacaatcttggtccctatgtcactacaatggtaatacggtagataactcattttaatctgtttatagacttaaacttaaaactagaagttttcttatcgataaatagcatggtaatactataaatatcgataaaatataaaaatttaggtgtctgaaagaaccccaaatggttcactgtttacccgaaacgattcaccatttttttgggtttttgcatggaaaaaacggttcaccatttctatagaaacagttaaccgttttctgcaaaaacgatgaaacaaaaatcctaacttctcaaatcttacccaaaactcctccaaaccctgccaaactctcttgaaaaatttaatactaagttctaaacataatccaacaagtaattgaaaccaaaaagctcaaaatcaaaaattatcattgttgagcaagctttgagtttcaaaactcaacacttgctccaactcaactaacagctataaaaaaaacctcttagttcactcatacacaacatacttaaagcttcaaaataaattctaacctccccaaaaatgtatagaaacgaattcctcaaacttaaataaaaaaaaaacaaactttcttcttgaaaacacaaagagaagggaatcttagggtttaccttaatctgacttcaattccacttgaatcctacttaaatccaagaggaaaacaaatgaattagctgtgaaaattcttcttcttgggtggtggttctaagtcgaggagagataaactagtagagagggtcttttacttatgttttaaatttaccctcaatatcatccttatcctaagtaaactcaccccaacttaaatctctagaaattcactaaaaaacaaagtttctatagattaacttagatagaaaagactatattacccttacttccaccttaaggaatctttaaaagattagaggtaaaattgtcatttataaataacctgcctaactcaaaattccaaccataccatataaactcctagtaccactaagacgcccactaatatcgggatgacatttctagccaattgattggtttttcactctagttgaagctaaaaatattttatttaacaagtattatttattttacctatatagctcagtaaaatctccgcaattaataaattacgcttatttaattattattaagattataatatcacctacttatactctaaaacacattattttatatttaagaaaatatgcattattacacataattggatattttagaatattacagtttgagttgtaattgtgaccgttttaattaatgaagatttcttttttgataaaaaaaaataaaaacaaataagaaaatacgctaaagaaaatgaaaacatacattaataataatatggagaccaaatatatcatattcatttggattagggtaaatagaatcttttgtaaattaccgaattgcttactactgcaccaacaaattaatgttgataactttattggagattttagtgttttcataatgattaatcagttcgaaactgataacattagcaaaagagaagagaggagagttccataatacaaagataataatttgaaatatatgttaggtttggtcgatctagaatttgcataaaagaagtttctaaaagggtgtaatgataaataaggcactactttttgtttttgtatttttggtttcactttactaagtctctactcaactcaaactctaatatgtgtgcttttgacaaattgagattacttgtgaaagcaaccacccacctctctccactctcactcaccattccaaaacaagaaataactaaccaatcccaattcatggaaatggaatgaaaacccacttctcacttctacaattttcgtctctcccattaaccccacaatctacataattaattgtatgaatgctatatattatctcacctttccatgtcttaactaatgtatcactaattatt

SEQ ID NO: 22283 - DNA, 5083 bp, Cannabis sativa
atatggtttttttagaaaaaaaaatcatatttttagtttgattggttagataatgtcatatttagtgacatttactttttatgccatatttatcataacttaaataatttttgccatattttttaaaataacccaaaaaaatatcaaaagaagagtgttatgggatttgaaaccaagaccttagacactatgccatccacctcaaccaactaaactatgaatatttgttacttataatatacttaaattttacttaaataaaagcctaataattttattttttatttgtttattttaggcccccgaaaagtgtggcccctaagcacgagcctagcctgcctatgccttgcgccaacctgtatataatctcatcgaagtgggtaggaaacaaaaatttagttagtatgtcaactagatttgttttggaggagatatgattcatctttagactaccattagtgatcttttcacaaataatgtggcggtcgatctcgacatattttattctttcgtgataaactaggttctcaaaaatatgtatggcagaactttatcgcgtaaaagaacaaatggaagtgtgatattgatgctgaaatcttggagaagagaggtgaggcaagtaaatttacacgtagcatttttcatggcacagtactatgcctcagttgaacgcaacaaagtctattgcttcttctattttcaggaaatgagagattggccaaaaaagatacaacatctagatatcgacctgcttcttcttcctattttattatagataaaggaatcccatttttcatgtaataagtttctataaatagtggtataatctcactaagaaaggaagagagaattaatccacaaaaatactcaagagagaaaagtgaatctaagagaaaaaaataactaagagatcgattgtatgagctttaaagagggagaacacttcattctttctcccaagtcaatataactgtaggggagtaagctattaccattcttatagggccaaatctctttaaaatcccgtgttctttttattttactgtttttgctttatattatttattttatctaatcgctttatcttgactcactgtcgttggctagaagcaaagtcaacattttggtgctttcattgagagcaaaaacacacgcttttgtcttaatcctgataggtagacaggatggttgtacaaactcgaatgggaagccttactgatcaatgagatctaatggtgacagatccaaacacacaaactctaggaaacacaagaggaccactagggataaacaccaaacaaattaatacacaaccaccaacagtaggccatggagtgacttcccctttggttgggttcacactaggcgtacaggatactgggaacacaagtactgttgtcgatgagactattactagcaccaaggtcacgtccactaataatactcaacggccagttggacatgacactaaacttcaaaatctacgagaagcacttgggcttatgcaaggccataacaacacttttcatcatgatcaggttgatctccgagtagtcattaaccttgccttcgacgagcaaagatgtcaattcatagagtggagaggccagaagatggaagtcatgagagcacagcaggcagccatttgcgatcgttctaggcaggccatcgtcctaatcagaagggcctaccagtttaccagtcaacaaccaacaactgaatctagtactccccctgagcaagtcagaatggtatgcagctagacataccgaacagactcggagtggttagccgtccaatccaaggccacaggtccaaactgtgggccaaatggtagatggccagatcttgccagatcgccccttgggaggatttacacattcaaacaactctactcatacggaggtctcaggttagcctctcagccaaataggtcaaacgccaagaccatctagtgctttagtgttcgattgactagccacagtgcatgacctcaaaaacaatttaaatcacagaaagagactagaccgacaaaacattccattgatcgtccagctagatacccacacccaagatccaattcaaagagatcccaatgtgacataggttagtcaccaggctgaacaagttcatctacttgtgcaagcacaaatagatcaacttaaaaacatcgtacaaggcttgaccggcccaaaagtcacagatctcaaactcgaccagacgcgtggatcaccattctcacttaaaattaaagctcttgacctacccccgatgttcaaaacatgaatatggaaaatttacacagaaaagaagatcatttatcccacttaaagtactttgaaatgtagatggatctgcaaggggtaagaggcgatgtacggtgcagaatttttttggccacgctcgcagaggctgcctaaaactggtatttcaacttgcctctaagaaagtttaatccgtggatttctttctcctcagaatttcacgcacagttttcttcctcccgtcatcttccctcacacctagaagacctggtagaagtaaagcaagtgccagttaaacctctaagggcctatattagcaggtttatgactaaagcaaaaaaggttaaagggatgatgaaggatgggagattagaagcaatattgggggggtggggcattgaacctttttgagagttatataaagacatcaaaagattaaatgtgggatcaatggctgagtttttggatcgagcagatggattcattaagctcgaagaagtagtacgacgtgttgataccatcgagcaaaagaagaatcaattgaacaccactgttgctggtacttccgcccagaatttacattatcctagcaactcaaattcaaatggaaagaggtcaaacaatggcaatagacagggtaatacaaagaaaagcaagttcactggcaacactgaacaaattctagggagaatgcttctaaatttaatgctttttcggtattaacagatgacatagagacaatttatgcaacaacctagtctatggtgtcgtaaaaaaaaccatctcccatgaaaaaggacatcagttctgtcgtttcacgcgaattacggccatgacacaaatggatagaataatttgaagcatgagattgaattttggattagaaaaaataacacgtgcttacaaaaatatgtcaaggttgaccaagagcgacgggctgcccaggcatataataaccagaaccaactaatgcctccactagtggacgggcatctacaggtgatcattgggggcccactcctcgatgaagactcaggcaaagctagagaaaagtatgtgcgggtcttgcaaaatgaacaaaatgacacaattcttgttgtggaagaaagaaaacctaaaataccacgagtatggggaccaacaataacattcaccaaagcagatggtagccatgttatcttcccacataacgaccctcttgttgttaaagtacaaattgtaaacaagatggtagcacagactatggtggataatggagcttcttcaaatattcttttcaaaacaacctatgagaagatgggacactagcttaaagacttgatcccttgcagtcaacttgtatacgggttctccagtcagagtgtgcaccatttggacaaattcgcctaacacttacagtttgataagctcggataagcatcactgttatggcacaattcttggtgatcgatgtcccttcaacttttaatgtcatattaggtcgatcaaacctatatgatttaaaagttgtcacatcagtttttcatttgtgcgttaagttcccatctaaaaggggggtaggttgtttgaaaggaaattaaaggagtgcacaaaatgctacaatcttgctctatctaaggtaaaaaggagaatacctccagccaaagttcagacaagggagcattgcccaataggaactcgcccaaggcagggacgaagacatggatcctcgacttgggaaaataaatactaatgttgggctaataaaagaattagaacaagtggaaatcgatgcagatatcccaactaggaagctgaagatcgataaagacttgttactatcttaataaaacttctgagagaaaacctcaacattttttcttggtcacatgtggatatggtcagaattgaccccactgtcatgtctcacgccgtgaacattgatccaaactttcgtcccatccagcagaagaaaagacaattacataaagagtgtggacaggcactaaaagaagtggccaaaaggctatgcgtaaacaagttcatcattgaagttttctacccggcttgggtggctaaccccatactaggacccaagccaaacaaaaaatggcgagtatgtatcaatttcactggcctcaacaaggcgtgtcataaggactgttttccactcaagaattgatcaacttgtggatgcaacagccggacatgaaatcttgagctttattgatgcatattcggggtataaccaaatcaaaatgcatccacctaacaaagaacatacaagtttctgaatcagatatgggtctatactgctataaagtgatgtcgttcggtctgaagaatgtaggggctacctatcaaaggttagtaaaaaaaatgttcaacaaccagatcagacagaatatggaagtatatgtggatgacatgctcataaaatccaggaaggttgggggcacataggatttggatgaatgcttcaaaatcctcaaaaaatacaacataaaactcaatcccttaaattgttcctttggggtcagctcaagtaagtttcttgaatttatttttaatgctccaagaataaaagccaacccagaaaaaatacaagccctcctggatatgaagtcgccaacaaataaaaaggaagtacaaagcttaattggtcggatagtcacactcagcagattcgttttaaagtcaacgagcaagtgcgttcccgtaacgcccaaaataattaggcatgctaaccaaaatacttatgaaaccctaatcccctaatcgggattactaatcaaaatagcgcataatttaaacttttatattaaatagaatgaaaataa

SEQ ID NO: 22284 - DNA, 2943 bp, Cannabis sativa
acccggaaatcaacaatcccactttccttttcacattatccatccacgtgtcctccataaacgacgtcgttcaacacagtaaaggactttactacattgcgtgatcccatgatatctttctcagatttttcacaatccattaaaattaattaataaacccgacccggaatcccacaaactcactttccttttcatccataaacgacgtcgttcaacacagtaaacgacgtcgttttcataagattttgcagtatataactacagttccctttcgtgatccgatattatatctttctaagaagattttcttccaaacatttctcatcaccggaatcggagctatgccttactacagagacgaagacgccgtcaatgacttcgacgagtacgatccgaccccctacagtggcggatacgacattcacctcacctatggtcgtcccctccctccctgcgaagagacatgttaccctccattgactgatgatttcgattacgatcgtccacagtactcttcccacagtgaaccctctgcttacgccgatgaagctcttgatgttgagtacagtagctatgtccgccacaagccacgtcctggaccagcttatgggtttaatccaggtggtggtcatccgcagggagagagacctgaacccgcgccttatgggtttcagcctgaagctcagtatggctctgagagacctggatctgaatatggatctggctacggtcgtaagcctgagcctgaacctgaatcggaatatggatctggctatggaaagaagagtgagtttgaacagtcggaatatggatctggctacggtcgtaagcctaaacctgaacctgaatcggaatatggatctggctatggtagacagccagaacctgtgtcggagtatgggtctgggtatgggagacagccggaacctgtgtcggagtatgggtctgggtatgggagacagccggaaccagtatcggaatacggatctggatatggtaggagacatgaatcagaggaaccgagttctgaatatggatctggttacggtcggaagacagagtatgagagttctgggtatgtagcgtctgagtatgttaagccctcttatggtggtgatgatgagtcaccgaagaaaccaagctatgggaatccaagttacgggagtcaagaaggagaatacgggagatcaagttatgggaggtccgaggaagagggttatcgtaagcctagttatgaaaggcgtgatgatgatgatgaagatcgtcccaagtacggttacagcgaggaacgccatggccgcaagaaatatgtgagattaatcttctaacttctatatgcttatattatatatcatattcattctcagatcataacttttatgacaaatatttgacctttaaggattagaaacttgttttttcttacatgtgctgcattagtacttacaaatcaaatatagatattgtcgacgtgtttatacacaaatttattgttggtgtggtctcttaaaggttcataaacatgaggaggttgtattataaatactattgcagataagcccgcaaaattatatttaaattctaacaatttgtgtcagctagaatagtgttttaaattcatatcagttcacttattactgatatggatatataaagatgcaatttttctacgtgtaaaactacaaattttcttatactaacattttctaagccgaatcgttaggttgggctattagaaatagccttagattgttaatgtgtggtaaatagaactaattgccaattaattttgagatagaattatgcacattcatactaattctaacaatttgtgtcacactgtttatagctagaattgtgttttagattgttctcctttttatcccgacaatcctttgctgttgtcacttattactgatatggatagatacacatagattttcaatgaatgaaatgtatcatttttacatatgactgatgatcatgtatgaacttttgcagggtggtgatggctctgatgatgatgaagagaagaagcaatctcgctataagcagggttccgataatgaagatgatgaagagaagaggcgatctcgctacaacaagcaaggctctgatgatgatgaagagaataagcatcctcgctataagcaccaccaccaccaccaccgcaagagctacgacgacgaatgatcttgttgctcatcgattgtttgcttgaattggaggagtaaccccatataaatatagctactaaataaagggttgtgttgggtctttcctgtttttgagtatcttaaaagctcttgaaaactatgttctaaaatgttacgagtgtttgtgttcttgcttttaataatataccagtgtttgacttgtcttgctacctgcattttcatatatttaagggccattatcaagaactctggcatcgttttgggttaccatatcaatcttttagagtggaagccttatatctaatttccttaaacttcacaagatccaagtcatgattgcttggcactgcctcatccaataggccttagttgtggaaatttacaaaactaacaaagtgaaataataaaatttgcaaaatgatcatataactcaatttacgactttaatagtgttttatgctcgatgagggctacacttgcatggtcctttttcatgctctcaaatagtttatatgtgtccaaaccaaataaatgaaatgcatcatctgcattggtgttattggcagaggctgagatcattgtgttagcaagtaaccaatccttttaatcttcatgacattgtgtcgtttcaaacatcagttttttgggcctagataacaggcccaccataaaataaccgatccaatccaatccgcacgatccaatctaatctaatccacaaagtgcggatatccgcacttgtacggattgaattggattggaaaat

SEQ ID NO: 22285 - DNA, 2551 bp, Cannabis sativa
caacataattagttaggtaaataatttactcttgcaagctaacaaagagcaagaatagtcgaaaaaaaaaaaaaaaagaggggggggccgggaggggttaaatcaactatccttattcctaatagagtttaagctaaaagattgacaaaacacaataaaggcttcgaatttgtacttctttgaattcaaactaaatttatttgtgtatttatattaaaagtaataatacatatataattttaatttatatactaattccacctataaatatttttaagtaggaacgatatgtaatataattgtaagactaaaattaattatatattataatgtctaattttttcgtgtataaaagtggatcaatcattactattacttttatattagaaagtaaaattaggattaaccataaagaattaagatcaaagtacaagttttaaagcttgaaaaaaaaggagtttttgtaactatattttgctttttatgaaaggaagtttgattaccaatattagagagcaaagactcatgattggagcgcgtagaatactatccaacaaatcaactcatgaatagaaagagaggggaaaaaagtaaaaaggtataggaagtctaccaaagtagaatgattacacagatgacccatgagatcatgaacaatctgacattttttaataaagtcaaataagttgcctcttctttttaattttttccacatctctcagacaaaaaccgaaaatgtgatcacaaaattcttgcacaatttgcgtatattttacatatatacttgcattttcttggtttatggattctctaaagattgcaaatctcaaaagttaataaattagtccaaaaagaaaatgggattccatcatacaaaattcaaaaatctcggctactaaatgataaatatatatagatataaagggaaaaagaaaactcttgtggtgaaaagttatggcacatcctgtctatatatgtgtttttatgaacataagtaaaaacaaacaaaagattaaaattgaaaaaagaaagaaagaaaagaaatatggggattagaatctctctcaatatggggtgaacatatataagtcgggtatacaagaaggttaccatcgacaagaatcaaatgaggaagatataactccaaattttcatcaatgaaaggaggctttgttggtgttggcaattcaaaatcattttgtttaagcatttgaattaattacttttggtcctcattgccatgttaggacgttaagacggttatatatagagtttcaaaagtgtcaagatctaaatttgttgttcctcacaccactaactaactccaacattaactccaaagctacaaacatcaaccttttgtgttgtgcactacatatcaatttcgttgcatatttcctctgcttgaattttcccagttgcaaataaacgctttactgcaatttctctaccgtcagcaatagagttccctacaaatatatattgatcacaggcatataaattaagaaagtaataactctatgattaagtataaataatcaaatatttatttattgaacatatatacacacataacaggcatatatacacacatagacatgcatgtatatatacgaatgtaccactggtcacattgtcacgcttttacaaacgatgcatgttataatttagagcaatgtgcacccaaacgtaaagtttaaataaatatgattggttaaaatactatcatttcccattatcattttgtgcatattttgaggtattgaattatattttatatcatacttttatgtaaatttaagtatgttattaatttgtatatggagataaaaaaatatataatattttagtataaattaaaatttaattttatataaaaatatacatataatttaatttaatagtatactacaatgccacttaataagtaccaaaaacgggtcctaaactatgattggttctccaaaacctccaggcatcattaaagccttctgttgctttttcaaggtcgaactccaaaaatttcgaatatttctttgatgctactatgctgtagttgattaattaattaatacaatttatgataattttgatccccaatattttaatattaataataagtaagaaaaaagttttgaaactaattggttgttgtgtcagtgttaaacattaattatgtacctaatttaaaggggcgaatctgccaactcacaagaacatatgtagcgtacgtcaatagaatttctcaagtattaattgaacatccaggtaattaatatacgatcaagccaacaatatataagccaatttggactaaaaatatacacaataacatttacacaaaccaattgaattagaaggatacactattttcaagaagacaaaaaaaaaaatcatatcacctggcttggttttggttggttcgattgaataaaatggcctaaaagttggaaaacaagtttcacaataatgcattaattcatgtcaacacaattgcattaaatagttttggcaatattacatggacttttcaaacacaacccatctcaaa

SEQ ID NO: 22286 - DNA, 3995 bp, Cannabis sativa
caactttcatcattttcatcaccaattttcgtttcatgtatcttaatattaggagtagacagatcgaaaccaatccagtccaatccaattatagaaacttcgatatccaattacaattggactatattggatttgaatagttggatacactttcaaaatttaattaaaaaccaatccaatccagttacatctttaaatttcatttttattgttgcatgtgttcatagtatcatcattccttttgtgaattttaggcgaaatcaaagacttatcaaggagctaagtaccccacaaccgggcaccaaagacctctattttcccacccaatactcaaccaactttttcactcaatgcaaggcttgtttttggaaacaacattggtcatattggaggaactctaaattcaatgccataagattctttatgacagttatgattggtaccttatttggagtaatcttctgggacaaaggcaccaagttgtaagtaccttactagctattacaactacattttatatgttttctatggcttaaccttatattgcaaactatatttgcttgttaacagaggtacacaaaaggacttgatcaatcttttgggagctacatattctgcaattcttttccttggagcaagcaatgcctctgctgtacaacctgttgtttcggttgagagaacagtcttttaccgcgaaagagcagctgggatgtactcagaattgccatatgcatttgctcaagtaaggcattgaaattatataaacatatttatctacaaaatcttaatgcacttccttctatatctgatgttgattcctataaaatctgtggtgcaggtggctattgaaacaatatatgttctaatccaaaccttcatatacagcatgattctgtactccatgattggttatgattggacatttgtgaagtttttctacttctactacttcatcttcatgtgttttacatacttttccatgtacggtatgatggttgtcgccttgacccccggtcatcaaatcgctgcaattgttatgtctttcttccttagcttctggaacttgttctctggtttcatgattcccagaccggtatgtgatccaaacccaagtttcttttcatctcttgtcaatattcatttgataccctgtgttttctcgaagaacaaatttggtacccttaaaagtgaaatttgatcatatcaatttaagtatatgtaataattaaatttgaatttaaaactcgtataattgaagatttgattgtattagtaaatttgtttgatcaaatctgaattcaaagtacctaacatgtatgctttcaaaatactaagtatcagatgagcatcattggaaacatacaggataccaaacttatatttagataaaactcgggataccaaacgagtacacacccttattttttttttaagtgacatgataattctctttagtggctgcatttttcactaaaaactcattttcaatctttgctttgcagctcatcccggtgtggtggagatggtactactggggctctccggttgcttggacaatctatggaattttcgcatcacaagttggtgatgccaccacaaatgttgaactttcaggtggtaaagtgatgagggtgaatgattttctcaaagataacttgggctatgatcatgacttccttatccctgtggtggttgctcatgttggttgggttcttctcttcttcttcgtcttcgcctatggtatcaagtaccttaacttccaaaggaggtgatcaaacttcattgttgtttaaagcacatagagataggatagttgagagcaaaatactatacatataacatatgtagtccaaaagggcaacagaaatttgttgccaagtttgttgtttttctttctttttcttatatagcttgtcaattgtttatttgtaagtgttttctttaacttgatctttgtttatactttcatacctttgtatagtttaatgtttttatctttccataaaaaggttatgtattaattttttttttgacattggagtaggggtatgtgaacttaggacctcctaacaaagaggagaagtgtgaaaccattaggctatatctatgtattgttaaacattcaattatatggaagaaaagtaaaagtgttgctttaggcatatgtgcacctaattatcaatagttaatgagcattgttgtgaggcaccaaggtgcttagcactactataaagtgacgttttataatcggttagtggttttttataatcttattaaagtaaaatatgtgagacctgatatcgaattacatcaataatgatattacacatcacaaggatactaagcaccataggtgccctttagcatttctcatagataatatgatgttatttttctcaagagctctttttgctgtaaacaaaaaggcctcctaaaaatcaaagtgatctattcaatctccatgattcaatttcatttagaattctactactacaaatcttaaaaaggatgaatatcttaagaaaataagcatattttatcacgaaatgtaatgtctgaactcaattagtgataagtgttattttgcgttatgtttaggttgcattttaggtttattttaattgtttttatgtcatttagcgcatttttacactcgagtttgcttattttttaggtcataataaataatgaagaattagaacaaattgaaaaaaaatacttgaaaatagaagaaaaatataagtttcggtttctcaaaagtagtcttgaagaattttgtaaaactctaatgaattttcggagctaaaatttaaaagtatgaaagaaagtaatagggtctcaaatgcggtttgtagcaagatattttggagtgttttagtctcacatggactatgaatgaattttgaccatcactaaacgagatataatgatctttatctttctaaaagtacaccaaacaagatttttaacttttaagtatagcatgatcttttattgatgaaatttgcacgttttccatagtttattggattctgatcttcttgttgaacattaactaattgaaattgacctttaattttggcttgtcttatacacttaggatatgacttctttcttgggtgttaggaattctttagtgtcatcatcaaaatggggaggaacacaaggatagtttatctctattgtacttatatggaatatattaacattaaattcagaattcccatcatatctaaacatgaggatgtagcctccttttagcttatatgaaactgttacaaaacaaaaaaataaaacgaaagaaggagaagaagaatagagagaatttgttattatctgaacagtggatacaaagcacaatgagtgagctttatatatagctcaggctcaagaaagatacaaggcagaagttgcttatacagttaggacaactaactaatataactaactttaactaacaactagacctaaaaccaaaaaaaaaataaaaattttaaagattggtaaggagtgtggataaattaattcaatcgttacttttaaatattcaattagataagattggttgttggatgagatatctaaaaattttatacaattcatttgaattgattaatatcgtcttattcaattatttaagtatatatgaaaattatgattaaaatttgatttttttaccgtatccataaattcagatctaaaatagtgaataaatatgaatcattctaataaaaataatcaattcattccaaatttgattggtttaaatgattgatattaataagacaaattagttatgaattcaaaatttaatattggatgtggtttaattagcacttttttttttataaaatattgaatgtggtttttttttttttgaaacgaaaatcttcattagtaacaaacgttatacaggattcgtggcatcaagcaaaaccgcttgatgagcacaaggaggtacaaccccaatccatatggcactagccttgtgaacc

SEQ ID NO: 22287 - DNA, 5483 bp, Cannabis sativa
  modified_base (85)..(87): a, c, t, g, unknown or other
tacacagtctcaaaatcatcccacttgactttccccaggcgatgtgggattacacatcttacccggtgtttccccttacggatcnnnggactactgactgtcacaaacttgtacccataattcatatcaaacgaaagaagatttatttatatatctcaaacgttgtataaatattgtatatattaggttaatattacatatattaaatatatacttagttatataattagttttttttaaggttattcaataaaaattattttttattaaaatatgttttatttatttagtattatttatgaaaaaaataataatatttaaaattgattgttaattataattttaatttaattattgtcatattttttattgtttatatgaaatataaaatatattttttttattgaaagctaaatatattaaagttttttttttatattttaaaataatttttttatttttacggaattccacatagaaaatcttatagcaattaacggagcaacctaaatcgcaagcaaaatctgtacaacaacccacattaaaaccagaccaaaaaaactacgagagcaactcaaactgtaaattgtaatttttttaaaaaaagttataagaaaacttattgtatagaaacatttaatataacatatgtatatatataaatattcaaactctctgtttattcaatctctttatatatttgttggtctcctaatgttttacggaaagtaatttttagttgggacacttttcttagtggccaaactgccttttcaataatagaatacaatgcacaaacactatgcaattgttttatctaagtacatttaattgtcttgttgtttgtgtgtgctttcatataataagctatttagacaagattaatccatgctttcctttctaaggggcccaattaaggatttgtttagctctcaatctttgtctcattttcaataaatcaagctagacttagatatatatatatatatatatataaatatatatacttataagaaagaggacaagaaggtcgaaaaagaaggctgaaaaagagagcattttatttaccctactaaaaataaagtttgacattcatgtgcgtatgcgtataagttttttatttaataatttcttaattaaagaatgataaaacaaatttaaaccaataaatcatattcaaagaagaaagtactagataacttttttaaacatcattatgtatggtaattttttctcgactgtataaatgtaaattgtgtactaaatttgttttctcaaatatatatatatatatatatatcacttactaaggcactaacacttccactagtactaccatatatattatattacaaactataattaattagtttgttaatttgttataatttattaacttattggtacgtatggtaagaatttcatagcgggttattatttagtttattaatgtgttataattttaaaaacttattggtacgtatggtaagaattttagatcataggggtataaggtcctacaattaaactgtcttactagttatataaatgcatacagtaattctgcaattataacatatactattattgtctgtgtatcttgctatataatatacatgtatatatttaaatatatcttggacattttgttagcccttttaattgaaacggaaaaagggatgatacattcctcatattatcattgcacaacaaattaagtacaatatttaattgcttgaatgatcccatgtaataaaagagaaaagaaaaggaaaagcaaaaaaaaaaaaaaacacaggggaacaaaggatccacgtgtgaaacagaaaattgggtctcatgttattattaccaatttttttatttttgattttttaagagaaaataaaattaattatgttttagctttacatgagttgttggggttctcttgcttgggattcctacatccgtgtgggcacctcatagtgttttggatattagtgccacctttttaagaggctcttgtgtgtattttcacttcgttcaatttctctcctcctatctatctatcttttatacaaagcacgctcttgttaaagagaaaggtttttgggaatcctatgcctcttccttatattctcatagttaatttgcttcttattactttgtcccttttgagattacaagattcccaattcttaccatcatcataccctaatgtgtttagatatatggttaaatctcttcctcatcaatactagtttttcatgtaaacatcagctaataaacttgaattaaaggtggtcagaaatacttttttgactaaattatgaaaaaaaaaatagttgctagatacgctccaatgtcccaaagttattttgtacatttggcacaatttttttcctatgggaataatagaataagaaagtgtattagtttattattctaattatatttcaaaaagattatttgaattttccttcctttattatcttggtgatgatggtattgtaggaggtttggggcctattttgatcagtcacgtccctagatgttttagatgaaaataaacgctaggacctatctgatgagtttaagtagcaggtccctgtaatgaggatatatatatatatatatatatataataaatgtaagaagataataaataatcacaagggagccttactaataatcaaaagaaaaaacttattatgatcatgaaaattgagccttcatcatgaaccacaagagaagaagtttggtcatagaattttactaataattaatctataaagtttaattgctctcatttgattcaaaatatattaattagggatataaaaatatatagggagagtatgattaatgcttttacttttgcccatgtcccttcttctcatggccttaaaaaaatgtggaaatatatttagtcaatatctctgatttagaccctcggtcagtcatgaccaagtatattttatgcctacaacatatatgacaagcttgaaggatgatttgttctctataatttttttgttcttttgttttttatatttctttatctatagataacaaaatgtgaatagggggttgtatatatcatatgatatactagctagctaagccacttaataaattaatagttagctaggtatatgtatattttaataaccactttcaataatttaaaaagaaaaaatgagttcattgagagcatacctaaggtagctatgtgtgagtgcagtgcacctccactttctataaataaataatccttcttctagctacaattaataaatagcaaaaaaagaagagaagaagggcctaacatatatatagaatatatgtgtgtatatatggtcaaaagttttgcaatgaagcagtaaccccagcctcagtcctttcatcacctaaggttggtccatttttctcctttattttctttttctctgcccgagcatgtaaggataactacaatagataagcaaagatatgaaataaattggaattgtcagttctaattcccaatatacagatccataattatgtacatatataaatataaaatcacaactatttaattattgccacttaactacctacgagtgttttaattgatttcatttgtcacatgatgaatagtattatttatcaaattcacatacataactaaatatatacgtttaacaatgttagttcataaaagccctacgaccaaattgagtggagttttcttgatcaaactttggaggcttttggtttatgtgcccaattccgtggttaattatttggtggctaaatgtgtgtctttggtgtctttttccatcctccggggatcccttgaaaaaattctactggaaaagaggccttaaacggggagattctctatcaccatatttgtttattgtgtgcaatgaggttctatctcaaatgttgataaaggctgaacaaactgatttaattagtggtttttgtgaagtaaatctaaaaaatattttagagattcaatcttgcttggattagttctgtttggcatctggtcaatgcattaatgtgcataagtcagctcttatcttctctactaatgttggcataaaccttacaaagaatattaaggaggttttaggttatagggatatgaatggtaatgataatttttgtggtaataccattcttttctctcgtagcaaagtgaaagatttaagtttccttattgataaattagccagacggattgaaggatataaatctaaacttctttcgcaacttgggcgctccatcttgattcaatcagtggccttaagaagcccagtttactcgatgtctactttgttgcttatgaagtccatttgtattgaattagataagatggttcgtagattttggtggatgggatctgcagataagtctcagtttcttgctcttgtgaattgggattcgatttgcatgcctaaagagtgaggtggtcttaattttaagaaatttgaagatctaaatatggttttattggctaagattggctggagacttgctgtgggtgatgattctttatagtgttctgttttgagccaaatatttcaaacaaaattattcattctggtttgtacctgtccgtagcaatatgtcttttggtgctagaggtattatggcatctagagatctcatctgcaatgaagcttgcttccttattggtaatgatcaggaagtggatatttggcactccccttgggtgcagtggctctcttgggagaagtatgtagcttcattcaatctaaggattcaagaatggggtgtctcgatcaactctttactctcttttgacttgtcaaattggaggtctgagttggtgagaagctagatggtttagtcctgctctatgtgatatggtgtggtctatcctgaggctctcttgcactagtgcagatgagctggtttggaaggactccaaggatggttcattttctttcaaggaggcttatttagctcgtgttagacatcaacttggcaagaaagatgatttgtggagcctaatttggaagagtaaggtccatgaaagagtcaaattttttctttggaaattttcttgtgatattcttctttttggtagcaggatccatcgtatcttcgggaatgattccaactccatcttcagcctctcagatgatgattcccctctccatttgttcttctaatgtgaggttccgaggcaaatttggaggtctagctcgtggggaattttctctgaggttttgttttttgcagaccccaaagctctagttagatggctcctctctcctacgaatattccttttgctgatgttgatgacaggtccaaagtttaggggtgcagcctcctcctcttcctccgcctcggaaggactaccaggacggacatcgcattgttcctctatctcctggaccttagcgtccccttcatgatccccctcctcctacacgggtggatcctgttcggcgccgggcaaggtggcgtgctaggccac

SEQ ID NO: 22288 - DNA, 1880 bp, Cannabis sativa
atatatatatatataaacagttaatttaatatggttgattatagttaagattgttttaattaagtaataatatcaatagccatatactattgaaaatcaagtctttaaagctaattgataaaaaaaaatgtgatattgggcggtcatcgcacgaaacgtgtgaaaacacatacatatgggagagaaaattagataaaccaattaagttggggttttagaagtcatacaagtaagacatctatacacacaaatacatatgcgcgccatatatatatatatacacacatatactgtggacaatattatgagatatatacttcaatttctctctctcgctctatcttatggcttggaattatggatatgacatatgatgatctcatgagagatttttattgagtaaagaattgaattttaaagcaaataataaagatattattatagatatcgatggcggccggagatggttcagccatctctttggaacatactcccacatgggcactcgccgttgttatctttggcttcatctctacctcccttctcatcgaacactctatccatactctttctcaagtatacacaaatatatctaactatatatgaactcaatacatataaatatatagtaatatatgaatctattccattctatacaaagtaaaatagtattgcttatttgttgtgtagtggctaaaaaggcataaaaagactgctttgcagggtgcggttgagaagctccaatcaggtatatgtatataaatatatatagatatatagaactaataatataacatgtgtatgtatattgattttggtgtagagttgatgcttttgggattcatatccttacttttggcgataactcaagattacatatcaaaaatatgcataccggccagcgtagcagacactatgcttccatgccccaaacatgatcctcttactcctacgacttcctcacaaaaatatcaactcattactagacaattactcgcccagaagtctgatgaggtttctgctgattcttgtactgcccaggtaagtatatgtattagtttcgaatttttcttgctatatttttgtgaacaaatttaatttgctatgtattttagttttggtttgttgtatgctaagatttagtgtgctatatatatatatatacatttagtctatatatacacttagatatttccaatgattaacaaccttttatggttgtaagctcaaagagagattcttatataataaaatatatgatatatatgtgtatatatgatcgatttattgcaatatatagctcatccatgtatttttataaaagtgcctatattattaaatgaggatttaacattttgcagggaaaggttgctctagtgagtaacgaggccattcatcagcttcacatatttatttttgtgctggcagctatgcaaatcgtgtatagtactctaacaatggctttgggcagggttaaggtacatatatataatatattattgacagatattaaatataattattatctataaatgtaaatgtaaattttgactttatatatatatttatatatattacagatgaaacgatggaaagcttgggaaaaagagacacaaacaacggagtacttagttgccaatggtatgttacaatttccatccaaatattacattattgctaatctatatttgtgggttgcaaaaattaggttccagtaaataactctattttttttttttggaatttttataattgattgttgattaatgatataaggtgaaaacaaaaagggaattaatctaaacatgaaagatttatggataggtaattaaaataatgttggggtgtctggttttgatacaattagcataacaaatcta

SEQ ID NO: 22289 - DNA, 2474 bp, Cannabis sativa
aaaataaaatgttaaaacttttataaatagtatgttaagaaaaacgtttaaacaataattcaaaaataactacatcatcagtcacaagcttaaattattaaattccaagattgttttctttttcttttattttattataaaaatacatgttatttctttgttaagtccactatttaatatttaccacaaatttaatatcttttcgtatattataaaaataacaatttttttattacaatagtattactttatttataacgtacacataaaaatattatattttaaattatattattaaataagtaaaaaaaaatataaaatgtttacaaaagttgaacaataccttagttctctagttataatatacactatagcatattcttgtaaatacataatattgcaccgtccgcatctatagttttcttcctgataagagctgacgaatcccttcatatgaaaccagagaatagcatatcatgcctttaagctcttaacttttctagaaactcccttttttgttctttctattattaattataacagtggtatttaagttccaacttgcaaaacttccacaaataagaagaaaagaataaagtagctagtcatcataatgttactttaacataacgattaacgaacatacacgtatctatatacatatatatatatatattatatataaccaaaccatatctatctacaataacgacgtcaatctacattgtcgtttctttagatatacaaatggaattggaaataacggcaatagcagatcacggcatattagggttgtcatcagagagtttcagagctttggagttggatgaatttgggaaaacgacatcatcatcatcatcagaaactactattccccaagctttagtggtgattggttgtgtgcttgagaaatggattaggaagaacgagagggtgataataagggcatcgagattgaaagatgaggaggccatttcgatcttccatgggtccaaagcacccaggttaagcctacgacagtatctggaacgtgttttgaagtactcaaagtgtagcacttcctgcttcgtggtggcctacatatacatacacagatattttcacaatcgccctcacttttctctcacttctcttaacgttcaccgcctcttcatcaccgcacttatggtcgctgctaaattcctcgacgatgagtaagatatatatttatacttaataaaataataatatataaatattaagaacaattatgtatatacatttcgctaaaacttaattataaccttgtatgaaattttgaggagaaaaatattaaaattaagaaactattaacgatagtttatttatttatttgtgtttgagaaattaaatgacatttttccatgtggcgttaatccatccatcccttatttgtatttgtgaaataattcttatattttattttgagaaatttttaaaaatattttttttatgtttttatttacaattttacaacctaaattttttatttattaaaaatatatttttacaaataaaaaattcaaaaaatttcagcgttaattttttttcaaattttagtttgtaaaattttttttctatttctattttcgtctccgattgttttggactttggagtgagttttattttatgtcattgattgatttgagataaatttcatgtttattcagctgcgacaacaatgcgtactatgcacaagtgggtggtgtgagcacagaggaaatgaacgagttagagatagagtttctgttcagcctagactttaaacttcaggtacctatccgactctttgagagttactgtaagtatcttgaaaagaaaggagggaacagcagcagcagtggcaagtaccggaccgatcaccaaagtagtgcccgtcatcggagaaggatagtgatagggtaaatgtgtaaaggaagagacagaaagttctgagatcaaattgccaaggaaaatgaaaatcactaccaatttaatttgatatgtgctttatataaccatgtggcataaaaatattcgatcaagcaaaattggtatcagctaaatccaccaacaagaaatccttaaatcacaacaatgaaaccacgcttatgtctctgttgaaacaatgatcaccaatcaatttatatatagtcatcttcataaaccactacaaagaatacaaacattgtaggaaagaaaaattaaggatggaaaaaaaatatatagaatgggacttcagaattattctatgcatataaactgtctcaagtgacccatcaaagtgggatttctggagataacgcagcttctcacaactattgtatttgacaaagcacgtgaaaacaaacgtagaaagctaattgtcgcgtaaacaatcggcccttctcctttagcttgacgagttctttcttgcagcatagacacggtaagctgccaatccaacaatggccactgcagctccaactgtatcaaa

SEQ ID NO: 22290 - DNA, 4828 bp, Cannabis sativa
ccaaatcactccaaacttcacagaacacatatatgccataaatattaccatctttacataacataaattaaagtcgagcccttaaatgaaaaatgtcattaacgctcggactaagctttaaaaagttttaaactcgatttctaactcaaaatcactttaaattcaacaagaaaacatcggagctagtcccatgactacccgagaacaattctataaggtcagaatcttcataactattctaattcacaaaactcctatacgaaactaattattattttaacttaaaacgaaattaaaccataccttaagcttttcttcttaaaggatttgctatcctgctactactgaagcttagattgctaagtttttggattgaaaatcaaagaaaatggatataaaaggagaaggtttcatcgaagggagaaaacgagggtttcgttcgttcgttcgttctgtttcattgataacttcatatatatatatatatatactagttgggtgtaacgtacttgttacattaaagtgttataattgcaattgacaaccttttgtatatttatattatgtagactaaaaaatgaaaaggcagcagtagtaaaatatacatactaaacactgtacaataaaaatatgattgacttaataatacttaataatagtaaccaccatataatcaaaatattgataatcatgaaattgtaaagcaactatagaaaataagtatgggaaaaatatacagaaactacttaagtgttgtcaatcatctaaaatgacagccacataaaaaaatactttcaacaaaatatacagaaaccacaaaagctatttaagggcggttagttatcgatattgacaatcaaaaaaatttacagatactactttaaggctatcagttactcaaattgacagtcacattcaaaaagaaatattagaggcagtaattaattctttgttacttcactggatgaaaccgatgaaatgtcattcgaagttggggaagagttatctagcaaagaaggtgacgcatctagaaatctgttgtcttcatcaagatttactgtgattgaggggttttccaatgaagatagtgaagcatcaatagattgaacattttatttaagctttttgtttgcatataaggtaggagaaacttggtgatcggttgcattttgatgatttagttgctcgattttttcacttggcagcatagtactgatggtatattttatatctgttggaaaaccaagtattagtttcatagttctcaagtaaaagaagtatctttttttacctactgcatggtttattttatgtagctgattaattgtttcttgcaataatgttaaaaaaaaagtcattcatttatattatatataatggaaatgaagatatgttgttgtgtttattacctgagttgtaaatttgacaaggtctgaggtgcagcaacataagaacatttcagcctttttaccaaacattattgcctccaaggaaccacttgagtcaataagttgtacattgattctagttcttaatacattacaatgtaacatactatatgtaatgttgtgtcacgtgtgaatttgaactgaagttattttttataaaataaaacatatttgatctgataatatagtgaaatggagaaattataaataatttataaaatatggaaaacagaaaatgtagaatgcgttgaaagtaagacaaatcgtggttcagctgttgcattttcagtgtattttatacaagtgaacgcttgattgaagtcaccagttgtaaatcttttgcactcgctacataccatgtaccaaagtgtttgtgttggatttgtgatagtaattcaagctgtggtccaatatgtcttaccctaaaacattaatcagttttgttaggagttttggagtggtaaacaaatgcagagataattaaagtttaacaaataaattacctccactggtttaatggcatttataggtgtcataagatgtagttgaggttttattagatgggacatggattctaagcatgttttcctattcattctgaggtcttcaagaaaagtttcatttttagtacacgtgaaagtaagtgtaaatgagaaattgcaagtcaagtttatgttctatatatttgaaggtaaaggtaagtgttacttaccaacgcctcagtgtttgaactttagcaacatttggattgatcatgagagagctgcctatctttgttgataatgagatttctaaaatacaaaatataaaatggttagcatgataatacatgtaaatttggaagataacaataacgtttaaaaaaagtaatgagaaatcaaagaataaaatgagataatgatctaccattaaatgatgtgactttcatacatctagcaacaatgataggtgtagtagctattagttttttaattgtagtacattcattaacaacaaaatgtccccagcatgtcaggccaattagttttttccagtataatagctttaaattattaacaaaaatgaagaaatgtaatctaaatgtacatgaattttgttttgtaatcttaatcttcattaacaactattagctcttgtaaaccattactgttgtatatttgcttcttaggattcacaataattgcaactgccatcaagtctgtataaacaaagaaaccaagaaaaaagtagttagtattttcacttgtatagcaatatgttaatataagcaaatttaaacgagcaatataattaccaactgaagttgattgatccatatgatctaagaagctaacaaaaggagtgaaattgtattctactgaagttgacattgagatatcttcctctggcacatttcaactaaagtagatctactacttattacccattcatatggtatccctagtacttgatattgtagttttgtaaatttgacataggcgtttgatatatagtagcatccgtgaacagtcaatgtattttgaaacttctcgatgtcatcatcatatatagtggcctgtatttgtgttttctatacaagagtgaagaaaattttcatttagcaaaatgaagaacaaatcagcagacattttgcgtatcataaaagttagaaaataattaagttgaagaatgaatagtgacatctaaagaataccgtaaatgaacgaaaattagtagtaaaaaatgttcaaaattaacttcaaaatagctatctattatcttcagaaaacaatttaagagaagaagaattgaacaagaaaataagataatatatttaccagctaacctgcgaatcagatagtagtaagttttgatatctttttgcaacatttcgagcagttttcggcattcctttctctagaacaatcactttcaccctccattttgtttctgatgggtggatatctttgataaatttctcaattgttgccattaaaacttgaaatgaattgaaatgattaaggttagcagaagaagtgatcaaccaaatgaaatcatattgttatattgtgaggtatactctgttatcttgcagcaaaatcatgcccaaaaaaataacagctacaacattaaaaaacaatttggaagaacattttgaatccaaaaataaataaaattatattgatgaaaaatagtaactattaatacactttcattgtcaatatataagttaattaagtcttgactaagaaaaatgaggacaacaagatatgcactatttgttagaatggaagagtactttaacaatagtcttattgatataaattcaacctggacatgtgtaaaataagtaacaaagagatgctccctaatgtccatgagaactaaaagtttatacctcacactacaacactatcatagagtatctgtagtgtacaaaatcattcattaaaaaattaattaagtgataatcacatatttttattaatttacaaacaaaagtctatttttggtttcattcagaaaaataacaaatgggaactgtatttaacacggataaaaaaaaggaatttataaaatttcaattgaaacagtaaatattattagctatagaattataccaattttatttcactacccaaacataaaaataaattaccaatcaaagttgagaaagctcaacaaaaagtttagaccatactttggtgtacctcaaaattgctatcaaacatttgaccaatcccaattccgtataaaactagaatagataaaataagaaagctaagaaaacaccaacctcaggtgaccaagtcctgcaatgaacgaagagcaaacccaagcaaagcacaagatgttgttgagccttcaaaaaactggttatcatgacaaagctacagtggggcaattcatcaaacatgtgaggcgcaatattagaagagcgttgatcaagaaattgttaatatatggaatcatactccaaacttatataaaaaataattgtcatataaagaatagaaacacaatcaaaaaaattagagaaaaaactattcattaccctgtttgcttttctttttgcctcccacttgtacaacaaactcctatagataagagagaaataaaagttatagtttttgcacaaagagagagagagagagagagagagagagagagaactaagacttacttgcttaggtagctaacaattaaggattggtactaacaataacaatgacaccaaagttttgatagatccagtagtggaagtagtttaagtgtttgaggccttgagaaatagtaaaaattataactgaaaagagagtttatgaaggtaccttttattttattttttttgtagtcaagttacgagcttgatttttttggttggcaagtgaaatgataca

SEQ ID NO: 22291 - DNA, 4918 bp, Cannabis sativa
tagttagtgttttgatttgggacccatacctggactcaaacccaaacctagactcggacccagaccctgacctagacccagacctgtaccccaaatctgggtctgagtctgggaattggaatctcacccagacccagacccgaaccggaacacggaccagaatcaaaactagaattcggactcgggacacatacccagacacggacatggacacaaaccttgacctaggatccggactgagattggggactcaaaccttgacctaagacaaaaacctagataggggacccaagctcaaaattagaaccaaaatcaagacccaagactgggactgggacccaagactcgaccccagtttgggtcccaaatctagactcggacacaaacacggacttggaccctggccctggatctgaatcggaatgagaccaggacccatgattgggattctgatcttgacccacgacccagtcattggacccaacccgtagtcggtgtctagatctttgaatcgtaccaagacccgaactttgaacaatttctagaccaatacccaaacccagactcagacctgagacccaaaatgagaacaagaaatggaatcagaatcgtcgaacacgaattagatttggaccgaaaaccggattttgacatgaaaccgaacatggacctagactaagaccgagattgataccggtaccaaacccgaacccgaacctagatttgcgccaggacctgcgaccaaaaacccggaacccaggacccgtgaccttcgacctggaccagattccagacccgtgccagaacctagacccagacctagactaaaacacggactgaaacccaaacccgaacccaaacccagacccagacccaaacctagaccctaacccagacccaaactcgtaccagaactcggactcaaacacgagactcgaactaagaccatgatcaggactgggacacagactcggactatgagtaagaccttaactttgactgggataagaacctggactgggaccgggacccgggacctgagaactgaaccatgaaccacacccagaccaggcgaagaaccgagacatagaccagtaccgaacacggaccgggacctgaactcggactgggaccctaacccatacaaggacctaggaccctaagctgaatcagggacccagacccatgactcagaacccaagaccgaaacctagacccaaacctcgacttgagacccgaatgaggaactaagacatgagctagaattggatcaggatctggatttggactcgggacccagaacccaagaccagagggttggacccaacccatagtcggtgtgtaaatttgggaattggacctggacacggacctagacctagaccaacagccgaactagtaccgaaactcgaactagacttgacctgtggttagtgttttaatttgggaccaagactcgtaccaaaacaaaaacataaacctagacccaaactaggactcagacccagaaccacacccgaaccataaataataccctttgacccgaaattggaaccggagcttgaagtggacccttaaacctttaacactaaatcctaaactctttacacttacccttataccctaagccctaaaccctaaaccctaaatccctaaacattaaacccaaaaccccgaaccctaacctggacacaggcccagacccatacccataccgtgatcagaacccaggacccagatctggacccagatcaagacccgaacctagacccagactcaggacttgaactcggacccaaatacaaagcagaacctggtccgggacctagatcgcgaccctgacctggacccaaacagggacctagactcagaccgagactcagacccagactcaaacctgaacccgtactaggacctaaactcggtcacaaactcgggatccaaacccaaacctaaacttggacctaaacctggacctaggatccggacctagatgggggacatgggccccaaacccaaacctggacaaaggatccagagctagatgggggacttggacccaaaactgggcccagaactgggaccgagacccaaaactcgatcccaaacacgagacgtgggacccgaccctagacccagaaccctggacctaactactgcccgaacccgaacccaaacaaaaacttaagacccagcccaagacccgggacacgaacaggaataatatcgagatctgaatctggacctgacgcttcaacctgtcccatagttagtgtttgaatctaggacccggacccgagtccgtacctagacccagaccgggatcaaaacccgatcccgaactcagaattagaattgaaccaggtcaggaactagaacccagacctgggaccacaataggacccaaacctaaacccaaactcagacaaaaacccataccgtgacttggactcagatgggacctgcgacttgggacctaaactaagactgggacctagacccagactgggacccagacccagacccaaaccaagacgaaaaaattagggttggacccacactgggactgggacccgaactcggactcgaaaccaaatcgggacccggaattagaccatgactcgagacccgaacctgagccaaaacatgaactttgctttgaccaagaccatgacctctaggacctgaacatagatgggggaccctgacccgataactgggcccccaaatcgggacaagaacttggtcctcagaacttggattcggatccaggaccctaccctagaccaaaacctagacctaggacccacctcgagacctgggattcgggactcgatgcttggaccccacccgtaatcggtgtctggatttgggacttagaccagaacccgaacccaaactcgaactcaaactaggaccctgcacatacccagacctagacccacacatgggaaacaaaactaaactggaactggaacaagaccaggatctggaacatgaccgagacctggacccagacccgaactcagaactgaaccctaccttggaccctaatccagacagaaacccagacctgaaccttgccccaaacccaaattaggatccgaacctagaagcagatcgagacccaagatcaggaccaggactatgacctggacctagacccaaaactttaatagatacaggacccggactcggatacagacccaccctgggattgggtcccaaacctaaatccaaacctgaacacggactcgagacccaaaccaagacctgaacttagacaggaacatggaacaggactcgagacccagaattgggatcgagacccagaactacacccaagtctcggtcttgaacctagatcgggacctgggacatgaactgaaatcagactaagacccgtgattgggatccagatcttgtcccgagatccagaacattgggcttggacaagacccatagtcgatgtcttggtttaggactcgcagagggaccagaagctggaacaagacctagacctagaaccagacccagacttgggacccgaaaccaaaacttgaacaagaacgtgacaaggaccctggaataggatcgggacgatgactaggacttggaccaggaccgtgactcagaactagaacagaacccaacccgaaactcgagctcaaacctagtattggacccggttccagactcagactaggacagagactcgaacctgaacccaaacccaaattctggactcgttcctggacatggacacgaacccagacccagcccctgaactaaactaggatttagacctggacatggacatgaacccagaccaggacccgaataccgaccaagacttgggacctagaccatgatcttgattctttcaaggacccgaacctgaacccgaaccaagacttggacggagacttggacctgaacgccgaccgggacctggagtaaaacaaagactcgggacccaaaccagaacctggaccaaaatggggatctaggaaccggacaaggatgggggacctagaccagtgacctaggccttggaaccatgacccagatctaaatttgggactcgaaccggatccaggacctgacgtagacacgggaatctaaagtcgaaccaagagtcagatctaaaacttgccttagtcccaaactaagacaagaacctggacacgaacccatacaaagacccaaacccaaaccaagacccgaacccaaaatcaaacccgaacctgggacccaaactcagacccagaaccaaaattagacccaaacatagacctgcacccggacccagaccccaactcgaacgcagaccaggattagaacccaggacttagacctgaaagtaaaccctgactcagatcgagattgaaacctgggactcggacccgaacctggaaccttacccacatttggagcctaatttggacctagaccgagatccagacccaaacccaaactcgaactaggactcgaaccctgacccgaactcgaacccgaactcgaactcagaatcgcaactgaaacttgaagtggactacgactaggacatggacaaggacctagactgaacacaaaaccaaataaaaacccagaccgagacccaaacatgaatttcgactaggacccaaacctaaacctagaacgagacccaaaacaagaccagaacttggacatggacttagaatcaggatagggacctgggcaacagaataaggaccgggacccaagacccgaccccagacccgaacatgaacctaggacccagctcgtgaccctacacaaaaaatggaaccaaatgaggaccctagatcgagatccagatctggacccagggcttggacaaaacccgcagtcggtgtctagatttgggaccaagccctgaacccgaaccctgaca

SEQ ID NO: 22292 - DNA, 1835 bp, Cannabis sativa
tgggagtgtgaattttgatttcttgtacacatattttgttgctccaagaaatactgattttggacaactgactgaatttcattctggattcaggaggttcgcacactgaagatcttaaatatgtggctattgctggggagcagtcttctgaggtcaatagttatcttttacattattagctactttgttttcatgtataggctatgttgcgtcatttgttcgtgcttcttatctcttccatgggtttatgctcttaggttgagatttgggatctaaatactacagaaagaattatgtgtctacctcaaaactgtgttggtggctcaccaaaattttccaccaaagaaagaggtataattttatttatttgactgttgactcaaagcctcaaggttttggtctgaaattatttattacagatttactatatttgatttgacatctgagtaagtttcttgtaggaatgtgtatggctattcaagcatttatcccatctgaatcacaaggagctataaatgtcctagctgggtatatctttttttttttctttctaggccacctgaaattaactgttttatcgttatcatatttagtggcctttgtagcacattgagacatcatccttgattgattgatagagataatgatatttgattgtatatactagttgctttgttctataggcgtgaggtcaaattatgtcctagttgtcagtttttaccgtcaagttacacctcttgaatcgcatctttatgtttaattattttgggggttgtcttattaaaactagactagttcagggttatgaggttaagtattgtttatgagggctgatacacgttgattattgcattgaggttgccatgaattgtgtttctactctctagaatgaattccttggccaaagcattgtccttctccaaaaaccatagtccactttaaggaatatggttgtgttaatttatttttcatgatgcagttatgaggatggttcaatgctttggtgggatataagaaataacggggttccattgacctctgtcaagtttcattcagagccaggtgggacataacttttaaagaactaccctcatactaatcattcatttctcttatgtgacagagcctgatatttgtgtatttttatgcagttctaagtctatgtattgatgggtcatgcaatggcggtatctctggatctgcagatgacaaaattgtaatatatagtttggatcattcaatggtaattctacaacatcatgtcaagaaaattcacacacacacacacacttgaccgatctgtaaaaatactagttttgtgccaacttatcaatgtattggctaataatccattttcacatttaagggagagtgactgattatcattcaacctaattattaactaagcttgtgtaattatttgattgttaaaaaaatattatagacaaaattatgtgtgagaaattctggttttgccccatgcaagtgttgtcattgactgatctaattaatctcccgtgtataatactctgtaagttttgtagtagaacgggaggttatgttcctttcttgactaactattatctacaatgatatttgtaattgatgatttgtttgtctatttgaaatatgaaattcagggcactttagtggtcaagagagaaattaatttggaacgaccaggcatttcgagcatctctattcggccagatggaaaaattgctgcgactgctggctgggatcacaggttgggatcattctgttttatttccaaattactatttggctagttttctatttatggttcttttgtataatgtcatcatatgacctca

SEQ ID NO: 22293 - DNA, 2478 bp, Cannabis sativa
acatataaatataatttggtaattgtggtttaagataaagtaaatgaagcttaatctcataaattgcaattcttgcaatttatttgtaataaaaaataaaatattattaataataaaaaaaaataatacctacattttaattaccttgttattatgttttagattaaaaaatactacatttacatttttaatgttgttataatttcttaacaataacaatttcttaatgataacactttattaatgttaatttttgtattttctctttacaataaaatttttaaatcaaattatacctattatttgtcacaaataaaatctaatataattacaatttaataaaatataatataattcatatattaaccaaaatatctaatatatgtgttaaaatgaaattgttctaaactaacatattaaaaactcattgtataatatctaatgagtcgaattcaaaataattgataacatttgtccttaagttattaattgcaaacattaagtgttgtgtctttatcttcaatcttcatcacctacatagaaaaataaaataaaataagaaacaaaatataataaaaattgagaggcaagcttgtaaacatataatattcatattaagtaaaggataaagtgcactcacaagaaattgagaggaagaataaattaattgtactgctatgccacacatgaaatcttgtgatttaggcacttctatggaagagcatgacaaaaacaaacactaaagaactaagaaatagcagtagagcagtacgaaatggagagcaagctcatcaaaagggacaccaagaattaaaaaataacattaatcccctcattataactatggtggctgctcttcgctcaaatcactaggacattatgcaatgaatttctctctgctcaaaccaaaaagagactataagtatcacaaacaaacaaagaaaaactttttcttttgtgataaattagtagcttgtattatattaaccagaaacaaatttacaacctaagccattgttaaaaaacaaggctgaaactagatcttaattagagcagatggagcaacaaaccatttacaactcaactcaaaaggatctttaagaaaaaacaactcagcacaaaaggaactccaatatagaacagagcataatattaaaagacttgcatatacattaaattcatatcaaatatgaaaactctgataagtaaattcgtacctcataagatggcttataattgctcatgattctctttagtaagatttcctttcaaccctgtgaaatttttaattgatgcccaaacaaataataacttataagtcaagctcaaatcatttaaagtactttaaaatcatcacatgagacatgggatatacatctcattatgaaaatcattataaaaaagatccatacctagtattgtgctgctaccacacataaaatataagaactgacagttttccaataaaaactaaagaactaatgtacatgaaaggtatccaccttaatagctagaacgagaatgaacctatttcagagaggcttctaacatttccagcatataaatacattgccaatcagagtaatatacctgttattagatgatatcaataccacagtccagttttgatgcatatttttttactccaatccatggttcttgatcacccaaaatgaagataaaattcttacaaaattcagtgaccttttgaacttttattgttgttagaatattagttgtatattagttgtaaaaattagggtcacttgtattttgtagtttcctattttgtaattagtagtatcccatttagtctcctagttttgtatataaatatgtactattctataaaatatacacccaattcgattcgttattttctacatggtattagagccatacttataattgtgattcaaaattcgaaattagggttcataaaaaaaaaagagattagggtttatgtttagggttcgtttttgaaaatcttatttggagtgtgaatttaatctcaccacccactcaagagtgctgcccagccaccgatctacaccaaacccttaagttcggtcgtcgaattcctcgcgcgtggggctcatgtgccgcctaaagtttctacgtattctcccacgtgccaacgcgtgggggcgcgtgtgacggcatcttcaacgacgttcttttaccggttctttagtctattcttctaagaccacttgcatctgtttaaggttgtaattttttttttttttgccttcttcgtgtttgggcgttcattctttggtgttctttttttttttccttttctctgtcaattgtttttgcatttgagattatggcagagataaaatcagattcgaaatcagtcgttatttttgatgtggttctcgtgatgcctaaaattacagaccataaattgattggttcgaattatttggaatggagtaagacgattcaactgtatttgaggagtattgacaa

SEQ ID NO: 22294 - DNA, 7744 bp, Cannabis sativa
aacaacagctcatataccaatgactgatccttccacatcatatgcaacatcaatattaattttgtaagagcccctgccgatggtagccatttaatttgtggcgtggggctattgtcaactgccattggtgaagcagatgtgcagcacctagttttttcctctaatgcattcgaaagaagtatcttagctctctgaaattgatcactgtaggcgtctgtgaatgtacaaataataggagctggtttgggtttagttccatgtacttccttgtttctttccatccatatgcatcattatgagcctctactaaatatgagtagatatcacggccattaaggttctgatattccaaaaacaaaacaaaaaatgagttagcttccaaacagcatcagctctagtgtaccgaaataaagcatggccaaccgattccccccctccccaccgccggtacacaaagagcattgatgactctccaagcaaagattttaatttttttaagcacatttagagaccgaaatctgtcccacactgtggagagttcgaaggtgaagaagtatctttccattccaagctttcggctaagtggtatcccaatttagtattgtatatcccagaatctgaatggtgccaaaatagcttatcttctctaggataagaactgagaggaatagccataattctgtctatatcgatctgtccaaaatgactctttagcagactaatgtcccattgtctttttggtttaatgtagtgttctacagtgaagtcacgatcaccagaaaaagaaaatggtttcaaagtcgtattacctgacagctaaggatcaatagcacatcgaactttatttccgtagccaattttctagtgaaggcctttagccaacaactcttttccatcgtaaatactttgccaagtaaaagatggcaagacacccttagtagcagtaaggaaatctccattcttgaagtatctagctttgagaactctagccaatagagaattgggatcttcaagaatgcgtcaaacttgctttgcaaggagtgcttggttgttttgaactatacttaattcatacacgtttgaaataacttgtgttgaagcaagattttgacaccaccataaatgatttagaaattcacgaaaaaattgtaacactaatatttagcttcatataaaaattgccaaaacatatacttatactgctagtgagaaaatgcatactcatattatcatatatttataactgtttattttatatgccttaattaaaatctcaatttattgtacatattttattatcaataaaaaaaacaaattccacttttaatggtcaatcacattgttcacatgtctaattttattagggctatttttaaaaatatggaaaaaaaaataaaagtttgatatatatggcataaaaataagtgtacaaaatatgacattttttcttaaaaaaacttaataatatgagaaaaaaaaacattatatataagaagaaatgccattaaaaacttttaaagttgtgttttttttcttttttaaaaaataaaatacttgaaaaaatcaaatgatttttattttatttttttttatagaaattgaagcaattctaaaataattttattgagacaataaattaataaatcaattaatttacataatcgaaaactggttttttttaacaaaaagacgatttcaaatacgaaaactcatataaattttacatcttcttaaaagctctaagacttgaccacaaacccagttgctgaagttacactcatgtcgaaaaagtcgtcaaaattcgctgagttgctgatggtttcaaaaaagtcgctggaattggcatcatcactggtaaaaatcactgaaaaatttgtcggagttattgtcgtcaccggaatttgatgtcagactcatcaccagcgtttgacattaaaatctgtctcacagaaactaactatatttattagctaattagaaatttgaacaatgaaccaaactatttaaaataaccaaaaaaaaaattaaacctgaattacatttaaaaaaaactaacatttaaatacagaaatcagttatttaatacaactaactaagaaattgaacataaataagacacctaaaaaaaaacttgttttcatatccataggaagctcctggatcattaggttgaatttcttaattcctagtgtttctagggttctggggatattcttcatccattgggatgtctctcatgtcctcaggtacttgataccttttggggtgatttgtgttggacacatcctaaagtaagcagctatgtctctgaaatatgggtgtagaggcagaactgccttctactaaaatatgggtgtaaaggcagcacgccatccaattgagggcaagccagtgtgctcattggtccctcggtggcacctcacattggactcctctcaccacttcggtctctcataccctatcgaaagcctcggtggtaataaaagatggaggagagacccaacagtctccctgtacccaaacatcaagaatctgaggcttgggagttaaacttaggtatttatttgaaactgtgagttaaacttaagtatttatgccgcaaatcactcaaaaaagtctatatgtaaagtattttgatgagtaagagattaagaagaaatagatctattaacaataattagtaatttaccaaaatatattataatatatagaaagaaaagaaatatcaatagaaaattgaggtgtttatgttgtccattcatgttattggtactattcattatttgttgaggtagtctaaacaaatagaagaaaaaaaattaaaaaatatataagattagagaaagattgtgcactaaaaatcaaaagaaaagaaaaaaaaaaaaagaaagaaagagcgtgagaaagtgcgagtaataaaaatgtatataagtttaaggttatataaattggtcaaagtttaatattagatatttttaatttttttaaatatatatcgtacataaaaaaaaatatattaatgtagaaaatagaaaaattattacgtatattatacattaattaatattattaattaattaattataatattattcgtaattaattaatttatcaatatttataaactggataaaaattaaaatctgaaagaattaagaagagagcaaatagggccgtgaagagtaattataaagtgacatgtctctgctttatatctctctttatgtatatagaatatatagatgttttttttttttttatgagaaaagacctgttattataaattaaatgagtcatttacaacaacagaaaatatggcaaaaggaattacttccaaccaagtataatcattatccaacactaaagcctatttagccatgccatgtgcagcttggttcgcatcctgtctaatatgagatacacaatctgaagagagataggataatttttgtgaacatccatcaccaagtcataaaaacaagattggttagaggtagagccattcagagaattggcgagagacaatgaatctatttctacaaaatcaatcgacaagccaagatgtttagcctaacaaagactataaaatatggctttttcttctattttttgagatttgaaattgcctataacttgttttgcaagagaaaccagaacttgtccatgtgaatcccttataatggcacccaatcctattttattcctcgaagaatcaacaactgcatcgacatttaagtttaatttgctctctagaggaggtaaccaagggtgatgttcagcaggaccagttctatttatagtagcaggaattgcagcacttgaatactgttggaagttttttatgtatgttgtagctttagagaaaacttggaatgtactctgtagcaactcaccatgccccaaattatttctatctgaccaaatatgccacattatacagattatcttttccatattagcagtaaaatagattttaaaaaggtgaattagataatctctatcttgcatttgatttgccaaaatgtagtcaaatgaaaacccaacctttttccaaatagatttagcatgcttacaagaaaacaaggaatgtcctatggattcccaagcattggaacataagcagcaagttgtagagtttaacaccttgcgataaaaaagggactttgcaactggaagagaagattgaactaccctccaaccaaatattttgatttttgaaggtttccaccatgatgattgacttctagaggttgaagactgatcttgttcttccaaagtgtatgcaaaatagtagcatgaatgtattgtgtactcacccgattcattaaaaatgccaaatccacttatcatcactaacatgataagatagtagaatggtaagaatatgatccacatcagcaggagaaaagtccaattacaaatgctccgaattccattctcgattggcagtgatataatgtggaacattactcataacatcaccctgataatgcgaaggagtgaaaatagtgataccatggatccatgggtccaaaccacacctgatattagaaccagaaccaaccttcaatcttaaacgtttagccaaaaaatctcgtacccatctaataccctgccatgtcatggacgacatacctccaagagcagcatccaaaaagtcattattaagaaagtaacgactctttaagactcgacgtagaagagtgtattgagatttttgaaaccaagagcttttgtttttagccaataaagcttgattgaagtgaataaaagattggaccaccttccatctttgttaaacttaaaaatttccatttctttcaatggattttcattttgtctgatgttgaacaccaccaaaattttgccattatagtctctagcgatttgcaaaatttggaagataatcgaaaataactcattccataactaggaatcgattgaacaaccactttcaatggaatctcttttccaccaattaaaaaaagtttatcattccaagagtgcagtagctttgatattcgttcgttgatgttgctaaataattactttttgtctctttcagaatacacatgaaggcctaaataagattcatgacactcacaaataggcatacccaaaattttggaaagagttcttgacagccttcattgtgttaagcaaaaaaaaaaaaaacatgacatacttgtttgtaatcaactgttgtcttgctgcatgatggtagatatcaagagcgcatttgattgctccacaagacctgtcattagcttcaaaatataacaaactatcatccgcaagaaaaaaaaaagatgagagatcgttggtgatttacgcaaaacatccagtcccttaagtcgaccaatctttttctcatattgagtaagcgagaaagactctcaaagaaaataaggaagagatatggaaagagagggtcaccctgacgcaatcgtctttgaggaacaacagaaccaaaaacatctccattgataagaaaatagaaggtgttagtatgaagaaatatcataatcagggagatccaacgaatattgaggcccattttttccatcacaggcccaataaaaatccattccacccgatcaaaagctttactcatatcaattttgagggcaacataacctttgctacctctattcctatgtttcaaactatgaaccaattcaaaggcaacaagaacattatcaatgatcaatctgtttaggagaaaagtactttgagtttcagaaatgaccgttggaagaacctctttaaagcgattgaccaacatcttagagataagcttatagatgacatgcattgcactaattggatgaaagtctttcattgtctttggtttttttacttttggaatcaatgtgattaaagtcttattaaaagctgctggactaataccattgttcaaaacattcaaagcaactttagtgactaagtcacctacaatttcccaattatgatgataaaacatagctgacattctatctatacccggacttttatcaaatcccatcgtccttaatgctgataataaatctgaggcagtaaattctttgagtaaaaaatcattttgctcacctataattgttgcaggtattgtagataagacatgaggcaaagccaaatgatcttcttcagaagccaagaacagattttcaaaataagatgagaccattgttgttattccatcctttgaagtgattacatatttcaaatatcatcgcggatagccttgattttgttgttaaagtttcaagctgaagcgctagcatggaaaaatttggtgttacaatcctctgactgcaattactgcactctccgacattgttgccaatattgttcttccttagctaaaagttcatccaatattgattcagccaattggatatgatcggattagaatttgtgtttcaaagagttaactctttgttgtgctactctttgaatatatagattctttatacacatatatagataaattgatacattaattttttagggcccatttggcacaactttttgaaaaagttgtgataaaaatgtgtttggtaaacagtcaaaaaatagctttttgaaaaatttttggagaagctatagctaaaagctaaagctgctccaacccaacttttagaaaaagctgttttgattaaaagactatataattttttttgtactaaaatcatatttacttatttattatatattaaaaaaataaatatttaaaataaattaattatataaaataaataattattaaatctctttttttttaagcaaaaataatttttattttatttaatattgataaacgacatcaacttaaaatttttcttatatacatgagtttctaatttttatagatttaataaaacataatataacaatactataaattatttttatcaaatgcatataaatttatatttgtaaaaaagataaaaattatagaaaataaaatattatataaaataattttttttacatatttgtgattataataaactagattataatattatcattatcattataatagatcttaacagattcacagtaattcaaaatttataatttatcaaacactcagttcagcttttttccacaattctgctgcagctgctctttcccacagcacagctacaattgctttttcccacagcacaattgtgctaaactggcccttaattgtactgaaaataaaataatattttaaataactggacttttatttaatattgaaaaaatcaaatatggttccctactagagtagtttgaccatattatgtgattttccttttatattatttttattaattaaataattgaacgaaaaaaatgggtaactaaatacctatatatataaatagaaagttaatcttaaggttgattttttttttttttttttttaacaatttacttaccctatgctctctctctatatctatggtggaacccctctctttctcttcctctattattgtattctactttttatgttgagaaattaattttcctacacaaatatagtgatcaagacctttaggaaagactgaaaataaaagatcgacaatacttaaaatattgtccttctactacctaatatcatagactagagattgaattaaggatagtcatcaatttcggttgtgtaagtatttaatactttggtttatataaattcattaaagagatgttctagtactcttaggaacttttacatatttatttgttt

SEQ ID NO: 22295 - DNA, 2275 bp, Cannabis sativa
  modified_base (26)..(31): a, c, t, g, unknown or other
  modified_base (1958)..(1969): a, c, t, g, unknown or other
ttaaataacatacttgttagtaaatnnnnnntcctggtaaaataattctaacacatgcatgctcaatgtcactcggccttgcatgttcaaagtcactcggccatgtttctcacaaatttcactctgcagccatggaaatgaacactcaacatgccctcctacaacaacttggctataattagagaaatcctcctaagtatggaaaaggaaggtggcaagtgtacgactacaaggataaggtgtgcatgcgaaatgtgtacaaccacgccttatgcaagctctgaaagcaaggaggtacgagtagtggaggcaacgtacttagaaagcctgacagtctgaccattggtacacaacagctaccactcatgctaccaggaactacttgacaccagacaaaggtacaaggtgctagaccacctcctgaaatctgcaattcacagaccatggagattgccatgtcgcttgggaccactattgtctaccagaccatcagagccaataaataccctcttctcaaatgtgagaagggattggaaaatcttgtaatcaacatattaaaaacaatagaaagaaatttttctctcttactctaaaatctcattattattttaatttgtacttcatctatttatgagttataagtatagattttgatttttcggccaaaaatttagttatgagttcttaccatcaacatacacaaatcatattacacaataacaatcataaatcaatttacgttttacacacaatctgatttttttcttaaaaaaatatatattattttatatattatatatctatatatatctatatatcattgagagggaggctgctgctcggtcatctccagacctggtggtctggctggttgctgcttagttgacaccgaagttggtggtgtcagaaggcaagagagctggtggtggcaaaccaaaatagaaaaaaaaaaaagacagaagtctgaaaagaataaaatgaaagagatgaagaagaagaagacgtggtggtggtgggggttgccattgcccgaccagactggggttctcgccgtcgccgatagaagaagaaggagagaaggaaagagggatggtggtgggttttggcgtcgtggtgttttcgttaagaattaagttctttttaaggggtatctgataacataacataatatatatagatagatatataattaaataaataaataaatatttgtatttcgggtgagtctgggtgaaacccgaattttggaagtgtggaattttttaaactcgaacctggcccgatttggcactgggtaacatctgaacccgcccatgcattatttttaaaacccaatttttttgagtttttcaagtttgcgtcagttaggtttgtcgagtgggtgcgttttttgattacaaatgttgcatccatgtaagattattcatatgcatataatttatattagagataagttgaggaatatttttttttttattcattaatcaaaaatactttcatattatattttattagaatatacccattttttttgaatagagtgtctaatatacactcactctctacttaagtgtagcacatattttatattaacctaaagggtataatgagaacatcatctataaaagtgagtatatcttaaagaatatgaaaatgaagttaaaaattaaaataaataaagtaaaatgggtctataatgcaatttcctctttatattatgtagtgcatttggttctcccaaaatattgttcaacacttcgaaattctagtgatgtactaaattagggataatatttgatcggattagatattattaaaaaagaaaagaaatatgggtaatgtcaagggatggtattgggaaatcatatatctcatttggggtttattggaagaaaacaataaggagatccgagtaaaaagaataacttaaggtgacatttggtaacacttttttaatnnnnnnnnnnnntttaaaattaaaaaagtgaaaataattttcaaaaacatattctataaaactttttttttcttttaatttttttaattgacaatccaatatttttctttttaaaaaaaacattttcaatattttttgaacagttttttttcttgatcaatattttaaactccgattagacctagacccaaatcccttcccacggtcctggtgctgaacccagcctctgagaggaacccaaattcgaccctgaacttagacccgacttaaataaaatcaaaaaataaaaaatataaataaactttagagaacacactt

SEQ ID NO: 22296 - DNA, 4063 bp, Cannabis sativa
ttttttttgggttttttcatttttcgcttttcttcttccatttttacaaaaatatatatagaaattaaaaacttaaattgtaattaaaattcatgtaacaattcacataaaaattacttaagcaatccacaacgtaaatttaaataaaaaaaataaaaaataacatgtggagtaatttttgtaattttttttttataaaagctgaaacttttttataacgtggtgaacttcgaactaggatagctcatcatttaattgaaaggcatgtgtttgccaaatcatgcagaattcttatcgcgagctacgtgagataaaactgcctccgaaaatttagataataaaattataacgtctttaaataacaccccatcatattgaaaaaataccttctcattattaatagttgtcgccagagctagcgaaattaaaaaaaatatcgcaacatcaaaccaaaaaacataattatattagaatgacaatcttcaaaataaaaaattatatataaacatagaatttaacaaacaactcatatcactagctcgacattactaaaaattaatatccaaccatttaatatcgtttcgcccaaaattataatcaaaaaaataaatcacacaactttcaccaaaaattacaaataaaagtgtaagcttatttaaattaaataaaaataaaagtaacaaaaatcacattaaagtaactttagagattttctctggatcaaatggattaataatatctatttagagaatagcaacttttaggagtattctcaaacaagattggagctggtattgagagacaactttccaagatgtgatattcaaaaagcaagaactggtggcaaatttaaaacaaattggctatacaatagttgattaccccagcatcaattcatttttagtaaagtcatatggaactctctaaacttgcccaaacacaagttcatcctttgacaagtggttaactctcatcttctaacccgagacaaaatgatataatgtaatattctattagaatcgatggactgtcccgtgtgtgaaatggtaaccgagacacataaccatttattttttaaatgtgttttgttgaacagagtggtggaaaaactttttacttggcttggtactcaagcatggccaaggccaactgcagggaatggttggaagagctggctagcattatgtgactccaacttgatgcatagagttcatgttgcagtgtttgccctcacaatttataatctttggactaatagaaacaattgtattttcagtcgacattttaaatctgtcaactccattgtaaattatgtaaaaaaattatattttacaggttataagtcattaaaaataggtgcttgaggggcatgagagaaactatttgaagagttcattttgatttcgggtgctgcccttgtttgttgtcttgtacagttttgttttgttggtgattaatgaagttcattcttcttcttgataaaaaaaatcacattaaagtagcgataaaaaaaaatctaaaactactcataaatgtattttaaatgctaatttaattatagaaatatgaatgtaaaatatactaatataatcaaatataaattactatttcaatgaatgggcttataaaaacaaaattaaaattaaaattgactaattatagaataatatattcataaggatagagtaaaataaaatttccaaaataaaatagaattataaatggtaaaaaatatttcaaactcacgaaactaaattattccttataataaaatcaaaaaatgtgatggtaattataaaataaaaaactaattagaaaaccataaaataaaaatgtaatttaataattatattatatatagaaattcttaaaaaattatgtaagaaatccttaaaaattaatttaaattttcaaaaatatagtatataggaagaaaactgaaaaaatcaaattgcgtattattttataaattatattgatgataaggatgtaattatcatttattaaaaattattaaaatttgaaaaataaagaataaaataaaatatatttaggggcttttttatttttacacttcaaaatatatatatttttttttacatttttacggaattgtacataaaaatccctacaacctaaattgtaacaaaaaatcgtatagaaacccttattgcaattagcgctgcaactactttagaaactcaaaccgtaaatttgacaaaagaaaaagttaaaaaaaagtatatgaggtaattccccatatatttatgtgataattgatattaactataaaaaatagaagaaaataagacaataataaatggtaagaaaatataatatttgttacaaataattaaataaagaaactacctatctatagacatagacaaaagggccacaaaacctaaaaatattgactatagagtatttatatttagtatatagagcgtttatgtaatttagagttcaattccgaatctatagtagagtcgtgaagaattaataagttagaaaatttactcaataaatttcaagatcgacttattgggagcttgattatataagtcaatgatccccacactagttgagataacattactttgtagtctcaattaattggttttaattaatcaatgtattataaataagactatttgttatttatattatttataaattttactaaggaatgacatacttgagaagaaaagagaaagtatagtttatttgttaattaagagaccttatagggtctaattaataaataagataaataataatttttttaataattaattataattattaaatagataaaattagcatttaaacaattagaatagaaaactaatatttttgaagaaaagataagttttattaaggaagcaataaaatgacaaaattcaaacttgtgggcctccatatagggttcgaccataagggtttagtaaagtcattttatttttatattttttaatttattttaactctaaacctaaccctaggtataaatataacattatagttcttaacctgataataaattttgactctctctttatcagacaagaagaaaattaagagctattatattatatacacttagaattttgaagttcttttagatttcttcttaaaattctgtgcttcttagtatcgagtgattgcccacacagatcaaggcaatacttaggatagtgtggaagattgtttagtctttaccaactctaaggagaatccaggttcaattctgatcacactctgtgacaaaaaggatcaagagtgagagaactgaacagaaggagtcaattaattctactgcaactgttgtaaaattttcttaatcctttatgtgtttatgttattgttttaggcttatccatattaatatgttagattagtcataatctaacatacatgagcagtaaattaagatcatggtaaaaaatattttaacactatttactaggtcctatgatgaggtaagatacaatatctattaactttggaccaattgaatgaggcctaattcacgaggtgaggcttgtttgtacaagcaaagaccgtttgaggataccaggtgtcatgctcaaccagatccgtatagagaatgtcagagaatatgatgttaggactttattagtactatgtttaggtagtttttttataaatagtgttttatgtgttttgtgcaattttacgcttttagttattaatattttacaagtttagtattgaagaaaagttgagcaaactcgagaaaaaattatgcaataaggttaattatataaaatcttgtcgctagagcatcatgaaattaatccaagaaaaaaattcaacagatctgatgcgattggagcttctaatgctaaggaatttaaaaatacggagtagcaccttaacatgagaattcaatggcatggcgctaaaaggcaaaaatttggcaacaatatcatattttgcaaatttataggcgcacctcaaaattgggatccaatgttaaggcattgaaacccttaattcttatttgccaaaaataatgcttcaagcactgcgacactac

SEQ ID NO: 22297 - DNA, 2852 bp, Cannabis sativa
tgttcatttgattagggagataaccttgataaaaaaaaaattaactagtatattgggacaaaaatgaaatatttaaaagtgatatatgcttatttgacaacaaaaaatatttttgtttattcatgaaaaaataaaaatgaacgacacaatgatcatcaaagaatgtaaatgagcaatgagcagatgtcatgaaagttgtaatagacaacaaactatattaaaaatttggatcataaagcacattggtgaatagaataagtggtgaaatgaaaacataaccaacacaggtaatttttctagtggatccatctagtaagataacaaaatataatgaagaattggatttaatattatgaaataaatcaagatgggacacatatgatgtgtagccctagtgtcaattatccattgagttttgaaaataaaattgttcttaccaaaaaaattagacatcataggctaagatggtggagtgggagaggtgtcactgtagaatttttgagcaaggaaagccataatccgttggcactgattaggtgtgagagtggaaaatgggtcttgacttcctctagatttatccttagcaacatcatcatttcctccagtaaaattggcagcaacttttccttgtggagccttattttgagttgtgttgtttcctttgtctgggaatatgctatggagtctgtgacaagttggatagctattgaggcaataacactttgccatagtgtgaccattgagtccacaatgagtacaaacaaggtggatagccattgaggcaataacactttgccatagtgtgaccattgagtccacaatgagtacaaacaagctttggtctttgagattgaacatctccagcaaactcaccagttggaggggaaacatgtttctcaacatcaacatgaacaacagtgattcctctttgtctttcctcctgaataatggaagcaaaagctttgttgatgcttgggagaggatcttgcatcaaaacttgagatcgagcttgactataggattcatttaatccaacaacgaactcaagaacacgattctcttcttgatactgttgaattattttcatggctccacaattgcaaataggtgtgggcctatattcctagatcatatcccaaagagacttgagtctggtgtaacattgttcgatccttgctgaaggagttccatagcacatttagcttcaaaaattcatggagcatttttttgactaaacctctcctacaactgtgcccagatcgatgaagcatttttgagatacattatactatctccgatcttagtcgagacaacacgcagaatcaaagaaatgatcagactattgcatttgcaccaagaatcacagtcttcatcatcttcttcaggttgtggcaatcttccatccaaaaacttgattttgtttctcgcaactaaagcagcaagcatcgatattttccacgacctgtaattttcagatctagtgagaattttagctacaagcattacacttggatgatctccatgagagagatcatcaaatcttggatttggataagtagcaaatgaacgattttcttttttagaattgtcatctaaattcgaattgcttcgagtctgagctactcttccttcgccatagcaagaagaacgagaagaatagagaaagaagacaaaaaataggaaaaaggaagacagagaactcaagatcttcttggctctgataccattttagtaaatagagagtaacatagtgaaagaggaaataaagagattgtatttttgattagagagtcatgcttttacaatgagtatatatatactcggttcaacaaattagttacaagaattagttgtaacaaataacaaactaactatacatctcactaactaataccaaacacacaccaacacacttcagcaacctattttgatatttcatgcaaacatctattttcacatgcatgaagctattaaatcaatatacttaaacagtcaaaaaatatttatacatcaacatttttatatagtaggtaactccagcattcttaagaccaaacgacatgacttgatagtaatacagaccaatgtctgttcggaagcttgtgtgttcttggttaggtggatgcattcttatctagttgtaccctgaataagtgtccataaagcttaaaatttcatgttcgattgttgcatccacgagttgatcgattcttgggagtagaaaacagtcctttggacacgctttattgaggtcggtgaagtcgatacatactcaccatttgttgtttggcatgggcactagtacgtggttagccacccaagccaggtagaaagcttcaatgataaatctatttgtgcaaagcctttctacctcttcttttggtgcatgtgcatgttctttgtccaacaatctccatttctgctggatggaacaaaagtctagattaatatttagggcatgagacatgacagtgggatcaatttttaccatgtcctcatgtgactaggaaaaaaatgtctaggtttgctcttagaaattttattaaggctaattttatttcaagcaacagacctttgccaatttttagttttcttgtcgggatggctagataatctccactttttctagctcttctactagcccaaaatttacatttatttccccaagtcggggatccatgtctttatccccgccttgggcaaattcccattgggcaatgcctttttctttctctgaactgtaactggaggtgtcttccttcttggccttagataaagcgaggttgtagcattcacgtgcaatcctctgatttcccttaagacaccccacaccacttttagttaggaactta

SEQ ID NO: 22298 - DNA, 9978 bp, Cannabis sativa
  modified_base (6421)..(6422): a, c, t, g, unknown or other
  modified_base (6519)..(6522): a, c, t, g, unknown or other
ccggaaggaaccttcaaggaaggagccgggggagagggggtgaaagccggaggagccacgggagtatgaaccccggcaagctgttccaggatgaaccccggcaacctcggtcaacagtagtaaaatttgtttctttgatctttagctgcaagtaaatgaatagactgacatcattcaattttttaattggtagtattctatctttggcttggtactgttatgaatatcataaattccctttcctgaattagtgggccaactgttttttagttattctgttagtcaattactcaccttaacagtttgttagtttgctaacagttgtaataacaactcacttgtatatatagatattcattcttatcaataaagacattcagacttttcagtcaattcatttcttgattctttcattatcttaactggtatcagactgcctaggtctccttccttcttcgcatctctctctaatggcgccctcaagccatccgactccgacgaatcaacctacaattccaccgcagctcccagctccggctaatcttcccattgctcaaggatttgcagttccagcaaacatggcgcccatcaacctgcgcctaactcgaacgaactacccatattggcagtctcaagtgcatccctctgttcgtgctcaagatctggaaggatttctcaccggcgatcgcatcagacccccggcaatgatccctgaccctcaagattctacacgtcaggtccccaatccagacttcagccattgggtgagactcgatcaatttctcatgagttggttattcaactcaatctcggaaaacatgcttggacatgtggctcgctgcaactcctctgctgaaatctggcatgaacttgctcaactcttctctagtcattcacgagctcgcatcgttcaactcagaactcaccttcaaatgaccaagaaaggctccactgcagttgatgaatacatactcaagatgcgatgcattgctgatgcgctcatggcagcaggacagacgattactgatgaggagttgatcttgtacatcttgggatgattaggaccagagtatgaatccgttgtggtaaatctgacgtcaagagagaatgtcacatttcctgagctgcagttcactctccagaatcatgagatgaggatcgaacaacacaacgctgttgccaccatggatcttcaaaatccatctgctaactatgcctctaccaacaaaaagaatggaaatcagccattgcccccttctaatcagggacctcgtggccgtggctacaacaatcgtggacgaggaggatgatcctctgctggccgaggcaataacaataccaatcacccgatatgtcaggtatgtgtaaagctagacatatagcattaaaatgttatcatcgcttcaatctgagttatcaaggtgaagctcccgcctctggtgctgaaaacaccacttcagagacaccacaacccccacaagcccttattgctactccatccactgttgctgacaacaactggtacatggatagtggtgcttcacatcatgtctccactgctacaacaaacctcaccgcaccaacctcctacaagggcaaagaaaaattggttgtaggtaatggatctcaacttactattcatcatattggtcatactcatatcccagctgatcgttctttacatttaaagaatgttcttcatgttcctgagataaagaaaaatcttatcagtatctctaaatttacttttgataatgatgtaacaatagaattcacacctgacttgtgttttgttaaggacattgctacgagacagatactatttcagggaacacttaagcatggcctctaccagctggagcttccatcatcatcatctccagttgcctacatcagcaatcaaacatcttctgcacagtcttccaatactactactctaaggaataaaactcattgtacttttcctgatttttttgatacttctcattgtactcagtcttctcgtgttagtgccctttggcataaccgacttggacatccatccaatgttattctagcaaaagtacttaataaaatgcaagttccctattccaaatctggtagagagtattgtgatgcttgtcaatatggaaaaaaccacctcatgcgtttttctagttcaacaattaaaaccacagcacccttacagttagttcactctgacttatggggtccctcacccattcctcctcctgaaggatatcgatactatatactatttgttgatgactttaccaagtactcctggatatatcctatgaggcaaaaatcttaagctctcagtatttttcacctcttcaaaactatggttgaaaagcaattagatctatccattaaggccttacaaactgattggggtgagtatcgaaaattacaaatccctctacagaaacttggaatcatctttagacacccatgtccccatcaccatcaacaacaaggtcgtgttgaacgaaaacatagacatgtcactgaggttggcctaactcttcttgcccaagccaatttaccactaatgttctggtgggatgcctttgtctctgctgtttttgtcattaatcgtcttcccactattacttgccaatataaatctccctttgagtacatccacaaacacccacctgactataaattcctcgaagtatttgggtgtgcatgtttcccatttcttagaccatacaacacatgcaaatttgcttttaaaacctctaagtgtatctttcttgggtacagtccctttcataaagggtatctttgtttgcatccaactggacgaatatacatagctagaagtgtaaacttcaatgaaacagaattcccttactcaacccttgtttctacaactaatatgcattcatcatccacctttagacagaatcttacatctccagccttcatcattccttcccctccctctgctacagcccaaccacaaccccaaccatcaccctcaaatacaaatatgtctctccaaacatctatcccctctctgtctaccaactacacggatgatgcttcaacaagtgttcccacattctctgaagtagcacctactcaagctaatgatcccaacatgaatcaagtaagtgaattatctcatatgtctactaactctttatctcgtatgttgtctcctaatgatgctgagattgagattaatccacctacttttgagatagcaccagcaagtgcaccaatacagaacattgaagttgctacaacaacacaacaaaatttgcctgcagccccaaatatagagacagtaacatctctacaagacatcactgtcactgacactacgcatgatacttctaatgtggtcccaagagcaccaccacctctacctagtggtcatgcaatgcaaacacgctccaagtcgggtatatacaaaccaaaggtgtatcttgctgtcacatccaactccatagcatgtgttccaacctctgtcaaacaagccctcactattccagtttggaaaaatgctatggacactgagaatgttgccttgaagcgtaaacgcacatggacattagtgcctcctagtgaagacatgcatatcattcaatgtaaatggctctttcgcatcaagctcaatgccgatggttccttgaataaatataaagcacgcctcgttgccaaaggctttcaacaaacggctggtatcgacttttcagacacctttagtccaattgttcgagcttccaccatccgagtcatattcactcttgctataacgtttagttgggacatacaacaaattgacgtgaacaacgcattcttaaatggagaactccatgaacaggtgtacatgacacaacccccagggtacgttgatcctacacgacctaaccatgtatgtctcctacataaagctctctacggtctcaagcaagctccgagggcctggtttgaccaattaaaaagcaccttactccaatgggggcttcaagtgttcaacttcagatacatcactcttctacacaaccaaacaaggtgctcctttatttctactagtatatgtggatgacatcctaattacaggtgccaactcatccacaattactcaactcattcatgatcttcactctaaatttgcactaaagtcacttgggtttgtgagctactttctgggttttgaggctactagaacagctgctggtttattcctcacccaagcaaaatatgctactgaactgctccaaaagacaagtcttgatgattccaaagaagctccaactccaatgatacttagcaacaaactttgtctaggtgacagtcctctgtttgacaaaccagaagtttatcgtagtgtccttggtgctctacagtatcttactcttacaaggccagatttgtcattttcggtcaacaaactaagccagttcatcaaagcgcctactgccaatcattggactgcctgtaaacgtgtactccggtatatctgaggtaccgttcatcttgcactccactttaagccagctactgttatgaacttagaagcttattctgatgcggattgggcatccaatttagatgatcgaaaatccaccagtggattctgcctatttcttggaggaaatcttataagttggggttcacgcaaacaacaagctgttgctcgctccagcacggaatcagaatatcgtgcacttgcttctactgctactgaacttatatggctacactccttacacactgagcttggaatcaagatctctatggtccctactctatgatgtgacaatcaaggagctcaagctttaattgtcaaccctgtttttcattctcgaaccaaacacatcgaagtagatgttcattatgttcgaactcaagttgctgaaaaacggattgaagtcagatacattccttccactgaacaaccagctgacttgttcactaaaccgattacctcttctagatttgaatttctttgtaacaagctgaacttggattactccaactacagcttgaggggggctgttatgaatatcagaaattccctatcctgaattagtgggccagctgtcttttagttattttgttagtcaattactcaccttaacagattgttagtttgctaacagctctaataacagctcacttgtatatatagatattcattcttatcaataaagacattcagacttttcagtcaattcatttcttgattctttcattatcttaacagctactgtatttgtagggttgttgttgtgggttcgcatcccaacgatactagtagcatttacaccaattgttaatacttacaatctgttggtgtgaattctccattcgcttcataatcaacataattcttttcttcttcccagtgctcgttgctctttatgagaactggtatagatttcgtgttctataacaattttttaatacaagtaacaattcaatgactcaatttaaataaaaacaacagtagaactactacaaaacaaccatacatagtgttattttttaaaagaaatcattagctagaatgcctcattttcattgttgttatgtatttatcgtgaaaatctatttattaaccccaaacaacactaaaacaacattgatcttaagaaattttaatagaagaattataatagctacaaatacaatttgtgcatgattttagtaaaacccaattttaaaattgtaatcgatatatgaatatatgtatatatcatattttcattgattcactttgtttttaaaattaatttcatatatcaattggatatcatgcttaatcgttcatctatttagatagatttttgtgagtttcagttacttactcatttcttttctttgatttctgagtattctcaatttcctttgttgctgattcacgtcaacttcgaaggcttctagtttgtatcaccgaaaaatatgattgttttgtagctgttccttggttgattagtgcttgctgattgtgattgctgagttctaagagattttggttttgtttggctaaaacacagtataaaaattataaatcaaacttgaacagtataaatgtaaaatataccgtatctcagtatttatgtaaagttcaaccattttttattatttgtataagttttcctaaaacaaatgacttcaaataaaattaagaggatcaataacttcgcaattcattataaccacaattacacacatatataattacatatattaattacagttgccataacataattttttacatatttggactttaaactcagttcaaattagttgccataacataattttttacatatttggactttaaactcagtctgaaccaaaatattcaattgtaagtatagtactccaacttatcttttctttctcatatttttataaatagggtaaatactattttagaccctgtgttttnnaaaagttactaattggactctctattttgttaaatgacaaaatagacactgtatttttcaaaattgtacaaataagaccctgaactaattttttgtnnnnataaaatttaataataatctaatctaaagatgttataacaaatctggttacattttctgattatcttaaaattggttatattcaaaaatgaaattattaaaaattaagcttagggttctatttttatcattttagaaaatataaggtctatattattatttaacaaaataaaaaatccaattaataacttttacaaaactcaacatccaaaaatagtatttatccttataaatacccataaaaaatgctatgttggaaggagttaccgtcttttctatcatttattcaaaatcgcaacaaaaaaaaaatgactaagcacgttcacattacattttatgtttcgacgtgtaaatataatttattatttttatatgaaaaaaccacataaatttgtaagaactttttctcttttatttttttgaaattaagaacttttaaataatttatgatgctgaaaacatgattcaaccaacttgatgcaggcaattttttttttctttttaatatgtgttaaattcaactatttgaatcatttgtgctttattatctaaaaaaaaaaaatcgtgatctcaatcattactctattctcttaccaaacaattgaaataactgatcatagttacacttaaattaatgttacacttaccaagtccttgagattagagattattggtttagctaccgtgccaagtgccacattattactattattattattattgttatcattatttgcggaatgtgtttacaaagaatttcttttgagaaattttgtactaaccaaaactctttcctaattttaacttgctggttcatatcggcatacacagtcgtatatgttcccattgataaggtttttagccagcctatgattcttcaccattgcaagctgcaaccaaattgttcttgttaatttccatttaccaaagtacccaaaggcatcaagcaaataatatgatagtgaaatctcaccttcagggcatcgcatttaaaccgcgcgttaaagttggtatgcaaagatctgcccatcccttccaagataatctgcaatatcacattttatgtatcatgccattacacttagctgttctgtcctcatttttgcttgtgtcttaatttgaagttgaccccccaaacataataataataataatcaataagtaaaacaagcatcataccaaatcagcatcttttgctgcagcagctaactcagagctgacctgcctcaaatctatgcaaggaccaccgcaaccattctcgacaaccatcaatggaacaaccggagatgaattttctttaggaccatctagaccactcaccattgcatctacaagtaggcctcctgcttctgcagcactgcggagaatgtcacagtgctgcgaacaagaagaatcagatcaattttgtttttgattaattatttccatagcagcatatatatgcatttgaactcatggaggtaaatatattttgtatcaactgaataagaaagaaaaaagctgtgaaaaatgagaaaataatgaaggtaacagcaaacaaagtaacggaaatccactcaaattgtctttcttttcaatcacaatgtcattgagttgcatgccatggttatgtacccaaaaagaaaaaaaaaattaccttggcagcttcagctacaattgcaggaagctccatagcagtaatatcatttagtgccgggagtgagtttgcaaccaaaacaacctgcagaagttcataatataacttcaatagatgttaaggcgggcgttactgcaggagaaaccgtgtcttttctaccaattaacaatgatgctaatggctacctaaaacattcacaagaaaaagagagactaaaaaatggaaaacatgaaaactcaatcacatcacagtcagctcatccgaaaaaagcagacttttgggaaattcttcatctttcttgtctttgttttattttgagacacaatatgttaaaacacctatgtttccagcaataacttaacaggggtttattaggcattagtcgaaatatttagagaatctaacctcagttccacgacgaaggagttcacgtgctaagggaagcatccctagaacaacatcagcacctgaattatccacaaagagcaaagctcttttatgcgggggaggcttcttgtctccagaccccaacattctttctttgaagacatcaaaatcatccacctaataacagaaaacaaagactagtactggctaacaagaaatctatgtaaaggaaaacaaatcatctcttgttgctttgctccccttacccgccaaggtctttgcatcttatcacgactcattctataaatttcaattatcgttcctttatgatagagatccacacaggcacgggatccccagtcaaagatattagcagcaagaacaccttcaatgagggtcactagtctcacttcctgggaaaattaaacagaatttcagttattggaaacacagtaaagaatcaggtggagtagctttaagattaaaatatgaaccataaaaacattccaccagtcaatgataaaaaaaaaaagaacatgtagttgtattaaactaggtaagataaattatacatcatctcatatttcgacgtacctcactcataccatcaagctctgtcaacaggtcagataaaacagcaagtgatgcctcattttccctgttacattcaggaaaaaaaattatgagaagaacaaaaatataaaagattgaaaaggtcttaaacattgcaaaaaaactcaaataaaaagaaaatatattttatttcactttcaacaaaagacctgtttatagaaactacaattgcaaaagaacactcgcaagtgatctctacctgttcgtggaaatgtgatacatgtagcacaatatgaccgctttgcaaatcagtaactttaattggaaagggaatgaaaaaagacaagaggcttattgtttacctttgttttatactcctataggcatcgacaaattggaactctctcaagctgtcctcccttagttctaatagattggccaaccccaactttccatatgcagcagggtcttcaatcaacctataaaatgttgttaggaaagaggatatcacaaataggaactatatctacctttgatattaagctgaacaacagctatgcaacaaattttattgatttataataataaaaaaagaaacaaaactttcataaaaatgaattacgaacggaagagtataagagcataaatgtctcaaaaccagcacataaaagcacatacaatacaacctgaaaagcaaaaccaacaaataaaagaataataatcatgcaaactagtaaagttaccgagccaagtgagctgaaaaggcatgagcaaaggcatcaccccttcttttagcatcatcagttccaccttcgcttgccactgcctaccataatacacatcaacttctcaaaatcattc

SEQ ID NO: 22299 - DNA, 6476 bp, Cannabis sativa
aacagtaaaacctcaaagtcgatacacctgtagtaatccagttggtatttaacggtaatatctaactacaactttaaatttacaaagaaaagtaaatttaaaagagttttgcttccaaaataaaagataaagaggttaatgtataaaaattaaaacataaggaagttttgccacaaaaaaaaagataagggggttaagtgtataaaaactaaaacataagggggtttcaccaccaataaaaaagataaggtggttaagtgtataaaaattaaaatataagggggtttcgccgcaaattgctctttatagtttcctctccctccccacaaataggataggaaacatcctcaacctgaattcgtctagcaagaatggaccaggttggcaaggcataggataggatactccaccacagaactttgtgacgctccaaaattttagagttccatagtttattccaaagagcaggagcgacattgcaagaaggggcacgactcaaggactgcaccaaataggcagactttgtaaagaattgaccgtcagattctttggtccaattccacttatcactaccttggccatagggtctacctcctttaataatacaattggttgtttctagtccaagaagtcattgaagtttcaacatatctcagtctccattttctgaaagtaaatttgctactttttacatactcttaggccaagcattaacagggtgaggatagaattcccagccatgtaaaacctatggatctttccaaatcgtagtatacactaaacacattgtacattcacttggaaagcgtcttttttattttaaggaaaaacgtgcatataaaaaataaggttaaacctgacagtcattacaaaagatattagtagaagatacaagtaagcaactatactgttagtgggtaaacacccacttagtcacattatagaccacaaaattacaagatatactaatactagaaaaaggaacagctaataaaatatggaaaaattcttttacaaaataaagagtagttcccaatcacccaacaagactcctaaccattgagagttgactacccttgaatcgctctccacaataataaatttgcaacctttatctcttgccacttctaaagccaaacaacaagcaaccacctcaccacaatgagcatcaaaaaactccaaattagccgtgtgcacccaagccacctcaccatggtggtttctggagaccacaacaatacacatgctttctatccctactttaacatcacaattcagctttagccaatcttgggaggaggatgccactcttccaacaagattgtggtgggagtagggagaagagaagctccaatatctgcataattgtaatgagtatagtcattgcaatggttcacattatctagtttattattgtgtaccttgtcaatttgagcccaccagatagtgtcaacaacaatcgatgcataaatgaaaacttcatgtgcattaataccttgggattttaagctctagaggaatttcacccagtcccacatgtgaatgtcagtgccatagacacgatataaaccccatggggatgagcgccacaaatgaaaagccaaattacaagagaggaagaggtgttccatggattcctcctcagatccacaaatagggcatcctacatcatcaagattgaatctcttattaaagcacaacccgattagggaaggggcattggaaaggatgcaccaccaaaggatcttatgactctccaaaattatgttattccaaagcttgttctaaagggaaggagcaacctcatagtgaggagctctttgcaatgcttgaataaggtaagttgatttgcataagaaatgcttattgctttcctttgcccagatccacttatctctaccatggtcagaaggtcttccccctttcaagatgacagtaatagtttctttgtcaaaaaggaaattcaacctacgagcatcctaatcaccactaacagttagaagacccgccactttacttaacccagactaaggtgacccattaggtttcgggaagaaatctctaccatgagacccttagggatcattccaaatactagtaaccctcccattagccaccattttgcaatctcatttccttaagatggcattcgccttcactacgcttttcccaaaaccaagaatctgagtctttgtacttgcaattaagaaaattcgtccccttcagatatttagcttgcaaaatttaacaacacagtgactcgtttccaatcaataagttccacccacacttagctaggaaggcctgattcatctttctagttttctaaaaaccaagacccccacaggacttggggaggcacatcttataccaagccttaaggtgaagctcatggtttcctttttcaaacccccaccaaaagtcacgggccatcccatcaatcttagccacaagacaatttgacagtttagtagtttgcatgacatacatgcgcatagaaaggcccatagctttaattagggtagcaccgcccagcctttgaaagtgatttagctttccaaccttagagttttgaggtgagatgatccaagatgaagttgaaatctgcatccttttccctagatttgaataaagggagacccaagatttaatatttccttccaggctaccaatccctaaagcatctatgattcctcttttcatcccatgggaagtattcttactaaaagagattgaaattttgagtttattgacctgttaactagaccaagaaccaaaattctcaatgcatttccaatagccttttgcctcctccaaagaagcccttccaacaagaattaaatcatctgtaaagaagatatgcaagagaatcaggctctcaacatagtttaatgccttgaatatcacccttccccaaggcttcctctaaaaaccttgataaaatttctatagcccaaatgaataggtaaggggaaagaggatcaccctggcgtaaaccacatgagggaataatcttcccttcttggcctccgtttaggcagacattcagggtggttgaagaaatacactgggaaacctaggtatgaaacttatctggagcaccaaagtaagaaaggacatgatcaatgaacttagaactcaacttgtcgtaggctttcacaaggtcaattttgatagcgaagataccctcttttcccttatttttgttgaaagaatagataatttcttggacgatcacattgttgtcttggatactttgatcgggcacaaaggcaacttgagtaggacatatgagtctaggtaaaataggctttattctgttggcaatgattttagaaataaccttatacgtgacattgcatagagaaataggcgtaaaatgatgggttattttcaggttttggatcttgggaatgagcactaaattagtagcatttattcccttatgcacgaaacttgtcttaatgtaatcagagacagcatcacaaaagtcttcccccactgaatcacttagaaaatgtcaatatatctaattatgataactgagcaaaacaataaacgacagcgcaatctcgaattagccatcatactaaaataaataaagggaaatttgatctatatgcatttattaagtgtaaattaatacactaaacataagtgtatcaaaattgttagaataaactaacttttccttaaacaaaaattaccctctcccattttgaaaactcacctctatctctctctccctccattctctctcgctctcttcgctcgtagcaaaagatccccacaaatcagcgaccgtgaccaccgtcccaacccaaatcgtggctctcaaatgtagatgaccactcaaacgactgagccctgcatgaaccacccacagaccaccatatttgcaccatttttgatcggtcacgcacagacaaccgttgaattgtctcaaccacgcacatgccaccatcctaacccacgaattcccctatttttgatcagaaatgtctaaggtaagttttgaatccctttttggaattaattgtctttttggttgttaaggtttaatttttatttatttagggtagaattttgttaagcatttgccttatctgtgatctgtaagtttggtttgatctagggtttgatttaggttcgatctgtgctactactagaaaccttgttttaaggctaggctcgatgtaggtttgatgcctgtgctctagaaaaaaggatagaagttgaagacataggtctgatataggtttgatgctacccaatacgttttaaaatttgatgagttttgtatatgtctaataaggtctgatgtacgtccaattcatggtctgatactgtcttataatttttgaaattcgatagactacgtgtaggtccaatagaggatgatggttatccccaacaaccagttggtatgatctggacacaaaagacaaggggaggtgagcaacctgacaaagcggcaaggtttagacaagactctggtcaactgtgcccaagagtacttgccaaataattttatcgtatgtatcaacgaagacaatttcaagtgtaacaacttagaaaaatgtggagttttaagttgagtatttgactataatagactcaccataaattgtcatacaaagtgtttaagggaaccacgtatgagacaaaggctgtataagttcacaaggccatgataggattcttgtcgaggtcaaaagaggacaaaaaattggcaacccccttgggatcaaagccctaggtcagctagggtcccaaggcatcaataaggccagtcagggtcccatgacacatgcaagaatcggccagggtcagaagacccatgcatgaactggccaccttccggataaaccctagaactggccagcccccatgataaaaccctagaatcagccaggtcttaaacaagacccctagctagggtcggccagggaatgtttgggatcaaagtgtttatttttttaaaactcgaacgtgttctttgtgactcaaagagtcaagaatcgcaatgaatgtcaaaattgaatctttttcaataggaaattacacattatgtatcctaaagctatcatgcgaattaagataccaaaaagactacaatgtaacgtgagaatcaagaatgtataaaacatggaaaagcttgaacacaacaatggcaaattcaagaaaacaagtagataatgggatttgaaagcttacccattagtgaaaaccttcaagaaagccagtgggaagcttggattgtcgaaacaaagcaggaatcccaagattcgggggacctaggtacgtcggcctcaaagggaaagtgaagagctttctcttgtttcctttttgaagagagagaacataaagtgtgaaatgagaatgtttttcaccaagtagccttgtatatagtttctggtagccccctctcgtttaacatgcagcaaacaaccatgcagtttgtaaaaacaaccatgcaaaatattatcagttctttattggggaacgtgagcagccaaacaagagaaaatacttcataactaaagttattataaaacctgcctggttaagactccaatagtcaaaactgaagttggaaagtcactattcgtacaaacattcacatagggacttggggataaatgttatttcaatttttacccacatggcgtggcatgtccacataggcaagattgatgccatgtggagtacaacctatcaccaagaaggccaagtcatcatgtataacttatcgattgatgaggagtccaaatacttaagcgggacataggacaatgaactagccaacttaaggggtctggccggaccccctggccagtcctattgccagcataggccagccagcctccaacaaaggaaggcccgaccagcctccttcatggcagacactttttgtgcctctacaactttctgcttggacaacacttccagttatgtcattttctatgattggtattgagagctaggggtctagtggacagtgtgatatgtaccggtagcttatctcttgtgattatttgtggtctctctgttttgtttatacatgatgatgatgatgatgatgaaaagttttgttttaagagctaaccatgcaaggattttttttattaaactgttggtcctctaatattagttgttttcctactgggctttataagctcaccccctatatttcctcttccaagaagtcagatttgtacttgtgggtgagaaggaatcgttgatggagaatagtgtgattagcttagtcttatcttagatattaattaactattcttttaatgattgagtatgtaccttattattaatgagtggtctatattaggggtgttcatcaagccgcttaaaccgctcaaactgcccgccccacaccgcaccgcaaaaaaaatacgtttgaaattctttacagtgcggtcgcggtttgaatttttttaaactgcgcggtgcggtttgcg

SEQ ID NO: 22300 - DNA, 4878 bp, Cannabis sativa
  modified_base (26)..(31): a, c, t, g, unknown or other
aggatgttaataaaacatacttggtnnnnnntctagatcctcgtaaaatatttccaacattattatgtttgattatttgcctttactaacttttttggggtctaagggaagatcgatcttagagattgaatagtgtctaggtttctcagggctcaagtgagagagattggtttaaattcgattgttaaccttaaaaattagcgaagcgatgttccaagattagtcaagcaaagtacgtcataaactaaggtttatcattaagtttagggtgatggggctgaagccatccccacttcaagtccctcaacttgaagactaaagcgtcaagacgagaagcaaagcttacaagcaccctggcaaggcttgcatggaagcatctcggcaagcatgcaagcatctcggcaggcatgcatgcaagcatctcggcaaggcttgcatgcaagcatctcgacaaccatgcatgcaaacatcttggcaaggcttgcatgtaagcatctcaacaagcatgcaggcaagcatctaggcaatgtttgcattgtaacaccctactagtttaggcgtgctataatacttttcataattcctgtgcaacctttactaatcaaagagtttaataaaaatgtgatttaatttaaactttaataaataaacataaacaacattacatttataaaatatgggattttgtatctacatttttcaactgtacataatcaaaagatgtcgcacagcgactacaaaatcgtgagccgtagttgttccgaagatccaacactccaggttgaactgtctcgatatgaacaatctttatccatctccaaactcgctatcgttcaacaacaaactttcctttacatgcacataacatattgtttgtgagtcgacagactcggtaagaaaagcataaaatataaacgtataaccgacctgcggctaagcgtccatacacctatcaacaagtcataaaccatttcagacacatatagctgagtctgaaacattcttgaacatagtacgattaaccataatatcacatgcactcagtactctagtcgtgctagtattggtagcatcaatccatactataagtacaactagccataataccacatgcactcagcactctagcatactagtgttgttagctctagttcatacttttgaaagtataatcaaccataataccacatgcactcagtattttggcgtactagtatttgtagcattggttcatactttttgaatggccaaacacatattcacgatatgaagatacaagcatatatacaccaattatcgctctaactgatatgtcatacatctagtaaacataaacatgtacatatgtatgtgtgtcatactagtcttaccttaattctaattttaggtgtggcagtcaacctgagtggaaatagctgcttgtaattggaggccctaagtcacaatttcagaaaaacaaataagtgttgccctgacattttcgaggacttaaattaaaaactaaaaatttccctatcgacagatttcatagaaatacgccaagtatcgataaaacactcaatcggatcccggaaaaaatctcaaaacatactgtttattttaaaaatagatccccaattctgcctaaatcggacagtctgaaactccactgtccaatattaaaacttacataactcatttacttctaagccaaacattaccaaaattttcaaggtatttaaaaacatcataataaatatttttttattaaggaacctcaatcaaattctcaacaaaattaaatggtcgtaataaaactgcctaaattagatggtccgaaacctccttattcgagtttggaaatcccataacgcatcctattgacttttactttaggcttaggtttccttttttactttatttttccttttgttttcttcataagcagttggtcaccaataaatggtgagtcacaaccctaaaaaggcttcataaaaaggtgactaatcacttaggagaaaaagaccgaagtgccttacttccctgctaagttatcttgtaaccctaggggtaaaatagtccaattatatgattttgttaaacctcaatattttaagatgtccaataatattaccccacaaaatgcttgataaaaatttatacccatgtgactaaacttgccatccaacccatttctactattatcggggataacaatgtgaaaatatgaaaattcacatataacatgcatatcacacctataatttaataaaatatctaaaattaagaaataataatcataatacatatttttcatgaaaatagggtctataaagcataacatgcataaattatcacataatcaaattaattagtgctaagtgtcccactaacccatgtttaagtatagcagtcattacaattatcccctgttaaaaggatttcatactcaaaatctaacccgaataactctggatattgagtcctcattttagactttaactcccaggtagcctcttccaccttactgttcttctagagtactttgactaaggatataatcttgttccgtagaactttatccttccaatcgaggatctgaactggttgttcatcataggatagatctggtgccaactctagggcatcataactcaagacatgagttaaatcagacacatactttctcagcattgatacatgaaaacattgtgcactactaacaatgtagaggtaaagctagccgatacgctacttctccaaccttcttgagtattttaaatggctctatgaacttaggacttaactttccccactttcctccaaaatttgaattgtcctttcgaactgaccatctatctagggtgaaaatctgtactaaacttcagcctcatacccatgaccttctagagactttacaaaaatttggaagtaaattttggatctctatctgaaactatggatttcggagctctatggagatgcattatctccttaacatacaactcagcatactgatccaccgtaaatgtggttttcactggcgcaaagtgtgctgactttgggaaatgatccacaattacccaaactgaatcatacaatcggtggttctaggtaatccaaccacaaaatccatggtgacatcttcccatttccacttagtaagtgtcaaaggctgtagtaaccttaccggtttctgatgttcagccttcatctgttgacaagtcaaatactttgacacataatctacaacatccctcttcatacagcaccattaataatagggtttcaaatcttgatacatcttggtggtacccggatgtaatgaatatggagtggtgtgaggttcatctagaatctctttcttactgtcgctcggaacacaaactcgagccttataaagtagcatactagtatcagacattgtgaagtccttagcatgtccagctaagacttttaactgagctttgattaactcagaatcttcctattgggcacacttgattctttctattaggttagaatgaagtgttaagttagaaagtttgtccaccacaaactcaatacctgcattgaccatgtctgtggctaactggagagagatcatctttgtactacaaacttgtccaggaccgttcctactcagggcatcaactactatactggctttcccaagatgataaagaatctcacaatcataatcctttactaactccaaccaccatcattttctcatattcaagtctttttgagtaaagaaatacttgagactcttgtggtcagtataaatttcacacgttttcccataaaggtagtgttgccaaatctttaatgtgaacaccactgatgtaagttccaaatcatgtgtagggtaacgttgctcatacccatttagctgacaagaagcataagtaatgaccatgtccccctacattaggacacaccctagaccctatttagatgcatcacagtaaaccacaaacttttctttttttgacattaaggccaacaccaatgccgtgattagtcgcttctttagttcttgggaactggcttcacactattaacaccacacaaaccgttggttcttcttagtcaattctgtcaatggcatggagatcttagaaaatccctttacgaaacgatgacagtatctagctaaaccaatatagcttctaacctcagaaattatattcggtctcggccaatctctaactgattcaatcttcccagatcggccataatactattctcaccgacaatatgacctaaaatggatacttgggataaccagaactcgcacttcttaaacttagcataaagtttattttctctaagtcattgtaagactattcgaagatattgctcatgttctacttccaactgagagtatacaaggatgtcatcgataaatactgtgacaaagttattacggaaatccttgaatactctattcataagatccataaaggctgccagaacattagtcaatccaagcgacatcactagaaactcataatgtatgtaccttgtacaaaacacaatctttagaatgtcttcctcttaaattctcaacttatgatatcccgaacgaatattgatcttagagaaggctgacttccctttaagctaatcaaacaagtcatcaattcttggcaatcgatacttgttcttcgttgtaagcttgttcaactcccgataattaatacacatctgaagggatccattattgttcttgacaaacaataccggagctccccagagggatacactgggtcgggtaaacccaatgtctaacatcccctgaagttgaacttttaattccttaagttcagatggagccatcccgtatggttctttaaaaataggctctactccctgttggatattattttacca

SEQ ID NO: 22301 - DNA, 5180 bp, Cannabis sativa
tgatagttctctgatagcatctcaacattaccttgttgatcttagtgtgacttggaatccttgccaataccttgtaatcaagtcagaaataatgaagatcgagccaaccatctgaggaacatcttaacagagatgtaactcattttttggtgaaccacggaaaaaaatttcagatgctttctttctttttccttatgcttttgtgtttttaggtttagatcgatctagatctaaattggtgtgcgtgtttatgtgaaaatactaatggttcgagctggtttagctctgctaaggttttgagaggaagaagaagattagagatctgattgatctcgagaatctttgaaagattttgttgtgggaaattaaaatggtatagttttgattttgttatcattggttttgaccgaagtcaacttgggtgtaggaacaatcttaaatgaccttagtttaaatactgattgaattattttattggtgtaggttttatgtttcaagtaattttttacagtagtatcagagcttgatttagcaagaaagtcaacaaagatttaactcaggaaggaaggagatacaacaagatcaagaagtcatagaacacacaagaagactggaagataatccagtggaacctgggaacatcatgaagaacttgtggatattccactaactaattaaccaaaaagcctaactctatctctgttttagattctgtaatatgagtaacattaaagttaatatatattgataagtttgatggatcagatgattacataatttagaggagaaatattagatcattactggcccaacagaaacttctcagaatttcggaagatccaatagattggcgagaaggaactacaaaaatccaacaagaagagttcgtaaagatagctactgggatcattttatcttcaactattctgattcaagcataagtcttattgataaagaagaaactacaacaaaaatttggaagaaattagatgagtagtttcaacaaaagtccttgactaataagatcttttaaaagaaaaggatctttgtgttccagatgagtcactgtaagactcttgaatagaatctggataaattcttgaggatgcacactcagggaagaatgatgctctcagtgatgagaaccagactatcataatcttaaattcacttcttaaaatttatagggaagtgaaaacaattattaaatatggtagaacatcaatcactttagaggaagtgatctaaagtccaaagttttagtaatgaagactgagaaaggagggagttcagatagacaattcaattgagtagaggcagatctactcaaaagaaaccttggcaaaataggggaaggagtaacaataggggatcatacagaggcaatagtaacaaccacaacaataaaggaagatcaaactcaagagatggggaatcatcagaaataattgtttgttacaatcatgaaaaacttgatcatttcaaaagagatcacaacttcttgaaaagaaataaataatagaccaattacatagggactatctcataactctaactcttattcatctaacaagaaacctgattttgaaaatgcaaatctaagtgatggctatgaaagtggataagtctatgtagctgcatcatcttttaaggattgttggagacaagactgagggtgtactttccatatgaaaaataacaaactgttattgtctgatttcaaggattctaataaatggaaggtaattttggggcatgattaatcctgtcccatagaaggctcaagatcaatgagttttaagatgtttgatggagtgattagaatcctatatggggtcagttatgtgcctaaactgtctaggaatcttatttcactacgtgtgcttgatgatgtgaatgtagaaagcaagataaaggatggaaagataaagttgtgcaaatgatcaatggtgatcatgaaaggcatcaaaagggaaggccaatactaactgattggaaaaccagttgcaaggagtcacaacactgttgaagaacccccagaagatacaaatgcagtgttgtggcatagaagtcttcgaacatagtgagagaggactcaaaatcatgagtggacaggagttacttgggaagcatcacaaactcaagttcaaaataggtacccacatgtccaaatccacattagaatatgttaattcagacttgtaataaggacctgagaaaaccccaacacatgaaaataatgttaattttttgtctattattattgatgattattctagaaatgtatggttatacttactaaaatataaaataaggcatttactaaatttaaacactggaagactctcatggaaaatcttacaaacaaaaaggtcaaaactttgagaactaacaatggcttagaattttacaataatgtgtttgacctattttgtaattaagaaaatagaaatctaaagacatagaacaacaagaaaaatactacatcaaaatagtgtggcagattggatgaataggactatactaaataaggctagatgtatgctaacagaatttggtataaatcatggattttagggggaagcaatgatgatatttgcttatcttgtaaacagatgcccttcaagggatatataatttaaaacaccaacggagagatggacatgtaagctattgaacttagaactgttagggagttttttctaggttaccctaaaggagtaaaaaggttatagaatatggttaagggaataggaggttttaaaactattatttgtagggatgttatttttaagaagttttttttttccttgtattactaacactagctctccaggaacaaagagaactaatcctacaataatcctagtactaaacctatgaacacttaatcagataaaggaagatgaacctgatataaatcaggtgaaactagcccaaccatatcaagtttaggtgaagcaagaaccaggggaaccagtttaagtggaaccagatggtgaagaaggacaaggaagtacaccaacagaaggatatctcatagaataccaccagggacagagaaaaaataattccaaaacctaatcctaaatacaacttcaacatatggaatgatgatctagcctatgcctttttgtgcaacttagaagctaaaaagtttaggaaccccaaagctatgaggaggcaattactggtacggatgtagagaagcagaactaggttatgaataaagaaatgcactctcttagaaagaacaaaacctagataatggtgcacaagcctaaaaggaagagtatattgcttgtaaatgggtttacaagcacaaggaagggaggttcaaaggagatctagtgaattttaaagcaaggttagttgctaaagggtttacactaaagtaagggatagattatactaaaattttctctccagtggtgaagtacaaaattatcagaataatgctatccttagctactaaatttaacatggaagtggactagatggatgtgacaatggcattcttacatggagaactagaagaagacatatacatggaacaacctaaagggttttttattaaagggcacgaggatagagtttgcaaactgattctctctatggacttaaacagtctcatagacagtggaataaaaagttcgatgcctgcatgatcaaacatggatttactagaagttatcatgatacttgtttatattttaagggtactaaggttgaggaagtcatctacatactattgtatgtagatgacatgctaataattaacaaagaaaggcacaatgcaaacttcgtaaaagaaataattattacaacagaatttgatatgaaggatttgtgaacaactataaaaatcatagacattgatataaaaagggacagaagtaatggaaaattggtcctaacaaatgaagactaaattcataaaataattgaggaactctcaatggaaggttctaagctagcaactcagcctatcacaagtccgtacccattatctaaggctcaatgccctaagacacaagctgagaaagaagaaatgagtaaagtaccttactcaaatgcaatatgatcagtgatgtacttaatggtaagtacaagacctaatttggcctacgctataagtatcctaagcaagtatatggaaaatcctgataaaatatattggctagctatgaagtggatgttcaggtatctaataggtactagtaagaagggtctagtgtacaaacaatagaagcaatgcactaacatagagggctacattgatgctggatcgagatatatagtagagaatctacatctgttgtgtaagttggaaagttcaattacaacctattgttgctttatatcaaaaatagaattaaagtatattgcaactacaaaagctttcaaagaaggaatctggttgaaaggcttggtagaggaattaaagctactaaaggaaactctaaccatatactctgatagccagagttgtgtgcacctatgcaagaaccctatgttccatggcagaactaaacacattaaataccactttattagagacaatgtgatacaaggtaacactatcattgacaaagtacctacagatgagaatctagaaaacatgagaaaaaagtgattactcttagtaagtttaagcattgcttaaacttactaggaattgatactagctagctataatagtatcgagctaatacccttatatggaatctcaagaagattaatagtccaagtaaagatttaggtgaaaattgtttagtaaatatccacttaaactattaatctaggcttaagtattacaacgaaaagggctctggcccatttgtctacaatataagtattacatcaacttaattagttacaagtaattgggaaaagaaaataacagaataaagttaaataactcataactatcacaacaagaaagaaagacctacaatgcctatttatacatgatttctccaagatcttggtttaagctgcagattactccaaggaaactcttagatatagagagagaaatagatagagagttagaaagagaggaatattgtaatacaagaaagaaagtgatcaaagggagacagagagaaaatcataagaattaccttgtcaatcttagtgtgacttggactctttgccaatactttgtaatcaagtca

SEQ ID NO: 22302 - DNA, 8001 bp, Cannabis sativa
tatgtttcattcatgctcaaatatttctgctctgttctttaggagtgtaaactctccttttaatttcggatttctttaatggaatatgaaggaatttcactttggatgggtgtttatattgcggggtttttaccttttgttgtcatttttgaatgtaggatgaaaatgaatagaaataccatagaaagaggaagaggtaagaacaaacattattggacacacgacgaagatgcagcgttactcgattcgttacacgaattgtatcaaaacgccctctggcgagctgattgtggattcaagaatggttacttagctcaattagagatcatggtagaaaggaagttacctggttgtgaattaaaggcatctccacatatcgaatcgagaatcaaaacattgaaggcgaaatattatgctttagctgagatgttatctcataaaggctttacttggaatgataaacagagtatgttagtatgtgaaagaaatgtttataatgattgggttaaggtaaacatctgcaaaatcttatttagtaatttatacaacactatattttttatctgttacatgcttttatgacatgtttgatgtgtagatacacaaagaagcaaatggactatatggtaaacagtttttgcactatcccatattgaaggagatttatggtaaggaacgttgtattggtgccattgtaccgatttctattgtaggaaagaaggaggaactgggagaggacgatgaggacgggattcatgaagatgatttgcctttagatgtagatttgcacttaaaccgtggtgttgatatgaaagttgatactcaaattgatggttcagattcatcagaagattacgaagtatcgtatactcaacaacaaccgagtagtcaccgacgtagatgcaaatcagtagaaaatagcccgagtgattcaaatcgcgatcgaagggttaaaattcggttgatggaggagatggataagagttttgggaaaatggcaacttctatagcaacaatggcacagaagattgaaggtttgactaacatttggtcatataatggtgaggtggctgatatgcaatctaaacttgataaagagttgactaaaattgaagggttgactgaattacaagttttcagagctacaaacatattggctacaaaacatgatttgttgagagtgttcttttcaatgtctactgaaaggaagagatcttatgttctcaatctcttagagtatgggctttagccattgtgactaactataatgaataatagggattttttcagaaatatgggaatttaattggcaatatatactaatattgctttcctatatagtataggttttaaaaatttcacccaagaaaagccatacttaataaaatttcttttgctatgaagttttaattgtttttccattatccaatagtgttaaataactttagctatgtgatggcccttgtcactgtatttactcatgggaccaccggggtaggaacgaagattattttttgtccccgaatgttaattaggcctgtctatagacgaacacaggcaaaatgagtagggagacgtgttagccctaaataatattcttcaatttttttcataactagcatcatctactaagttaaatgtgattggattcaattttaagtgtctatcgtttaggttttaaatgaaaaaattcctaatttcaaacacaatttcattcaactcacattttttattttcttcccaaactttcacaaccttacactttgatcctcctccatctatcaatctcaacttgcctttttaactctttaattgtttgacctagaatcagttagggtggtcataactaaatattagagcaattttcttaaccaattgtgttgactaacttctatgtatatgcattagcaacaattgtatatgagtatatgttatgtagtatacataaaagaaaaacaaattcaaattttactacatatcacaatttaagtgttcatttataaccgataatatgcgaataattttcaattttatttacaatttctttgacacaacacactagaaatatttataaagataaatagtatcgaatctcttcacgataagtaagataagttgataaaaagtgtaaagtaggaggttaaacgatcagttttcacctttacttttcatttttaaaagaaaattaaatatatgtctatgaaagattgaacttgaaacttttaagaaccttaaaaagttttaccattacattaaagtactaaaattattattttaaccgttattaaactatttatataagcattacaattttttttacttttagtcacaacaaaacttgtgatgaaaaagtagaaaaaatgtaattaattataaatcatcattttaacgttgtaactaaaaggttcgtggttaaaagtatttataaaaaaaaatcacaatttattgtaactaaaattaaattagtaaaaatctttatctaaacactctgttttagtcacaaataatttttttgttgtgactaaaacattgtcactaaaattattttttttttttcaagtgaaggcctcaaatttaatttcgtcttaaatctcatatatcttaaaaccaactttgttttaaccgtaacttttttcacaaagataaattgagctaaaatacatcaatagaatcaacaacaaaattaaaaaagaaaagaaaatagtatactaaggataaaatcatattaactaacaatggacatgtttaaatcactaactaaaccgtttttcacgcctaaacaaagtcaatatgtccacaaaaaaaataccaatgaactattcaattctattcattttatttttgctattttaagttttttctaaaccgaatctctcatttattatcaccttaactaaaacccattctcacctaaaatcaattcatctctctaatcctctctttctctctctctctcccacaatttcctagtgaaaaaaaattaagaaattaaagttaaaaaaccattcaaatcaaagcttggtgagtttattattattatttgtctatgtttggttattattattattattaataatgcaatttgattattatgttgtttaattgacatttttgttgtttgatttgtgcagaggaaaagcataaggttaggtggtttttgattttttttgatttttttttttctttgttgggttgaatattaataaataaaaataaaaagagagggagagaaggagaaaagtaaatttttttttttttttttaaaaaaaatgggagatacattgacagaaaatagtggagggaggcaatcatcctctttgatggacagtttgctcggactcctaagaatccgagttaaacgaggcattaatcttgccgttcgtgatgttcgtagcagtgatccttatcttgttgtcaggatgggcaaacaggttagttaaaatatgagcattgttattgggcaccatgttcagcactttctataggtgtcaccttatgattggttagtgatatttcttaaaatttattttcttaagttatataggacccgctatttaagtacatcaatagcggtatgacactaaggaaggtgctaggtactaataatacactttaataattcttttaaaatatatatatatatatatattttgataaaatttatcactattctattctatgccatgtaacattatgacattgactgaaaaagttgtaaaactatcgatatggtgacatgtggcttggaagaaatttgatgaatttatgaaaaaagttaagcaagttcatataaagaaaaaatattaatgttttaaacttttttttccaatttaaattatggataatttgccaatatacgtatagtttctcttgttttgagttttaatttatatatgattttcgcatcaaaagatttaattgactttttttttttttaataaatagtattattaagtatcagtgggtgttgatagagttaagacttagttaagatgagctaaacgcgggcctaagccctatccagagagcccaaaaacaaaaattaaaattaaaaatacacatatttttaataattttgaaatatactacattttcctttaaaaatgacctaataattttgttgttacttagggaataattaatttgagggtccacatccaccccctctcaaatatataacaatttttttataataattattaaattaaaatatgtgacatctaatccaatacttaaatttgatatctacgttaagcattatttgtgccctttatcgttatctctctctttctaatatatattagtaattcaaatctataattaattctttaattaacattaatacagaaactaaagacacgagtagttaagaaggatgttaatcctgagtggaatgaagatctaaccctttcagtcacagactctaatcttcctattatgttggtaagtaagtagtttcttaatcagttaattaattattatatatgatttaatcaggcttggccttgtgcatacgcggactaagcctgcttcaagggcccaaaaaaaatattcctatttaaaaatatacatattttttttttttgttaattttagaaatactttatttttttctataccccattaaagtaactaattaatatataatttatgtgtatagactgtatatgaccatgacacatttagcatggatgacaaaatgggagatgcagaatttaacataaaatcatacatagaagcattgaagatgaatttagattctgatcttccaagtgggacaataatcacaagagtacaaccaagtaggcaaaattgtttggctgaagaaagttgcatcatgtggaatgaaggcaaagtcattcaagacctttgtttaagattaagaaatgttgaatgtggtgaagttgaagttcaactccaatggattgatcttcctggttgtaaaggtttataaaaactttatatatataaatatatctacacatataagtgtcttacattcatacatatatatctatatgtactttgtattatgtatctctttatacaagttcattattagatgataaaatgtttctgttgtaagaacattgctattagataataatattgtttaatcaatggtatgttatgattggttgatattttttttataataactgttaaattaaaatatgtgagatatgataatgaattgcactaataactgtacgatattttaagtgatgctaagcaattctcttgttgcaatacaatgaattgtattacactaaaaaatgtatgaatacgatttgaaaaattataatgaaggattttaaaagttacaattaaagtatgttacggtgtttagagattaagcatttaaaactctttttttttttgtagctttttaaaggattttattttttgtcatagttagttaaacttttaaaagtcatttttggaattttgatagctcaaaaaatacttttgttgttggttggataattagttaattagttttaacttttaactcttaaaacttttttttattagaagatcactttactaattttctcagaaagaactttttgaaaagttaaaagtaaaaggcaggatcgggcttggactaaggcagactaggcccgcgcttagggcctactcagcctaggagccaaaaaaatatttttcctttaaaaatatacatatttttcaataattttcaaaaatactacatattttttagataaaggcccaataatttttattttcttaagactcacccattctcagggtcgaccttggtaaaaggagaaatccaatcaaacaaatcttttattttcaaattggttgatagtccttaaagaccttatttcatggcatgctattattagcataatttaatactaaatttcacatattttaattttaattatatcaataataatatatagatatgttaaggagataaattttttttgagtgtagcgtaatggtattatacaatccgttaatagcttaatagctttaaggtcctaggttcgaatccatgacctctccctttttcccacccctccctcaccactaagctagccttagtggctttgttaaggagataaattgagaactatctttttttttttttattacacattaactaactataaccgtaaatagctttaattgataaatacccttttttttacaattaaagtaccatatttaacctcacataacttattaaaattagagttcctaacgcacataatgagaatatgacctataaaactgaatataaattaaagagtaatagaaaaaagataaaaattaaaataaaaaataagtatagagtataatttcatctatattaagctccatgtcaatctactttagatttggagttggtgtgaaatatatatttcttttttcataactggatttttcattactaaagataaatgtgacacttatgcatataattagaaggttttttgttaccaattttcctataaatattgattaaaaaaatggtaaatttctaattatatatatacttagatataagtccaaccagtgacggacccagaatttttattttgtgggggcttatttatgactgaaatttttttatacatatattataatcactcttattagatttatttaattttgtgggggcttttttactattttagcctataattatcaaattaaaaaaattacatttaattttttgaaaaggtaatatttttgttagtgggggctatagcccccacactaatacaagtgagtccgtcactgagtccaacaatcgtaagggctggttcacaatttaggtaggtattgtaggttttgggcctgaattgagcaatcagaatgagcttctccaaaaataccattttattaaacaaaatatcatttataccaaaatataattaaaacaaaagatagacctaacacattgcacaacaaggatgaaacattacaataagtacacaacaaaatagttaaaccttagatgtagaagaaattcaaatgattttaatttgtaagctaaaaaggattttgtcaccagaatttttatatgtatcaaatgaaacgtcttgaactttttaggctattaaaaattctatcgaactattgagattgttgaatttttcaaagacgtttgtctaattttactaacgaaagtcagacgtggataaaatttcagggagcacaatttagtacatctcatagttcgaggaggaacgatttgctagatatcaaagtttgagggccatgatttagtacatagacaatcgtcacgttagtaaaattgaacgaaattggacagaactcgttaaatacaacaatcttaatagtatgagaaaattttcaacgacataaaaaatttcgagagtattatttggctcatgccaaagcttgaagatagaaatcttaataattagccctactttatatgataatgataaaattaaatatatttattcatttggtactcaatattttaccaaaatattacaaaatttgaaaatgtatatcaaatgataacttgagctccatttttttagaaaatagaaataaaatattatgataaaaaatgaattttgaagtactctttatattaataataattaactcttttgtacttgtccatgttgtagaagactagaagtactactttttttcttaactatttaaacaataaaagcagaaaatgacttaactattatatttttagttgaaaaaaaaaaacttcccactaccatctaatttatgtataattaattcattttttttattaaattttaattaaaaagaaaattaaagatataagacctagatgtagtgcctgaacattattgattgcttattaatataattaattatattaatgggttgagattaatacgagttttgtgtttcttcaaaccaatgatcattacaggttgtggtgaaaatgaaagttaagaaaaatctttttttttttgagtcaagaaaaatcttatttaaaaaata

SEQ ID NO: 22303 - DNA, 4472 bp, Cannabis sativa
  modified_base (876)..(880): a, c, t, g, unknown or other
  modified_base (1038)..(1042): a, c, t, g, unknown or other
tatataggttttggcgttattccaatcatggattaactacgagtgttacttcttgataacacatatgtagtttctaaactgtaaagaatccaacaccataagagcagtgaacatatagaaaggaatttaacatcatcaataattttgtgactaatgagatataatggtggaaaaggttgatactgaatataacctatcaaatcctattacaatgataatactacatactacacttgatctggacatcaaggtgttgagattaattgaaatacaattctaattttatattagtgcaagtgggagtttgatgagatttaatgccctaaataaatgtcttttcaatataattggatttactaattaataacatttcatgctgcatggttcacatgattaatttcatgattttatatttattatataaattctattaaatccaaaatatatagttattcacaatgacaatgctgtcatcacagtggaaagtaattgtgattatatgcttcaaagtctttagtcccatgatttatcagtgtactggatttacactgtcgttataatcaacaataaaatttacttacaaaattttatgtggaatgtcttttccagggcattagcaaagtgtactagtataaaatgtattgtgtatacatcagagtggaccgatattgacagttgaaagatttcataaacttattgttatgtcttttctaagtcaatatcccttagttgatcttaggtcaacagatcttaatcttgagatggttaggttctggcttaaatatattatatgtattctttgatttgttcgttaaagctgaccaattggattgacccaatacttacatcttgggaatatggtagtgcaattgagtnnnnncgctaatcatagatatagaatccatagcttctataactattgaagtgaaacaatgatttccttcaagcttggcttaataagataaatgatagagcgctcatttcaataattatattagtttattgaaatattgtttacaagtagctaagtattttaannnnnaaatatattgaagggtagaacggtaaatttatccttactcgatgtaaataatctatagaggatctttaattatatggattgaaagaacaaatatttataacatatgtatatttggtatatagagcattctatgtaattaggagtgcaattctaaatctatagtaataagttaggaaatttacttagtacattttggatctacttattgagatctttgttacataagcccctagttcccgcactaactgggctaatattattttgtagtctcaatcgattaattttaattaatcaattaaaattttgaataagactgtcttgtttgtgaattttcactatgcaagggcttatttgagaagaaaagagagtttagggtttggttattacttaaaagactttgtaaggtctaattaataaatatgtttaatggatattttatatgataattaattataattattaaatagatagaattaaaatttatagagttagaattaaaagataacatttgagaaaagaatgataagtttcaaataaaatggcaaaattaaaacccaataggcctactaaaggattcgaccataaggttttaaataaagcctattttatccttttttttattccatttaaattctaaacttaaccctaatagctatcctataaataggagagatggctctaattttctaacctaattagaataacctaattgactctttgtcagacaaaattataaattcaagagaggctcttctatttttcgaatcccttcttctttttaataatttaaaggctatagtgattgagaatatgtccactatgtcaaagtaatacctagcaaagtgaggaagattgtgtagaaaaactgtcaactgaaggagatccaagttcagatcttgatcatactctgcaatagaaaggatcaagggttagaaatctagatggaaggagtcatattgttctactaaactcaatgtaaggttttctataactttatatgtctttaattcattattttagggaactcatatttaggatgttagattatagttttataatcaacatacatgttagtaaatttagattttggtaaaactagttctaacagatactacattcaaaatataggtagctgctagaaggcgtatcccaagaagtttagtgctattgatgactaaaacatcatcaatttgaccatgtttaacaaggtttagtttcttctctctgcaacactattctgctgagttgttctaggtgctataagttgggataagatcccttcttccagtaaatagtctttgaatttgaaatccaaataatctccaccacgatctgttcagagtgtcttgaatgatttacctaatggttccttcttcagtgccccagtaacggttgattcttgagattgtcccagaggacaaacccatcgtggaggaagcacatgtcgtgaaagctaaaggagaaaggagggctaggactccccctgctggacaagctttcaatgactccatctaggagatggaacagaaggccgattacttatgttcttataaaatgctaataacatacactaatgattccagtcttcaaaatattccaggactgatgtggcacaggttgcctgccgtgggagagtctgcgtccataagtgtggagggattcagcacttggagctggtcccaaatctctaatggaattaaggacctattttgtgaatctgctggccaagattgggataggcccttttccagttaatcccctcgttgtacaggctcttagctgggtggtatatcttttgcaaaatgaacaagttggtgctaccttccccagagtagatcctttacttttatagtgtaaaggctaaccctatgagggaaaaaaagaagctgagattctttaggttggacaagcatcctaactcttattgcccaattagctgcaccaatcgtatccatgacctccaggaatactggttattttcttttgggttccctgtgaaaaaggtgccctcactccagctacacttccagttgccaggtattattgacacacaaccttaatctcccatttctaaaatttactttactttgttttggttgttttattgatggtttcattgtaaatgattgacttttgccagaaattccatctcagagcatcaaaactgcaaagatagccaaaaaaaaaggatcaatacatggcctttactgaggagtagttaagggtcgagaaattggtcacgaccaaattactttgtaggtctagcctcattgcaaagtttcagaacattgatcctgttcacctctgagggcaacgccatgctctaaaagaggtgaaagaagccattgcaaccaacttagccattgtcataactgcggcggctaaaaaggatgaactctttgagcttgattgattggcccatcatccaaatcccttatattaggaggaggaaattttagaaagattccctgcagcgtatgtttgatctagatttactaaaatgtatgtttgattataatctataaatctaacatcctagtaacatcctagatgagaatttccttaaacaatgaaataaacacataagagattaagaaatccttacattgatggcagcagaatataatgactccttccatttagatctctagccctagattcctgtcttgcattatcaagatctaaacctggatcttttctccttcaatttggttaaacacagtcttcctcactatgctaggtattgctttgacatgagtgggcatactctcaattcaccataggcttcaaaattatgaggaggaagaagagggaattttgaaatagaagaagaagaagctctctctttattttctaattgtttgaccaacagagactggagtgttatgaaaaagagctataattttctatttagagggtgatactatggttaggtttagaatttaaatggaattaagaaagataaaaaaataactttgtttgtccacctaggccaaacccttaatggtccttatggttaggtcttatcatttaacttattaattgttatcattgaactcaaagcttggctcaccaatggtaattttgaattctgagtatgggtagttgttttatcacttggaaaatttttattagggtgtattatgcaggtctggaaagtttggttgggtttggaaacgatttggttagggttttgaatttcttagttatgcttgtaaaatcggttactcagatttggcagcagggaaacccaaaaatttagcttgtcgtttcgcgtcaatttcaggtttgtagttggctgattccctgctagtttggggtatttccaaattaagttgcagtagataggtttttggtttaaaacctaagtcctggtcgtgatttagcgagtcacttatgcgtgttaatatcgatgtgatttaggagccta

SEQ ID NO: 22304 - DNA, 1293 bp, Cannabis sativa
ggttgtatttttaatgagctaaatcctccgctttctttgtgtgatattgttaaggccgatgcctgttaatttttaatgaaactcctttatccaaaaaaaaaaaaatgaagtaaaaattcttgctgaaaatataacatttgtcatcatattaaaaggagcgtaaaaatgagtgggatagagaattcccttatatctcctcttattttaaatattacactagaagtctcttatatatattattaactattttttaagtaattgctctaagtcctgtactgatttggcacattatttaaaaagtattaaagtgattaagcaagttaaattgcagagtaccttttcgattataggcacataatatagctccaaaatattagtttcaaagctaattttgaaggcgtgcgtggtgccctgctcttcttccatggcaaaaaagaagagggcagtccgaaagcctgcgactgcaacccgtgattcgactcttcaagctgctgagagtccttcggtcattgaggatggattgggggaggaaattttccacgaaccatgtgagatttgggggtagaggaagaaattgctccgtgccctgagaagagaagtggttcgaaacctagctgctgggcagaggaggttgagagagctgatttccaggctagtgcggtggatctttggagcaaattcaaatctgaccaggtacttactccttcaactaaacttgtgtttactgaacccatcaaagtgggggatcaattagttgctaaaattgacattgaggaagtagaggttgaagcctcctattggaagaatgctattgtttgcatagtgttgggagcaaacccaccgcttaaggtgtttaaggggttcataaatagggtttgggggaaacttggaattgagaaggtggccagaatgaactcggggttcactctggtgaaattcagggatgaagcaactggagacttaatcctagaaaccggtgtgatacattttgacaaaaaaccagtggttctccgaccttgaacaactgatatggatgctactagaatgatttaatctgtcccagtttggattcggctgaatggattggggcttcaatactagggcaagaacaaccttagtgcgcttgtgagtgtgattgtaagccgatgatggtggacaaagtcactatggaaagatctatggtaaaatttgctaaggttcttgtggacatggttatttctgatgaacctccaaataccatatcgtttgtaaatgaaaggaaacagttggtggaacaattggtggagtatgaat

SEQ ID NO: 22305 - DNA, 4271 bp, Cannabis sativa
tgttatggcaatgatattttcttctgaatggacaatagagtgaacattgttatggaacatagtcatattttagtcacaagtgcactataagttgtcgggtggcttcataattcagttgtttaagttttatttttggctcaaatttacttcaaaaacttgattcagaatactgcagctgtcacatcttgaagttggtaggtacattgggggagagaaagagagagaaagtgagagattcttcacatgttggaggaataataatattgttatctttgtagttctgtattctaagcttggaaagacctaggagtactatatatataggctagtaatttgactgcttttgggacattcttctggctcttggtgaatgaaaaaacttgcacttgattgtgaaataaaagccccaccactaattcacttatttatttacacagttgttatatcaaaccaaaagccacaaagctaaaaaaagattcacttcatcaagctctagttgttgctctcattattactcttatatatatatatatattaatttatatatttatatttagtgttattctagtattgatatgagaataaagagaatacaaattgaaaagaaactacaacatgagagcttgacaaggccaagtagaatactaaatttggcttgaaatggacatatcccactccaactcccaagtagtggagacatctagaaaagaaaaagaaagagaaatcatttggtgcagaataggaccaatggtacaatattcattagaatataattaaattattattttaaaaaatagtactaaattattatatgcatatataaacatgtcttagtcaaatttgtatgtaaatcactccttagtcaaacatgtggcgactgaaagttgatttggtgttcataatttttttgtgttaagataaaagtatatttgttagttattttaaacatgtaattcaagtaaaattgaataattaactgtcctttgcaataatttgtgtttttttataataattaattaaaattgataaaatttatatttaattatactaataataattattaaagagcacaactgagagcacaaaagaacaataaaagaaaaacaaaaaaaaaacataacttgtggtaacattgttttaacctaaatgttaaaacatttattactacttcttatctagcaacatatatacttaatattttttattatgtttatttaattaaataatcgattatgtttattaaattaaataataggtaagaaatatacatactagctttcagtttatcattattgtattttcataaagcacattagaatagtgggtaaaaattcatattacaaatactattagatatccccacatatgtggcaccataaaaaaattatcacatggcaagaaggtgagattaacctaatgaaaactctttaatggtggtacgtacgtaattggttatgatttaatcattaatagaaatactattaataattatatgaaaaatactaaaacattattggtgtctagtaggtcgagtgagtcacatataaaattaaaaaaaaaaaagtaatttttaaaaatattactaaaaagtgctcataataatatgttattttatattgactcattaccactatttggttgacctaaatttttctgttttttttttcttcttctacatttatcatatatgttttttatttcgtaccgcaaaattttgctagatggtctatatgagtttcttattcggtcaatagaaagaaaaaaactgaaaatatataaaaagaaaagccatttaatattagtgtattactttctctaacatttattttttctaatctttcatgctgccttaactaaaagggaaatttacaaaaatactgtaatttgggttaattttgacaaaaatgctgtcacacggaaaagttttcaaaaatatgtatttttataaaacaccagtaaaacacaaagcagaacaactcaaaacaacagtagaacaactacaaaacactagtagaactccaatgaaaacttaacacagtatactgcagtatgaaatttataaaaaaaacatagtaaaaaagtaaaaaataccgcctagcagtatttttataaaaaattaataaaagttagtataccatctaaatttccctaactaaataattgtgttgtaaaaaataaaatataataaaaaaatcattcttgtgttgtcaataaaataaaataatcatatattcttttgctcatttcattaatcacacactgctagttagtgggtaaatttgatttacatattctaagatatatttcacttatgtaaggcgccactatagaaaaaaaaatagtcacgtggatcatatgaaaactctaaacatataatggtacaagctaggttaatgatttaatcactaatatccttaaattaaaatttaaaaaatttacataatacatctaaatataatattttttattatttatatttttacaaaacaacgtgtaaataataattttttaaaaaaacaaaaacaaaaagcatgtaaacaatggcctgtagaaaaagaatgtccgtagtaagtaaaaaaatactcagaataattctaaaaggtaaattttttatttttatttttattttttgatatttatgagataatcccttaaaataaattatgaaaaatgctgaagggtaattcatcatcctacataataaaattgttatttaagtatactgttaataataagattattatattatttcctactcactacatcatcctattttctttatctctatatctttgtttacttaattttattttttgtgtaagattttgctagattttatactataatgaatttctcatgatcaagcagaaaaaacttttattctaatttttcatgctgccttaaccaaaagtttcatcattataaaaaaatatattttataaaaaaggagactctctctctctcttgtctgctcaattgacattattgaaaaataaaataaaaaacaaagatggtccacttaaacattaatcaaattcccctcgtgcatattatataaatttaaatacatatttataaatatatagcttcttcttcttctgttttttttttttttttgggttaataataattgcaagaaaaaaccactagttgaaattttcatcaccagttgaatttcatgataacatggaattttcggtgtaagaacaaggacctacctttatatgaccaaaacaaaaggacaaaaccaaaaacgtataaatataaaaatggacaccttttgcaatcactcgttttctcatatcagctgtcactttataaatatgtataatatataaatatttatatgatcatcttgctcatattattcccgagaaaattctcttcttctcttgggggtatcttttgtgttatggaatgaacctatatttatatgtacgtatatagctactagttagctagctagctagtgatgactaatgtttacgcaaatcttttagcattagtgtaatgatagggtgttgaagttacaaattaagcttaaaaatatattattattattattgtgctagtcaaaagtgagtatttggaatcattgtttgtgtgtgcttattgattataaattaaaatattaatttctttctctatactgctcgccccattaagtttaagttgtctccctttctctcttataggacatatatataatgtttattataccaaactaaaattggtaaaacaatagctaaaaattgatgagattcggtcttatatatataaatcatgtgtctccttttttgtgactcaaagttagatgcttattgtttctttatgggtttctattggcattttcgatagtctcttatctgtatctgtaggttgtcaatctgaacagagaaagaaagaagtaaaaataaaatgctagagaaaagagccttttttttttctgaggttcttgttccacactgtctttgatgcatatatatatagttatatatatatatatatatcttttttcctataaagaagttaggtcaaagtagtaacaacgcatgagattgaatattaataataagtactggcaaaattgttctgatgaagtctatcaagtttagtgactaaatcttcatgtcttgttttttttctcttcatttcatactcttattattattattgaaacaaaaaactttgggtgatatggcagatagatatggttcttgccagtagtgcaaacttttatatatatatatttgtgtgtgtttttttttttt

SEQ ID NO: 22306 - DNA, 1199 bp, Cannabis sativa
attagttattttttcaatattaaattattttatattgataaaaaaaatatatattttttttcttcacataactagcaatgaaataaaacaaattgttaaacataagtttttaataatttgtttgaggatagtagcagtgatacccgatctgctttacatatatcaaatataattttttttatatatatatatatataaaataatattttggaatatttttcaacatatagataaaaaatctcattttaatttaatattaagttgtgtatttaattaaatttgatatatttatcttatataggtgtatttttatttcactcacttgatcgtgctatgatgcaaggatttcaaaagctatcaatgaatagtgttttttcatgagatagaggtgttgtttgaggatgttatagctttattgtttaaatttttgagggcagttttgttgtatgagctatcctagtttcaggaggtgtcgctgctgattatggattgatgcattgtcattcatgtgtgattttaatcacgatgtcataaaaaaataaattattattattttatgccttcaacaacaaattaaaaggataaaaaaaaaattgtatgtataaaaaaatatttaattttgttttaaattgtatgttgaaaaaaaaattatatgtaagaataaaatatacatttgatctattaagttataaaatatatttgtattatgtcaattaatatttaatctgtacaagtacggattttgaattttctcggttacttttacatgtcaatcaacattcaatacgcacaagtacggattttgaattttctaatccaatccaatctgcacaagtgcacatatccacactttacggattaaattgaattggatcgattattttatgaacacctctcctcctaatttatttaggaataggaaattgataacatttaagtaatactgaacatcgggcgagttgaccgggttttgggttcgcgggtttcgggttcaaaaaattatactcagacccaacccatgaaataatttgggttcgtaagttcaggggttcgcaggttcgggttgaccgggttggctgagtcaacgtgttgacccagtcaactctttttaaaaactcaaattcccactaaattaacattcatttaataatgtgggtattattttttttttattgctaactatttttatttttatttta

SEQ ID NO: 22307 - DNA, 3185 bp, Cannabis sativa
aaagtgacgcaaaaaagtttgtgccatttcaaaactgtcacaaaaaacttttaccgtcggttcttaaatgacacataatttgtggaaatacatttttttgttcatcttttgcgtcagttataaaatgaagcataaatataggtaagggaaaattacaaatttccatgcaattttcctacctgcattttgaaattttaatatggttttatataacagtaaatattgacaatatgcaactgaattaaactgagtaagactcaacaataatcctacttaggttcccacaaaaacttctcagaagaccttcctatactcttctaaaaaattctcatgaaacataggaggtttgattttatgctactgttcataattataaatcaaccagacatagttatatcttacatgttatagacctaattgacacaatcatttcaatactcattcaagggatctcataattaataattagtccaactaccaggaaaaaaataaaaagcaaaaccctttgaaaataacaccactagcaatgtgactataaaggaaatttaactattttatttgtgaactgtaaaagaaaataatgattaatggaaagagtaactgtatagcacatacattaaactttacaagtgtcacttgatagagtaactgaacaaagaacttcgtcacactgcaaaatccaagaacacagtgctcgcattttaccaaaatgtttaacatcactaagacccataaaactttcattctgggtgctccctctcaccaaatctatatctaggccaaacaaaacagaggcaaatcttttgtctcttttttgcttatctaggtcatctctagaattaggcttgatcaactggtgattacttacctgagagtaccattaattatgaattgaaacatgttgaagcacaacaatatcaataaaaagtgattagataaagattggaaaaattatcccttttcatgaggtaaacagatcattattattattttcatttgtactctttggaaggaaatggcatatagtaattcccttactttgattattctacaatttttgttcgtgtaaaaagtaagctttgattttattaatgagcagaaacttagtctaaaaataaattgagaatagtatcagtaatattttaaacttcagaggtattcaaggcattcacgtggaatagactcatcatcacaaattgaaaaggacatatataaagacgatggccaaatataatagagatacatactaaacagcgatgagtatctgggtgttcagcgttcaaccttagtagttattttacaacctacagtccaaagacaaattaatcatcaattgacctttatgcaactcaagacaaaaaaaaaagtcaaaatacaagcttctcagctgcatgcttaaacaaaagcttacctgaaaagcaaacaaaatcttctgttttatcacattcccctttaaagtattttcttttactctgctaacaatatctcaatttactaatttcagcatccagtcctatgttcttcggtcttcatcaaacactgaattatacacatatatttagaacaagaagcgccaataattataatgtatgacaaaactaatctatatcaatgggagaacgataagaagaaagagtaagtaatctatcaagattttggtggggattacaatataaaggaaaatatactttgaaatggagtgttgattatcatgtagaaaattgtgtttggttggagataaacaataaatttgtttcaagatgttgagagtcctttcaaatcactataagaacagatcaagtcctaggttgattgatgtgtggcttaagaaaatatgaatttcacttctctttctctctttctgatctttcaagagaatgggtagctaatgtggggtttaagtttgtattatgaatatcttatataaataatgaacagacaatacttttatatagacaccaattaaaaaaataatatacctacttgatattcaaaaaaatttcacctaaaaaaaatagtaaataagaagaataaggttcgattatatacaaattcactaattagattcagatagatttgaggctttgcaaggaaaatatgagtatcagtaacaaaacccaacaaatagaaaaagcaaacacctatatatcaaacataaaaataagtaccaaaaatataataaataagtgaatagaaacatactctgtccaaaaatagctttacaatgaactgtcttcatttcaatgctttgcgattgagcaaaagtgtcaaccatctcaaaccccacctgttttcaaaatccagtcaaaacaacaccatcttaattttcatttttattttggttcaaaaaataatgaaattgagaagtataattgcattatatttagttcctttatatttatgacctgggttttcgaaacccaaaaaaagcaatggtcttgttggagctcaagctaaatgataatggagtttaggttagtgttctgtgatcctaaaaatttggagaccaataattgtaaacaagtgattaattacttctaatctaaatacaaattaacacatacataacaatataaatgaaacttacgtttttgatttggcccatgtattcgaggtcttcagggtcggagttagtggcttctttagatggaggttatttttccttctaattcaatctgttggaggtcgtctttccttttaactctaagaccacccatcactcctagatttggttgaagaggacgaagtcacgatcagtttgagaaggagaagaactcgaagagggggtcaccatttcgatcgccagagctctttcgcaaaagggggtgagtgaaatctgatttcaaagcggaggtttagggatttcatagagtttagtgtcatttactcactctcaaatgtataagttatagtcagttttaaacctcacaaacaaacacagtattcgagtgttcataacagacgcaaaagggaaagaattatttaaaaattttcccaattgccgtcggttttgtttttaccatcgctttgctaaacgacgtaaattatgtattattagtgtcatttaaaaattgacgtgcctaatggttcagttactattcacgtcggtcaacgcgatgaatagtcgcgttgaccgacgtgaatagtgaattttctagtagtggatagtggtacccctttgtgaa

SEQ ID NO: 22308 - DNA, 3453 bp, Cannabis sativa
aaaataaatatgttctataatcactattattttttaattttaaaaacagaaaacaaaagtgtgttttataattttatttttatttttattttatgattttatttaagtcgggttcaagttcacgtcttgggctggggctgtggtctgagtttgggattggggccagggtcggagtctgtgtcccaagtttcaaattggagttagagtctaaaatattgattaagaaaaaatctatttaaatttgtttgaaaataatttttttctataaatttttaaaattttaattctcaatttaagaaattaaaaagtgaaaacagttttatagaccatatttttggaaaatatttttatttttctaattaaaaaaataaaaaactaattaaaaaaatgttaccaaacatactctaaaaaaaactaaatgtaggggtagattattattggcaccacattaaaaattacttaattctctaaaaaaaactaaaaattacataagaagatatattatttattattatattctttttttttattaaacttgtaacataaatgtagggattatttaaaaaaaaaacacaaaaataataaagaaattacaaaaatacggttgtacgaaattttaaatatttttacagtttacaaattttatttacaaaaaatgcggtcttttgatatatttttatgttgtacttttattattttttgttgatttttcattatttatatattattttttttttatgttattttgttgtagttttgatgttgttttgatataattttcttgtgttgtgtcgtgtctttctttatttatagaaataccataaaaatattaaaaaaaaattaaacgtaaaagtataaaaaaatttacaagaaattacaatttatgtaattttttttattactatcattttttttaaaacataaaatcattagttataactaatattttttaaaattatatttatatacattacatctgattagtactcttttttctctttgaagactttcttcttggtgttttgataatggcaaacgctttcaaaaaataaaataaaattagatattgattactttcaacatcaaaaatacatccaatccaaccacacatgtatgtactctcttattataattattttcaaaatttaacattgcacattttttcatcaaataattgggcatcagtaatattcaatatattttatagatgacggttcacgattaattagtaatattttttaaatttttttttgttaaaaacttatatgaaaactgatatttaattacaccaataataatatgatactgagtaaggtagcatagtactttttttaacaattctccctaaaaaattggtgattactttttaatcatactaccttgaatattttgactttctccacaaaaattacgtgacaagtcatgagatgactcatgtatctatcttaaattataactaagtggagtttactataaatacacagtcacaaacaattcaattcataactcaagtcaacttgtgaaatcctttaaatcaattatcaacttacacacaatcaatttgtccaatgttaaatataattaactaatggaatatttataattatttatttgcacctcttaagatgatatcgatgatgatgtgcctttaaaggtgcatatcttatactttgaatcttgcaaaccatgttaatatgtgagatggttgaaagtagatataatattgctattgaatatcagtgtgtttaatatttttttagatgtatgactttattattagttagtaatattttttaaaagttattatattaaattgtatgagatttgatatttaatcgtatcaataataatattaacatataagaaagtacaaagtattactggtgataattcaaaagaaaattattaaaaccttatttgaagtatgtaaaagtaaaaaaaaaaagaatgacatagaagacgcataagatttgagcaaaagtaccaagacatatggttgtatcatatatactatatcactatggaatcctattgtccattaatatgctaagctaaaagggatgcacacgggcggggaattagcggggagtatttttcctgtttccatcccagttaaggattttaattcccatccctgcttattctctatcggggacgggacgagaaattccctaatgaggcgggacggggtggggaatctcctattgtaaaaataaagtttattttaaaaatttaaatgtataacattattaaattacataaaagataaaatattacacattatttactatttaatatagtaattattatacaaaaacacaacttcaaaaattgtaaaaataatattaatttacttaaaaaaatataaacttatatataaaatataaaataaaaataacaacataattaataaattaaacgggtccccaccggggtggagagtgtcatccccgtctctgcccccgtttaacatttggggacaaaatttgatcttgtccccgccccgttccccattaattcgggaattctcgcctcattaggggtgggtcctggcggggccatccctataagaaaaatgtgcattcaaagtgttctatggctaaagaaaaaaaaaatatatatataattttgagactatattaatatttaattatcaaaataataattttgtagtgataaacaattttaaaatttttaggagttctaaaatttaattatccatagctaattttttttaaaaaaaattaaagttagatattgggaattgattcttaacttcttttgcttatagcatgtccaaaagttaaatttgaaagaacgtttatttagttgaacaatttaattgataaaatatgagagtgctatattattagataatatagaggaataaatgtcattttaggaatttatttatattgtattgatgctatcttctattttatttaataaaaaattaaaataaataaagttatacaatttataattaaaacacataatatatttgttttatttttaaaaaatatatttataataacatctttgaacggcgctatactgttagagtgtttttagacgtaatagtgtaaaaaattatgtaataaataaataaaataaaatattatatttttagatgatgtagaaagttgtaacatctttcaagaataataccattagactcttaaaagcataatctctactactataataaacgagaattggtaaaaagtcactattggtgcctaatactctcatcaatgtcataccactattagtgtaattaagtatcgaattgcatataatataagaatataacttttagggaatattactaaccaatcataagacgtcacctataaaaagtagtagacactactagtatctaataacaatattcataataaacaatattttgttatattttcttattatttaatgttgaccgaggttttcggc

SEQ ID NO: 22309 - DNA, 2846 bp, Cannabis sativa
  modified_base (2140)..(2140): a, c, t, g, unknown or other
ttttttttttttttttttattgtgcagatttatgttttgttttatttatttttttttaggagaaatattgagtgatctctgttttttgtaattttggtgtccttcaagcttttttgagacaaaagtgggaaattataagtgaaaaagataacttccataatgcttagttagattttttattgcctcaattttgtcaaaattttcattttagccctaaaatttatggtctagagtctagagtgatcacttttcatttttagatgctcagcacgctctgtttgtgactgaaaataaattatgaagcttcaagccaatattttactatgatacattcatttccagggaaaaattttcgaatgaaagttctatatctctctttagctttctaaaacatcttaaatcgtctaattctgaactatatcgagagagttatgacaaaaatactattagtcatcgcaattggaaattagaaaacgagagagccatgactcatgcaaaagaaacgtgaagcttcccatattttgtctataaaatgagttggagctaggttccttcatcattcgaacttggagaccaattttgggcattggaggattttgggaaaccttcctaattgtgtatttaaaggggctgagagcttagatctaatatcattcaaaaattgagagaaattctgagtgtagaaggagagcaaggagcggaaggcatcactggaggactccaacattattctatctcttcatctttatcttttatgtaaatttttattatttttcaatgtcttctagtagctaatttcttttaagaattattatgcgaatcacttgaatcaattttatggataaatgtgattgttcaatttcttattcttctctttattcaatttcatacaatctgcttttattttgcaattatttactagccatcaataacttttatttatgaatgcaaatcaaaattcttgaaggtgagatttgaaaatcctcttactgttatggatgcaaattgatttaggatgaaagtagctaagttatttgtataattttattggttcttatggtaaatgttatttttgtgattaaacttcctataggaatataggaagttttcatatagattgagtttataagtcttaaccagattataaacttcttaactctatttatcaattgaatagaaagaagagaaattgggtaattacattcagaagtaaaataaaggatagttgagaatcataataattgttgtctttattattgttatttttctaaattttaattattgccttgatttatttactttttctccaacaatttttattaataaaataaaactaaagaattaattgattggtaattgataatcaattctcgtgagaacgatactctatttattattatattacttgattcgatttcgtatatacttgcatatcaattttaccaaacaaaatacatcaaaataagagtttcattaataacaattttatttgtacaaattatataagggaaccgagttccatattctctacctgatccttgaatttatgaggtggcaagccttttgtcataggatcaataattatcaattcagtgctaatgtgttgaatgactactttattttcattaacacgttctctaatagctaagtacttaatgtcgatgtacttgctttgacttccactttttttgttcttagccaagaaaacagtagctgaattgtcacataacattcttaatggccttgctatggaatcaaaaactctacggcttgacatgaaactctttagccatgcaccatgtgatgtagcctcaaaacatgaaacaaacgcatcctccacaggagaagtagcggttaagtttgtttgttactctaccatgacacaactctaccaacaaacataaatatgtaaccagatattgatttacgtgaattagtataaccaacaaatatgaatctgagcattcaactacttctagattgttggttcatttgaacataagttttaatccttagtaccttgaaggtacctcataaccttctttgcagatttccagtggtctatccccaagttactttaaaatcttcctaacactctgatagaataagcaatgccgggtcttgtgcacacatgagcatncattaggcttccgacagcagaagcataagaaatgttcttcatttcttctctttcaaaatcattctttggacagtggctcaaattcagtttatcacccttcacaatgggagcaacgctagttgaataatctttcatctaaaatctttctaagactttgttgatgtaggctatctctatgaatcttaatgcctataacacaggatgcttcacgcatgtctttcatctcaatgttctttgaaagaaattatttcacttcacgcaacaactccttatcattggatacaagaataatagtgtccacacataaaatcagaaagatatcttactcccattaaccttcaagtaaattcaaagcaagagtacaccttgaaatttcagataccattggcgagatgcttgttttaatccatagatggacttcttaagcttgcataccaaatgctcactttaatataggagaatccttttggttgttgaaaaatcaagatttatcaaatatcaataaatattacagaaatataaaactgtaaacatctgcagcagcaaaatgtaattctattactgcagaaaatagttttgcaaaaacaaaccagaactgccagaatataaaaataattgcagaaaattaaatcacttgacataagagatttgtacgtggtatcagtgttctttcgaacactcctagtctacggggccacacccagag

SEQ ID NO: 22310 - DNA, 6940 bp, Cannabis sativa
agtttattgatgattaatgattacaatctcataagaaattaatatatttaaaaagtttgattgggttcaaccaaaataatacaaactaataaaagaagaacgaaaacaatagagaaatgttaaagggaagaacgaaaacaatagaaaaatgttaaaggggtatcagtagtgccaaacaccctcttacgtattaatatcgctattggttcaattaagtaccgagtttcatataatttaatataatagcttttagggagtatcgctagcaaatcgcaatgcgatatgtcgagatggtgctaggcaagacaccactcgctcaaaacaatattaggaaggataagaaaaagctcaaaacaatattaggaaggataagaaaaagcaacaatgggattttggtgtcacaatctggagacaaagacagatgtttcccggcccaaataatgttaaatcaaatcaaaatggtttacaattaggggtcatttttgtagtagtagtagtggctatggcccatggccattggctattggccgaacaacccattatatatcgtagtcccctctccatgcgcttgaaagcgacactgcgttttggaaccttccaaaacgaatagaaaaatgtctcagtaaggatccaactgagagggtgcccagttgatagaaaatacctgttggaccatgtaatcccatcactcattttcacttgtttttttaattaccttattgtaagaaaagagcttggtttatccgacagtgtccatcaaacacagaagcacacgcttctgtgtgatcctgttatggtcctgtacaactcatcttctgctctgtcttcagaaaagggtctttgatcccaccaaagataagccttttagaatcttttagagtagaacacagtgactgagataaagatttacatatatttatctctattttgcatttttgtatgtttttttctctgtttgtaaattttaaaaaaaaaatgtgctcatcaagatgatcagggtggtatcttaatctactgatgaaatgatgatcatatttcataacgagtagtccattttgtttttttacttttattaagtaaagtataaatagatgcttagtttaatatgagatgaaaatgaaaacacaaactcttggattagagagccttcaaagcataagaaataataataaatgtaagtgttcacgtgaggtttctttttttgcttcctgattcataaacttaattttaaacaaaaacttcaccatataatagctgaagcccatttaccaaaatgagaaataatgcccttttttcggactcatcctaattaactgaaccagaagcaaattcaaattgagagtagagaaaatagttttcggacttctcttttctaaattcgaattttgtcgtttagaacaaaattcagaattaaaaaagaaagttcaagccaaacgctatttaattatttaatttaactatttaataaaataaaagaacaaactcatcagccaagtaccaactacctattaccattatagcccatctaatttgatggcacaaaacatagaaagcaagctacacaaagcccaagaaactgacacatgagaagttgatctttgttgagagagagagaaagagggtttgtttgttgtttggacaggaaaacccaatgcaatgcaagctggtgtaccgtgtagtgagtcgtagatacctgtcggttttaagtctttgctagcgttatgagaaatcactttctctagtgggtattaggatcagctctctctctctctctctctctagctgtgtttataatagtagggaagactaggggcatggctgtagctactcgtaggagcatcacagttgttcatgcagcagcctgtgtagtgtacctgtatggttcattttcttttttatgttttgtgattcgccattaatgcttttggaaagtttcactagttgagctttgcttttaagttacagaggaaggaaaccaactgcactgattaatgtcctgtattaaattcttagacctgttacgttatattgattaataccaatagttgctcttaacagaaatttgaaataggcttttttttaggttagaaatttgacatttttatttttgcataatatgagattatgaactcaaacctcactgagatgtttattaaaaattttctgaaaactccttttatttgatattcatttaagatactggattttcagtaaagaaccagtagcatcatcaattgcctctaaaattattggttcaattattttgtttatacagaaattgccaagtgtttgatgaaacaacaaaacgagaaaaggcagtgagaaagaaaaagacttcttattggagtggtttggttggttgatggagcacagtactagcttcttgtttctcgagccccgccgtttgtaatcgtatttgtcgctcgtgcactttaaattaaaaaccaattctcaactcaaacaccaaaacccagatctcgaggctctcgtcttatcccgcagccgacacctgttgcagagtctaagtccatactcctccacacctttgtttggcctctatcaaaaactctctcctttccttcttccgccattttctcttataaactggtcaccctctctcattacctgtattgggttcagtacaaagtacttgaacagagcttggccatattttaatatttgactatttgagcaagcaaagtgtgaaactggtctttctacgtattgcattaacatttgccacaaattttggtgggtcggtgatattattgtatattagctcttgctttggcatttagctcgaggtacactcttcgaaccttgtagctttggtctctgtttcctacatttgattattctagcatatccggttcttttgggtgtgacttgatttttatttttccctttctttgatatttaagtattgggatctataatagagccttttgaacgtgtaataatacgttgtcattggttgtctctttagtttggtagttggttcctagtacttacccgttctcttatattttattttgaaatttagttggcttacttggctttggtcccctttatttttgcataatcagggagcaaaactcggtccgtgagttgtggctttggtgactacaaagggtttcaactttcaactattattctttgagattgactggaaagagtgttagcagaattggtttttgatgtgtaatacttagcttaagatcaagacatgctgagctcttatgaaggagaaaatgatatgttcttcgactcgcaggagtttttgtcatctgaagagtcaagcgtggctcaggaagagttgagtagtagtaacttggagtatgaaatttggtttagtgagccgagtagtgttgaggaaagaaggaaaatctttctaacacagatgggtttagctgaatttacttctaaaagtaatagttctcgagaggtggaaattgaggtcgatagctcatctaagataatggcgagggacagactagttgagtgtggtggaactgtttctcgtggttctatgttttctgttagtcacattgaggaaactttggattgttgtagaggggaagagagtggtgaagcaaattctttgtctaatgtgctacaccaaaaagaagatcatagtatagttttagctgtagagtctccacctaaagaagctgaagttcatgtagaatgtcatactcttaatgatgataccaaaaaagtgaagagttggtggaagcgttttgtaaataagagcaagggaagagtcagtagagtggcgtgtgatgcctcaaaatcagtaatgcaaactactaaagcatcaaagctgaaggtgattcataacaagaagatgtgcttagagttcacggcccctgtcattggacaagaaatccgtgctcatgagggcttcatttgttcgatgaagtttagtccagatggtcagtttcttgcaagtggcggtgaagatggagttgtacgggtttggcgtgtaatgacaatggcatcttctgattatttatcagctaaaggaagcttttgtagtaaactgaaggaagggaaatccagttttcaaaggaaacatccaatccgtgcctctgttatctttcctgagaacatttttcggattgatgagaccccagtacatgagttttatggtcactctagtgatgtgttagacctggcttggtccaattcaaatgtgagtctgccttttcaaaattgagttgttcttttgttaaaattagactaattagttatatatgctgtcttattgagctggaaatgatctttttcttattagtttttcttttgctttgctgcagtgtattatttcatcctccaaggataaaactgttcgactttggcaattgggtcgcaaagattgtctcaacaagttcgagcacaataattatggtaaatatagttcgaagcattcttttaattaaatagattttgccattcataaatctaatgattttgcctttctattataaccagttacctgcatccagttcaatcctctagatgacaattacttcatcagtggctccattgatggaaaagttcgaatctggggattatcggagaagcgagttgttgattggactgatgtccgagatgtgatcactgctataagttaccaacctgatggaaaagtatgattcatgatacctttttactgcataatttctgaattgtaaaatttccctccaaaatactaaccattttagtctattttacacatgcaggggtttatagttggctccatcactggcacttgccgtacctatcgaacatcaggtaatttccattctctcattctacaaaagaacaattccatttcttgtatgctgtacatgaaatgaaaattaccatccattggaagtgcctaatatattgttatttctatgcaggcgaatgtcttatgttggattcacagatacacattcccggtaaaaagaaagcttcaggcaataaaataactggcatcaaggtttgcactgaatctctttctagtttatttctatttaatatttttttacacctaatgcttagcttctattctgagactcaaagttcatgtaattcttatagaaaaatgtttttgctctttccagttctcccaggataaaagtcaaagtgttatgatatcttcagaggactccaaacttcgcatatttgatggggttgatcttactcataaatataaaggtaagagcgtcaaatctggaatcattttcaatatagttacctgtacattgagttttttcttcttttatattagaacttagtagaacatgattgcaattctcaaataatagatatcttaataaagtggttgtttaatttaatttgccaatttgtgattgattgcattattttcttgttatgtaatcttatttcattttaaaagattggcaacctacacttttctctgttttttttttttgtacagcctacccttttctgtaatatctaatctagattatacactgcatcggtgcatctaaattccccaagtgattttgtttttcttgggtaaaatgattttgatttctaatagtcctttacagctgggatttccacttgttacaatgagtgttttctttgctaactagtccaaggccacttgtttttttttttacttaagagtgtcattatttagtgagtaattatgtgcacactcaaattactcacaaattttgatagcaaaatatttcaacttttcacttttcacacattcactgaatctacacagtggtactaaaataattaatgcaacatttgatctagtcttggtttactgatcttgtcatttttgtaacaggtcttcccaagtcaggaagtcaagtctcagcttcttttacttcgagtgagaggcacataatatccgtcggagaagattctcatgtatatatctggaaccatgatgccttgtctgctccttcgtcgaaacaaacaaaatccgttcgatcttgtgagcatttctttcacgacggtgtgtctgttgccattccatggtcaggaatgggaacagaacagaacaacttgagcaatgcacaggaccacctagaaacgacatcatggaccagagattcagagcgtttttctcttggtagttggttttccatagacgggacatgtaagggatctgcaacttggcctgaggagaaacttcctttgtgggatatctcattcacagaagaccatgatagtttgcagcaacaccaccataaccccacagctatatcagaaacatgggggcttgttatagtaacagccggattagatggaacaataaggacattccataactatggattgcctgtcagactctaagctcatcgttctgtgttatcggatttaatatcaacatttctgctgaacagaatgtgttgtgtatgtatgtacattttcatacttgttcatataaactaggcagttctcttggtatcctgccaaggagataggactacaattttgtttcttattttctcctcttttgtgaagaatagtttaatgtatatgagaatacagaaatagtaaaatacaacttattattttattttattttgaaagggaattaattatatatttctgtgttttgttctgcttctttcaatgtgagctttaatttatcccaatgcaactcgagtcaacaagctgacattggtattcattgttcaaatcatttctttctattctttagaataacatcatttatttgttatttcagaaaaaggttatctgctagaaaagaagacaaatggctctcaatgatgtacacccttggaaagaagaacacccttggaaagaagttaaaagtgaaaaaaataaaagaaattacctatatattattttttaacttttatttttaatttatggtttaggttgctctggtaatttctatataagttgctatgcagattttagttgcgattta

SEQ ID NO: 22311 - DNA, 6468 bp, Cannabis sativa
  modified_base (6405)..(6415): a, c, t, g, unknown or other
ttataatataaaaatacaagttaataacatagataagaatagtttcctagtaagactgaaacgctttttattgggcatcgaagtctaatatgttacagtaagttaatatcttactatacaatgaggtggtagagtccaccaaccagattatcagggcattttaagatgaaggtccaaaaaacgagaaaaggaaaaaaaaaatgtggtttctaggcggaaaagagcttctaacccagagttcttcatgcttccgaaaattacataatttgtatttatgaataatgaaaaatcagcaagttccataccttcagcaacttttccaccagcaagatgtacaatactaattacaacaaaagtgaaaccagacaaatgagccgtatttgcatcctcgacatattttttataagcatcacccggtaatttactcattatgacgtaggattttgcatctgaaacacctgtagagaaaagccacaattggaattgaaaagtcaaggcggagaaggtggccaacagaaagtagtctcggcagtacgcataaaattagaaccgaggataataattacatggaattatctaataatttcaaatcaatatgtattctaattcaaggatgaattaatttaaggcttactcaaaccgaattttcaaaaccccaattggtcaaagggtttactctattcaaaaccccaatcagtacatcaggaatactattaatacacctaattaatcttaatctgaatcaacccaaatcggcagtctggaccagcaaactaattagaatatggaaaattcctacgtaccaatggtaatgcgagagaaacccctacccagctgaagcaaactaagacctaaaattacgagtcgtgaccaaaacatagaaattgcatctcgatgactcgcaattgaatccaaccaaatcatcaaacgaaatggctgctctcgcacagctcttaatcaatgcttaccaatgtccacttcagccgaatattggttacagaattatgccagttggatttcacatagaacatggaattagagtcagcacaagaaataaataaataataaaattctcactctgttgagaagagcggccctggcttgccgaggaaggtcgagaacgttgaagctccctcatttcatagccaaaaatggtagaaagcttctctttggcctcgttaatgataaagccaggtagagctcgttggcgatagtttttggagacgagttgagtgagctcctctctcttgattgggcagcctgcagtttggtgggttttgaatagcacatagcggataacttctgctaccagcctgtccttctcctggggtttacatagttaatggggatcattatcatcatcactcatctaagctctaaacgaaattaaataatcgaaactcgaaagctttcaaaagcggagtaaggtacctcgtttgaaacatcgaattgagataaatcctcaagagcggaagccattgttgagattttgcttcgccagttgccctttccccggaaaccctagaccctctgcttcgaactcttctctcttcccaatatttcgtggcgggaaaatctggcctttgtggttctgaaaatgaaatacacgcttttatactctctcaactctttctaattttctaatttttatgggctttttctacccatttggactgtattttactcaaaggtagttttggagtacccaatgctaccctctaatctattgagaaatggtaaaaatgtattagttgtgttgttagtactttacttgatgtcatatcgctattagtgtaattaaatatcggattacatataatttaaaaacatctctaatggtaacatattttaaaggtataatagttttacctttagtctcagttttttctttagagtctcagtctagaactgatactattgagtactctttggtgccggttataaaccgacacttaataattagattgattttaagtgttcgtttttgtaattaaccgatactagaaccgacattaaaagtgacttttgtagtagtgtaataagcttgattattttattgatgagtttaataataatcatgagtttataagagcttcgaaatataggtctatggttcctggatcacctctatacaacattgtactgggaaagatttaatttgaggaataaattgagaaagaattgatttctataataaataagtttttagggcaaaataataattttgtataattatttaattatgaattaaataattgaactaagctaaactatttagttttattcacttaaaattacatattaattaaatacaatattacagccttgatggagggcactgccataagggttgatgcttattattatacccatatttcgaaccataagtatgaacatgataagtggatattggtctcgaaaattaaggggacttataaatacaaagtttatcttatctcgggatgtgctacaattaatgaggtgttgtctcgcattgtattatattatggctatcaattaaaaacgataaaattatacatacagtgactagcgaggataacagtatcatgagttaatcttggaaattaattgaggtaaatgaggcttgcataagacattaaaggatgagttaagtggaaagagtaaataacgagttctttaagagcttacaactcattgacccacgtattggtgagtatattgaaagactaagggtcatggtctaaagagaacctgccccaccattttccatcaaatgcaagaaaacaaatcaagacaaacctgctttagatcgcttcttaatgatatgatggggaaagcatcaagttgtctcgcaatattcatctctattacaaaaagatgtgagacaactctgaacacaccacttcagcaaagacctcttacttctagataagattaaaaagcagttattgccagttattttatttatcccacatgttgtaaaaatgaaacatgtggattatccacgtttcaaaaatagttaccgagataagttcaagacgaaatagctgacatttggaagaatcctatgaataaggacaaaaacctacaaagaggcgatggagtttttgggagtaataactctggagattaatgaaatatttagagatgttctcttgtatttgaaaatattataaaaaatataatcaaaaataatattgacttgtggagtatgtagatttaactacaaaattacgtaaaattcctttttattttatatatattcgatcataattaatttttagttttatttaaaaggcttcattattgttaataaatttctgtgttaataatttggtgcttttattaagagccttagtttaaaattaagaactcgaaatgcatctccccggcatagccagactttctcgtcatggaaaatacttaacatgatgaaccagtcttaaaagaagagacaatgcatcaattggtataaaagcctcagggaacacaaactcaaaatagaagccaaggaaagggtcctacttaaaggaaccccaaaagagatgaccctgaggaaaaaattcccgagagaagagaatcagatgcatatgaccgcacgaggtatgttcttattgtggaattagaaaattgacaactccgttggagactcgcagaatccaatcgaaggaacgaagagttgaacaagcaatgactgtggccagaataactcaaaatgatgcaccgtcagtgcaaggggatcatgattcctaacttgtctgaattcgagcttgataaagaataatgctcactgctctccgaatgaatcaaatctcttcccattccttcaaagttcaagaacctttcttggcatcaatacattgggaaagaagatccactgtctcacatctgctacttcaaattgcgaactgatctgcaaggtgtgagagacgacgttaggtgtagaatcctccctgtcacactgagatgcctagctcaaaggtggtaccttaagctctcccctagatcaatcgactcatggaaagatctagtggatgcttttggcaaccagtttgctccttcttgacaatgccagatctaatccaatgatttggtggatatcaagcaataaggagacaagctcctcaaggactacatccaacgattcttagaggcagccactaagaccaaaagtcttggcgaggatgcaagagttatggcactcgcagtcagacttaaggagatgagtcctctatggtccgaccttcatctcaaggctgtatacaccatgaatgacttcttatatagatcagatggctttatcaaacttgaagaagtcatcacgcaagccaagggctcaaagggtggcaagaagaagccaccagaatcccaaacctctgctactgaggtacagggcaatgggaagaagggaggttcgaacagaggaaagagagccaacaacggtggtaagccaggaaacgccccggcggaaagaagcctaagactgggggcaatcccttatgagagtatgagcctcgcttcaccaactactcaattctcttagctccaagagaggagatttgtacgactacaaagtcaacaggtttgtattgcaaacctcttcccttcaaagaatcaagaaagaggaacatgaaaaaattttgtcgctaccacaataattacggtcatgacactaatgagtgtaatcagttgggggtgagatagaatttctcatcagacagaaacatgccgctgctctttagtggtatgtacgacctgaagctccagttgggggtaatgcagctctccagcctatgccagttgcaggtaggctagagatcatgattagaggccctcacatagctggaaattcaaggaaggccttagaaaggtatgcaagatcactttgacatgaaccaagagctgaagtcctagaggtagcagaacgtcctccaaagtctctgcgctatggatgttaacatatcaccttcagagaatcagactcttatcatgtcagctaccctcacaacaatcatttagttattgaggtagaaatagctaatatgatggtggtcaggatgatgatcgatgacggagcgtcctcaaacatcctactcaagcaagcactaaatagaatgggtttgacattagaagacctagaactatgtgagtagcttaagtatggtttttgcggagctggaattaatccatgtggcaagatcaaattgccacttactgtcagcactgcctcaaagcagaccaccatcatggccacgttcatagtggtgaatgtgaagtctccgtacaacgtaattctcggaaagcctgctcttaacgaccttcgagccatctcctcagtataccatttgtccatcaagttcccaacgacagcaggtattggttgtctccttggtaatcaaagaacgacctgcaagtgttctaacgcatcgttatcactcgccaagaagacctcctctattgctatggcttcagagggaacgaacaagacctcctctgttgttatggcattaggggtacaagaaaggcctctcctgcgaaagtcagagagacgacgaagacctctgaagatcaaactacgaagaagacagagacggcacctaaaaccacttgaatgtgcacccaagatggggatgacattaacccccatttttgggaaatcgactcgggagttggtccgaccgaggaactcaaaaaacttcccctcaacacatcagacccaaccaaggttatgaagattggaacaaacctaacagaggtcttgagcgagatgctcatggcttgcctcaggagaaattaagacattttcacttggtcgcatgaagacatgatcgggatcgacccccaggtcatctgtcatgccctcaacttagacaaggtaaaattcaagcctgtacaacagaaacgcaggctccttgacaaagagcgttccaaagctctcaaggaagaagttgaaagactaaaggagaacagctttatcagggagctttctactcgatttgggtatccaaccctattctggtgcctaaactgaaaggaaagtaaaggacatgcgtcgactttaccgacctcaacaaagcatgccttaaagattgtttcccactaccacgaattcatcaattggtggacgcgatagtcgactacaaccagatcagcatgcacgcaccagacgaaaaacatactagtttttgaactgacaccgggctttattgttacaatttacgtggttcaggtgttaattaaccttagtccatgagtcagtctattagcctcaaatggtgtatttgatatttttacagtattttagcaggaaaaccctaactctgtattcttcgtttctcttgaagaagaggaaagtttagaatgaatcagtagagcttcagctatctaggttacgatcaattggaatatattttaccaggatcnnnnnnnnnnnacaagtatatttttaacatcctaatatgaatttctaaaacgatgaaaataaac

SEQ ID NO: 22312 - DNA, 4451 bp, Cannabis sativa
  modified_base (942)..(952): a, c, t, g, unknown or other
ttttttttggttaaaactgaaaaatccatttctttaatgaatttatttatttatatttaagaatttgaagaatatatatttataaattaatacataaatataatttttttaagttttattacatatttgtaaaaattttagtgtaaaaatatttgtaagtttattttattttttagaattaggtaaataaattatttatgtaatttgttagtggaaagaataattagtttgtaagtgtattttttttaagtttaggtaaaaaaaattatttacttaattttttattgtaaaaattaattagttgttttaatttagcttaggtaaaattatattatgtcattttttttttagataattatattctgtgatttagtttaagttaatggagtaatgttatatgcaaagaaaatttattatatgtggtgtaatttattaaaaaaaaaaattgtatatgtttatttgttagacatatgtaatgtgtttgaaaagtcatattattatttattttaaattgttaatgtttaattttttaggaattaattgattttctcatggtgcaacaaagtcctcttttatcggtggttcttcgagtgatcttctcattctcggtatattattgtttaattggataattagtttatgtaatatgtgatagaatttgtgtaaattggttagtctcaattaattatgtcaattaaaaattgatgcatattttaaatttaatttttaggtatcatgttcttggtgttgatggtagagtgtaacggtagctagctttattgctgaaaggtataattactagaattttaaaattctttacttagtggagtttgaatatcttagatattcattcgtagtgaagtaagttcagcgattagttgtaatgcagtcgaatgggtggaatatgcatgttagataaatttgaatatcttaaatattcannnnnnnnnnngtaggttctgtgaatacatgtactgcggttggatgggtggataattttgatattgttaatgttattttgtttattttgtgtgctttgtttcttattttttttttttttttttttgcaagtttaaaatttttgggaacatccgattatagctgttatgctgccaaatttcggtagaattagaataaattacactaaaaatgcataaatattagggtaaaaatttatataggtgcggtaattaatttaactaattaattactacacattcaaataaataattgaatttatttttgttttttgttcaacgtttcaaaataaataaaaatcggatgagtgcgaagattatcagtggagtatatgagagttgttgaccatttcttagacttttgttaaaagaatgcaaaaaactttgtccttgtcttaaatatggtaacatggagcgtatgaatattactaagatgaaggagcatttgtttaaaaacagaatagaaaagaattaaaaggttttgtttcacaacagagaaaatattagagtttcggacaaaggagcgtctaagtctaagaaggttatgggtgtcaaaggatgatcacattccaaaaatgataagagacatacaatttgaattaaatttttatctattgaaatttcaaagttttgtagaggatgtcgagaagcctatttaccctaattgtaataggtttactaaattatcgacacttgttagattatacaatataaaagccaaacacgggtggagtgataagagtgaatacatatttaatagcttttctagttgagttattacctgaaggtctttctacgaggcaaaaaagacattatcttccttaagcatgtagtacaaaaaaaatgcatgcatgtcctaacgattgcctcttatacagtaagaggtttatggatgcaatatcctgtcacatgcggtgagtttaggtggcaaaagaaaaagaattctgacgaggtaaaggttggtgtccctgcaaaggtattatggtacttaccccccaatacctcatttagttcgattctttcaaaatatcaatcatgctaaaaatttgacctgacatgctagcaatagaaaattagatggtaagacgagacatccagttgactccctctcacttaaaatacaattgatgctaggtggcctaaatttgacaatgaacctaagaatattcgtcttggtctttctgcagatggtatcaatccacatactacctttagcagtaagtatagttgatggcgaattttgcttgtgaggtataatttgtcgccttggttggtaatgaagaagaagtcactatgcttacactattgataccaagtccttcttaacctggtaatgacattgatgtgtacttagcccatctaattgatgatttgagtcaactgtggtacgagggtgtttctatatacaatgtctttacgaacgaagaattaaatcttatggccatattattatggaccattaatgatttttcaacttttggaaatcttttttgtatagagtatgaaatggtacaatgtatgtcctattttttaggagaaaacatgttctatgtatttaaaatactcgagaaaaatgagttatatgggacactgaaagtttttgccagtcaaacatgtatttaggacttggaaaaaagtatttgacagtaagtaggaattttaaatgccatcaccacctttgcaatgggaaaattattagaaaggttgaataaagttaaattccacattagaaagcaaaaggtgacttcaaagaaaagaaaagttcggcgtgagaaaagtgacattgttacaaataaacctcagggtccatggaagaagaattcaatttttttgagcttgaatattggaagcatttagtgttacatcataatctagatgtgatacatattgagaagaatgtgtcagatagcttgcttaataccttgttaaatattcttggatagagtaaagatggaattaaatcccacctagatttgaaagagttagggattcggcctaatttacacccacaagttattggtggacgaacatttctaccaccggcttgtcatgctttgcctaaagtagaaaaataatctttgtgtagttctatctcctaggtgaaggtacctgaagggtgttgggatttatgctttaaaagtaagtatttaataaatcatttattatagaatttatgaaatacaagtataagatatatgaatacattaattatagaagtataattaataaatatttgaaaattctttattcatatagaaattgtataatcttgtaaggtgtacaagagaattaagattatacaatatgaataaaataagttggtagtgcattaaagtaagggatcgttaatatggaataaccaagtgcggtttaccatatgtgtaattttaattcggagatcacatatttagatagacatgtagtaaaggtgatgtgtataatttgattatacatgattggaccaatatgtaataacatctttcattaacatgtcatttactatgaaagagttattcatattacaatgatgatcattagtagatcaatctgaatcttgagtatacatgaactcccatttgtgttgattgagttctttgattcactcgttaaagtttctgagagaagataattcttacaacttctcttttaggagcttaataacatgagtggacgagaacatgttatacaataatggaatccaatcttatagtaaaccagagaagataattatagctatttgacacatggcatgaaggataacgtcatggagttgagtagaccagagtcatagcattcaacttaggaggagaccctagccctacgcccaagttgactctaagatctccgggatggaagttcggactttaataacttgaatccaacccactatcttttagtattatgtaccatgaagacatggagaaacctaatccaaaccccgagaacataaaatacacgaacctacaacccaaaagccaaattgggacctagggtttcacttgtcgcctaggttgacatcttgaattagggttttagtttccaggagtggtcaaaacttgcattgggacatcaactagacataccatggatatatttgatgcatcagaatcagaattggagcaagttgatttttgagcacctccgactccggggccccgagcacccaacgcccaggttgacaatctatcaatttgggcgccttctaagtgtctaatcagagatctgacttttgcatcaaatccttcttcattcaaaatagggaaacatgtctgtctagaggaaaaacaacaattcctgtgcacaaataacggggcttagcgccaaagttgacacttggggctgaccctggcctaggttggcattttgtcaacttgagccatttaaaatggagtttttcaagaattttttggagcatcttctccgtcttcagaaaatattgagattcaactatttttagggaccaaatagaatttt

SEQ ID NO: 22313 - DNA, 1778 bp, Cannabis sativa
  modified_base (541)..(543): a, c, t, g, unknown or other
accaaatagatctttcttacaaagtttagtaaggcggggcggggggtgggttggtctctctcttgaagaccttgttgccttctttatatttcggatgtcatttaaaaaaaaaaaagaaaacctatcaaaaaatgtatcttttaacaaattatattataataatatattaaaacattgttaagaaaaaagaaagaatttaaactataaaagtagatttgattgtttttgtttgaaataaacacaaaaagtggtattattgtgaattgagattagaatagagttggaaggaaggggtggtggagatagcataaaaaaggggtggccacatggaaaaacttctatcttatatttctcataccaaacacaacacaaggacgatatagcatttaatatttatgtatgtgtactctaaaatatggagttgatttttcagctctaaaagatttaaggtctcctcattacaaacaaaagttaggtacaagtttgtcacctattagggaatttataatttctttgcattttgaaatatatatatatatannnatatatatttatatatacattttgctggaagtcaaaaaacatgaaaatattttggtcattgttaattaattgtttctatcccggtcttttcaactttgtcactttaatatgcttaatactatatatgggtgtgatatattatagattatacttatttatgttattaatttaatttgagacttaataataatagtatgttattttttgtagtacttaacactttaaatagtgtttgattagaaagaactaaaatataaaaatatgaatgagatagagaatatatacaaatataaatgtaatagaatcaaatttataatacatataaaaaattattacattttttttcctcatcttacattagaatggtatttttttatattttaaaatagaacagtcattttacaaaaatattagaaaaatcattctattaaaatgacattctaatactttaaaatacaacaaatcaaaagaataaaataaaatttatttcattttcattccattcttttcactacttctaatcaaacactacattaatgtgttacttacctagcatttttaaataatctttgccaatgactttttaaagtcaactagcttataaaacaaattgcttttaattagcataaatacccctttgagtttcttgctaattgacaatttagtccctttttgttgcagtcaagtccttcagtttttaaaataatatctaaatatccaaaaagaaacttatttttttgtgaaataattagctaaaaagacttgattagttcttattttaatgcttaaggatttgattgcaaatttgttattcacagggagtacaaattgccaaacaaattaaaattcataagacatttttgctaaaactctaaaataataataataattaaaaaaaactacaaaaatctagcctcaaattatctaaatcgaacctcatacctaatcatcaaacaagtactcatttagtagatgtattgaaacaagtctctacagtacgatcgccacccaaaccctagtccgcaaaatcatcttattagtattttaagttataacatcaataaaaaatataaggctcaagaaccaagactcgtgccctaactaactacaactaccatttttatttttatttaaattgtacagagttagaaatttactaaggcacaattataaataacaatacttgtaacagagaaagcctgttaaaaaattctagagtgagagagtcctaaaag

SEQ ID NO: 22314 - DNA, 3515 bp, Cannabis sativa
gctcgaggagaaaaatgaggaacagaaaagtcggaagcttgaatcccttttcccttgtcggtatgaacaatagtggatggctcattcaaagaagcctgagaaacagcacatagaagactctgaagaccactgaactgggaatcagaagtcactatttcctgagaggaaataggagacgtggaatgaatttggtgatcagtaggagccaaagtaagaggagaaacctgagaaccaagtaagcttgcttgaggaagaaactgattaacagcatcttgaagatcatgattttggcccaaggatcgaagattcatctcctcaaatggaatagagttagccaaatcgaaagggtcacgcttgaagtgtgatttgagaggagctctaatattctccttaaaaggcaaaacaggaggataatagccatcatcgcagcgttgcagaaaagagccacacttagaaaagatatgatcaaattttccacaaaaatatcaataattctgaaggccctcatatttaaacataagccatttggtcctaccaaggattcgaaagaacacctgcatcccccttcgaataggcttagagacatctaagagaacccgaatgcgcaggaaaggaccagaaatttccagcaaagtagttttatggatttcaatgagatctccaatatcatcaacaaccatttttgctaggagatctaaatccagaaggaatatagtggatttgcatccagaaaggaacaaacctaagttgttcaggttgaagaagatcaagaccttcagggttagcaaaaaccatcagacaatggtcaaaatgccatggctggttctcaataaccctacgtctgtctccatcacacccaaaatgagaaagaaagagaccagagtgatattcagtaaagttgacaggatatcttaaagtccaagcttccctcatagctttgtcaagccaatcaggtttgatacttttcagagaaaggatcttaacaactaaacagtacgactcggaagaaggaccagtacccaaagaaactccatcgaagttatgaataatagcttcctcttcattcaaagcaagatgactaggcgaaattctgctagaactcgccatgacacagaaggaaaagatttggcagacagaggaaaaaggacagacagatagagaaatacctagagaaacacttagcaaactaaacaatacataaaagaatatatatagaaaaagaaaatacttgtgaacagaaaacatctgagaaggaatggaagatgccaaatccatctccacattaatgagaaactagcgtgatccctcgatagaagaggtaataatcaccaaaatcctctgagttcttctactgacggcgcgttgagtagagagaaggaagaaaaacaaaagagatttaaataaggtctgtagaagtattaaatagaaatagatctttttgagattcactgaggtgcattaaatgcctaaacctaattagaaatgatgataaagaaacaaaactagagagggaaccaaaacgacatttacacatcatcacaaggaagaaggctggaaaaatccagaagaagagggaaaaaccctaggagagtattccagagctcactccattttagcaaatatgttgtactaaatgctggcacaatatttgctatgtggcaaatttgtattagtttttagcacaccattaaaacatatttttttgttaagtaagttatattatagttttatatcaatgtatatatgccgaaaattggaaacatcaaaggttttgatattttttcccaccttacagctgctcacaatgacgctgatttagaaatgattacatgtcttatgtggagtatttggtctgaacgaaataacaaaaattcatggtactaagcttaaaccagcagacctcatttgtaccttctctgcctctcatttggctcaatatcacaaggttacatcaaccaaagctgctgcaactgatgtggattcaaatagaagcaatggtcaagttcaacacccacctatacctgtgagatccctgtcggtatggcaaccaccggctgctggctgcttcaaattaaacttgaatgcagcttgtgataatgcaggagcaattattgggtttggagctctaatccaagatcatgctggcgctgtcattactggttttttaagcctttccgagggtgtttttctccaaaagaaatggaggttgcagcaattgtttcatagtgtgaaatgggcaattgagccttaactaccaatccattttatagagacaaattctcttttggtagccaatgtgattaataacatttcttctactagatttgtaacaccctttcatgatttggtagatgatatttgttatcttttatcctcttttcctagagcaaaggtatctcatgttaaaagagatgccaataaagcagctcatgctttagcaaaatttgctctttgattggatgaagatatttcttggttgggggaaattccctcccaatccactctcttgttattaatgactctcaattttaataataacagttttttctcaaaaaaaaaaaaatcacgtattttcatttctattagatatgctttaagtttaacaatatttaaacttgtaaagtatatcaataccgatcttccttgaaatggccaactccatccttgcttgtaaaatgatatgatgtatttcatctttcttcaagccttgaaagcaaaaacctacgttgtcatatccagattcattcatcattattaagagcactaataactaattttttattttatctttcaaaatacatcatcgacaccttttttttttatgatctcatgttgagatttggatatttgagaaaatagttgcctaaatattttaactgaagacatgttagtttcaattgaatcataacaactcggccaagctgttatgacattactcgaaacctataaataggccagttgactctttagttggatgggaggttttgagacagaaattaagagaggatttgacttagaagagtgagtgtttatgaggattgtaaaagagttgtctcatgtgtttaattgagctctctcatggtgatgaatttccttaatggagctagtctcccaagatgaatcaagatcagtctatttgactgtttagtgtaatctgtacaagccattaaagttcaataaagcatcaaagcttctgacttccttctcccgtggactaaacccaagtttacccaacttgtggtggaaccacgtatttcattgtgttaagttttcttaattttgatttttatttatttattcttgtttagctttgtgttcttgttgttggttaattcttgtttgatgctttcaagtatcaacaagtggtatcagagagctaggagaagtcctcggcaatttaagaatcaacattgaagatcaagatctcatcaagaatggcaagaacaaaatttaaggtggacaagtttactagtgcaaatgatttcgatctctggagaatcaagatgaaggcactt

SEQ ID NO: 22315 - DNA, 1936 bp, Cannabis sativa
atatcttgaagagaaggaaatcttttaacttacagagactgcattgaagcagacagcgcaaatacggggactcccgaaacaccatcattagtagctgttattgatttttcttcaaaactttctatgaagtcaagaaaatcagcaagtattctttcagctgcaatacttttcatcttatcagatagtaagttcagtggaaagccctccatgaacaatgctgaacacataattgacgacagttgagatctgctgtcaccaattatggatttgaaaacctggtctaccaaagattgcgccccgaaactgattagcatgctgattgatcttgccaactttctcattcccgaactaggatcaagaactgattgagaagacgccagtgacttcatcaatgaacaaatcttattaataaatccacttaccattcctgactcagcataacgtagaataaagcaccaaagctccattacaatttcccagcaaaggaaatgaggatggcaaaggttctcaagaagaaatgcttccacttccatccatgcatcgcttgaagataccccaaccaaaaatgactttagtgcatccaaaagacatgaaaacattggttgccaaactagcgtctcttttttctcagaacaacacaatacagggagttgtaaaacgagaactgaagaatacacctcttcatcaattaaagagtctaaaaaccatccaagctttctggcaagcccaagttttatatcttcttttagatcaggtgaacatctcaagaaactaagaaacaatgcaacccgaccaaccaacaatgagcttaccccagtaaatacttgagaagaaagagtgtcttccatgtgaagcatcttattatgatcattcatatctccaggaatagaattcgcaaagctttcgtcactgaacaggctatcaacaacctctaattttaacttttgctccacttgatctgaacttagaaacgaattaagtagatcaaaggatgttttacccaaaagttctgaaaaagcttcactagcagctttaagcagtttgtccttgctccaagagactttaagagtcaaaatcatgaggatacagagtgttatctccctgtgcaccgtacatgcttgacatggatataaagctgaaattttgagagcattaattaagtaaaaccttagtggaataaatttccttcttgcttcaactgcagaaataggctcctttagcgaagaagaccaagcctcagcaacacttttcagatattcattagccaatgagattagacttgaaatgatatctgctacattcatcttaatagctaagatcccctcaccaagctgaagcagacttaccacacctttccatgacacattaagtatacttactaagcttcccccactattagcagcaattatgcctatctcatgcagttttccaattgaacactttgttatatcaataacatgattcatattattgatcacttcacattccatactactgttctctgtatcaagcttttcatcagtaacattccaagttacagcttcagaatacactccacacagtcttattacagcatctataaccatatgtgctatcttcaacacttctgatccgtgtgaatttattttctgcatttggataaagattacttctggtgataaatgcttaaaagactcttttgagacaaacttaaaaaagaagtaaatataactttttagataaatgataagaatttcaagaaggaaactgaattgtctttatacgatgaaactatgaaaactcaaatcaaaccacatgcctaaccatttgaactactcttaggtaattttcatgttttgtgcttggcattcaatgaataaacacaagttacattacagtaccttgatctctgataacaactctttggttaagtttaattgctccaaaatgaactttt

SEQ ID NO: 22316 - DNA, 3682 bp, Cannabis sativa
tacttaatttatttataaattaaattataagttataaattaaattataagttaagtaagtaaaaaaagaaatttttactttttgataacgtcaagaacgtaatagggcgtcttccattgttttatagcgaaaattggcactggtaagatttagatcaaataaatgggaaaaatgaaaaagaaataggggtatgcggtagataatgatctatatatatacataacttatgttcttaagagattttataggaatttagtcttattcaattaccatagaagccatcttctctcttttgtgtcccttaaatccatccacgaattgggttatgttaaaagtgtgtttggttagaggtaatgaaatatttaaatctcttcttttataatttttgttatttataattgtatacattataattattaaaatattttgtaagcacttaataaatttgacattatcttaaaaataaacttaaaatataaaagtttggttttaaatcgtgattcccaacattaatccataacaaactttattatatatttacttaaaaactaaacacatcatacctttcaaagaaaaaaatatatatatatatatagctaacgaattcgaagaaaattaaaggaattaattagttaattaaacaccataaagacaaaccaataaataataataagttttctcaagtcaaatgaatagtcattccacaagttttaaattccaactacttactgatacgatatagtataattttttaaattaaattggcaatggaaattagtgtaattatttaattacgattatataatgcaaaaaaatatatataaatttattatttaaaaaaaaaacaatattgaaaagtaatgaaatattttgtttttctgattactttgatgaatacaaacatactaattaagcacacgttttcatgtatataattaaaatttaaaatatatttcaagaataaaagaataacaaataccctcataaaatggtaaccaattaagtaactaactatatatatatttatatagtatatagtactagtatttgccaactaaaataaaagaacactacttaaaatgaaaactcttaacaatcaacaacggaggaggaagaaaataatgaaggagaaatgtgatgtagtggcgccgatatggattctctccgatgatatgttactcgaggtatttcttcgaattttcgatttgaaatgtattatggagtgtgcttttgtttgtaagcgttggatgtcggttatttctagctctaaatcttctttttggcgcaaattcaatcactttcatcgtcaaaataggcttaataactcttcatttactccttttacattattatttagaaccaatatgagattcaaatctcaaattccaccatcattgaaaaacaatatattttcattcgagtttttctcggagggatcaaagatttttgactacggtcaaaaaccagcgttagactttttaccttggagaggtgacaagtggcgtgcttatatatggtcatcgttcgatgatttgttgctagtggaacgatctcctactcgcgtgtacatttgcaatccttttacgaaacaatatgttgagattcctggatctccatttggttttcatgagctttattggtatgcattagtagtatcaagtaattttcataattacaaagtagtgaaaataagttcaaatgaaaataaggttagaggtttaataaatctaccatggaaagttcaattatccattttttgttccgagaccaagctatggagcacttcgattcttaattttccggtgaccttcaattatttgttgcaatggagaccgaccgtcgttggaagcaatggaattgtgtacttgtcatacattaattataatatcaatggcattattggagtgaatcccttttcaaacaattcttattttattaatttgcctccaaacttcttacttaaattcaaggcacgtattggagtggttcatgggaagttgcgtgtggtgcaactctatctaagtaattcgggtaagtatgttttcaaatcatgggaactaatagacgacgaagacgatgaggtgtgtatatggaatttagtgcattatcacgataaaatgacgatacaaagtaataaaatgagtgggtcgtcgcaatttaatgtgttagctctccatccagatgacgaagatgttttctttttcgaaaatcgtacgagtgatgatgatgttgagattttacaatttagaatacttggccaaaatcacaatgagattaagtatctttgccatcttccacctacaatgaataagtatatacatgttatacctctttctcatcctccttggcctactccatgccctaaattattttaaagtgttttgttattgtgatttttttttgcttaataatgttttgattattgtttgttaattttatcattttttttttttttgaaagagaacatttcattcatatcaattaattatgttttttaggtatttattttattttttgtttttcaaaatgattaataattttacaatatccatatgcacttaattaaaagaaaacaaacgtacctagtttatagttgaataaataaaaaaataatatagttcataatcatcataacaaaattttctaactaaagctatttttgaaacttaattcccataaggatattgttaaattaaaataaaaaaaatacttatatatttaacagatatttaagagaacataaactatagaaagctttgttcatataaattatattttagtatgtttattattaataatttaaatttttgtaagatatttgtttttgaaaattttgattttgaagatatatatataaataaaatatattttaaatcatatgaatggttaattaagtttaacaataacctcagtttcactcggagcagttcccacttcccatgactacttccaaaataaattatatattatgtataactctaataaaaaaaaatataaaataaaatgtattggatcaaaacaatttaaaatctcaagaattatttcataaataccaaaaatgataaatatatatatatatatatatatatgtttttatgaatttaccgttttttttttttacagttttacaaaatttaattttgtttttacaaaaggtgatatttgattggaggtaatgaaattgattggaaaggaaaggaaataatcttcattccttgtttgattgcatattaaagtgttggaatgtcattctaatggaatggtctttccactattttcgtggaataacaattctattttaaaatggaaaaaaagaccattcctggagagaaaaaatttaataatttttttatcaatttatttttatccattttaaattttattcaattcctattcttagttgtcttttcttattttcatgttgctgctgcaaaattagtaatctgattttaagtactatttaattttttaattattattattattattgttaggatttactcctaactaacaaggtaacttattatagcccacaaaaaaaatatttaactttaactcaggaaagtaatctaattattaacaaccaactctttttacttctaatggcatgtttactatacagtaatcagaatcggaataaattaatggagaaatgtaacggaataaatgaaaaataatcgaa

SEQ ID NO: 22317 - DNA, 2546 bp, Cannabis sativa
ttgaaaacaagaaagtaaaaagaaaatagaataaaaaggtgaataaaagtatatcaaccattgagtgtttgacactttaggagacttgaatagctaaagttggaccaacaaagaatcgaatctataaactttagagaagctagaaagagtaatccctttttcttttttgtgatactattatactaactactaccatcttctttttctatatgcttttactttatttatgttacatcactctacaacaaagtgctactactttaatttatatttgaaaattgttataggtattagtaccacaaaatttagggttaataatatctttgatattgtgttttgcaaaaacgataattatattttttgttctgttaaattacaatttaaattgtattttttttttttaaaaaataaatcctctacttaattttttgttatttttttttctaatataaccaacttgaaactaatttttagcacgacaaatacaaaaaaaatataattactattattataataccttcaagttaagttattattaatttttttttttgacaaaaggttattattaaattttaatttaacgaaaattaaatttaaagtctattttatattattttaaaaaatataaggtctaaaatgttatttaccaaaacaaataattaaattagtaatttttacaaaagtacaaaatttaaaatagtatttaccctaaaatttaatatcaattatcacatattgtaattaataataaaagatatttatagcataataataattatagaaaattttttaccatacactctcttaaaataggtatatttataccccttacctattccagtatctaaaaaactacttagtctaatttttttatagtcgtatatattattatagttatttaagacatctgacaaaattttgagaaattcagaaaaatttaacacgccgaaaacaatgttcaaagaatttgttatacatgtgattttttttttattttatacgcgtggaaagtagacgatttaaatattgatttctatattgtaaattattttaaattttgtaaaatgtcttaaataactataacttacataattatgaaaaaatttagactaatttttttttataaataccaaacacttaaaagggttgcatcagtacacctattttgatggagtgtatactgaaaatattcctaataataattatttaaaattattaattatccacacaaaaaggacacacgtccccaatgcaaagctttcctcacatatcatctaatcttcctttgaaagattataaaatattaagaacactttttcttatccttttctttgatgcatcgattgactcttgcagtattacctaattcctttctttaatggattatatatatatggttaattggtaaattatataatcaatagcttttttcgttactctattcagccaagcaccaaaactttacacgtattagttcaaacgatttttgtttaaatatttgtttttttgtttttatgtgaaagtaattattttaaataagaaaaataatttgcttacaattgtttctatcttaaatttatacagacttcatccatataaaaagaaaaatactaagggcatcttaatgttactaagaaaaataaaaaataatatattattattggtataatttaatatcgatttttacacattttaatttaataaataatataaataaactactaattacttataatataataaatgggtataatattaatcaacttaaagtacttataatactcatacacaaaatatgatatcagttcactctaaatatacacatgaataaatttaagataatagtattgttacggtttagagaaaatataaaattgttgggtaagtttgtaatacatatcccttaaaaaagtgtttaatttctagctagatttatttatctattttgatatttaggacaattttttactcttatttttttttttatgaacgtgtatgttataattatttaagattatttgtaaatttttaaaaaatttcaagtaatttataatgtcgaaaataaaatttaaatattttattgtatgtgagactattttttcttacatacatggtaaataattggttaaactttattttttgccctaactttctaaaatttttaagttattctaaatagctacaatgtataatgcaattataaaaaaattgacttattttgtttttttaaatattaaaatagataaaaaaaaaatctaccaaagcgatattctaaataatttttttttttttaaaaaattcccaataccaatttagatatgaatctaccaaatcacttttactatataatttccattatattatatagagtattgttttacgattaataatattttttaaaatttagttatattagaatatgataccgaaaaaaatactaaatactagtgcttttagcatttatctatattaatattataggaaaattctacaatgcaccctcttaaaatggatatattgacgcactcctatctgttttagcatcc

SEQ ID NO: 22318 - DNA, 4769 bp, Cannabis sativa
  modified_base (2232)..(2246): a, c, t, g, unknown or other
cttggtgcaccacgagtgcatgcacaaaacaccctcaagcgaggttatcacatactgttgttgtgccttggtgcaccaagagggggtgcacaaagcaccctcaagcgaggttatcagacaccgttgttgggccttagtgcaccacgagtgactgcacaagcaccctcaagtgaggttattacacgctgttgttgtgccttggtgcaccacgagtgagtgcacaaaggaccttcaagtgaggttatcacacgctgctgcctctttctcccttaattgaaaattgagattgtgcctatacatttgagcttccattcttgcttccaagtattgagttttagccgcctggtaacctttccctatgtctcatattgtctccttgttgaatttctttaatttgtgctttaatctcattaacttcagaaataaagctttcatcccctcagctctaactggtttctcccagtcattaaggacaacattcttgaagtcatgatgatcagcccaacaattgtaataccagaatggtttgaaaccaatcttctcagtcaccttcatagaaatcacacaagcacaatgatcagaaatacttttcccatctataatgagccttagccgacttgaagacatcataccaatcttcattcacaaacgagtgatcaatcttagaatagattctcttgttcccctcttgattattagtccaagtgaacctagaacctatctttagaagagcttccatatggctttaagccaaccatttggttgcatcttctatatcagtcaaagtagctttctttcccccttctctatcctccaaatcaaacaaggcattaaaatctcctgttatgagccacagtttagcagggggttttaaacccgaaagcccatcccaaagctctttcctctcttccactgtatttaacccatagacaaaagtaatactcaaagcatctacctgaccagccatatcggttcagccccttgctctttgagaacattgaaggtgttgctgattttattaatagcagcctccccttcctctcgttgtttacttggtcttgctgcagccctctttttgggtatcacccaagaattaggttgctggatgcctttgtcttcattctcatctttatccccttggttgacttgagttttctttatttcttgctgccccttctttttttcctgttgttctctcaacaccttcctttcttactgaatctcttcatggcggcaagtggcatttgtgtccccatacttcgaacaattcgaacactttgtcggcattcatactcaactttttgttcttgtaactgaccatattcatccacaaaagggataaatctaggaggtgattctgttatctcgatctccaccaaaactcttacatattgaatacgatccttggtgaattgatccaccatgatcggcttccctagtgtgctcactaaagcactcaaacttttatttccccaatattggagccctaaattataaagtcttatccaaagtgacacggtatgaaccatatttagggcattcaaatcagttgaccatggcctcactatcactggtttgcgatcaaattgtatcacacctgcttctacaacaagatctcgagtggcttcatcattaaatcgaaccattaccaaccccatagtcattttttctacctgcacaacccctaaatgactccaaattcttttaataaaactttcaaaaactgtgataggaggattagcacccaaaactttacaaataacagcagacttccagcaagttacttgttctctgacttcatctacatctacttgagcaatcttaattccatccctaacctgtggttcagtgaaaagcaatctctggtctctgctcactctcttctccttcgtaaatgtctcccatgtttccttagctgtgttcggattgatgttctttgcagagtcttgttccatcaacctccactgcccaggttttgcccccactgtgcgcagatcgagcttcatccccaatctcaacgaaatcgtgcgaatcaaccattttagctattaagttaagcccttcctacgaacctgcatcaccgccgtcctcagctgcttcttcgatcggctcatcgactggggttcggatgactggccttcgtccgacttttttcttcttcgcaatgggagagagaaagcaggggaacgaaagtttttaaataaattattcacgattttcaataacctcgtnnnnnnnnnnnnnnntgcacagtacgttaaaaatcacgcgaacatgcctatatttgttagggtgttacaaaaatggtcaaaatttctaattaataccaacagatcccgcctctaataatcggtattacttttttgaaattttgggcgataaaattctcgccttttttttgataaatcagcaagtttattattaatccacaacactttgtacaatcatttacaatgaagagcatctttatgctaaagacctcaagaaaaatatctctcctttttccttcttttttttttcttacaaagaatgaaaccaatctctatcttgttggccaatcttttttggaatttcccacccttggtataggggtgaaatttctgccggtattaatattttttattaaataattattatttatttaaatttaaaaactattatcggcgtagtataaaaaatcttacttttagtcataataaaatttgtaactaaaagtaaaaaagttgtgatctattattttttgttgtgaccaaaagtcacatttagtcataaaaatttatgttctaactaaaaaattatcactaaaagtaactattttttttttgtagtagtagatgacctattctgctagtaataccctcattccaccgataataattaaatttgttgtaatgtccactaccacatgttgtgatcaaaatagtacaagctacccatagagaccatttatcttagcttgtaaacaagggccaattcgagtctacgtataaatacattggagaggggttataacttttgtgtattgagacatagctattagctattataacaaagcatttactcatatcattactccatcatttctctcaagatttccattgttgctttaagttcatcacccttagtcatttttttgctacaaacattagctgactaattcaaaccatcaagggtaacaattcatcatttaatcgtaccaattaaggctatgctaatatgattctcctatcttattccctatcctatcctatcctataatatgtactataaatcccaatatatatatagtactattttgaatcatttcttacttagtctctacattattatattaaagactaaatattgggaaagggtaatgaatgtgacgctcgcattggtgacactacatgaatcatcaaacattatatacacagtgaaatgtgacataaaaacgtagatcgaacagccaaccaataacgtgagagtgagaggtcagttttttttctttttgttttgggtgctctgaataagaattaatactactgatcatccttatggtctgtgcccacggaccacgatcgatcgatactttccatgtgacaaaacctgacacactttctaataaattatatgcttattatatatatataaaaatataaatatgtatataaacgacttcacatcccacgccatgaaatccagagatttcaaacacaaagtggtccagctgatagagacatacctatgtttgattgatgatgctcgaaactagttacataaactaactttgttgggagagactttagaaatatctccccttagtggtcctaataaatcataatttcctttctatataacctaaaacactaaaatagaaagaaaaaataaaagtggtccactattaatattccaaaacattgaacatgggagagatctctaatgcaatacatatcgaatattcttcaaagtaaatggtcatatcaaaggttaaaagaaaaagaactacggaatcaatggaatcttatttatcactcatttaattttaaacaaacatatgtatgtataacttttgtggattattcgtaatgtagttgttaaaatattcaaagggtaattaaaaaagtactatcactaagtgagtgtgacatattttagttgcatattttgtatgcgcttatcgatcgttacaccaatattcaagtaacaactagtaattgttaaatactctaattaagttggaacttgtataagatcatcttacatatatatcttgttactcgaacctatagaggctatattttgagatgtatatgtatagttagtattaataactaataaccactattattgttaacttggctcgatggaattgtgttaattatggggctcaaggttattgtgaaaacgaccaaataaaattcaaaggactatatatactccgtcgttgtcaaaagttaggagaaagaggaccccttttgtttactatagaagcctgtgtggaagtaccattgacccgtattgtgcgcatgagttatcccacgtgaagggagtacttgaacaactttgctatatcatattcttttacttttgctaaggtatcagtattatctaacactttttcgatatgtcgtattacgattagttagcaatactttttaaaagctatattaaactatatgagattcaatacttaattaaacttatactaatagcgatattaatttttaagaaaatactaagcactactatcattctttaaaataattttttaatattaaaataatttt

SEQ ID NO: 22319 - DNA, 2498 bp, Cannabis sativa
aattataccaattatttttcatatattgcatgatcacatatcatgcgtgaaagtattctcataaaaaaatataatatgcttgaaagttatgttctgaccttaaggcacttatactatgaattatatgggtaccacctatgtgtagcagtatagtatatatactgataaagaattcgagaaactaccgggaaaagaaatatttatatcaattaataaagctcataatggcttttccaattcgaacacgtttgaaatgtacagttttttttattaaatatcttactattcaaccaattgttttaaaacatatctattatttttaacttgtatatataataatatatcatataaaatgggtgagcatgaatgaattgttatatataaaagtatatgatattgaagaccttatccctatgttatattatttataatacattctatattatatatatatatatattatatatatatttcgaactatctggtttgaaaatagttttagttgatcatatgaagcacgccatgtatatccagtttcagtttgatatattttagtttccttttatatatatatatatatatattgtattcatatatatcaaaggatctatcaacagcttagatcatatatattttgtagctctatatgtgccaagtgccaaccaagagatcaattttatttgtagaattattaataacaactgaaaagccgacaaggaaaattggtccccaaatttaatggatagaaaaggacacaaagtaatgtatttaatttttttttttccatctcattatttcaaaaactcctacctaaaagaatcaaaatgcatgttcgtgaaacgaatgtgaaaagattacccaaaacttattaatgcatttaaactatttgtttatgggattttactattttcttctttccaaaaaataaacctttcgaaaaaaagagagacaacgaaatagtgccaaaaaaatagaaagaaagaaaaaaaaacgaggacacgcgcgaaagtgtgtagattttgattacagccaacaaattaaacgactggtatgtatataactatagatatagagtgacccctccatgtgcttaatatatggtgcatgaatattctcatccaaaaacatgataatctcattcaccataaatataaaaagtataaatatctattttttaaaatgaaaaaaaaaaaaaaaaaaagtaggggtcacctggatttgatcaccgatattgacaataaaagcgtgtggagcaggtttgactgttatccaagagttagcttttcggacttggagccccgtaacttggtgctccggtaacaaaagggtcattcctccaggatccgaatgtgacgacaaacctagcgtcagctcaggttgcgggcactttgggtaaaagtttactctcatacatgctccaatctctttccccccaaacgcattttgtagaaactcttctttcaatcccaaattcaaagataacaccctcaacaacctctcgcatagcttcaccacttctttaccatattcatctataacttctctacaccaaccaaaaaagaaaaaacagaaattaaagacaaataatattttcatctcgagaaagtggtcgtggtttatttatttatatatgtacctgcagttggaggggaggtggggccatttattttggtccttcaaggacaatggaaggtagtgaagaaaataatagtcactccaatcgagaatggcacctttttgtatccctaaacgacttccgtagccttcgtaagttttggggctgtttgcatagagttgtttgtcttgggccggtaagtgaaaaaactcacgccagatttgtaaggcccggtccataagttgggggctaactccgtggttcactacttggaagaaaccccactcgcggcacgactcagaaactattctcatcgtctcggctcggactaagccgtcctcgctttgtaagccgctcatgtcgatcacgggtatgttaccttcggcttcagctgcagcttccggtactacggacctttctgagccgatgacgtggcagaaagacggtcgttctgtcgggggcttgatgtatcgttctggaattgaagatacaccgctgtccgacaaggactggactcggacgattggctcaggccattcttgcggactgttcatcattgcttttttttttttttctgggaaagtttgctccaataccgaggtaaatcgtattttaacgtagtccgtacgataaaacaaaatactagactagtagttattgtgttaagattgagattttttatttatttattttattttatatatataaaaaattatataatatgaatatatattagtggtttctttcttgtgtggatgagagagagagagtgatgaggagagtggtagcttaaagttgtaagtagtggcgcggtagtgaagtggacatgaaagagaaacgtgaaatatatggggtatttaaagtattgaatgtgtgtggattt

SEQ ID NO: 22320 - DNA, 2800 bp, Cannabis sativa
  modified_base (313)..(315): a, c, t, g, unknown or other
catcagaatcgggctctgcagcagtggatcaggaccagaaaggaaactttccaaattgaatcatgatcacgaatttggacttcaaagctctcaaataaagtttatttgatttgttctaataaaggcaaaactgaaatcatcaattataaaaagggaaagtcaagttttccaaagttagacaactttccataagagaatttcttttcttagaagaagtttcttaaaccaaaaagagaccagctgagaaggaatctttccttagaagataagaataattaaatgcacaaaatcaatgtaataaaaataatttaannnctcaatgaaaatgcacattaattaaaaaaatattttgacaactaaattgccaaaaaaagacctaacaaaaattagtgagacatattgaaaatggagtaaagaagttgatgtgagtgctttaagagcacttcgaatgtatcttcaaaaattggatttggtgtaagaaattggtccaaggtatcactaaaaacttacactattattatactgtgtaagctacagtatgttgtgcacagccacgatattcttttttttttaaaaaaaaataatattatatatatgtaaaatatttcaatgcttttaaaggggtgtactaatacaatctgatctattttagcagttagaaatttttttttaatttaattttctttcatggttgtatatgtagtagttgtttaagatattctacaacaatattaagaaatttagagaaatttagcaagcaagaagttagattcaaacagtctattgtacgaataactttttctacgagtgtgaaatagattgtttcaacactattttttatattttaaataatttttaattattgtggttggagtggaaagagtttttgacaccaaatttagtgttagtgtgacaccaaatttagtgtcaatgttagagatgctctattgggagtgctctaagactatcttcaatcctaactttactttaaatcatttttatcttcattttttaacctttttcactctaaattattattttatctccaatcactactttaaattttaatttaaccaagaatatttttttttttgctctctttattcatcaatatgattaatgtatttaggaaatgtttatattaataaatatatttaagttaattaataataatttaattatcattaattttaaacatacaatatattgctttttaaaaaaaataaataaataaaaatatttttctaggttatgtttgtaatagtagtaataattgttgttattttttgttgatgtagtttttttttattatttttaattttaaatttaataattctatttgtattttatttttaatagtaattttttggtgtaaatttttatttattttgattattgaaaattaaaatatgaaatttgaattattattataattacaaaaataataaataaaatataataatattttattggaggatataagtgtaaatgagtaaaataattaagaattttttgggataaaacttttcctttatataaacactgattccttcagtattgaaggtgcacaatgtatttctttttaatgaagttaaagattaagcatgattggagttgagattttttggttttgtagctttaaaataaagaaaatgggttttgaagcattccatttgagattgtacctaatcatgctttctagaaggttaaggatttgtttctggatgaaacacagaatgaatggctgatttgagagtgttttgatgaggagatagcgaatgatattttgaggatcaaacctttgcttggaggtacaaattttttattctggaaggctgcaaaatcaggtatttttttttttttggctaagagggcttgttgggtaagtcaacaacaacgttttaaagttccaagcgagatgtgggttaggccatggaagctgagcctttaccctcatttgaatttactctgttggaaaatcttatctgatatcttacctactaagtcacgacttggtgttagaattagtgaacaacaaatgtgttgcttctgcaatatggaaattgaatatacttttcatctattttgtcattgttctttcactcgtgggatttggtttagaagttattgggagcttcgaattgactgcatgaattggacaaatcttatagacgttggcaagtggtggatcaacttggaagattttgagctaatcatttttactggttgtgtttgtgacacaatctagaaatggagaaatgacatgatcttcaaggatcttgtaatctggattgggattttacagactatatcgtgagatacaaggaattttcttgcgaccgctactggtttgaacaagaggaggtactagacttatgcttgcagagacgtattcagcaaccgaaggagaatttctagtgctgcaaagtggatgcttctgtggtgaaggcggaagctggttttgctgtttttcacttaaacgcgtaggtgtttgaggagtcttgagtaggtgtggatttctcgtcagtttatgtgtgttggaaggagaattgagtggtattgccctggctttacagttggcaagggataaagaggtaacaaaagttcgtattggaaatgactcgatggcaaccgctactgcgtttgaggttggcacattaccttttggttggagtacctatcatttgttctctttctgtttgaatctttgtaagtcttttaaggaagttgttgtttcgtttaattcctcagtcagagaaccatattgctgattctttagcttgttgggctagagtggcaa

SEQ ID NO: 22321 - DNA, 4836 bp, Cannabis sativa
  modified_base (4561)..(4561): a, c, t, g, unknown or other
gtcattccaatcattcaaaagttcgtccctccattccaaatatttttctttttttgctttcttcaaattatctttattgtgttccagacaacttttaaatatatatataataatttatgtatgtatatgtttatacacaaaatataatttttaagaagattgagaacaaaaggtgatattagcttttgtaattttgacttcaccaaccaaatttgctaaattgtttttgctagagtaattcattgaacttttttctgatctataggaacaaaaacaactttcacagattttttgtttatttttacgatctttctgatttgaaatcatggtaagcaataagcataatccagtggtccatttgtaaacaaattaggaaacacattattaacaagccgcccattattccaaatattggtgactcaaaacggctcatgtttctcaattacacacaataatcataaatcttaccaactcaaattctttttttaatttatcaaaatacacatcatgcttttcttttttaaaaataatattacatgtttttattttcccaaggggtatgtttctattttcaaaaatgaaatatggtctaaaaacagatgaattaaacaagaagcgaaaattgattgtgaatatacttattatcaacgttaataagcaagaaaaagtactatactacagcataatagcattgcgttttagacacttttgtgaatcaatttcatttgtcatttatttataacaaacccaatttagaagccattttcccttgtgtggcctttttcaattgggtatggaatgttggaccataaaagattccatttagagagaaagaatatacacgtgtaggtatccaatacgtcactaccaacaaaatatccaacagtggatcaaagaaaaaatatccaactaatgttttcattcattgtagtggcgatgccatgccattctcctcctattggttcaagcaataacgacaatgttttgagatgatgcgatgtaaattaatgttttgtgattgcataattaacatgtgaatataatatgagattgagacacataatttgaaataatgataacataaatgttgtttagacaaaaccattatacacaaaacactgttaatatatatttaaaataatatatagaagggatattcatacaaactcaaggtaccccatatcatgcttcatttcatattccgcaataactaaaaagagagatatatatggaaataataaatcattaaaaaaaatacaaaaaatacagtgggggaaggtgacccattttactattggacaccattttctcaccagtgggagagccatccacgaatgatgatgacacccccaacggaaaaggtataacttattttttccgtatgaattaaaaaagtgacacttttagatacaatttgagttggtacgtacgtacaatgttcattttcctgggagtccaactcgttgcctctccctctgtcgaattagatttggatcctttggagatgaggtcttgcctcccaccccacctgcctgacgcatcatttctgtaaaaaaaaaaaaagaaaaatatgcactctcaatattcatagctattaatttatgatcttattaaatatcttgactcctttaagtaaaaattacactaacacaccaaaatttatgtggaaaccaatgtgacacttgaaatatatcaaaggtgtttcccaaaatttaggttatagtcaaaatgtacaaattgtagcgtactgctataattttgacataaatcgagaagtaacattttaatctttcctaattaagaggagtatttgctaggccagcatatttaatttcgtttatgtaacacaattattgtccatttcaagaagaactatggaatatgtgagagcctaatgatacttttaatggaataccaaaaatcatgcgcttccaatactaagaaatgagaacactgtttataaggaagtaggaaacaaaggttattaggagtgcaattggaaagcactcctataattggaagtgtttgtttaaccaggtaaaatacagtaaccagaaattactgatatattttaattaaattctttaattattgtagcttttataagaattgggtgtaattacaaattaaataattgattaataaactatgcgctaactcaaatttatatctaattacaatttgacattcaaacacactttttaaatagccctagtaatgacacaatgacttccaaatacactgtaaaagttgtaaaccaagaaaacaaggaacttacctcgcgtcctctcaagctcttcaactagttcctctttccactttctttgcctctcagagaagtttgtgctgccagtaaaaacaaaaaattaattaagaagatgaagtatacattaaatttgagaaacataagctaatgtgaatcaccaaaacttgatcacaaacctttggcttaaagatccttcctgagtaccaataagacccttccattcaccaagctgtggtggctgaatttcctgaagcggtcgaccatgcacaatactaatactagcgtttgacacgttttttgtttgacttctggaccaaggactggcagtcttggcagcatcaaccatggcagagaatcttctacttggtagccgactaggtgacttgcttttaggcggtaaattcagaaaacttggaacgttttcactatccctaacaccaactgtacatggatgaccagcgggattaattgtgctgttatagaactcttcatatagaggcgtctgcaacttcttaagatctaaagcctgacagaataacaaataataatggattttcaatgatacagctataatattagaaacaagagatatttaccaagatgttcaaatcattaggcaccttttcatccaaaaaggctctaattttcgactctgtaacttcttcatcgtcttcagctgtagatgatggcccacaactaaatttaaactcgccttcctgaacagatgctccaagactgttatcagccatttgagctgtctgacctggtaatgagtcgattccacttctatccaactccaaacttttatcaaacttagatggccaatcatcagttggttcagacatgggattaaaactctattgatagtcaaaagaacaaaaacattcatcaatgtttaaattagtggtgagcatctaagatactggacaaggaaagagaatgtccattaccttggtcaagtcgtttgactctaagacagatccaaactttactaatgaactacacataaggtcatcatctttatcatcaatctgacacatctcatcgtcagaattggtgtgcccccagtgtgatcccattcccgagaaattctcgggatatatagttgaacatctcaaactacccatttcaaatatatctttcaagcccgagcaagcggatcttctgatagaagagttcaagctgcaacatcaatacaatgtcaggagtcagcattacaaaacaaatcaataagagctttacaaactaaaatacttacgagtttctaagatttgacccgggtgctgctatgatgtttccaggatcctgatagaaacgaagttagcaagagaagaaactataacagtgaacggcaaaaaaagaattcttacagaaattgtactgaccaaaattgacgtgcgaaacactggatgaggttcttgatacaccccagtgacaaacggatgctgcatgcaatagccaaaattaatgtttgaatagtaaaagtgtaaaataaagaagtcatgtaaacgctagatggacaagtggttactgataattaccaaatatttatactgaaagtgaaaatagtgcagtgcaggcgggtgtttcaaaaacgaaagagagggaaaaacttcaacgaaaactaaaaattcaccgaaatatttcaattgatctgaaaactaaactgttgaccactgggaaactagaattttttaaatagcataatgtaagcttgaaacaggacattaacaaaagaagaaacaaataatagtcctaattagattagcacactatggaagaaaatagcaaataaggaaagaggcaaaaaaaaaaagactaagacaagtagaaaacggattaaggaaagcaagaaaagtccaaacaaaaataataaagctatatatatatgctcgatataaacgggaaactactaacactgttagaaattagtaaatacgtaagtaacaaaataggaaactagacaacgggtaactccataaatgtcaattaaggtctgacaacctcagcttacgctgggcgtcctacatatcagaaaaacatagtcagacacatatacatttaataaaatgctaatgatattccgtatatgtatttatttatagcagatcactatgcatactctcattctttaaggttccgcatatttataatttagtgctactaagtactacctgcaacaactccgatgccgtgggccgtaagtctggttccctgccacaaaattttcaagacttaaggaataggatagttaaatatttgatttgaagaatacaaaaataataataataatantaataataataataataactacacaagtacacagtattcataaatttaacagattgtaaggatataaatatgcattattgtcaaacaatttgaaaggggagaacaatttagagaaaatgtaattttacttgtgcaaacattttagcaggaagtcctttgcctcagcagatagatgctcgggaatgggcggatgtgattttgttgtcccaatatggaagagagctgcaacctgaaaatacattaattttcagttagcaatgctttaaggaggaaaa

SEQ ID NO: 22322 - DNA, 3518 bp, Cannabis sativa
tgacgataacgagtaactacattacaatctaatttagtttccataataaataaaacatgaggagtttgctcattgacaagaaaacgaagttgtctgaatgctctaggattccccaagccacacgcattctagcttagtattttcatggctggttgtggggctgttaaacagcctccgcaaggttgtcaaaggaatcagatggatctgcaacagtatcagaagcattctggttcatctcagcatcagtagacaaatctgaaattgaggaagtaagtttgtgacccctacaacgctttagagcctttcgcattgacatattttcatgaagcctctttgaaactcgattaggtgactggttttctttaccatacagagcagcagtagtcatgcaaatggtggaatcagacatgattggagcataagttggttgactagccatgttggaagcaatgttgaaaaggttagttgtgtttgcatcaggcggatatgtagcaatatatcccagtggttgtccaatgtttggcatgaacatttcagacaggtcactctcatttggagatgctgataaggtagtgggagatggtggaatggtgccaaccttattgtttccttgaattagtgatggtgaggcttcaaaagtggtggcagatggtgccagaataggcaattcaacactttgagaacttccctgaattccaatagcaatgttgtgttgattttttgaacgagtaacatcagaattcttcccagtagtaggctgatccgtgcctactgttgccttattttttcctgcagcatcattaacagttggtgtcacagccattgtaacatcattatgaaccagagatgcagtgttcaaggttgctggtgcaaaggaaaaaagagcattgttatggtgttgaaaattgtccgagagtgattgattgccaccaacaaaattctgatttgatatgtcatgagagtatgcgttctgttggttcgatgattccccataaagcagtgttttcggttgtggctgaccatgaagagagagagcagggattgtattcatgatggtttttcttgctaatcgggtaactaaaggccaagcattgcctttggataagtccgttctatgccgatcataacccgacgttggcaaggcagcccccttaatagcaggtccataagcgagttctggtactataccattatcaataagttcaaggaatgtagaacatttctggtaaggatggcctaaacaaccacattccatacaccattcgggaagtcgttcatagcgaaagtccacccaaaacttgtctcggatttgctgcaaacggatgtgttgaccccttctcaatggtttagtaacatcaagtttcactctaattcgtaagaatggcccccatccctcattcagagagtcagtataaactttcaggaattccccaataatgttacccaatgcttttgctaaccctcttgatttactaagaaagggcaacctatatacttgtacccaaaagggtgaaaatttgagatcagttggagtcaaattttgcaatgcataacgtttttgaagtacaatatggtgattttggaagtgccaaggctcttgggtaaggactctttccatatctccttcacagccgaaggagaccatgaacaattcagtctccttttcagtgatttttgcagggaactgtccatcccaatggattttcatttgtttttgcagggttgatagataaactggtttcctagtgaggacacgagcaaggaggcaatgatcttcagtcgcatccaaagtgggggactcttcctcatcaaaagtaagtattgattcctcctcttcttctaaattgataatacctttcattttatgagttaagggatccatggtattggcaaaagttgataatcaggggcaagaaaagggtttgtggggttgaagatgatctatagaaaaccaaaaatgggtaaaaaaatcgtaaagaaaaataactgccttggagcaaacaaacggcagacgctctataattataaaaataaccgttgatgtttcatatcttgtcaaaattaaatttcttaatatgcgcataatggaaatataacctataaaattaggtataaattaaaaagtaataaaataaaagtaaaacttaaaataggaaataaaaaataggtgtagagtgtaattttctccacttttaaaacatacaaatttagcatttcatgagtttgttgcatttttttttttaaaaattactctaagtactaacttttttctaaactttacatttagatctaggtactacttaagtgtaattttctcactttctctctcaaactttatattaataatatgataaatgaaataataataactttaaaatttgttatatataaataggtttttggaaatagtggtagtctatatataactgattaatgatcaattaaaaaaaatacaatagttagatattcaagactatacatgttgctatctttcatccaaaagcacaattacacaatttaaatattgttgattatgtaatattgattttttttttttatgattataagtttttttttagatgaaatatcaactttattgaataatttagcattctgaatacaaaagatgtaagagtttaccagaaatagaaatatcataaatgctacgatcagataaataccgagaatgtctagcaacataatctgctactcagtttgctaatcgtctagtgaaaaataaattaacatttgggagggtagataacaaaagttggcagtctttgattaaaaggccaaaagtggacctcattgcttggttgcttcgaatagcttgtactgaaacaagattgtccgtctcaattcgaacatgttgccaattattggtctttacccaactgacccaaggcttcaatgacttcagctgcatatcttctgccatggcaaccggcccgtgctgtaacaaggtgaccaagatggttttgggcaacaattctgaaaccatacttattgtcgctatcaaagagtgctgcatttacattaatcttgattgtattttctacgggtctagaccatgactcagcgccatcaccgatgatttccagacagattgatgacaatgaaattttatcctgagctttattccagtgatcaagagctacttgtgcagaagtaagcacgtcattaaaagaggagtatttctttttccaaacaaccttgttcctagccttccagattgcccagctatacatggcaataagagaaatcatatcagattcagcttgcttaaagatggtctccaaccaattgccgaaagaaacgccaggatcaaaaactgttggagttgcacattggctccaacaatcaaatgcaaacgggcaagagatgagggcatggctgatggtttcaggttgtagattacaaatagggcaagtgacagaaatatcgacatgcttgatcactagtttgacacaagttggtaatgtacctgtaacggctctccacaaaaagtttttgacttt

SEQ ID NO: 22323 - DNA, 4323 bp, Cannabis sativa
caatccttcatcaattgtccctctgatgtagcttcagatttcctcatctcagcagccattcggtacccacttctcaccgtatactccccattcctactataatgccacataaccttgtcttctaaatcttcgtgaagtggcggtagccttaggatcatctctgcatcctcacgcttgaaattagcccgaataaaactctcatcccacaccccactcggatgtgtgagatcaaccacacaaagctgttgtggaaaaggaggcttatcatagactttaaagcttgtcggccggggcaaccaagggtcctccaatactcgtactttctgcccattaccaacacgccaacgataccccttcaaaataatttctttgccccacaccaaactccgccaaacaaaagacgcatgggctccacacttagccgccaacacacttttatgaggaaaatagctcgcctttaacaccttagaacacaaggaccccggttggcgaagacatctccaaatttgcttagcaagtaaagcttgattaaacaactcaaggtcgcgaaagcccaacccaccttcctctttcggcctacacaaatattcccatttacaccaatgaatctttttctttttcgccgtagacccccaccaaaatcttgccgccatccgatggatactagtaatggtgctcttagtgaggcgataacagctcattgtataagccggaatggcttgaacaatggctttaataagaacctccttgacacccatagaaaacatatgacccttccatcctctcagcctattccataccctattcttaatcacatcaaaaacttactttttattcctaccaacaagagacggtaaccccaaatacttaccatgattatccaccactttcactcctaaaaactcagccaattccaacttcgttgtcgctgccacattcttcccaaaacaaatttccgacttttggaaattaactacctgacccgaggcacaagaatacttactgagcaatgtattaaatcgttgacaagcctcccatgttggatcaaagaagatcatactatcgtccgcaaagaaaagatgagacacggctaaaccttgccttccaaaccgaacaccaacaagttgattccctgcctcctcccgttgaagtaaacaagaaaatacttcagcacaaaaaagaaatagaaaaggggatagcggatccccttgtctaattccacgttgtggcacaacctttccttgaatctctccattaatgaggaatgagaacgtcaccgaagtaacacacgccataatcttagcaatccactgttcatggtaacccaaccgtaacatcacctcttgaaggaaccgccattccaccctatcataggcttttgccatatccaatttcaacgccatctttgtcccattacgaaacctattctttcgcatacaatgtaagctctcatagccaaaaatcgcattatcatgaatcaaccttcctttaacaaacgcactttgggactccgaaataactccatccaatgtctgtctcaacctattagccaaacacttagaaacaattttatatataacattgcataaactaataggtcgatattcagcaacattcatcggcttctccacttttggaatcaaggcaacaatggtctcattcaaacaccccatatccgctcccccatcaagaatattaaggcaaacacccaccacatccttattaaccttactccaaaatttttgataaaataaagccggtaacccatcctcacccggagccttcgtcggatgcatctccttaatagcctgaaccacctcctcctccataaacggttgcaatagtgcctcattcattactaaagaaaccttcggctgaactgcttgtagcacttcctcaagcaccccccaatctatatccgaagccgatctgaaaatatccctccaccgtatgttgcaccaaaagcttatccgtttgccacactcccatagcatccaaaattcctttaatctcattctttttccgtctcgccgaggctttatggtgaaaatacttagtatttttatccccccattttaaccatagagctctacttctttgtctccaatacttctcatctttttccatcaacacattcaacttcctttcatttttttttatctcagtccagacacccggttgttggattgaagtgagctcctgcaaagcctttttaatcttcgtaatactactagtactctccttccgttttttcctattccacaatttcagatgccgccccactctgatggttttgccccgaaaagatgtagccgaaccacttgtaccctcatcccgccactgatcttcaattatagccttacactcatcatcatcacaccacacctcctcgaaatgaaaccgacctacccgcttaatacgtccatccggctgtccctcctcggcaagaggaatgtcaacaactaaagcgcggtgattcgactcccaccaatccaacaattgaatgtcagccccttcaaattgttgaagccattccaaattacacagtccccggtctaatctttccatcacttgggacgactcatgtccattgcaccaagtaaactcacttttaacagaacaaaaatcaatcaattggcatcgatcaagagtctttttaaaagcttccatcgcagcagcccctcgcgtacgtcccccacttttctcagtcagactaacaatttcattaaaatcgcccacacaaagccacgacccattaatcttcccaccaatcttttgtaacaattcccacgaaaatttacgttgagatgcctccggatgtccataaaaacaagttaacatccatggcgaaaaaccattcccagttacctcggcaacaatatgcccaactgaactcgaatcaactctcattttaattccatctctccacatgatcagtaaccccccacttaacccaattcgatcaaccgcccaaaagttatccccaaactgcaacttattacacaacccctctgcttgccttctggtgagcttagtttcagctaaaaacactacactcgggttaaattcccgaagatgggattgaagagctcttaatgtccaagggttcccaattccttggacattccaacttaaaagtttcattgtgctcggcggccctgctccgcaaggctcgccgctttatcaaaagaaattggagatcgtaaatccatagatgtagaaatacttaccccattatctatgttggaattactaccttcaagaggaatatgagaccccatatctgctccaaatacgaaagccgcatccccaaccacttcgtccccaacagttctcataatccctggccttgtagactgctcttcagcttccatagctgcaattgcttgatgcctatgccgagccttattcttaatggaaatcttcctacgctgccccacttgcatcttcccttccttatctccatgatcagctcttccaggattgaagccatcattttccccagaaacttccaattcaacaatcacctgcttccctttgttaaagttcctcttatcctgaacttctcccttcccaatcgcatgccctgtgttctttcgtttttttacttctatttcttcctcagataatgaatcagatagttgtctcaccctacccaattgcaacgaagacccactaagttcaagcccatccatctttccaccatgacccacttttaattggcccaaagtcttatcattaattgagcccaaatgctttaaatcatttgttcggcccaaagcttccccagccccactactctctccacaactacctaattccacgtgtcccactttcaaagcacctcccctagctccacaattcgtgccactactttccataaccgtcacctccgcccgtccaccagccaccggagtactctgcaatcctccattgaggtccacactttcatcatcatgatgtgtagcattttgtctaccatcattagcaaacagcctggtattgctttgatcatgcaactccttttctcctccattgattctcatctgcaattgcttaaaggctacaaatgcattcggaagagggtcttcgtctctcaaccaagagccatactttggaacaacctgactgtgttcatccttttccgttagtgcaaccttagcacactctttttgttcgtgtccccataagccacacccaaaacagagcattggaagccgctcgaatttgaattgaacccagtgttgccttccatcactaggaatgaatctgcccacaaaaacatttttctgcagtggaaagccaatgcgcattcgagcatat

SEQ ID NO: 22324 - DNA, 3739 bp, Cannabis sativa
aaactcacacttctgattcaactacacacatatgctaagtctgttaactattaattactaacaatattggcgtccataaactattaatcactaacaatataggccaacaaaacaagaaactatctttttattttcataattagaccatatggtcattacaaaataattttgttggataagacgatacatgcaagctactaaattatttatgggcaaaagttcacttaggcacattattggcagcaaaattacaagttctagaaatacaagaaaaaacacaacctacaaaattagtagaaagcataagacaaaaggccgaatagttcttaatctgctagcaaatctccttacgattgagagaattgatgactattctagaatcgctctccacaatgataaacttgtaatctttgagctttgccaactcgatcgccaaacaacacgctgccgcctctccacaaagagcatccgaaaaagccaattttgtcgtgctaacccaaattacctcacccaaatagcttctagcaacaatcgcaatacacaagctttcaaatcccactttaacatcacaatttattttgatccaatcttgaggaggaggaccatctccactctgagaggaggtggagtaggaatacgagtagctcttaaatttgcattagaataacgaatagagtcaagacaatgattcatatatactaaaccgcttaagattatgaaccttttcattttgggctttccatatagtatggattacaatagaagcatagataaagacctcatcaatattgatgcccctattattaaaactgtaaattaacttgacccagtcccacatacagatatttgaatcaaacactagaaatataccccatggagaagatctccacaaatagaaagctagttcacatttgaaaaacagttgctctaaaaattcttcctctttcccacacaaagggaaaataacatcttcaatttatattcccttgccaaaaactaccctaatcgggagaactttagataaaatacaccactaaagaatcttatgcctctctaaaattttactattctagagtttattccacaaggacggggcaacctcacacggtggaactctcagtaaggcttgaaaaagacatgttgatttggaagagaatttcctgttacgctctttagtccagacctaattatcttatcctagaccagaaggtctacccccttttagaatagcagaaatcatttcattatcaagcaggaaaatcagtttctggatgtcccaatctcctatgttagttagaaggtttgccacctttctcaagaaacaatcagggtgactgttggacttagcgtaaaaggatttaccatgggtcacccatggatccttcctgatgttggtatccctaccatcagagaccactttacaagcaccttgtctcaagaggtcactagctttgaccatatttttccaaaactaagaatcagagttattgtacttgcacccaaagaatccttttccttcgagatacttggctcttaagatttcttagcaaaggaattgactcacgaatagtaaattccattcccacttagctaggaaggctagattcatgtcctttgttttacaaaatctaagaccacctctggacttgggaaggaaaatcttatcccaagctctcaaccaaacacctcggttccctttctcaaatccttaccaaaaatcatgcaccaagctatctatccttgagacaagtctattagagagtttggttgtttgcatcgcatacataggcatggacagtcccacagatttgataagagtagcatgactcgctcttgaaagtgttttagctttccaaccctgtaattttaaggtaaggttttctacaacaaaattgaaatcaccatccttttgtctagatcggaataaggggagcctaaatattatagttcccttctggtcctccaattcccatgacatcttgaatcccttgtttcacattctcaggggtacttttactgaagaaaatagaagatttgagtttgttaacttgttgtcctgaccaagaacaaaagttttgaagtcccaatatccttttgcttctgccagagaggccctacctaccatgattaaatcatctgcaaaaaaaaatgtgggagacagtagggccgccccagatctaacaattacccatcgttttatcaagaagtttcgacaaaaactctgccgccaaaataaaaaggtagagggagagggggtctgcctgaagaaggccacatgtcggagaaattttcccaacttgaccaccattgagacacacattcagagacgtagtcaaaatatattgggaaacccagttacgaaagaccttcggtaccccatagcaacacagaacatggtcaataaattgccagctcatcttgtgttaggctttcttcaggtcaattttaattgcaaaagaaccttctttggcctttttcctattaaatgaatgaatgatttcttggataatcacattgttgtcatggatgcttccgccaagcacaaaagcagcctgagtatgacaaataagtcacgggagtaaaggtttaatcctatttgcaataattttggagatgaacttatatgaaatgttgtaaaggtatagaggcatacaatgttgaactctcttcgggttttgaatcttcggaaggagcactaaattagtagcattcatccccttgtgcatcattccagaggtgaagaaatctaagatcgcatgacaaaaatcctctcccagtgaatcccaatattgcttaaagaaaaggtccgacataccatctagaccagagccttatggttgcccatagcgaacaaactttacaaaattttatcaagatcaagggcccaaactatatcctccctctccacagaggagagcttatcggtaataatatttgcacaattaagatcttgattcgagtgagatccagagaatatttcactaaggaaactagtgaacttttttccaatggcacttcaacctgcgagcaagatgttattcctgtctaggatgctctcaatagcattacgcctccctcttatagtcacagatagaaaaaagaagttggagcatttatccccttctttcaacaaagagacacgtgtcctttattttcaataaagttccatcatttcaagtgactcattaagggcgcgcctgacctcacgctctgccttctactcacgagatccaatgggaaatgattgaagatgatcatgtttgcattccaactcttttatagtagcgtcaattttcccaaactgggatttgtgccaattcaacaaggcaacctgagtggctccaatatttttaaacaccctggctggggcctaataatgagcaactgaattccaagcctagccaacaaccaactttcttctctcatcttgggtccaaccttcttcaaatttaaaggttcttttaagcttctcgtcatcccctccaaaggaaaggcacataggcatatgatctgaattacaagtctaggatgagcgcaatatagcttttgtgaacaaattaatcaaaccttcattaacttaccccttgtccaatgctgacttgacgtgactaatacccaaaatgatggttgtcctaagttaatttatctccttcaatggtcaagttgatgagaggccgagatttcactagatccaccatcggccaccaaatttatccccctctttcatgacttcaaacca

SEQ ID NO: 22325 - DNA, 2699 bp, Cannabis sativa
aaatactaaccaaacatgacttgtgttttaaaaatttcaaaaactattttttttctcatttctaaaaacaattttttaaaacaaaaaacaaaaaacaataccaaacatgctaatagtcttcgatcgtaggaccttaactagctaggatgactcatatataatatataaatttagaacattacttaaaaagtaacgtcttaattaatgatattttataaatttcattacattaaattatataaaactccatattatacactaataataatataatatttagaaagatggtatatacaccactaatgtcttatcatttctcataaatttatatagagataggctttaggttatatataaattaattaatcactgatcagataacaaaagtgtaacttaatttatataggttttaatattacatatggaaaacaaaaaacaaacattacttaaagaataaaacccttagataatcaaccttggattatagaaaatataattaagttgttaaaactaacaaatgaaactctcacacacacattacactctttatcacaaaacaaaagcctcactcataactcttaatttcatgatcatcacttttgtttgttaataaaattcaaggggaaggaacaccaccaaagccagaaccaccaccaccaacaccagtaccgccgagtccaccaaataatccaccattgccaccaccaagtccaatcccaccaccaatcccaccatttaagccgttaccgcctccaccaatgacgccacccatcccgctaattgggagtccgtcattgccaacaccggagtatccaccgatacccccgtaagagaggaagttcttctgatcgttaagccctttgttattgtccattggcacatttctagcagctactacactcagaacaataagaaccaacacaatgcatgagtaccacttaccacaagccataattaattcttattattagctaattagtaagtaacaaaattattattaatataaatattttgtttttgatgagtatacttggttctatatggaagggtttttatagccaaaaaagagtgatgggtacagttgtttcgatcttcaaagttcttttctggagttggatagaattattatatttatcattattggtagcacagtggatatgtataattaatatatattatatatgtttatttaatattcgacagcattttttaaaaatgtccctacggttaattagtgatatgtcttaaaagttattattatattaaattatatgacatgttatatacttagttttagcaatattgatattactaattagagtcaaaaatggatttgatgctttaaataacatcagaaaagagggttatgatcaggtcaaagatggatatatagtaattaagctttgtccttaattatatcaatcctgaaacacagatttgttctctcattagatagattgtgtgagctatgagagcatatttctttacttgccatatatattttagtgctcaagtattggaaagatcaatatatgtgattaattggtttattaaagggcatacataattcaaagttgaataaatttcaaaaacatgtttaattatatattcacctatatacactcttccacctgctgtatatataccatgtttaatgttaattaattaataaataataaggcctttggatcgaatttgagaactatatattcaattggttctattataaagagaattaaatttgatgtgaagattagaatcagatgaattttaattgaaaaagtctcacaagtagatagagaatatctggtttactttaaaaaaattgattcactcaacaaaatttctgtaccaatataaagttttattttgttagttttttttctttaattccctactaaattttacttttcaaaatgtaccaaacatatagtcgtagccaattaatctggtctcacactaattagagtaattatttctttaacagctgcctaaataaatgtatatgataataatatgatagtagatatcagcagcaattattaggacatgaaagataattaagtttgcataaatttcctcaacaaaacataacaatgttcggtccacttattatatgcttcatctgcatattatattaattaatggataaattattgttattaagtactaatatacatacatactaatgcatacatgttattattgagtaccagtggtgcctagtatttttagacatgttaccttacgattggttagcgatactattatttaaaagttattatattaaactatatgagatctgatatttagttagaccaatagtaatattaacacataggataatactaagcactaccagtacctttttagtattattctaactaaaatatatatattcaaatacacttgggttaatttaataggttttaagcttttttttttatatataatgcataaacactactataaaattaactttttctattggtttaatttataactgtcatttatttttgttagtttaacaaaatattttaaaaatataagaatattccattaaatttaactatatttgtagggctagttttataaatatatataaatattaggagaattactccatatatactgtttttttaattttttttttaaaatttacggtttgaatttctaaaatagttgcagcgctagttgca

SEQ ID NO: 22326 - DNA, 1366 bp, Cannabis sativa
accatattggttgatcctttagttttaggaattcgtggagctggtcttggaattcgacaaagatgtcttccaaatcgtgagctctaatggaaaataccaaattatcatagttgagtgaaccagtgcaatatatggaacatggttatcgaattgaagtgctgataccatgtaaaaattattatgagaactagtttttttattaaaaaaattagcatttaatttttgatattaagaatattaagttttgaaattaaaaaaaaaaataaatgtaaggcatctggactttttacttgtccatatttataagttaacaaaagtgttagtaactagtaacaggtgtaagagaattgtaacattgaatatttttacccttaaaaaaaaagaaactaaggaaaaaaattcatacgtgggctatgccccaaaaataaaacaccaaaacctgtcacaaaagattaaaatagaaaaattttatgtgaaaaatcctatcataagcaaacaaattaaaacttctaaattcaaaatcaactgctataaaaatattttcatgtgtgagaacaaaaataatgttctcagagtattaactttatacctattttatacctaatccgtcccacttgacgtttctaagtctaatattaacttttataaaatacattatttaaaatagtattaacttgattggaacatcattcttcgagtgaacaatcaaatgagtaatgtgcaccacaaattattactcatgcaaaaaagtgacactaaactaaaaagtgttatgtcactgtgtgtaatatcaagtataatttataggtacacatttcattactcattactcaggtcaaatctaattagacaataaactaataattaggtggtgatttgcaatccaataagattgcaaattagtggtgagttaaaatgccacaattttattgataaaaaatatatttaaaaaaagttatattattatatacgaataaagatatacatatttttaaaatttgtcattggggtttataatctggtgcaagtgttgttgttggacagttttctgttataactgttagttatattcaattaagttagttagtcatttgtactctttctttcagcctatatataaaggctattttgtaattctttggaaaagggattgagaggtgtgagctgagagttctttgtaaaagagaatgagagttaaactcatgtctcttgagtgatctctgtagtgggagcaagactccattgtgtatagtttctggtgtccattttgtattctctaagttatcttcatcaagtaataaaggcaaagcctcaaggtagttcctcccaaggattagatccaagtgttattcacttgtgattgaac

SEQ ID NO: 22327 - DNA, 3110 bp, Cannabis sativa
  modified_base (2536)..(2543): a, c, t, g, unknown or other
tgttctgtacaggaatggatgctcaagtatcttatgcatttcactccgaaagaaagttgcatccagaaaagtttaaaaatcaattaattaatcaggtacagcattatttcatgtaaacaaatactgtggcaagaagaatgtgttgatcaatttaacaaatttttataaattacatcaccagaattatttgattattatctattggatttcctgcaaataaattggaaggatgcgctactgatatttgttttcgtggacttgatcagagtacttacttgaagcttggttgcacccaaggatggttttgtgcttcgttgattcatcccgcttcaaggttacatccttaaacttggtcatagttcttagaatttaatatctttcatcttggtagtctgtattgtgacagcatctatctcgttacaggaatatagcacagctcacaaaggtcatgatcatgaaaaaaccaggtcaatgggaagaactcagcatacctagctggtgagacagaatctgttacctccacaaacaaatgattgtgaaaatgcgcgcacacacataatatatatgaatctattctctgttatgctatattaaatgattggtttaatacagtaatctatgccggtggttgattaagatagatctacagtttgataggctctttcattgcttaaaattagttttgtaactatgtctcatattttaatttattaattccatgcctcattgcacagagatctagagtcgcatttttacttcttccgcatggatataattgaacattatttttttttttaattattaatgcttttgactttgatttacagtatcaggtctgttgtttgcctcaacttgcccagtttctctggtggactcaatccatggggaaaaccgaagggaaacaatctgcatgatgttagttttcgcttctcaatatttccttggtattttggttttagtggcttgtttccaaactttaatttgtctcacctacacatgctaaatgctgaccaattaatttcttgtagagagacttgacacctccatacgtagacgatggccttcttgagatagttggttttagaaatgcttggcatggcctggttttgctagctcctaatggacatggcactcgtcttgcacaggtacaatataattctaatactaatacacattacaacatcatctcattatgattttcatatctataaccattataattctaaaaactcttaattttgatattgcaatgtaggcaagtggagtccgtttcgagtttcataaggcagcagccagccatacattcatgagaatagacggcgagccatggaaacaacctcttccagttgacgatgacaaagttgttgtggaaatctctcactttggtcaagtgagtatgcttgcagcagcatcctgtcgatccaaaagtgtccatgatccatcatcagcattatattgtatgaatgatgaagatgatagtaatgaagaagaaaatacagaaggttcagaagagcgaaggaaattcggtgcagcagacacctttaaattaccggacgatgttgacattgctcaactcagttaagttgatgcggtacacattcccgcggttctcagtttgctttatagaaatcttcattttccatccactgattaggctttgaaatttaaattcttactcatacaacttcatgatacattgtatagtagcaaatgtagtgatataacttcatgattccttttttcactttagcttatttagtatatttagcagatggcgtgtaaatataaatatatctgattgtatttaatggatgtttcttattcattagttcatttataattaacacgtttgcatatgaaatggccttacgtatattgcggtttgaaaattgcaagtgacactctctgtcgagtttttgagaaactataaatatttgaagattcaagaaaaatcaatagtgtatttagacaatgagttttagtgattgcagtattaattaatcttataccatgaatcattagttttgagctcttaccgtcttagcctttagaccatctttaatgcaatgttaaattttacacaaaaagaaaaaaaaaaaaattgtactatatttagttcactatttataagaggaaattacacatgatatgggattttaattttttttttgaaaaatatggcacttttatgtttgcccattttttatggtattttttaatttttaaattgttttattgtatttcttatgccatatgtgtaaacttaattttaaaacccatatttaatgtctagatgcattattaaaaaagtaaattatggcataaatacttaagttttatgttaggtagcagataagtacttaagtcatatttttggcagtaaaaatacattttgttactagcgtggaatttttgttatttactttttattttttatctaataattacaattctacaagaaaagaccttttatcccggtttttaagactttttattcgctaaaataaaaatcgggatgtatgccagtgggataaannnnnnnnaaaaaaccgggataaaaggggtattttttatttcgggtttttcataaaaatggggataaaaaataccttttcgtcccggttttaatgaaaaatcgggataaaaaatatcccttgtatctctatttttagagaaaagtgtgataaaagggtactttttatcccacttttaatgaaaaaactgggataaaatgtaccaattttatcccacttttgataaaaaaaaatgggataaaatgtcacattaattttgatcccattttgcgaatgtataagtcttttattttttttttcttttaattttattacatttcatttcattcattttttttcaataataataaatataatttttatttttgtaattatatagagtatgtataaaaaaaacttaattaaaaatgaatgattacaatcatttttaataacaacaataataatttgtaagttcgattctaaataacacattacatattatgcataaatctctaaaatactacacagtgtctaaaaaatacaataaaagactactaattaatttttatatatcaagggaagcaattgacttaa

SEQ ID NO: 22328 - DNA, 2260 bp, Cannabis sativa
  modified_base (2158)..(2160): a, c, t, g, unknown or other
ttctaggtgataaggcgccaagcccaaatgggtacaacagtggtttttttttttaaaaaaaaatacttgggaaattacaggttccaacttagtggaggcagttctgtcgttcctttactcatgaatttttttatagcaccactagtattactctcattcctacaacaaaatgtcctcataatgtaagtaaatgtaggttgattgtttgctgcaacatagtgtacaaagtgactactaagatgatttcttatcgtcttagagaggtttttttgtctattatctcaaaaaatcaaagtgactttgtcaaagggaggtatatatatacatatatatatatatatattgctcacaatattatgatttttcaagatttgatgagacattatggaaggaagaatgcaaggcccacttgcatgatgaaaatttgtaactctactagattagacacattattgtgatttcaaattactatgcactcctttgcaaatcaaagggcttacagaaaaatatgaataattgaaattttctagaaaaatataattatataagttttctttgaccatttttgtcctttgcttcacctagaagcaacctaaaagcctaaggataaaatggttctataccataaccctgaatgatccagacattataaatgtctacatatctttccccactaattctaagatattttacaatatttaagtgattctgtaggccaaatatcgcatttcactgttgtcgggcataaaatatgaaaaacataatatttcatatataacataattagtacgcttataaaattcaaatatatctccataattacaaaataattattaaaagcctactttcgaaaataagccctaattatctgctaatttcttaaaataaaactaagcggtcattacgaaattgatcttcaaaaggtgtatgacacccttgactaacattttcttcaagaaatgttaatggcacttaatttcccatcaagtttataatctaatcatggtttatgtcactacccctagattttctttcatgataaatggttccatcaatggataccttattgctaaaatgggtttacgtcaaagagatccaatgtgtcctttgttgtttgtctttgggatggagtatcttctgagaattttggccaaagtgacgaatcttcaaagattaacattcatcctagatgtgaaggtttgaggcttactcacttacgtttcacaggtgatcttctgttattcatcaatggaggttttaatttagttcatctgttcttgagagatttccaactcttctcagatagctcgggtcttattgctaataaagaaaaatctgcaatttatggatcttcgatgataggtgagacttgggatagactgactggcatgattgggttcaagaaaggttcattaccttttggttatataaagatgaagatcagtaacaaaagtattacaaaagcagattgtgaatgcatgattgataaaaaaagatgcttagaattcgtatgtggagctcccgcaatctatatcgtttactagtaagtatgttttaattaactcagtcttaatttccatcgatactttcttgtctcaaatagtaattctttcaaagactatggtgaatagaataaatcaattatgtcaagctttcctctaaaagggaagagctgattatgaagggtcaggtcatgtggcttggagtgagacttatatgtgttgggatttatgccttaaacatttaatagataatgtattacataatatatgaaatataattataaagataaataaatacattaattatagaaatatacttaataaatatctaaaaattccttattcatatggagatgatataaacttgtaaggtcgtacaagagaattaagattatacaatatgaataaaacaagttggtagtgtatttgttgacctcgcttttagtcaacgacaatgagtcaattatgaagcggttagaaatgtaataaaatagagcaaaaactaataagtagtaaataacaccaggttttaaagaggtttgacccctttagtttggtaatagcctgctccccttagattgtattaatttgagaacaaagaacacaatgttttctctctcaaagctctcacaatgaaatctctgagtatttctctnnnatctctctctaaagcaattcttttgatcccttttacagtgaagctagatcactatttataggggcttaatgtatgaggcaagatttcccttttgcttaca

SEQ ID NO: 22329 - DNA, 2446 bp, Cannabis sativa
gagagagagagagggagaaagagagagagagagagagagagagagagaaagtgataagggtatgtgtgtgtggtgaagtcgaggatgatatttttaagatgatgatgatgataatgtgtgtgaaaatgaaaatggcaatttgatattttaaaccatttatgtctatagtgtaacttgttagataaatacttgtaaataaatatttaagtttgtgtatttttggtggtaatatttataattgttaaaatatatatatataacaaagttattttaatggataatttttattgaagatattcttataaatttataatttttatagatacctgtagttattatttacgtttaacatgttgatttatttgatatttaaccgtttgatacttataaatattttaaaattataatttaagtatttatttgtaattaataatcaaacttaaatatttatttttaattaaaaattaaatttatgtatttataccataaattattgatgtacatattttgttttagtagattttattaatctaataataaatgtttaagcttgatgatgaagattaatatgaagatatttggacttgaaggctgcgttttctaactcaaaaatagtcgttacttactagtatttaatatttattaataaagtgttattgttagacaagtagtgttattattgtttgcttgtttgtttaaaaagagtaagagaagatattttgtcgtatgtatattgattattatatttgattttgatcatcaattcaataatagaatagaagaatttaattcaatgtggatgatgatgatgatgatgaattaaaagtggggcccacaacaagtgagtattatttgaccgacaatgttcacatgatagaatagtactactatatatactactattcttctttctttggatactttttttttgttaatttaacaacaaacaaaaaagaagaagaagaagaagaagaagagaatgagtgtgatcaagttttattaattacaccaactttcatggatttgtgtttgttttgtttgtaatgttgtaaaccaacaaaaaaataaaaaggaaaaacgacattattttaactaaaaggtcataaaaaaaaacgacatcatttgaaattaaaagatgcctaacatatttgtgaagcaaagcccaaagccaaaaactttggttggggtagctttcggtacattatcatgtaatgaaatttcatagtattcatttcaattaatataatataattgtaggtataatatccctactcacattttattctacaacgatatttgagtgatcttatcacgagagggaactctaatcttatcatcacaaaaggtaactcaaatcacataatagtgttattatgttacccttcgtgataagattagagttacccttagtaataagatcactcacatatcattgcaatagaaggtatgtataaagatggtcatagttcttcttgtgtgggaaggacctcaacttgcaaccattttaaggttaatgtattaagccgtacttatctcagtctctaaaattattattcactaaaaaaagctgtagatagaatgttcactacttaatccccattcacattaaaaatcaataacaccatctaaatattaataagagtcattatattattataagtcataattatcacaatcaaatcaatgtcacctaaccctaacgaacccaatgaaaaacacaaaacaaaagacaaaaattgtgtcacatactcatgtgtcttttaatttttttgttgtatgattcttagttctaatagctttcgttatcaacattaattgtggtttcgtataattgactcataatattatacaatatgagttgaagaagtttgaaattgaattagaggaatctttgttcaagtgctttttgttaggtgtgtaagtaagtaagcaagcaactatatatttttatataattaatgcatgcaactatactatatatatatatatatcataattaaatatattaaacttggaatcttctatcattttctgctaattatttgtatatataatatgtattttatacaacatgtttccttcgtcggcctcataggacatttctaatggtaaatattaaatttagtgttaaatcagcacaaataataaaattttaacattaatttttttattctaattacaacactaaaaattatactaaaattatatattttttttattatattataaataaacacaaataatataaatacaaaaaatttacttataaatatattatttaaatattaaaaattaataaaaatatttttggtgtagtctatagtgtcacactaatattgggacactatagacaatgttatatatagaataagttttttttttttaaagaaagcatgttatttaaatcaaatcagctgttacaaaagcactaataaatctaggacaa

SEQ ID NO: 22330 - DNA, 2514 bp, Cannabis sativa
  modified_base (731)..(737): a, c, t, g, unknown or other
catatataatgtatatcaatataacttggaataatcaaatatcttatcttaatttattccttgcttgttgccctcaacatcactaataattcctacttttccaaaagcatatatatcttatcatcagacacagaaattaaaataacttgttactagttactttatacaatgaattattggagtatatattacaccacaccactcatttccacttttccaaaagcgtacgtgattcaaaagcacaaattaattaatcagcacaagttatcactatcaacttcttatgctataaatgtgcatcaatatatagtttctacttttccaaaagcatcaacacttatattgttcattcccttttttatcttaattaatagcatcaccactcatttaagcttttccatacacgtacgtaaaactgtgtagtgagtgatatagagaaactaatcttaatatgggtggcaaaaggactatttcaacctcagatgagaactttgtgtagtgagtgagtgattggttggtgagaaagtgagtgttgttgttgtcaataatatatgtattaaacatctttggtttttttttttgttgttgtcttgtgccttaatttgaagcttaattatttgtcttcacatgtattacagaatttcttaagtttattctaaaaatcaaaatgagctagaagactttgatttttccaacaatccccaaatggcactacaagaaatgtcactttnnnnnnnacagttcgctactgcgctggtaaaggtaacttttaccagcgcacatttgcagtggctaaaatctaacttataccagcgcatttacgctctggaaaaagtcatttttgctagcacttttcattttgtgctgacaaaagttctaataccaatattgatttgccaatacatcagaaataaattttattttaccagcgtaataccaaacttttgccaacacaaaaatgtgctgacaaaagtgacatttcttgtagtgtggttcttccccataggggcattgaccatgaattccttaaatatgtctctactaatttcatcactaattgggagcaattgtagaaattgcttccttcaaaaataggaaactataacaattgctatataggtatttgggaaaggactcgaaactccttgtgggagcaaaccacatgcctgacccatacccatcttgggcgcatcatcaattattgacttaaacaacattttttttttgttgatttgtttgtagagtgttttctcatttttttctcacattatgattattagttttatttatttttttaattagcatccgatgtaatacgtacattccacatattataatactctaaaatcaaagcagaaccatgtgcatatataccatctttcaaaaacattttaagtataaaaaagttaaacaagcgtgcatgttatttggtctaaagataatattatataattactccactaaaagattcttacaataattaattaattaattaattaagctcttcttattattgatatctaaacttgaaaaaagagagagtaaagttcattcactacaacacaaacttaattccttaactctctgcctattcataatttcttgtgtttttcatccgatcaaactgaaaccatggctgatttgatggtgggaggagctcttctctctggtttcatcaatgtccttttcgataggattgcttctaaagaagttcttgactactttagaggaaggaaacacattccaaagcttctcaaacagttggagactacgttgttgtctgctaatgtgctcctggatgatgccgaggacaagcaacttggagatgacaatgtgaagaagtggcttgaagatcttaaagaagtaatttatgaagcagatcacgtcgtggacaagattagtactgaagctttgcgactcaagatggagaaagatgaatccgaaagcatagcaagtaagttcttgaacttagtcccaaccatgtttagttcatttgacaatgatgtgaaatctgaactagaggagatccttgcttcattagacaatcttttagctcaaaaagagtgtcttggtttgaagaaagttagccataaaacaacagcactgcatagatcaccagctcctttgctacacgattccaagatttatggaagggagggtgataaagaggctattgttaagctattgttgtctgatgatgatgattttggtggccacaagatctctgttgtttctatagtagggatgggtggtattggtaaaactacacttgctcaaagcgtatactatgataccaatgtccaagaacactttgacttaaaagcatgggtgacagtgtctgatgattttgatgtttttaaactgacaaaaataattttggaggctatcactaaaacaacatgtggagcaagggagcaacatcaacttcaaaatgatttgcaaaatgctttgaccggtaagaagttttttattgttcttgacgatgtatggaatgaaaattatttgttgtgggac

SEQ ID NO: 22331 - DNA, 1746 bp, Cannabis sativa
aattgatgtgaaattatataatagttaataaaaagtgtcttatgaattggtcaaacacgtgtgctaagctaacaattaaaatacatattttatttaggatatttaatttaagatgtacctgtgaatatctaaggtagttactaaatttatggtgattaagagaataaatcattaaattagtcacaggtgttgtgtatgatggtggaattgataatggaaattacgttcatcgtgtctagtcactattttagattattaaaaagagtataacaatattataaattatgatagcataagagttgagttaccaagtcgtccttttaggttttatttttttgaaaaagactacagagaccaagagagaggagaatgagaaaacgaggagagccttgaatcgctagagtgatcagctaggattggataaacataaacaaatttggagatagcaaacttgaagatggtacgtacatggagtaattttgggtttttaagggcatagacgcaatcacaatactcactagaagaaaatattatttaaagactcaaggtaaggaaattaggtaattttattatcaactgcatgattaatggatttgattatatcattaatagcatatatttgattgtaaatttgaatatgattattgaatgtactcattgtttgttgattgatttcaatacaaccatggttggtaatggccattggatagattgtggcccaaatattggccattggatagaccgtggtccaagtagtgatcattgaatagaccatcgttcaagaaatgaccattggatagacctcgcgtatgagaatatatgtgtggggtgtgttgtatgtgactataattttctctatatggattgtggtataaaactaactttacatgaagtaaagtatgtatatgtataattatgtgttaaataggaattctttctgcgtaatcatttgactatgaattaaagaggcatgtatcatattactagccttctggtatattgtatttactgtgtgtgatactatagtattgtcatgatattaatttgatatgttgtacttgttggtgttgtaccaattctatagcattaatctgatatgttgcacttgttggtgttgtagcatttctatagcattgatatgatatgttgtgtttattatctaatgttgtcgcattgttgtggcactaatttatttggttgttttgttgaaatagatgttatagtattttatgtagtatctgtgttgttggtttgtagtattgtaacacatagaattatatggaacatatttgggtgaaatgaaattaaaaaggaaatatctcatgattttaattatggtaattgtaagtaaattttaatgtatttatctgattacatgtatgtaggatttccttactgggcttagaagctcaccccttatttttaatatatgcaggtaaggtttaatgagtttgacggtgacaagttggactcaatcagcagtgtgtgtattcagagagaatctgataactgagcgtatggtcatgggcatttggttataaattttagagtcttttgaatatagctaaaataatgttgtcttttgttattttttttctatattattgtaaacaagtgttattttcttttaatacacgggtaccctatctttaaaaaaaaaaaaaatcattttaaaataaaggcaacattagtattttaaagtaaagtcatttatgatatttttatgaaataaatgagggtgttaca

SEQ ID NO: 22332 - DNA, 4111 bp, Cannabis sativa
  modified_base (560)..(566): a, c, t, g, unknown or other
  modified_base (613)..(650): a, c, t, g, unknown or other
gagagagagagttgagaaagagagggagtttccttctttttttaaaaaatcttgattttttaataaaatgagtaaaatctatggtttatctcatatattcagcatatattaacccattaaaatcagactattaaattaatctaaatccacaaaatgacaaaaaacttatgggacaaaataaccattttgcccctcccacactaaaagggcataaataacacataggggtattttgggaaattctaaaatcccgactattcccgacattcccaatgtctaactatattggcccgatataccaaaaattctaagatgtgattcttagccaaacaccgcgttccaatgttgaggggcactgaatatacaaaaattatgaaatttcatatatgacatataaaatgcattctgaatttaaataaatcaccataaataattaattcaatactaataaataattttcataattaagccctaattatatgctagtttctaaattaaagctaagcggtctttacaacaagtattatgactaaagtacattagtcacaacaaattgtaannnnnnngactaatacttttagccacggaacatttagtcacaacataggaatannnnnnnnnnnnnnnnnnnnnnnnnnnnnnnnnnnnnnacaaattttattgtgactaaaactaaatttttttgtagtgatactaaaagtattatttgggacgacagaagttgttgagcctaataatgaatcatttgttgcaacaataataaattagaggcttttaccataattcgttgttttcttgcttatattcaaactcaattcgaatgcatttcaaaactttcagatccaacaatgcaccagaattagtttttaaggatttattctctaaacataggattatgaatgatttttattgtgttgaaatacccgaacaaaatgtagtagttaaacgaaaacatcagcatctgttaaatgttgtttggactctattttttcaagcaaaaattttgattaaattcttgtcttaatgtgttcttgctgccacttatttgattaatagggttcctacacccgttttataaaataaaatcccttatgaattgttattttaggaggtactccaatatgataatctcaaatcatttggctgcctagcatttgcttttactttgacttctcataggcttaagtatgcttctcgtgcaagaacttgtgtcttcataagatatccccaaggggtaaagggctacaaaccttacgacatcaataaccatcaattctttatttctagaaatgtggtatttcatgaaaatatttttttttacaccttaaacatggatggttccacaactgaccctttttctcaaattattattcctagtcattttgtttctaacacaactgtttctaattatcccttagacaatgcagcgctgctaatccatgttcctcaggtgccagatattacccctgaaactcacacagacaatagcccatctgattcttctcctattgctaaagtacacattccccaccaaatgacactcctccaattgctttaaggagatctcacaaaaactcacatcctccaagctaccgtcgtgattttgaatgttattctacaattcagaaaaaatcttccacaccacactacattgataaatttatcaattattctaacctatctgatagtcacaaagctaattttatttatgcagtgccttctcataaagaaccccaaacataccagcaggccattcaattcgaccattggctcaatgccatgcaattcaaacttaaagctcttattgccaacaagactttgacaatcgttcctttgccacccagaaagcgagaattggttgttgttaggtatacaaaataaagtataacaatgaggaatccatagcatggtacaagacccatattgttgctcaaggttacacgtaacaagaaggccttgattactttatactttctctcctgttgctaaaatagttaccttaaaattgttattagctataacttctattgaaaattggcataccttacaaattgatatcaacaatgccttcttaaacggagatcttaatgaagagttctacatgacactacataaaggactaactcgtccatcctctcttaatgcagaacacaacttagtatgcaaattgcactgataattctatggtttaaagcagtcctttcgacagtggtacaagaagctctcggatgctcttttgcatgaaggattcacacaatctcaagctgattacaccctcttcacaagaggcaccacaccttcattgccttactcgtttatgttgatgatatcataattacaggcctaaacatctccattttacatcaattacaaacttctttgcatcaacaattcatgctcaaggcccttggcactcttaaatacttcctcaattttgagattattggcactcatgatgatcttttcatctctcaatgtaaatatacccttcaactcttagaggataaatgatatatgggcaacaaaccaagtaagactcctatggatcttaagaccaagttagacaatgacaaaggagaatcacttgaaaactcttctccttatcgacaacttattggtcgactactgtatttgacactctcgagacctaatatcacctacgctgtaaattatttgagccaattcatggctgcccctcacacacctcacgtacaagcagttcatcatctcctgaggtatctcaaaagcaatccaaacaagggactattatactcctccagttcatctttgcaacttactaaaaatccttactgccatataagagtgagtggccctagagtcaaacaatacagaaaagtaagagttgttgaccgagagcttacctgtgaaaacagaggggctagcctctacatctgcctgagttagagcaaacacccttgctgaagtgggattttcagttgtcttctgttcttctttccttctttcttaagctgtgggtagtctcttggcaaccaacactggaaacacccttgccctctacactcacccaggtgatgctttttacaactggggcattctgagtaagtgtatcgagtttcagaagcaccctgtcaatttcttcgaccgtagttcccccagaacaacttattctaacctgagcaactgggtgcaaatggtgccttccatttctgatcagtggtcgagccactaccaccccttccaaaactaggggtaggaggagtaggggctccaccagcgacctgagttcctcgagactcctgactgcactcaattgcacactcagctcggagtgcttttcccaccatgtcgacataggtagcgttgtcgtcagtggtaatcataagatcatatcttatcttcgaatttaatccattaaggtacttttgtttcttaatgaaataagttggaaaaattctcgaggccaacctagctaatcaatcaaattgagttatgtatttagtaacactcatattctcattttgggtcaactgggtaaattcttttctttttgcacttccgaccgcttcgttgtagtactttgcgttgaacaactcctggaacttttcccatgtcatagtagtaacataacaagtcagggacaccatgtcccaccaaaccaaggcatcctcctgaactgaaatgtggcacatgccattttgtcattgccagtgatgcccatcaaattaaagattctagtaatgtccgtcagccactgctcgactttcatcacattaggacctcccagaaaaactcgaggtgcctgcttgcggaacctattttcccattccttagcagcctgcaggtggttaacatcgccccgactacataccctccctctagggcctctacttcagccacaaacattcgtgggaaactgagctccctgaacaccactggacctcaccgagttatcctgactcttggtatttcgcctacatccatactactagaatagcctgcgtaaccaagagctagtctggttagattgtgatcaataataacttactaattacagcttattttgaaaatttaaaacatgcgcctaatcaactatcaggccactaacatgtttcttattaggcttttctta

SEQ ID NO: 22333 - DNA, 2217 bp, Cannabis sativa
  modified_base (919)..(941): a, c, t, g, unknown or other
caggcactcattcttagttgctagaaaataggtccaaacacacctactataatcattaactatagaaagaaaatatttattccaaagtcagtaggcacgttgcatggccctcaaagataaacatgcacatattcgagtatcttctttgttgtatgccttgctggtgtaaatttcagcttatgttgtttccctaaaacctaagtttcacaaaatggtaaggcataagaatttaaatttttaattatatcttgtttgtatagttcttttagaccttgttgattgatattcctaagtttgtcatgccacagctgcacatccaattttagccctttcaccaaacttgcttctttggctagaacaatttctccttggggaacgtacaacccatcaatcttttcacctttcattactattaaagaacctttggtgatccttaagcttttgtgcatggaattgtatatgtaaccctcatcttcaagctcacctagggatatgagatttcgtctcaactcttgaatgtgtcttatgttcgtaagcactttgattccaccatcacactttttgatggcaatctttccagtttcaatgaccttgaatgaatagtcatttcccaatagaactttacccccatcaattgatttataatcaaaaaataattctcaactcgaacacatgtgataagtgcattcagagtcaataatccactccccgttcattgaggagtctgagattgaaaatgattctccatctgttgagccatcatcactatcctatgtgattgcaactgaacctttcttatggtgatgatgcttgttgtccttcctatctccattgtgagatttgttgaagccttgttactccttgtacttcttgcaaaatctttgcaagtatcagaccttccataaaagtaacactttcnnnnnnnnnnnnnnnnnnnnnnngatcttgattgagagtgatgttgtttactcttcaaacttcatttcttgggtgatctatctctttccaaatacacttcttccttcttggattcctttgacttaaatgcggcaagaacatctctgccatatttgatggaagccctgacttcttgatatacgattgggagcgatctcaataatgatggcttgactttcttcaccaaccttatgatttatattagcaaatcctacaataatctcattgaacctatcaatgttatcatctaaagaaagagaaaaaattattctaaaaccatataacctttctagtaaatcaatcttgctaccaattgatggctctaattacaattctttcaacttgttccagactcctttttccatctaatctgcaacaagttttcttctaacaatattggattgagacatgatgatcatgtaatatgccacctcctttatttatgctagctcatttggtttcttctctgctagtaatttctcatctccaagaattttggagactttttggtgcactaggatccttttcaaactctctctccatagtgcaaatatcttgttccatcagactttttcaatttaaatctcgccattgatgacattaactgtttcttcagaaaatgcatcagaaagaatcatagcgttcttgatcgatgaccaagttctaatttgtgagaaaattacaactaaagtggagaatcaaatcaactaagctttaatcaacaaataattaacaatgaaaatatttacgatgcttaaataagaatcaaagataaaatagggaagaaaaaagcaatcaaaatagaaatgattaaaacaatagaattaacaccaagatatatattggttcaagttctctagatcaacgtaatctatggctctactctagttttgaaatagcacagaaattgtctttattgattgagcaagaacaaggtacaattacagtcgagttcgattctctgttacgattctcttaaagtgtttatctttcacactcttacccaagaatctactttatctacagaagattgttcatacaaatcccaaacccaatctctctcttttttctgtatttcactttctctacctctcaatctctctcttcaatctcaatctttaacctcgaagtcacccctcaaactcgtccctcctaaaatgataagtgttggtggtaattatagatcagtgatatggatccctaagtcagtggctacagatgataagttgttaagttagttacgacctaacgaacttaaca

SEQ ID NO: 22334 - DNA, 5010 bp, Cannabis sativa
agagaagtttagtttgcccattgatatagtcaatttcagtaattagtcctttttataattagttttggtcaaattactgttttaccattctaattacttcttttttttagcaccgttaaaccgttaattgattaattgacaattgactagtgaaagtataatttagatccaatctatatttggacacaacttctcatttccagaattaacacttggaaccaacattcgatctgttgagaaagttaggattccataaatgttggattttgaaaaaaataatggattttgagatggaacatgaataataatttggacaccttaatactaacttttttaggagtattttcaagggtttatgtggtgtaacttttttgagtgaattttgaatataaaaaaaaattaatatgagaagtttagtgtgcccattgatatagttaattttagtaattagtcctctttgtaattagttgtggtcaaattattgttatatcattctaattatttctttatcttttagtaccgttaattgactagtgaaagtataatttggattcaatctatatttgtacacaacttttcagttctagaattaacacttagaaccaacattcgatatgttaagaaagttaggattccataattgtacatcaaattcccagtgaatcaaaaaattaataagatgaacaagagttcataattacttaggattcaggccaatttactattgatcatcattgtgatttgtattaggtcttgatagtaaatgacacgtttgataaataaaacttaattacacatccgtccatgtcatatataatctttattatacacaacacatttacttagatgtcatactacatcagaaattcgaatcgagattgcttgcatcaaagaacaggaatcaatgaaccatactagacaccgttaattaaagctttcataactttaatatgttgctactattctatttatagctaagtgatcttaattctttgtacaatataagccacaacctcatatatgaataaaatatgagtaaaaaggtttcatataaagctcgatatgagtaaagcctatgaccaagtcgagttggactatcttcaggccattatgagtcgcatgggctttcatgataagtggattactctcgttatgtcttgtcttacctcagttcggtataacatcattcatggtggtcatgttgtgggtcctattaccctgtcccgaggtatccgtcaatgcgaccccttatctacttatctttttatcatatgtgctgaaggtttatcaactctcatcaacaaagctgaaacaaatcgtgtcatccaaggctgtcggcttgcttgtggagcccattccattacacacatgctttttcaaatgacaactatctcttttgtcaagcttcgagaggtgcaagcagggtgttattaaactccttcatgagtttgaacttgcatctggacaaaaggttaacattgctaagtcatctatatttttcagccccaactctgatgctcaaactcggtcacaaatctgctccattcttggtatgtctgaagcttctgatggcagcctctatctaagcttgcccaatatcattgggcacaacaaatcatccatctttggatttttgaaaaataaagttcttgcccgtatcaacagctgggatggcaagtttctttctagtgccagtaaagaaattctactcaaaacagtgatccaatctctgcctacatatgcaatgagtgttttttttaatccctttaagcatttgtgaggacattaagaagcttatggatggatttggtggaagacttcctcaagcaaaggccgtggtgtcacctagatgtcttgggagtgaatgacagtttcaaaagatgagggtggtatgggttttcaacaccttcaagatttcaaccttcctatgcttgctaaatagggctagagattattatgtcaccccgagtccttggtggggcgtgtttttaaggaaaaatattttccctatactgattatctctcggccgaccttggtaacaattccagttttgtatggcgtagcatttggggcgcccaaagtgtggtctgagctggtgctattcgaactattgggaacggtctcaccacaaacatactttcccacccttggcttacacatatgtcaaatatgtttgtctcatcaactcattctgccttatatggacaaacagttgactctcttttctcaatcgaggatcgaagatgggatgctgaaattgtctatgatttgttcaatcatcaagatgctactttgatactagcagatgttgatttctggtcctggtcgggagatcgctcaggcactttctctgttaaaagtgcctacactcttttgcaaaatggtaaatctaagcgtgcgggagctgataactctggtttctggcacaaactgtggcatttaaagatcccccccaaggttaagaattttttgtggtatgctacttctgaatgccttccaacttgtgttaaaacacgtgagaatctcatctactttcccaacctgaaattattgttcatgctttacaaaactgccatcttgcttcgcattgttggtcaacattatggcattaccatcctctttcggcagttggctagaagaagtttttcacaagtttgatgagaatcaagtaggtcatgctgcaatgttatgttgggctttgtggaaggcccgaaatgctactttttggaataaaaaattgtcttctcacactgagattctggcgtcggctagtacaactcttgatcattggcgaaaagctcagggtaacacttgtctattctctttgttttttgaaagaaaaggtgatggcgctgagctttggactaaaccggactccaacaacatcaatgtcaatgtcgatgctgccctatttgcacaggaaaattcttatggatttgaaattgtagctcgtgacagccatggaaagttaattgaggctaaatcttgttaccaaggaggtgagtatcctgcaaaaactatcgaagccattggtatcaaggaggctctcagttgggtgaaaaataaacaatggcaaaatgtacagatcgagacggatagcatgcttactatccaaagtattcgcagtaatcaaaagatgaactccactttcagacttgttattcaggattgccaactcttactatcctctctacaaaatgtaaatttctattttatcagacgatcaacaaatcgagttgctcatgctgtgacaagacactctcgatctttccctagtcatagtatttttgagcataatgtttgggctgacttaaaagctctcgtgtactctgaatgctaatatttcaatgaagttgctatttcatcttaaaaaaaaaaatcttagccttgaagaatatcaaaatattggctatatagagacttgatgtattttgataaatttttgatattcttgagatgcttgatatagttggtgagcccttttttacttaattcttgtttgctcattttgaaaatagtcatgtatattaagatcaactatagaatctaaatttttgaataagatttgctctttttctgatatatttttttaattattttggattattgatgtaaatagtataaaatatgaatattttaagtaaaatatatttatttagtgagatatttagtgtgaattgttagagttgttctactaaaagtaaaaaattctacactaaattagtgtaaccattggaaatgttccaaatgagtttccattacatcttaaattagattgcctttttattttatttgcttgcaaatttataatgatcgtaaattttttatttttcttttaaaaaaaaccctagtatagagtaaagtttagccatcatatttatttatttggacataagagagaatagagatgggggagacattaggctaagcctttacttagctatgttactaaaagccgaaatttgaagtaaattcaattaattttgagattttattatattttaaaaaaactaaacattggtatacacccgtgtatcctaaggcagtaggggaaagtgaatctatttggagcactgatctacacagcatattcaacacaattccaaccaaaccatagaaaataatataatagaaacagatgggattggataaatcttcaaattccaaaatccatactttctgactgcacataacaaggtgcaggagcccctttcatgggagctcgtgtctccaaaatccccctcataacttggaccatcttcattcccaacaacaatttggcaaaatccaaatcaataatcactcggaacccaaaacctacccctcatgccggggctccagaccaacaatgtacaccattacctatgttctatagaattaggagaacccttttcagatcccccatgaaaaatttcccttcaacataaaaaagtcaatgctcggaaggaaagcaaaatcgaagaacaggcactaacatgtttctttggttttcaaaaagtgtcccatagttttttattatttgactaaatattactgagcgttcctcatgactactcctaggcctgaaagttacatcaagtaacagaacttgttgttgaaaccattggcttactttgctgcatcacttgcctcggcagtttgagcttctaatgggcactgcgagacatatgcttttagctgcgatgaaaaggggattacatgagttcttagtaggaaatgaaatacaggaagaaaaatgaaagacatataagtacaacaagttatgagtgtgcacaaccacaggctgtgcattttttttaatgtggagagttggacggtttttgtacggggtgtttggatggtgaaaagtgtacacgttttataaaaacaatatgaatggtttcatttgaatttttacagtgttaaaagcgtcagtataaattctcaaatttaagaagataagagtaaagttattcattcagaatttaaagaataaacttataaataattaaacatacttaaaactagac

SEQ ID NO: 22335 - DNA, 5107 bp, Cannabis sativa
tggactaatggtaatctatttcaattgtgatttttacaagtacttcataaattatttagtcatagattccattaatacccaagtagataacccttcacataacattgaagtgccactaatgataaaccttaaactatcacactacatatgtatgatttcaacaaaaagaataacaacataacataaaacaaaagccttcaaaaagcatattttaactattcttcctacacacacataataataataataatcttaaatattcaaaaacaaaacaaaccaaaactcaaagctcatcatctctaacacgcccagctctgtccttagcagcctcataaacttcctctgttttcttcttaccaccatccacacccctactcacttcctcctccatctcccactctttcctcttcacttcctccgccgcttccttcgccttttccgccaccttatctttcccctgctttgccttttccgcggtttcgttcgccttctccttggccgcaacgctggcctcgtaagccctttctttggccttctccccagcctcgtgagtcctctccttggccgcacccgtggcatcataaaccttctgtgcagcctcgtaggccttatccttagtagcctgagccgcctcataggcaatatctttagccgatttggcagtgtcatatgctttgtccttagctacattgatggtttcgctggttttatctgtggcttttcttgccttgtctgagctatattctccagcatctgttaaattatcatattacaaacaattttatatataatgagaaattttgtcaagggcaccaaattacaacaaaatatttcatttccaatttctattatattggattcaatgtattttgtaaatcgtataaatggtttttttttttttttcaattcaagaaatgttgccaagtatttttatttttttggaattgccatgtaaattacatttttcattttttaaaaattatttgcatttctagattaaaatgtttctattttaagattattattatttcaagattatgttgtttccacccgaatatcactttaaaactatgtgttttaaaaaaaattaccattctattttattaaatcaaaatatagaccctaaattgatttttgaatgaataaaatttaataagaatttaatttagagatgttataataaaattagttatatttttttttatctgttaggattagaaatgatttttaaattagttaactcactttaaaaaacatgagaattcaattaataattttgaaaaacacatctataatagtatttagccttaacaaaataaccatatttagtcacacaaatctactaaaaattacactgtaaaacgacccatatggttgttttgggaccataagtgtaaaattcaaagtggttatttttcatgttagtttctcaaattactaaatttcattagtagatttttaacactataaaataaatgtaaatattacctgaagagacttgttggaccttgtgtttggtgttcttagcagtatcagaaacagtttgataagctttatgaacaccaccatctttagctaattcatcaccatttgtgtccttaaacccaagcccttcagtgatcttctccttagcccattccgtccaactctccgagctctctttcgcctctttcgccttctccgccgccttgttctctgtttcatgtagtttttctttcattttctcgtaattatgagacacttcttcttgcttagtagaagccccacaagtggggacaacaatcaccatagccataataatagccaaacataacaaatgcctaaaaggcaataaactcttagaagccatgactctgtttttttgaataagaaaatgtttgaagattggaatgtatggaggttattataaatgttggcgaagagggttgtggaagaattatgcatgggattgtgaaatgacacgtagagtggtaagggctacgtggagggttttgagttactgggtgtttgacacgtgtcgtgtcgtgacattgtaggtgtcaaccgtatatttatcgaaaatgatttctttacatttaagtatcaaaaaaatttgttcttctttattggatcggtgagtgtaagcatttgatagggtcagattagatctgtacaaacctgtgctgtgtttccatataacaaagaggataacaagtaattgcaaacacagtttcataaataaataaagataaaaaaaaaaggaaatacagcttccttggataagaagtttagagtactgtttctattctataatgcacaagaattatactaatacattttttatttattttgtacagttaattatttataaaatatcttaaatcactacactaatatattttatagttaataaataaatagattagtgttaaaagcttaaccgacctaatctaattctcataattcaatttaatttaatttataaagtataggtatctatatttaattatttatacaaattgaatgggcttatactaatatatataatttttaatggatgtaatttaatttattattagtattagtatttttaaaaacaaatataaattttttattaatttatcaaatcaacaaaaaaaaaaaaaaattgtatctcaagagaaatatcgcccttgttaaacacacatttagaaaataacaagatactctaacaaaactatgaacaactatattagcagatcgtttaataaaataagaaaatattattaaaaagtggaagaagtttacgacaatcttctataataactctaaaagaagagcatagataatgaattttaaatagcttaaactactaccaagcagtctgattccaactccactttccgctatagttgagttttaatccaatttagcgcttcctttatattaattgcttcagccaaattcggaatgtctttaccagttaccttgattgtattctcctatagcttaacccaaaattcagctctattaccagcttcaaaaactgaaaaagaagcctctgaacctttattttgtgttaacttccattatacaagacaactcattgatgagataagaacaccatctaccatggcatacgtttggttccaaaccaacttgtttcgaaccttccataactcccagcacaacacaacaccctccccacacttgtccttattccacctttacaaaatttgatcaaaccagcaacaaaaatcggcccacccgaaaacctccccaaccaaaagtgcttgccagaattgagtagcaaatgaacaagaaataagcgcatgaaaaatagtttcctcacctcttcaacaaaccagacacatgatttgaactgggaccctctaaacatataaacaatttaaagcaacctgtcatactaaattgagtcgagttaattagtattagtattttatagcaataaaagtaggttaatgttcgtttgaattttaagttaattacaaagttattcactttacccaaatatttgtaaaatccactacattttcacataaaaaaaaacacaccaaacaaaaaaaattacttcatataccccagaaaaatttaaacaatggccccttaacagagacacataagaatgttatatttgttcttctgaaatcattaaaaatcgtagttgacatggcttaatgaagtacacagtacacttgtttttccatgccaaaaaaaaagagagaaaattaaattaattgaccaaattgtcgttacaaacaataaccttttctaaactaatctcaccatatgctcataaagttgcattaattaaaatactaaacagcccatcaaaaatttcagaatccatttacatcatgaaagaaaaaataaagtaaaaaagaaaaataaaacctacttacaaatccaatcctaacatgtatgtgtgctaaaactaagctaaaaacaactaagaaattttgcatgtcttcttgttatggccaaggcctttgcacttgctacattgtaactggcgtttaataatgtctaatgattcaacctgcttcatctttggcctccctggtggtcttttcgtcgggggtggtgtcacagtaactattgcctgatttgtatcactcacaaccggcttgtccacgtctggaacgggcataattgactcggcgtaagctagcctgtaagtgtccacagtaaagtatctagagcaaaaatcgtaagggcttctcccagtgcattgcattgcagcaatagcatggctgcaaggcaagcctgtaagttgccaacccttgcagctacaatcccaattctcaatatcaacaacctcactaccagattctccccgaacctcgaacgagttaccatgtaaggccaacacttctagagactgagcagctaaagtctctttctgaagctcttcttccttggatggtgttagcttcgtcgcccattggttggaatcaactcgacgtgtgtagaatgattccatcatcttgcctcttaatacatcaatcatctgtgttattggtaactcgtgtgcctctgatacccaactgtagaactgctgcccaaagttcgatgtcatgtgattgtaccttgctccttcaaaaaaggcgttagcccagtgtgctggctcgctctcaatgacccaattgtgggcgtctggggagatgccttttatgttttcgacactccgctcgaaaccttccagtctgcgcgaataggcagcagagtagaagtcgttaaccatgaatcttcttgcttcatgagaaaactgacccttcaaatccctgttaagtttctcagcgagatggcgtaagcaatagcagtggtgacatttatcaaatactacagccaatgaattcttaataccattctgaaaatcagcaacaaatgtaagtggctcagatcttgagattgtagatttgagttctgtcaagaaccaaagccagttctcatcagtctcggcatccacaacagcaaaggcaactggaaagatgccatcatcaccatcagcagctgttgcagacaacaacacgccttggtattttgagtttaaagctgtgctatcaagaaaaatgagagggcggcagccttgttgaaaacccacaattgaggcatggaaagatacaaa

SEQ ID NO: 22336 - DNA, 6007 bp, Cannabis sativa
taacaagatactttaacaagagagctcgaaagaggttgtttagagtaggagatttcgtgttgagatgtgtctttgcaaatacacaagatctagcagtagaagtgtttaacccaaactaggaaggcccgtatattatagaagctattgtaggaatcggggtttataaattagcttggcttaatggcacgctaataaagaatcactggaacagcgagtatttacggccttattacaagtaattttattatgtaaatgctacatctatctccgtaatcattgatcattgttctgaaaaaaaaaaagttgaattttttaaagtgattataaagttttattttctttaaaattacttgggggcatctatgtgtataataactagattctacctagaaatatatactataatgctaataacctaaaaattaaaattttttcacaaaggaaaggataattgattaaaattatctttggacaatatgaagtcaagaattgaaaaatcttttctttaagagaaaattaaattagcagttgtaagtgagattctttctcataaagcaatagaaagctatatgcgatctgagtatataacagctcacattattatagcatgtattataaacgagatacaaacgtgtcttgaaaaataatacataagctaaaatatgaatagaggattaactattcatataagcaatcaaaaaatattcaaaatagttcttaaaagaactattcaaaatatttgaagtttgctctaaatatagcagattataaacttctcataaataacatagcagattgcaaactgctcacaaaaaacgtggtagattattaactactcgtctaattcaagataatgacgatggaacgcatgtaacctaaaaatatcttaagctaaatcgaggaagaaaaatgtttgattgtgaatttaaacgcaatagaagaacataaataactccaaaaaagtaagataaaggcataaaaataaatatatagatcagcaatgttaaccatccaacaaagtaatgtctaaatatattacaaaaaaaaaaaataccacaaggggcaaaccattgcctcggccaaaggacaaatcgttgaaaaaaaatgactaagtctacatggttagagacttagttggttattcttcttcttcttcttctttgacctcttcctcagcatttcccgcctcttccttcttagtttgttcgcacaatgctaacatctctctagccttgtctcccaaaaaactcagatccaacccagggttggcgaaccaagcttgataaaagatcgactaacgattgtattgtccctagctttggcataggccttggcctcttcaagctttctatcagcttcagcttggcctttcttgttcgcctcttcaagatccttgatatttttctgggcagcctcgaggtctgtcttgagactcttttgttgctcctcggcctctttcttaattttagagatcttcgactgcaaatcagaccattgcttagctaaaacctcatgatgttccctgaacttgcaaagtttgacattaagcatctcgacactttggagacctctctgttgagccacaaaagataagagagatgcatgcgagaagtaaagtcagaggaagatgtgtaagagaaaagggaaatatacaaaaaaaaaaaaaaaggaaagaagaagacaaattaaaaactaaccgactgcctaaggtcataactccttgtcacaagactttcaaagctacccttgttcattaggtctcagtcactttgttcaaaagacttgtaatgatggcatttattggtagcatgcagcgagcaaatctacgagccttctgtgctggtataaataggcaggggcaagaaggctctagcagtgccatctcgggacgagaactagaaaacttaacttgatgaacggacccaaatgcctgttcatcagtgctcacagcaactagagcagttgagttatctggagacttttctagctcgatgctaagttgggtcgaggctcattttttgctggaagtaattttggtccttttggaaggttccttggttgatcccgagggatctcctattgaagttgtgcgcttcatggattttttgatggggcagtaggtctgcacaacatatcttcaggatcaagatccatacctgggagacagagaaatatgtcaacacttgtttaaaataaataacaaaaatgtggagagataatctcccacttaagaaaattaccatagtcatcagatgaggatgaagattaaaataattacgaaactccctagaataggtaatcatgtaaaggtcaaaggggtttagtggacacatgtcctaatctggatggcttgccctatcgaagttggtgacatattgtttggtaattctgaagtaagaaccattacaacttaattgaacgtgatgctcggggtaccaactattaaatctatgggcaatgcgatctacacaattctaaatgtaaaagttacattggctatccttaaatttaactagtgaggtacgctcgaccctaagtacagtcggagaccatccacgagcacaaagtttattacctcaggaggcatcatcttcagctttcaaaggagttatgttcttcaaatagtgggtgcaagccacataaacactatcttcctcgtcagcaagaactggaacctgttgccagtccaaatattttcggactttaaagtcatcaatggattgtatactgccgagaaaatttcaggtcttcaatttatcttcatgtaacaagaaatctgctgctcgcggcccgaagggaagaccaagaagaattttatgcctcctttcaatatcaggagtcacaataggcctcctcgtaaccgctgtcaatacaacataaataaaataagtaaaagcctacacttattaaatttaaaactcgaaaccaagtttttgagataagacaatacttacatactgtgcaaaacgcatttgtgttgatgggggcgagacaaaatgtccaaaagaattcgtccttgaattcatttttattgggcagcctcacaatgatcctttgatcattgttgtgggtcccgagatagtaaaaaccacctgctcctcgcttccttgcaggacggacttcactgagaaaaagtaaagaattttgagtggggttgggcactctcacttcaaaatatgatacaaaacctttaaactggccaatattctatatgaattcggtaccaattgaaagggagcaatgcctaagtagttgcaaaactcctaaaaatattctttaagagggagaacggctccaactcttatgtgctcgaggccccaggtgcctatcctagatggttcgctagtactacaaccttcttcacggatcactcgttcaggagaataacaactgagttctcctatggcaacagacctaactaagcatccttgtccatacttgatgccacacgattttaatacctctccaacataagatcctatggatctgactttaggctcaattagttctacctcgaaagtaactgtagggtcttgaggggtctttgattttcatgcttttagggccatgaaatcaaaatctatgtcacctggtgaaaaagtaatagtgactggaggtaacaacagaggtctcgataaaggaatatcaattgaattctgagattcaggccaggcagcttctcgcaaaaaataacatttacccctcagttatttcttgcaaaaatcacctatagcgactagagatttcatcttggttggttttcataagatgatccctaatctttgcatcttttaattcgagaatggttttaggtatgtgtattttgagtttgaatggaatgacagagatctaacgataatttgattctagggattctggaattgtgatttatagaacaaattaggtcatacttatagacaatactatctcaatttcgaaaaaacaaaacacaagtttaacccagaaaacctatgaatcgaataacctaaaatttttctagccctagaactatgcagacaaataaaatcaaaattacctaaaatagcaaaacaatgcagataaggaaatatcaatgaaggaaaagaaattatgaatacatagaagaaaaatcaataatagaagaaagcatattacttactatcctcactgaaattgctgaagaaattggaattttgcgattgaacttttgaagattgaaaggctgagtcctaatggtttctagaactataaacgtaatttgatgtaacatgcaagaagaagctgaaggaaaatgagggcatgaagaaagcttgaaggtttgaaaaaataaaaatggtgacatatgctctcagtttcaattttatacccaataagtgatcaccgttcgatcaaaagaaatctaatcgaacgaatgggaacattgcaaaataagaacagtcagtgcattaaatactcaatgatgtgcctcgaagttctgaactaccaaaactcaaagcatgtaaatttttaaaagagttaaatatgattatacccctagaatcatttaaaaagtacttttcagggggtaattgctatactcgaaatttgattatgcatcagaagctgacacatgtcctacaaaaggaatatgaatcaactcaaagaatataataatgacattctataaataaatgcaatttaaataactcgttccaattaagtatatctttgatatatatatattcaaacttgctgactactcagccttatgtgagacaagaataataactattaaactagaattgattagacatatgtctgtctcgggataaacatagtaaaataaacgagaagagatatttaaagatctcgtgaatcgttgactctcctacacaagcagagtaaaagtgataacactcaaccgcctcgcattattatacacaatgtagtgatcatctcacatcactaatacaaaaaaaagggtacaataagatgaagtacttctatcagttaatgttttttcctattaagatggataagaaggagaactcatatttgacgagatgcaaccttcctaagcagcataatcgtctaaaaaaaattaagagcagttggatagctattagatattatcccatctgtaaataaataaaacgtggggaatgtccacgtttcatcagtagttgtaaatgaatcaatcccaataaaaataactgtcaacctatattcttataaataggggcagaatccatgggaagagggacggcaaaaaatagagagaaattttattatttcaaatattgagatttgtattctgtgtttgagaaaatatccttaataatatgaactagtggagcatgtagattttaactacaaaactacgtaaaatatctggtatttattattatcattaatttttgtagtgtatttattgcaaaaaaggttatttatttagttaacgaaaatctacgttaacacattcctatgtaattagctcctacaaatattggcctcatctcactattaaaggggacgaacttattcggggagaaaatactcaagagagaaattttgatctaaaagtgaattactcagagatctttgtaaaagctttcaagagagatcaaggtctgttgttcctttactcacaagtcaatacaataaaaaggggaatatgctatgaccagtatcactgggtcgaacctctataatttctagtgttttctttacttattactctttgatttctattctttatttattcttatcgctttaattaagacttattgtcgttggctaaaagcgagatcaatagtatatatattttgttgtatgatatatttttttttttttactgtgtataatatattatttattatttaacattgatatttaatttctattttattatatataatgatgatatataattttgttagtaatgtatacatatttaatagtagtatatataattttattactgtgatacattttttgagtattaatatactagttttagtatcgatatactttttttgtggtatataat

SEQ ID NO: 22337 - DNA, 3425 bp, Cannabis sativa
gtaaaataaattccaacaatttgtccaggtgttctttccgtagtgaattgagaattgattaaaatggttgacagtacttttcatcaacgctatgaaggtcagttactaagctattctttctcttgttttttttttctttcactcatgccaattgctatgactctagcattagaagagataagctacatctctcttgttgaagttctgttgatgtgagactaccatttggtcacattttaataatcttaattaactgcttaattgaaaacatgatcacttgttttaaaagtttaatctcaattcttttggcatgaacagttctttacaattgtactttagcagagtgatctcgagtttaaaatatacttctaattaaagctggagtttcattagtgtgatatacatattccctcatctctttactttttctcgaaccaggacccgaaaagcccataccctgaaaacctgcatgaatataacttcaaccctacttatgacatatctaatttcattattgcatgaccgatttttcctttcttcttgttattcaaagcatgaattaattcaaaagccactaaaatattatcacttacaagcctatagcaacaaaagcactttgttgaggagatatccaattagggaatgaactttcattccctgcactatctcttcaggcttcatcttaaaaatcacactgcgattagtctaaaatgcaatggtagagaaacaagacacttattattttcttgactttcttatcacagaattgcggagtctcaagtctcaactctccaaagataattttattaaagatttggtagctctctttttgaatttcttttctacaaacaagtttgtcccatatgaaatatgaacaaagacaatttacatttatgcaggtggacatggaaaacaatgcaatgaaatttgtaatatttgtagcttcttgtgccaacgaatttgaaaatagccctgataaaccccctgattttcaagcttgtatagatgagatcacatataaactcaatcaggtagttatgtgattttctttgctgattttgcgtgcttctgtttatggtgatacaagcaatttcacaatgtagattgttataatttttgggtaggtgaagacaccgttttgtttgttctaaagctttatgctaatgggttactttttatgcaattcaaattgaagtcaagatgtaatgatcttacacctgctggagatgtaagtaataaatttttgtgttttataaacgttgaattctttttatattcaagaagggtagttcaaatagtcaggcttgtggtatgctcctatgtcaggcacctacgtagtatttgctatagttttgttctccttaaatattataatgcttaatatatggggtttgatacagtttggggaatttctcagtattagaagaaaaatttgtatttttatgatcccttaaacagtgattgatatcaatttcatcttcctctgaaaatattaggaacttctggcctatgaagatacgttccatgatgatgtgtgtggaacttctaaaacttggttacaaaaattaagaattgtagcgataaagggaatgttaaagggcaatgaaaatcaatatttggaggattgtattcagtgcttgtcaaatacaatatcttcacttgtaagataatttgctttcacaattaggctgcaattcaattttcttatttggtagcttttttttttttatttcgtgagatcaattttttattgacatgattgctgcaggaagtgagttctggtggatctcatcaaaaaaagaaaaaagaaagaaaaaattgagttcaggtggaaaaagtagctatagaaccggacatacaaatcagttagctacagcacattgtcttcgggccttctgctttcagcaaaaagatccaagttctaaggtgatgcaagataagccagtataaaaaaaattattattatgatcattatgcaatatgatttttttgaggagggagtaagagttactatactaaatgtttgcttggtttttttgtacaagcagcaagttttggaagatatcaaaatcgcaattggcttatgggtgaagatcgttactccaaatggtacctctgaagaagaacactttcaagcttcgaataatatgataaatttactccatagtgttactgatttgttatcagttaaggttggtgggatggttgttttagttatgtgtgtgctttaaattttaatattctttcttaacttttggaatataaaacaatttgtctattcataatttgtttgatgacatcaatatggcctttcttttttaatgtgatattgtagagttgcatgatggactatcagcccaggagaagttattggctgtactatgggaatgtaggatgactagacacgctctctgcatttcaccggttaatgaggcgttctttacgagcttagaagacagtttttttgataaaactgccaaatctattgaattttggagagaacgtttgagagagacaccgttattaatcggttttcaacacactttagatatcacagagctagagcgcaaagttcaagatgctgcttcaacctcaaatgtaatgttttctctcaagtagccactgttagttttttttagttgaagtacttattaacttactttatgttgtgttattacagattcctgctttttatttgtgttatgagttgagtcaaaagtttattttaaaaggaaatatggcaaaggtaaattgtgtaacttggtttgtttgtcattcttagactaatcagagacgtaaatttctctaattttcattgaccttgtactatccagggttttctttatgcaaaagaagcttaaaggataagcgaaaatctttttatcgataatttcaccagtgactttaaaactggtggtgtagtgctcaaaaaagtggaaagagacctttggttcttcagttctaattcaccggacttggacaactatatttctagcccgtggattgtgcttcagttttaccttgaaggcttccttcaggtttgtcctaaaataccccaatttcataaatctctacaatcgtcagttttttttttttttttatcaaaactttattattattttatgattcttaatcctctctttgtgatacctctttccagtcaataaattcttttttatcaaaatatttatcctttttttttttggctaaagaagctttcattgtttgatcatttatttcaatgttagtttggaatcgctcatgaagtcatgggtaatggaagggttgctgaattttatttccttcggggagaacgtatagcctgtaaacaggagttgctgttattcatgattgccttctcttctgctttgggtatgaaataaatttttctaacattcttgttcaaattattacggtagaatata
